United States Patent Application Publication US 2006/0134663 A1 - sequence listing, part 135

SEQ ID NO: 451032 - DNA, 812 bp, Homo Sapiens
  misc_feature (546)..(556): n is a, c, g, or t
ttggtcacagtttggagatttcagtgttacccaggaggagtcttgtccagagatttaggaagaggaaatggaaattcgtgtgaatgtattatgctttagatgaagttgtagtagaatttggaagcttagcctacacaccataatcgatcttttgagatttaattttgttgtggctgaggttaatttctttaagatgagttgcattgatgaatgaatttgcagtcacagcctcaatttcattgaactgaaggtagagttgctgaatgtgcatcggaatatttgggatagtcttgagtttgcgattatcacagtacattgatgatggaaagttagttggacagaagcattcactgacacagcctaaagtatactgatgaaaaggaactccgtagtctacattttgacgaaatgggaatcctgtttggtaatcatcatctggctcttggtcatagtcttcatcccactgataagtttcatattggcaatgtactttgactcccaaaaagaagaaaataacatatattggacttaaaaaacccatcttcnnnnnnnnnnncctgttcaatttgctttagttttcaggggttgatgaatttgtaaatcctttaaatgaatcagaaattcctaaattctttaactgagtctcttaaaaatccacagtaactctgtgtccagacagggctgtctcttgaattactgtagcaatttaagcaaatacaatcttcttggaaaacactcgggttgaattaaaattatgtatttcttttcattacatgaaactttgtggattcaaattaagatgcttgtgttct

SEQ ID NO: 451033 - DNA, 878 bp, Homo Sapiens
ggaagtaccatgcaggcttcaggttctccttccaggatctttcggcctgcctcgttttgtggcaagttcatgagagtccgggcgatctgcttgatctcccgggcatccacaagaccttgggcgaagccgatgccgtagcggatgtcggcggatcaggccaccgccacttgcagccctcgtcccggtggtactggcctgcttctctttgtcgcagccacagtcgctcaggttgccctgggtacaggcagctgtgattgcgtgcgccacgccggcggcaatgatggcgtaggtgaacgcagcctcccgggctccccactttgagctccttcccgaagacggtgcgctctcccagtgcagagcagttccagcggccattgcggaactgaaactgacactcgtccaggcccatttgtgagccttctcctatgacgatgatggcgtcgggccggctctggcagatcgcccgctgtctgggagccaggcctgggatcttgttacagatgatgcttgcgcccagagctaccactgaggagaagccaccgatccggaggtagaccatgcccaggctgagaaagaggtggcccaggcagcgccgcgctttccggttcatagtcccgattggccgccggggccgcgggccgggctgtgctgatcccgcgggccggccccggcggggcaatcaacatagcccgcccgggaggcgcgagccgaggcgtccccggggccgtctgtcggtgcgcccgtccgcgcgctccgcgcctgagcctcgccaggagcacgggagccacggagcgggaggagggagggaggagcgagcgcggcgtggggcgacgccgggctgcgcgcgagcgaccggtgcaagtgtgcgagacgcgggg

SEQ ID NO: 451034 - DNA, 1123 bp, Homo Sapiens
ctcaaatacacatccactggcgagggggcgcctcactaatattaggtggcgggcgggtctgtggtgggcggtattttatgtgggaccgggggcggccgcttagaggaacagttttcaacacggggggggttgggccagagaccagggggcctaggcggcgccccacggagttggggaaaccccagggccgtaatttcttccggaagtttgtttttaggtgtggacgaattgccccgagcccccatttttttaagccggggttcgagagggtggtgaaacccgcatttttccccttacccaggcggcggatttcaaccccatcccaccccaggggttcttttccttggaggaccttgatgcccgggcaccacggccccatgcgccgaacccatcatgtgcaggcggctgctgctggtcagcccttttagggcgctacccatggtggtgctctccaggctcagcccattcacctccgtgatcttgtcccccacgcacaggccagcccgctctgcactgctgccttcctccactttgctgacgaagatgcccaggccatgctctgagcccccgcgcacgctgaagcccagcctccctgctggactcttctccacccggactgaatggatgatgtcactgttcatcactgttggcttcgatgggggagttgatgaggatgacgcgtcccatgggcgatgaggctcggattccgcgggggggcccgttcagcagccgttgttgcttccttagcaggtatcgcgttgcggtggagcctgagtcgctgcctaggtggcctcgggaggagagggagctcagagagccggagctcaggtctcctaggcccagtgggtcgaagcccactgcgaaaccctgcgccatggcggctgggctagggcggcaccctacaggtccagaaggaatctgctagctctggagaggccagccctgcgtgcttcgagctccatgagcctctgtgcggggctggggtctcagtaacgtgaaggccctcgcttgcgatgcctctcagaagtgtgagctccaggcctggtcgctggtgtggcgccgccagcccttgtcaaaccacacgcaggcgagagctactgccgatccggagaattccggaccg

SEQ ID NO: 451035 - DNA, 1071 bp, Homo Sapiens
catatatacctctttaatcctggcccagcatctttactttgggtttactgcgggaaataagctttgcattcacagccccctaaggtttacagacccgctacatttctggactgtggctgtgatctgtggtctgattcaggagcaactgcgttagcactctgacatcaaaagaatgactagttgcttgagtattccctctagaagatttttcgtgtccttctaataggtcacaatcttcatctttaacttgtccattaatcaaataaacaccattttctattttccttggcccagcgtgtaagtccatcctttgtatttttctccagagtatagctgacagaagtagcagaaagtgggatgtgaatattaatgtgaactgtacactctaaagaaagccatgaggatgataatccactttgatacttccaatctgctggtcttgctgaactctttggatcatggatatcataagttcgacaaaatattttttttgtagaagcacaaatgtgaagtgtcactcgttctgagacttcctcctctgtgaaattccacaatctctttctatttatagacttttccacagcaaacattagtctacgcagggcattttgaaaatcatttgccagttctaaagtagtaataataaatactccaagaactaaaagtccccctggtagcattctggatacctggcaggcatgttctgtggcccattcttcatccaagttatccaacttagctttgggatgtttgaggttctcactttgctcctctttgggtggcgttctagtggcaagaatcacataatccttttgtgacgaacactgtcctattaaaaggccagagacaaaagcctttccttggagatttatgtttgaaagatactggccaacagtctcttctacaatgtaggttcttcccatttttaggaactaaaatctcctgttttcagaatgtgcactcgtggcagacaattacctcggacggtctctccgccggagatgggggtttcgggcccaagtaccagcctctaggggccagattccctccgatcccgaaaattccggaccg

SEQ ID NO: 451036 - DNA, 829 bp, Homo Sapiens
gggcaccccggctggccgctcctgaggccccaggatgagcagggagacccaagtccgtgtaggtggaagtccctggcccagagcaggcccatctggccatgcctggatctctaacttgcgtgatcagggccccggtgcttccacatcccaagtcaggcacggctgcatctctgggctctgctgaagcctccacgaggatatggagggtccaatgagggtgatctggtcaccgccagcacccagcgccccactgcacagcacggagtaatttcccaggtcccaatccaggctgaagttgccgatgtggagtttccgcccatcttgactgagccgcaggcgactcccgcctcctggagccaggggcctcccttcccgggcccaggatgcccgtgaggctgggggacaaccagaggcctccagtgccacctctgcctcctccaactgtgtctctgccaccagcggatgcagcagcacctctcggggggcctccggcgtgactgtgcaggtacgcgtggccaccaggtggcgagcaaggcaggtgatggggacgccgctgagccgggggtgggcggggacggccgccagcagcacagaggacactggcccggcgcggatgccttcggggagacctggaactgcagggaggcagcaggggccccgccgggccacgagcagcggaagcggaggctgcggtccccgggacccccttcaactgagcactgtggggcccccggggggcaggtcatttaactccgcttgtcgactttgtcgagtgttccatgcccaggaatgtccgccctctcagtgactggccggcccgtcagtcctg

SEQ ID NO: 451037 - DNA, 1280 bp, Homo Sapiens
  misc_feature (1190)..(1201): n is a, c, g, or t
ggcttttcattgaagtgtgaccgaagtcatgatctggaaacctccaagaggaccctggtccacgtttgccgcgcatgtcggaaacccgtttccctctcacgacaacttggaattgactctcctgcacatatggtggatggttcagctgctagaatttccgatgcaggacttctttcaaaattgagtggatgatgccttgcagagcctgaaagccgtcattcacgggaaacacatgatccttactgtccgcaatccgggccagctgtgtctcattgaaatctttcacacaacacagtaaacaattgcaccaagatctcgagacctattagcctccctctctgaatagaaaaagagatcttcatggagttctccatcagtcaaagcaatgatgacgctggctgtcctgtacccttgtctgttttcataataaatctgctcactggccctttcaaatccttcatgcatgtaagtgtctcctcctggcagaactttctggagttcttctaggccttgacggatttgttctctgtcttctgtcagtttcattaaggttgttcctcgggtggagaaaacaataaaggacattctctactgtgggctgatgaatcttgtgagccaaactgttcccaccaagtaatagatttcatttgccattggtttcagcacacttcctgatttgtccctttatgtagtacaggtcatatccgccgtagcaggctggacccccatcctccctgcgtcccccttgcccggcgcagatgagcaccagagtggccaaagagagccactggaagccgatgccgagggctctccgctccgccgtggccatggcccgcagcccggggagagcagggtccgctccttcccacgctccgcgaactcgccacgaccctcagggacgcgccatccgcgggcaccttccatcgcgggtcctttattccccctcgctcacctcgcaactccccaggaagcaattgtctggaggagttcaaggtttcccctctggtttccgctccgatgctgtttctgggtttcgggtttcaaggatcccaatcctgtcctccgcttcttttaaaggggagggctgcctcggtccggggccgccgggcagctcccgaggccgcgccgagcttttgcaatggaaggagttccgtcccgacggttctttgtcccagattttaaatatgatnnnnnnnnnnnntttcaaattgttcttggtgggggcagtgctttgccttctctccttcctctctcctcgtgccgaattcgccacccaggca

SEQ ID NO: 451038 - DNA, 994 bp, Homo Sapiens
cgttttggagggcaccttccctcgagaagggctttcgttccgagtcatttactgagccccgagatggggctacccagtctgggctcagttggtcagtcttcccatcttaggcgatcctctgcgtggcagccaccgccaaattggcaaagtcaaaacggggccggtccttgtgcagggctgggaggacgtgggcaatggccccctgcttggggtggaataggtgggtggtaaaaggcagggccgggaaggggaagcgcgcgtccacgaggccctgcgccgccgccatctccgtgatggtggagcgggtgatctcgtgcacattgggataccccagcgtccagtggttcatgtgcatggtctgtaccgcgctgagaccgtacaggccctgcaggtggtccaccgtggccgggaaggtgttcacggcctgcaggaaggagtaattggtgagctgcagcgacgggtggagcgggatgggcgctggcagagccttgctccccattttccgggatgctgggggtgctgaggggaccaaccctttcttccaggaatcagaggccggagggcgtggggctccgacaaaaacccagtgagacaacagcacgtagagaaagccctcccgcagaaaggtcaacctgggcagccgcgctcagacccggtccaggcagcgaggcgcacagcttggaaaggtcattgagtccacgcctggcaaactttttttatccgcgcggagtcgcaggagtcgcggacatgatctggaggaccgcgagcagctaaagcgagagcagatccacgtcttcgtcagagtctgtggacgcggactgtgtaaagacccggggtgcttggggccggcgttcagcgctcgcccagaacctcgctcttcggcgaacctctcgctgtcgactcccggtgaggtcggagcccacagccttgcagggccatcaccctccagcagcaagcacgccgagctccgtccccgcccgatcccgggaattcc

SEQ ID NO: 451039 - DNA, 1079 bp, Homo Sapiens
  misc_feature (983)..(983): n is a, c, g, or t
ccagctactcaggaggctgccagctctgggctttggtgccagctgtcatttatggaagagcaggccgccctgccctggcctcaatcagcccccagcagcccctctggctttcctcatgggccgtgtgaccgcaggggcttcctgacacacatgggtgcgagtgtccccaggaccagcctctacttgctactgtgctgtcttctcgagtgggaactccactgcaaacatggggaggaagggaaggagctcgctgtgggagtctgggcgcggtggacgttaacaatggggggcgaagtgtcctcccacggtgggtgcactgtctgtgggaaggctgaccacgctgttagcttttcagggatcttggttggcctcctgagtctctactcaatggacagggtccagactgcactttacattttgccaacaagaaatgggagactgtccttgagccctctcctgaagacttgagggaaccaaaccagactgtccctcctctatcagcctgcagcctttcttccatttcattaaagtgttttaggacagggaggaccttgaccaacctagcccatctcttatttagaggtgaggaagatgacaccagaggcctcaaggcttccagagcacctggctgcaccctcagcctctgctgggggcttcccaccatacaagctacttgcacagttttcttttcattcagcctgtgcttgggagtgagcatggccactcagaaccaggcagctgctttcgtgtgaacagttgattcgggggctatccagtgaggtgagggacgggatgtgtggcaagaaggtctaagcactgcacacgaggggacagccagcctcgctcttgcgtcctagaggtttccaggttcatgctcactccctgatggcagaggacaggttgccagcctggctctacatggcagaaagccacttccctgcaagcgttaagtccttctgtcttactctattgcttttctccanaaaataaagcatttttgagagctaaatccggggattgactttcagattaacaatctgcgcggcctttcctcctttcatcccaggaattccggaccg

SEQ ID NO: 451040 - DNA, 890 bp, Homo Sapiens
  misc_feature (22)..(22): n is a, c, g, or t
  misc_feature (47)..(47): n is a, c, g, or t
  misc_feature (70)..(70): n is a, c, g, or t
catgcctaactcccctgaaggncaaagggcaagtttgccaaccctgnctcctaacatggcaagaaagccnacttccctgcaaacgttaaatcccttctgtccttaactctattgccttttcctcccaaaaataaagccatttttgagaagctaaatccggggattgactttccagattaaacaatctgcgcggcctttcctcctttccaatccttagtcatgtttatctttggggaacctagaatgtacccaggaaacacacaacacagcttagaaagagaaagtgggggctctctggaactccagacaaggagagagtctgcggctctgggaaacagacaagcagacaaaatgcagagaaggattttgctttggaaaaaagagaaattcaacagacattagtaggacccaaaagggagagatgcagggaggaatgcaagggtctttcttgttagctgctggggcagaacggcctgtgtgcaaccccccatcgctccacattcagggaggatccggcacgacggccccaaagtccactcctagaaaattaagagcagataaagcagtagctaaaataagatttctgggtcaaaaatgaatttcattcttctatcatctttgtctcctgctggcatagaaaataaaaaattaattgtgagtactagtccatgtacatttgctacatgattgtcatcgttttgcaaattcattaggtcagaaaaagcaagtcaaatatgcattaatggaaaacgtttcggtaaatatcttagttcataattcagtgtaatcatgtgtgggactgatctgggatcctcatggtctctcaagtatcctgccccttcctccctctcttccttcctcttccccaccttctgttttctttccctgtt

SEQ ID NO: 451041 - DNA, 380 bp, Homo Sapiens
  misc_feature (360)..(360): n is a, c, g, or t
ctgtgcgagaacacaagccgttcatggagatgccactcctcaggtggaggctgccagctctgggctttggttgccagctgtcatttatggaagagcaggccgccctgccctgggcctcatcagccccagcagcccctctggtttcctcatggggccgtgtgaccgcaggggcttcctgacacacatggggtgcgagtttcccagggaccagcctctacttgctaactgtgctgtcttctcgagtggggaactccactgcaaacatgggggagggaaggggaagggagctcgctgtggggatttttggggcgcggtggaactttaacattgggggggcaattttccttcccacggtgggtncattttttttggggaaggtt

SEQ ID NO: 451042 - DNA, 1163 bp, Homo Sapiens
agttttaggggtgccgttgtcctgaacgacgtggcccacccggctgcaggagcacgatctccagactgccaccacacatccacaccctgaaggagagctcaaaattctctcccccccagatgtccatctgggcatcctactttcccaagtggttaaaccaggacttgtcgatcacgaagattcctccagctatgacaggcgtccttatgggcctggtggggtctgtccgggtcatcttctgctcaagagggatctgctcccacttgaaatgcaggctccagtcgaacccttccacgaaggtcagcagatgctgcaaggtaggcaaaattatccagactgatgacatcaatgatgggactcaccacgcgggtgtggtcctccttcacccgctgcagcatgggcggcagccactcggtgttcacttcgcagtggctatccagaaaggtgagaacggtagctgcagccacgtccgccccacgcactcgggaccggatcagcccttcccgccgatcattgcgcaggcacttgaccttggggatcctggtcaggagtagacagtcttccggatctgagctgaagtcatccactaaaatgatctcctggatcaagttggcaggagttcggttcaggacactcttcactgtgcgcagcagggtggaacgggcctcattgtggaaggtgatgatgacgctggtggctggcaggtccgaggagtaggacacagatgggcagctgtaatggcgggtgtcccggatgggccggtctgggctcagcttgtcactctccagctggttgaaggcgtgctgtctgtaggggtcctctccagccttcagctgcttggccgacaggtaggccttctcatcaaagcctttcgagggagttcctgtcacaatgagcgggatggtgcggtcctcgcggagctgctccgacctcctgcctgccctctgcgcgccccggccgccggaggatgctgcgtgggctcggttgtcctagccataagtagtagaaagtgcccaggatccaggctacggtcaggatggcgatggcattggcgcggatcttcctcatggtgggcagacgggcgccccaggtgggggactgggccggcgtgctctcggggccggggcgggggcgcttcagcagccccagctgtttgttttcgc

SEQ ID NO: 451043 - DNA, 834 bp, Homo Sapiens
cggggtattccactttcctccataattttatagaccctcaatggcgcagggagaaattctgttccttcattgaaatgatgtataaatccaagagcatgtttaatcatttgtctcattttgatccaagatatcagctctcagaaccccttgaggctgaggaccaacttctatacccacaggatacttggctatggaacgagtgtcgcatatttgagggaaggatgctcaatcagataaacgtagcagggtagtggagccagagaagtcttaatgtaatgaaacatctgaattaaaaagttattcctggaatcctcaagaataagagtgcaccccatgttagaggtggtgttgtgaaggtcaaaaataatgtcataggaatcttcactgtcttttggaccaaataaatgatttatttcttgagcccttctcacttcatatggcaaatcttctgacatttttttgccaagattttcaaggtcaaaaatgcgattcaggtcacagtcaatatatctggtacacttcttcactgctctggggttagtaataaatggttttacctccagccctgttctctgaatctcagcgccattctctagccaatgcttaaccagaaatactccggttagctcattcccatgggttcctccaaagatagcaaccttttgtatatgttcttcagcaatgtgacaagaagtcatttcaccaagtagtttttatctgatttctgcaattcagaagagagatcaaaggaaattcgattttcttaagaaaaggtttagaaatgtaaatgagactttacccaaagggcaaagtacagaattcccttgagtggag

SEQ ID NO: 451044 - DNA, 295 bp, Homo Sapiens
  misc_feature (285)..(285): n is a, c, g, or t
cctaatccttaggctttatcctacccaagaaatgaattggataatcccacatcaacaaaaagcatggaaaatttatccaccagaatttgccgtggagatactttttggcgagaaatgacttccaatgacgtagctggatccgattaagtatagtttccccttccccttctgggaaagaattaatgttctttccaacccctgccatgtgcatgttcatatgtcctaagtcttccttgatgatgtatctatatttatatatgtttatatatgttcttcataaatctnttaaatatat

SEQ ID NO: 451045 - DNA, 858 bp, Homo Sapiens
agcgggggctttacggccgcggggacggagcgagccggcgccaggcccctcgggccgggaagaggggaaggggagcgaggttgatgcccggcggaggggcgagcgcggcgtctggccggcttctcaccgccgcggagcaaagagggtcccgggaagcggcagggtcggcgtccaggagcggcttcgggggctccggcggcggcagaggcggagcaagcggccccgggtccgggagcggaggccctgggggccccgcgggcaggatgagcttgaccccgaaggagctctcgagcctgctgagcatcatatcggaggaggcgggcggcggcagcaccttcgagggcctgtccaccgccttccaccactacttcagcaaggccgaccacttccgcctgggctcggtgctcgtcatgctgctccagcagcccgacctgctgcctagcgcggcgcagcgcctcacggcgctctacctgctctgggagatgtaccggcaccgagccgctggccgccaaccccttcgccgccagcttcgcgcacctgctcaacccccgcgccgcccgcccgcggcgggccaggaacccgaccggcctccgctctcaggatttttacctcctataactccaccagaagaagttttttctttcccagctgatgctggcacccccacgggaactcttcacaaaagacgcctcggccagattgcacttgatgggacgttggaaacattgggccagtctgtggacattagtgggcttcaggttagccttggccgaacgccaatctgaattgccaacgcaaagcatagcgagcttccaccagtattctcagtgacccaagacccggattcttctaatctgg

SEQ ID NO: 451046 - DNA, 1090 bp, Homo Sapiens
  misc_feature (33)..(33): n is a, c, g, or t
  misc_feature (127)..(127): n is a, c, g, or t
  misc_feature (140)..(140): n is a, c, g, or t
ttataattaagccgggtttggggtgtccattgntgggttgaccagggagttcattggaaccttcagggcgagcccagagactttctggaccattctgcaaaaaaggttgtatgaaaagatccatgtnctgtaaaatcgtncaagggtgaaggggtcgatcgctgccaggttgccttccactgattctggattttttacgggtatgatgtgtaacatcgatccaaggcccgcaagtagcacctggaatggaaagcttcccatccactattgggtactccgaggccaaatttggtttgtagaagtcatacacattctccatatgggttcccctcagccctcgctccagggccagaggggccttgggcccaatcagcatagccacagctccggccccacctgtgggacgagcattaccactgggatagacggcaatgtctccacagaccaccatggcataacgaccatcccaggaactggactccatccagttggcagcattgaagagggaggcagtaccaccgtagcaggcattggtggtatctatgccctcaatatcagtattgcctgaatcctggaagagttccatgagcactgttttgacagctttggacttgtcaatgatggtctcagtgcctacttccagcctgcccacagagtcccatgggagctgtatgcgctccatcagccgttgcaccaccgtcaggcacagggagttgatgtcctcttggactgagcagaagcccatacgggtctggcccaagcccactgtatactttcctgcttccacattgttatacttctccaggtcagtttggtccacatattgggctgggaagtagacctccagggccaggatgcccacgtcctttggccaagtatctgttttggccagggggacagcagaggctgtagaaaacctttggtgggctactgggagcaggcgagcaggtgtgagggaggtttcctgcaccgctcttgtcagttgcagaatgcgcttcactggagtcaacagacgctgcatctccagaggagcaagcagaaacccagcagttcagaaacccagatcccaaatctcccgaccggtaccagc

SEQ ID NO: 451047 - DNA, 791 bp, Homo Sapiens
cggggtttggacattagcttccggcatgagggggctgctatcccttttatgagaggagacaaagttctgaagtttgtttcccaaagagctgctacttgaagacactttacctgaaggaacacctacaacagttttgccagcgccacttggctgcggtaatcgtgaagatcctgatgatgcagttccaggagaatttgactttttaagtgcgggtggcttatacacctgtgtccgagaagttggttttcctttggtatctgtagaaaatttccctttattactaatacgtgctgcctgttctttacagaaatttatatgtctatcagctgcattttcattgaatctcctctgacaatatggacattgaatataatcaggatcataagaaggtggaggaggaggaggaagtttgccaccctctttgagggcctgatcaaggcctttagctgctcttatggtagcaatgaattcttcatgtttccttctccaattagatggtttctttggtggttctggcctcggtttgagaggttttactgttggaatatcagttccttcagctctctgtctgcttgaatcaaaagtcttccgttttttagttgcagtcttctggcaaatgggtccatgtttttttaatgctactggaaagaatgttcttccacaaatcttgcaaggtaacaattctccaacttggacaacacctccattctcttccagtccctccatcgcgccacctcctcgagctcagcgagactccttcagcagcgcccgccaccgcccagcgctccgct

SEQ ID NO: 451048 - DNA, 831 bp, Homo Sapiens
  misc_feature (118)..(118): n is a, c, g, or t
aacatttcaattcacccggttcttgtggggatggccattcggccggcgttcttgggtgaccattaaataatgttgtgacggtcgaacatgggccccgtgacgtcgttgcttgcatctncggtgtgacgtcatgccaagtttccccatgtctgtgtgcgacgtgctgcatctgcacgacgccatccgctatatctcttcgtgacgtctacatggccacgtgacgccatcaccacggtgatatgtgacgtcagcgccgttgcttgcgtgacgtcatctccgcggccgtgtgctctgggtgagggatcgtgaggcgcgggtgcgggtgtgagagggtactaggggtttgcatgcagggagttgtctgatggtggccctgggtggttgggggcggcgggagggggttgtgtcgggcgctgtgagcatatccctgcatcctccgcaaaccgccgagtcgggccatcccttggtcctcaggcctggagcctcctcagccactggatggggctacagggatgcctgcagggggcctctgggactccaggatcttcctcttgaactcctccaggctagctgggtcgatgggctgggggttggggacagggcccatgggccttgacactggcatcatcggctgcgacttggtcttgatgcaggtgtccagggctgagtttctgatggccagctccatcctgagctgctccgcctccctcttcttctcttccagctccttggccaggttgtctcgttccttccgcagcaccgccttctcctccagcgctagctgggtctgccgggagcattcagcttggagcttggcctcccgggcctgag

SEQ ID NO: 451049 - DNA, 1194 bp, Homo Sapiens
ttaccgccgccaagatccctcgctctaatgggggaaaggggggccccgtctggcccgccttgaaatggatttgccatagccgtcgggtacagagcacagaccccgtgcctgaggcaatagggggaaaagggcccccagggtgtaggccccttgctccttggataggcggtgctggccccgccgtgtccgagaggggttcaggggcagttgcacccggccccagtacagaagagcccttccttggcggggcaaaaccggccttccttcttggtcaccttttctcgggggttccgggtttctctcccatggcccccaagggcccccttcgcaaggccagctgtgataccagttcagggacgttgacatacacatcatcgtccgtcttgaggacgtatcgggccatggggcagtgtttctcagcccagttcagcccgctgagggtctttagggtgaggttgcggtaggagtcctggaaggcggcctgcaagatatccccctgggctgctgactccgaggccaggtcactccccctgggaaccccacacggggtgctgtgcgttcggctctcccagcaagaatagcgtctgtaccctgagcccccgggcctcgcgcagcccgccccacgaagcccgaatggcgtttctctggttcaggttctccggagccgtgcacaccaggatgagcaggaagggaggggccccgggaccactgcaagcttcctggttggggatcaagaggcggggcagggccaggggcggccccggtgaggcgggggctgggagcagggaggctagtgagaggctcagcagctcctcccccaaccccgaaggcccgaagagggtccagacgatcaccagcagcaaagcggcgagaaggaggcgccggaagagcctgagctgcatggtgcggcgtactccgaggggatccgtaagagcgaagggcggagactagctccccgggcctgggtcacggccggggacttaaccgaccacgcccgggatgcggaggtctgagcgcgcgaccgggaccagcgcaccctggggggcggggagaggcggtgcagctgcggaccgcggtcgaggcatgctgcgggggtggctaccttgtcgccgcggcctcgccgccagcaagctccgctccatggctggccgactgcggcactcacggcccctcccccgcctcgccccggcgccg

SEQ ID NO: 451050 - DNA, 1288 bp, Homo Sapiens
  misc_feature (48)..(68): n is a, c, g, or t
  misc_feature (862)..(862): n is a, c, g, or t
gtgtgtttcaacattattggtagctttattaaatttgtttaccttctnnnnnnnnnnnnnnnnnnnnngaatacttcatttaagtgtaatactggctttatggacgtaccgtgatcagaaagtgaaattaaagctcatggatatgcgtgagaagagaatgggcgcagaggcacgagtccagtatcccacggagagaaggacgtgtagagagatgcgtggacccatctcaggggtcacgcattcctgggccaaggagttgcttctaagagcttaaaataaatgcactggctggctccagggctggacacacaggcacagagctcttgtaccgcttctcaaagctgcccaaagctgcgaccttccccctcagacacccacaattaattgtttccaatcagctttggttttgttttctctgcaatttacatgcaaacaccatctatctattcatccatccatccatccatcctgcttgtctctgttgaccagccaagccctattttgttttacgtacattcccttcactaaaaatcaaagcaagccagtctgaatcaagccaagaaacctacttttctaaggagagaaaccagtgctttgccttctttaatgaacctgcgagctctcagcgctttctcttgctgaaatgcgggctttaaagccttggaggctgagctcactggcctcgaaagggcagcgcgcgtatttggtttcgagcgcactcctgatcacaaagcacatttttagaggcttggaacccttccctttctgttgctcaccaaggaaaaggcacaagaaagacaatgatgtggagattcttaggggaccaaaaacaggcccatgaaggaaaactgtgagtgtctcntggcaagcccccgtttcccacaggctctgttccaggcagctccggaaagtctctaggttgttaaaaagcccagctggcccatgtttggttttcagcaaagccctgtctctttaagtttgcgctgggaggcctggggacggccaacttttaatcgtacacacatggggtttttgggagccggccctgcgttttgccaacaagcgcatgccctgttttctttcctttgaggagagaaattctggagtcccggggaggaacaggacggccctgtgaccatagtctggggcctggcggcggggacgcagaagccaccctgagagccagattcttttcctgcgtcttcaggtctgaaggattttctaggaaaattaacatttgccaaggcctccatgtggggaagggaggggtttctgggtaatttgtctc

SEQ ID NO: 451051 - DNA, 1729 bp, Homo Sapiens
  misc_feature (1254)..(1254): n is a, c, g, or t
aaggacctttcacaaaccaaatgacagcaggtttttattaacatatcttacaatgttgattattcctagttttgtaatttctgcttaattataaagatcaatttagcttctacagtaatgtactgtatttaaatgatcattcatacaagatatcacaccagtacatttttttgaataatatacacacatcactctaacttggacctgttatttttaaaagtgggtttataaatgggacttataaaagttatggggaaaaattaaagttctagtttagcagcatgcattgtatgtattcaagtacaattttcaaccaagtgcttttttaaaatttactggtgactaattcaccaatatcaaaataaacactatcaaacaccccaaattttaaagttaaggctaatattttcacttcacatccatatgcacaaccataaaacattccattttaaataagtagtaatcaaagtctgaatacattataccatgtatatatagcatcagagtttcaaactgtagaattattcaagttcatgaatcctgtaacagtatttactagagatgtcaattagcattttgctcttcaaccacacttacaaatggtctggtattcataacgatcaatgcaaaaagtatgacaggctgaacttatgatacagtatttaaaaaagtagcaatgtgttggaaaggacagctatttagtcgaacagaatcattgactcttacagaaagttatcttaatattttggaaatgtatataaaaatagcaagctatttccatgtattttattgtagaacgataggtaatcttttgactttctgaatacatttgaatatgtactgctctgctttccatattttaatgcaaggccatgatttaatgtccatttttatactcttgtaatgtcatgtcattacaaaaattttttagaacatggatctgacatattttatcattagatttgtttagtttatttttacatgtaaaaatgtaattttatataacaagccatggaagtccaaagtaccagggattgcttgatagcactatatattaaataatcattcaattactgaatcatttaggaaaaaaaatctttgtagcaatatgtcacatgcttttcagtaatcttccttctcatagagtgggttttagctcaatcattcccatttttactgatttttaaaccctgcaaacataaattgtttttcacagcagtttctaagaagaatgcagaagcgtggctcattcantgagggtcatcaccactgcgccttttttttccttttaggaaaccgagcagaaatagtagtgattacactgcacaaatacaatatagctgaacctcttgagctgaaaggaagttccaaatttatggttcatttctggggaagtctgagcatttctaatacaatcatataaacaaaccttgtttggtaataaaaggtgggcatgcacggaatcaacatctgcccagtgtatgttcttaaacctcttgattttatagtaagatttgttattacctctagtaattcatccaactgaaatggcaaattttgatttttaaggaccccccaaccacacatatgccccccaaaatgtactgtattatattaacagcagctatctacttattttacagctatttcaattatttacctggggagaagatttatgaaattcctgagaatgaattcagttttcagcaaagctttaaacttttaacag

SEQ ID NO: 451052 - DNA, 806 bp, Homo Sapiens
atggtgtcctcatggcatcctcagtccggtaggcagggttgattccaactgcctccacctccagggccgggcccgacctccttgtgcgccgtgcagtgttagcccttccgcttgaggaggttgcacaccaggatgcccaacagccccatgaggcagaagacagggacgatggcgatgaccgcgtactgggcgtctgtctcctctgggccacctgcccgggtgccgttcccaggctgccgtgtctcaccaccgctgctggcccctgctgccacctccacgccacgtcgggcccgccgcccccactcatcacagccatgagtacccagaggtgcccaggaacatggttgacatggaacgcggggaaccccccaaggcccaaaccacccaggccagcagtctccacagagtgtatctcgagttgccatgcccacctgggcctccagcctcctccaaaggctgcaacgggcatggggctggcatgggctggagccccatgcagctgagaaggtgcctggggggcagggcctgcataatgtgccctgccctgggtccaggtcgggctcctccccaggtgggcactgccaaagggttgttgatgtcagggtggcgagaggccagggcagcagcataaggaagcaggacaggggccaggcacagcagacttggcttcatcctcaggcccctggtggtcgccggcctggctgcgccgcggcagctccagctcggctccccgttcgactcggcgccgcggcccggctcggcgagcgcccggacagccgcgcagcctgcgcgccttttgaatgaat

SEQ ID NO: 451053 - DNA, 1172 bp, Homo Sapiens
cggctggaccggtccggattcccgggatgtggcaggagtgtggcggcccggcctccgcaggctacccggggttgaagctactgcgagctccggtggctgcctggggacgctcagggacgctcattcctggccagagtcctgacttctttctcggatcgagatctcgttgctggctcgaggaaatcaccggctcttctcccggatccttttcttctctcacttgctggctttcttcttcctgcctccctggcttccatctcccaaccccgcgattccctcctctactcccgtgctcccgtcgcccgccatcctgagccatcccacctgcaaccttctgtcttttgcccctccttgacctcagagggtcctgccttaagcttctcaccagaatctcctagatttctatctcttccctgcttgccagctcttgactcccaaattccagctgacgtttgaccacttgacatttgaccctgacacccttgactgcaaatctaaattcttatcttctgcaacctgtactgctgaaacaggccttccccctgtcttccaaccccgctttctgacacccatttttactttcttactcttgggtcagttcctgctacagctatcccaccatggacttcttgatgagtggcctggcagcctgcggggcctgtgtattcaccaatcccctggaggtggtgaagaccaggatgcagttgcaaggagaactgcaggcccctggcacataccagcggcactaccgaaatgtcttccatgcctttcatcaccatcggcaaggtggatggccttgctgccctgcagaaaggcctggcccccgccctcttgtaccagttcctgatgaatggcatccgactgggcacctatgggctggctgaggctgggggctacctgcacacagccgaaggcacccacagtcctgcccgcagcgcagcagctggggccatggctggggtcatgggagcctacttggggagccccatctacatggtgaagacacacctgcaggcacaggcagcctcagcaaattgctgtagggcaccagtataagcatcagggccatgtttccaggcgctaaccgagattggcagaaaccatggtctggtggggttatggcgtggggctctggggcggcctgccccgaattatcgtcggttcctccacca

SEQ ID NO: 451054 - DNA, 670 bp, Homo Sapiens; identical to SEQ ID NO: 147031

SEQ ID NO: 451055 - DNA, 1026 bp, Homo Sapiens
  misc_feature (58)..(58): n is a, c, g, or t
  misc_feature (92)..(92): n is a, c, g, or t
ccccagaaacccagcttcaagattccgtcattttggggttgccatccccaggttcatncggaagggacctcgtaaatgatctctgccacttngctctgtggggttcttgtcttcccacgatgactagaggctgctcagctttggaccactttgggttttctcccccttcggaggctttttcttctgttctttggtggcaacattctcgctctcggggcactgcagggggttcccccccggggtgtgtcctgctccttctcgggagctgctgcctcgctttggctgcctggaggaaggcttttggcttgttctaagtggcccaacagatgttcattgaggagctgcagctccaggaaggtggcagaacacactttacacgcccactggctgggctccgactccacgggggcgctgttttctggggtgcctgcagcgtggacgccagagccggcctgcttcagcatgggcttgtccatcttcttggcatagaaggccgcataccacacgcgcagctcggtacccggggggatgtctctggaggtggtgaagtacacgtcgctgccgtgctggtaggccgtcaggttctggtgctcggcctccgccgctggccgcaccagcatcatccagttgcagtcatcctcgttggaggtgtcgaagcacacggggtgcccgtccttctggaacaccttcaggggaaatgcagactccttttcccatttggcgaccctcctggactcaaagggaccgaactgtgtccgcttgacgagctgagtgatggcgaacaccccctcggctccatcttccagtcgtctgatctccaagttgggaggaagggatgaccttgccctgcttaacacaaaggagtctttgaccatgaccactgggcccagctcgggacattcggagtcgtggtactggctgcagtcttcacaccagatgaacatgatctcttcgctcccatcttcagccatctctgacacctgcctttggaatgtgcagagcgggatcgatccgactccgggttgc

SEQ ID NO: 451056 - DNA, 1084 bp, Homo Sapiens
ttgtactaaagcatcagagactgtgatcatcctgactgtggtcctgttgcggccagtggctgagttagtggtgtggcaggcataggatccgctgttctttgtagtgatgttggggataaagagcttttgtgtgtattgctggaatgtgccattgacagaccaagaatactgtgagggtggattagaggccgcatggcaggagaggttgagatttacccctgcatggtaataggtgtctgaaggggaaatggtgggggcatctgggccatagaggacattcagggtgactgggtcactgaagtttgcactcgctgggttctgtatttcacattcatagggtcctacgtcattccttgtgacactgagtagagtgagggtcctgttgccattggacagctgcagcctgggactgaccgggaggctctgaccatttacccaccacaggtaggttgtgttctgagtctcaggttcacaggtgaaggccacagcatccttgtcctccacggggttggagttgttgctggagatggagggcttgggcagctccgggtatacatggaactgtccggttgcttcttcattcacaagatctgactttatgacttgtagggtatagaatcctgtgtcattctgggtgacgttctggatcagcagggatgcattggggtatattgtctctcgaccactgtatgcgggccctggggtagcttgttgagttcctattacatatcctacaattagactgttgccatccactctttcgcctttgtaccagctgtaaccaatacgattctggggcaggttgtgggcgagtagaagaacctccttcccctctgcgacattgaatggcgtggattcaatagtgagcttggcagtggtgggtgggttccagaaggttagaagtgaggctgtgagcaggacctccttccaggggacatgcaatctgcagggaggggctgaggggggtcccatggtctctgctgtcttctctgtccacctctttgtagaggagcttgagctccaggaatgctctggtcagggctgctgtgactgttggccctgctgtccttcctccttctgtccc

SEQ ID NO: 451057 - DNA, 1296 bp, Homo Sapiens
gtgcgcgggtccacttgggacgggtccctgagtaggtgaggaggtgggtaggagcttgcttatagaaaagtggaatcgagtagtccttgctggtggagccgctgccgccagggaactcagggccggctcctgttccttcaagagtgctggaggccaaacttgaaatacaagtttaatgttcctcgtcgggcaaaagataaggatccgatctcccccggcccggtgtgcagcaggagcgaccaaccccgacccgggttaaaactcccagggactcttcgctgctgccacctcttgttctctcccccgttcccactcggggtctccctcagggccgggaggcacagcggtccctgcttgctgaagggctggatgtacgcatccgcaggttcccgcggacttgggggcgcccgctgagccccggcgcccgcagaagacttgtgtttgcctcctgcagcctcaacccggagggcagcgagggcctaccaccatgatcactggtgtgttcagcatgcgcttgtggaccccagtgggcgtcctgacctcgctggcgtactgcctgcaccagcggcgggtggccctggccgagctgcatgaggccgatggtcagtgtccggacgatcgcaacctgcctgacgatcaatctggtgcacgtccgggtccacccctcgggccccgaagtaaccgtaacccgttgtcacctgggaggtacccccctttccctcgtaatccccccttccaaaatctactcattcccatctcccctcccttctcttgaccccatctccttaacatacccatacaaccccacctcaaaaaacaccataacaaatcgatcgcgattccccgtgccatctttggccccgaccacatatctcgctatctcctcgcccatcgacatccttaccacgtttcacctccctcgatctctcccatcgtttaaacccctagcctcacacgtttactccgccccccccagctattcctatcgcccctccaacccaccagactattattagccttcgtcccacccacctccttactatagccatcctccccacattcttctccttaaccgcaacctgtgtcccctttccacacacgcaaggatgcttaaataatcgacgtgtgcgccacacaacccatagaccacccacccccttacaacacatctccacttcatatctaatcctccgcccccgtatattacacacctccctttccctctccccctttctacgcgtcactccattttgtaccccctctctacctccggcatcaagcgtgatcgacgccacg

SEQ ID NO: 451058 - DNA, 975 bp, Homo Sapiens
ctgctgcctggtctgcaaagaagtcctttcaagtctctaggactggactcttcctaagcaagtccgagaaggaagcaccctcactatgtggctctacctggcggccttcgtgggcctgtactaccttctgcactggtaccgggagaggcaggtggtgagccacctccaagacaagtatgtctttatcacgggctgtgactcgggctttgggaacctgctggccagacagctggatgcacgaggcttgagagtgctggctgcgtgtctgacggagaagggggccgagcagctgaggggccagacgtctgacaggctggagacggtgaccctggatgttaccaagatggagagcatcgctgcagctactcagtgggtgaaggagcatgtgggggacagaggactctggggactggtgaacaatgcaggcattcttacaccaattaccttatgtgagtggctgaacactgaggactctatgaatatgctcaaagtgaacctcattggtgtgatccaggtgaccttgagcatgcttcctttggtgaggagagcacggggaagaattgtcaatgtctccagcattctgggaagagttgctttctttgtaggaggctactgtgtctccaagtatggagtggaagccttttcagatattctgaggcgtgagattcaacattttggggtgaaaatcagcatagttgaacctggctacttcagaacgggaatgacaaacatgacacagtccttagagcgaatgaagcaaagttggaaagaagcccccaagcatattaaggagacctatgggacagcagtattttgatgccctttaccattatcatgacggaagggctgttgaattgtagcacaaacctgaacctggtcttttaaaaacacgggaaaaagtaggacaatcggagagtaccgcgagctcgatattccggctgacggagagtggtaatcctttatagtccggtaaca

SEQ ID NO: 451059 - DNA, 537 bp, Homo Sapiens
atgtggcctgggttctaaatcaggattactgagacactaacaatttcagatttttgccttcattccaagaagcaccaacccagttttctttagactgcctgggctggtttgggcccaagatctagtccaaaatgtagtcctgcccagtgatgtaggtaaaataagatagagggatgaaagaaaaatttaagcatccccagcccagctgaatatcgaagttccgcggatgcaccgatgtcagaagcatgttcccatgcagtcagtgacccaggttcaggtttgtgctacaattcaacagcccttccttcatgatattgtaaagggcatcaaaatactgctgtccataggtctccttaatatgcttgggggcttctttccaactttgcttcattcgctctaaggactgtgtcatgtttgtcattcccgttctgaagtagccaggttcaactatgctgattttcaccccaaaatgttgaatctcacgccggacttgcttaggaagagtccagtcctagagacttgaaaggacttctttgc

SEQ ID NO: 451060 - DNA, 700 bp, Homo Sapiens
ttctcaccgttctcatccacccttcttccagttcttgcaaagtctatccaaatgccccaccaggtctccaataacgttgtcccctgacaccagaggctgtcgattccggccccgtgacatcaacgtggaggtccagtcatccggttccactcgctctggccccttcttgagcacagctttgatgtggctgtgtcctgggcaacgggggctaaatcccttccacagacactcctatgggactggaaacttggtgctgctgccaagagaaggttgactggagggggaaacagtacttgtgggcctggcaggacactctgccaccctcccaacaagggtgctcgcactgggtcctgggaccttcagggctgcctggcacaggaccccctccagagatctccagctgttccaagtgctgtctgcacctggaggagcttcagttcttgcagtgcacccatcatgcagttcatctgatcctgtaagccatcacccacctccttcatggacatcagctcctgtttgaggcgacggaggtagcagtccatttccctgctctccatcgtcatgcgcccatttgtcgggttcggttcaaacagagagggcccgggtgaaaccccggccccactggaaactgcgctccgggccggctccccgcccatgcgcccgtagcgctcgcagcgcggagctgagcctgcgctccgag

SEQ ID NO: 451061 - DNA, 952 bp, Homo Sapiens
  misc_feature (209)..(209): n is a, c, g, or t
  misc_feature (297)..(298): n is a, c, g, or t
  misc_feature (875)..(875): n is a, c, g, or t
  misc_feature (900)..(900): n is a, c, g, or t
gggtcaatttttttggggttaagaagggaaccggggggggttttttccaacccaatggttttgggcccccaaggggattgggttccttccaaattctttcctttgaaaccctttcggttgaaattccccaacccccgggcctttcaaggccctttcccccaaaaatgttggcttggggggattttaccaagggttgttgaaggccccantcccggccggccctcggggcccgcacccaggtaacaggtttttttaccaaaaggacaaaggtggtagcctcccagggaaaggaaaagnngaataacccttttagccattgacctgtgctgcaggaactctagcccctgatctgctctcttctgggagcatctgatagaacaaacagaaacccctctcccactgttctcctgtgtccagagtgggaggcataactgctttgcctccagtcatcatctgggggcatatctactcttcgaggaccaggggttcgggaccctggaacaggatctgaattccaagctgacctcaggggtacatgaagactgctagatggtgggtacacaggatgaacaatgggagggtgggagggtgaatggaaaagatcactccaggactgagtgtgaggaacctgaaggcccttgcttctttctggtagtgtggcagtgtaggttagttgaggattgcaccctggagtagtcgggaatctggtcccaatatgctggttggtctctgaccagggtgcccaggagttgtctgttctggagcgatgggggaggctctggtagttcaaagtccttcctgtgtacttggccccttgggaagtttcacccctgtcacacatagccagaaactgctggacactccttgaagttccntgggagtgtattgggcttcccctgnccatggtgattccggagaattaccggaccggtagccagctggtttttgggcc

SEQ ID NO: 451062 - DNA, 786 bp, Homo Sapiens
  misc_feature (329)..(408): n is a, c, g, or t
cgatgactaaggttgtgcgattagaattgttcttagtcgaattcttcgcacaggtgctacgctcggatttatagcggacggctcgctgtacagtgcgaagaccgtaacagtactctctaatccactcactgtctttgtttactactgctcgctcacttgacttctgttttacttcgtttaattatgaaagtggtctctggtggtcactgctcttgactactaggtagcttctgttgtcttcgctttactggtgtttagttatctattggtaggtagatgtctagagttctggtgacttagcttctcaattcgggtggtctctgtctagnnnnnnnnnnnnnnnnnnnnnnnnnnnnnnnnnnnnnnnnnnnnnnnnnnnnnnnnnnnnnnnnnnnnnnnnnnnnnnnntattattatgatttatttgttttgtatttaatttggtttgtgtaatagttaatagaatgattgctttcatatattctttcttgcaagaggaccgtgtggtctcatgcgcttccggcaagtcgggagaggcccgcaaggtcatgacttgggcatgccttgccccgtccttgcccctaagtcggagccgaggacgggggagaagggaaagcggaggaggagggacgggcgcgggtggggaggcctgcgagccgcgcgggagggccccggtcggcagaagcgggtggagggaaaaggctcattccgaattgctggggccccactcaggatcggcttcagccgccctcttgtttcatccctctcccgcagcgcggtcccgct

SEQ ID NO: 451063 - DNA, 1279 bp, Homo Sapiens
agcggagtcgggccttctccttttccgcagaccgtgtgtttctttaccgctctcccccgagaccttttaagggttgtttggagttttagatgcaaaatccacaagtattcaagtgattgttaaagagggaggcctgaagttgattcagatccaagacaatggcaccgggatcaggaaagaagatctggatattgtatgtgaaaggttcactactagtaaactgcagtcctttgaggatttagccagtatttctacctatggctttcgaggtgaggctttggccagcataagccatgtggctcatgttactattacaacgaaaacagctgatggaaagtgtgcatacagagcaagttactcagatggaaaactgaaagcccctcctaaaccatgtgctggcaatcaagggacccagatcacggtggaggaccttttttacaacatagccacgaggagaaaagctttaaaaaatccaagtgaagaatatgggaaaattttggaagttgttggcaggtattcagtacacaatgcaggcattagtttctcagttaaaaaacaaggagagacagtagctgatgttaggacactacccaatgcctcaaccgtggacaatattcgctccatctttggaaatgctgttagtcgagaactgatagaaattggatgtgaggataaaaccctagccttcaaaatgaatggttacatatccaatgcaaactactcagtgaagaagtgcatcttcttactcttcatcaaccatcgtctggtagaatcaacttccttgagaaaaagccatagaaacagtgtatgcagcctatttgcccaaaagcacacacccattcctgtacctcagtttaggaaatcagtccccagaatgtggatgttaatgtgcaccccacaaagcatgaagttcacttcctgcacgaggagagcatcctggagcgggtgcagcagcacatcgagagcaagctcctgggctccaattcctccaggatgtacttcacccagactttgctaccaggacttgctggcccctctggggagatggttaaatccacaacaagtctgacctcgtcttctacttctggaagtagtgataaggtctatgcccaccagatggttcgtacagattcccgggaacagaagcttgatgcatttctgcagcctctgagcaaacccctgtccagtcagccccaggccattgtcacagaggataagacagatatctctagtggcagggctagggcagcagatgaggagatgcttgaactcccaggcc

SEQ ID NO: 451064 - DNA, 719 bp, Homo Sapiens
  misc_feature (25)..(25): n is a, c, g, or t
  misc_feature (32)..(32): n is a, c, g, or t
tactttgtcccaaagtctgtgattncactatncctgttctcttggagagtccgagatttgtcattaccccacaacaactccttcccctttgctgaattcttcatagtcgtttgattatcttcagcaggctcttgttgatttgggcacagactcttttcaggatgtccaactttccttctcccaggatgaccctcttctccatctctatgaaaatatccagcaggttcatgtcatcatccagtttgcatttggagatttcctcttgcaaaagaaacttaaaagacctcaattctgatctgctcacttcttctgaaatctgatagagcatgaccctgtaggcagaaatttgagccctgcctggtgtctgaagttccctttccatctcctcctttctagtgtttaggtaggtaatcagcaaatccagtctattaattcggaagagcagctccttcaggaaggacagattgctttcctccaacattctcttttcctggagtctctggaataacatcaaggcatccttgatgggttcttgcttcctttgcggaatgtagtccaggctcaggaacttgagggaggccagatcttcactgtccagttgttccccaatatcataaagatttctgctgaagtccatctttttaaaaggcaggagaatataattcgaacaagaaatgtttcctgtttaaaggaacagatgcccaatttccaaccatccc

SEQ ID NO: 451065 - DNA, 911 bp, Homo Sapiens
  misc_feature (165)..(165): n is a, c, g, or t
aaaaatctatttatttatcaaaacagtattggcacagtaattctcatattatcatcaaataataaaattgctactttctgtactcaattctttagaatcctagaaattgcaaatgcattcaatttaacaatattgtaaataacaatacaaaagaaagaactctgncatatttatggaaacattgttgatggtacagttctactgaaactcatacacatttcactatttaatttacatatggtcttgttgaaaaaaaccagtatgttttactttttcaatttccttatggctaaaatacatgtaattctaaagggatatctcttgggtgttataaaaaccagggagggtccaccaccaggtcaaggttggagtcaaggatacttcaaaggttccatgaaatgatctgaaaacaatttaaccaaaaaatgtgtactgtattggggcacatccatggccacccaaactgtattctatctctgactgtggcatcaaagaaaggtatatggaattataattgaccttcatgatattgctccaaagtggattgactaacactttcccctcttgacccaacatcccaagttttccttaataatgcaaacatcagtcatttacatattgttttgagtctttctaaaacttatctgtatttttatactgtctcatatataggatcacaaattaagtttactatctgtatgtagagtgatcttttctttctttattccaaactaccttattcaaataattaagagaagcatttagcagggcatttcagagagcaagaagcgcccttaaaagaaggaggtggggggtttccttaaaatatgaagaaatgctaaagctgggttataaaatatggtgctgcatctaaatatttacattcaattatcatttaaccgaaaatacac

SEQ ID NO: 451066 - DNA, 1114 bp, Homo Sapiens
  misc_feature (53)..(90): n is a, c, g, or t
gattcaatacttttatttttagaacacttaaaaatatttttcaaatacacttnnnnnnnnnnnnnnnnnnnnnnnnnnnnnnnnnnnnnngttagctcagatgctttcatgattaccaagttatataaataaatattttaaaataagttatgcttacatgtttgtttccacaaacactttggtacagaaatagcttataaatatttgcccttctattaaagtgaatgaaaaacaccttcaggatggatattttcccttcttagcaattcattcatgaaaacttaaaaacaatttatccacagtaaatgtcaaaaatacttgatcagaggtatcatgtggatgtaatagtcccatccttctttccccctccctagttcttaatccacatcctatcaaagtttcctcatttcaaagttttataaaaatgacaacggtttggagggacctcgctttttaggaagcattcagatagctcatcactctatcaatagtcactgcccgaattctgaaagcatgaagaagtatgcagagcttgatttcagttttgataaacaatccggttcttcaagggaggatttttgtggcacagtctcactgttgaaattcagggcctgcatcagctcatcaataactgccagcatgttttgatctagaaagatctgcctcttaggatccatcaggaagctttgcattcatggtcttgaactccacctggtacatcttcagtcttcataaatactactaaagcacagggcctgacgtgacatgagcagattgcggaaagtatccaatggagaatggctaaggacagttatgccacaatgccattgagcgaaaagagccgtggtgtcatcaccaattgatacaaagaggacaacaggcaagccaggaaaatcgcatcctagaaggcaacaccatcagtcggggccaaccatcggatacgaaacagtcagtcagaccgaggcccgagaccctgcacacacactatgaagcaacaacggtgagtcaaagaggaccccccgcgaattgagcgaaacatagacgacaggaaacaacagactgtcaaaccgtcacgccgcaaaaccaccgagcctaaggacacaatagacaagga

SEQ ID NO: 451067 - DNA, 1461 bp, Homo Sapiens
  misc_feature (272)..(282): n is a, c, g, or t
  misc_feature (1438)..(1438): n is a, c, g, or t
ctctttttcttctgcttccttcttgttttaggataaacacttttatgacaccacaggaactagaaaaagcacacggaatttaaggaagaacatattttaatggttgaaacctgtctttatgaggcgattatgatagccgaaaatattataatgaataaccatgcatagtctacgctttgtaatatttcagtaccataattcctgttatcatttacatctcttaatgctagaaaagcattctgaagatgcccagcgtaagttgcaactgagtnnnnnnnnnnngcaaaatttactcaatttccagaagaggtgcagaacagagaatgaaggtccttaaaatataaaccgctagtgtgctaaaatgatgtccatttgcaggatcagtgacaaaatatttaagcccataaagaaaagagttatacctgctgtatgaaggtattcatagagaaatatgagtcataagccaattatttataaatgtctttcaaaatatttggtgcacatgaaatgcagtatactgatggtcctggagactgttgcagttgaatagggcagctactgggatgatggtgtttcccccggatgaggatgacaggaatgcagggcctaggatttgttgagcatgtacactcttcttctgaattggccacccagaaaccaattattgaatcagaacaacacaaattggtttgtgcttgagccaggtttattttattgttttcgatctgcatgcacaatatgaaatcataaaagcaacaaacatcaccacaccaacactgagtaagatcatttctatcaggccaaggaggtttatttttccagttacttgacttctgaacatgtttgccttctcatcaccaatggtcccagtctcattaagccaaagaataggcacaatatagttcctcttcagattctttaatacttgaattttttctgatggcttgaccaataggttgacctgcagccgttttgcaaattgtaaagtgaatccagttataggttcaatatccaagtatgtcctatgttcttcttcatttgggtttaatccatcaataggttctgaaacatcaggacttgcatacagaaaatgaggaagtgaaatgtacacaggtctcccttctttgcatttgctgatgtctagcacaccatatgatgtacaattttttgagataattttttctgtgcagaaacaatagttgtctgggttttcaactgggagaggcaaaggccttggatggaagaacaaatctatacacagggattcctttcagattaacgtcggattcaaatacagcatagattgacctgcaaatatcagaagaaaagaactgcaatacctggcttttctcaacaaaaggtggaaatgaggctgcatctgtaccattaatcatgtcgcagtgactttcccagataggacagattcccttttaccctnttatcccggagaattccggaccg

SEQ ID NO: 451068 - DNA, 768 bp, Homo Sapiens
ggaaaacacaaccagagtcttcggtgttaattccctggtcttcccaactagcattctgaaagtgcattaacatttgtggccttgtgctctttcatcggacttctaatgatagctttccaatgattagacgaattgattctttctgtgactcatcagttcctttcctgtaaaattcatgtcttgctgttgatttgtgaataagaaccagagcttgtagaaaccactttaatcatatccaggagtttgcaagaaacaggtgcttaacactaattcacctcctgaacaagaaaaatgggctgtgaccggaactgtgggctcatcgctggggctgtcattggtgctgtcctggctgtgtttggaggtattctaatgccagttggagacctgcttatccagaagacaattaaaaagcaagttgtcctcgaagaaggtacaattgcttttaaaaattgggttaaaacaggcacagaagtttacagacagttttggatctttgatgtgcaaaatccacaggaagtgatgatgaacagcagcaacattcaagtttaaagcaaagaggtccttatacgtacagagttcgttttctagccaagggaaaatgtaacccaggacgctgaggacaacacagtctctttcctgcagcccaatggtgccatcttcggacccttcactatcagttggaacagaaggctgacaacttcacagttcctcaatctggctgtggcgctgcactcccatatctatcaaatcaattttgttcaaatgatc

SEQ ID NO: 451069 - DNA, 1671 bp, Homo Sapiens
aggggaggggtttttaattctttttcccaggttataccttggactttttcgtgaaaccaggctttgcgcctttttcctttcaccccaaagggttccccggttctccaattaaggccaaaagagaatagggcaccaaatataggttccttcttccggtttcttttaatacttgaaatttttttctgaatggcttgacccaatagggttgacctggcagccgtttttcaaattggtaaagtggaatccagtctataggttcaatatcccaagtatgtcctatgttctttttcatttgggtttaatccatcaataggttttgaaacatcaggacttgcatacagaaaatgaggaagtgaaatgtacacaggtctcccttctttgcatttgctgatgtctagcacaccatatgatgtacaattttttgagataattttttctgtgcagaaacaatagttgtctgggttttcaactggagaggcaaaggccttggatggaagaacaaatctatacacagggattcctttcagattaacgtcggattcaaatacagcatagattgacctgcaaatatcagaagaaaagaactgcaatacctggcttttctcaacaaaaggtggaaatgaggctgcatctgtaccattaatcatgtcgcagtgactttcccaataggacagattccttttacctttatatgtgtcgattatggcaactttacttatgttatcttttccattgaaaactttataaactccatctgcagtattgttgtaaggataaaacagaccaactgtggtagtaacagggtacggaaccaaactcaaaaatggatccctatagccccataacagttctctcaaagttctgacttggaacatagaagattttgacttgttaataagtgaattgaggatcatttgaacaaattgattttgatagatatgggatgcagctgccacagccagattgagaactgtgaagttgtcagcctctgttccaactgatagtgaaggttcgaagatggcaccattgggctgcaggaaagagactgtgttgtcctcagcgtcctgggttacattttccttggctagaaaacgaactctgtacgtataaggacctctttgcttaacttgaatgttgctgctgttcatcatcacttcctgtggattttgcacatcaaagatccaaaactgtctgtaaacttctgtgcctgttttaacccaatttttaaaagcaattgtaccttcttcgaggacaacttgctttttaattgtcttctggataagcaggtctccaactggcattagaatacctccaaacacagccaggacagcaccaatgacagccccagcgatgagcccacagttccggtcacagcccatttttcttgttcaggaggtgaattagtgttaagcacctgtttcttgcaaactcctggatatgattaaagtggtttctacaagctctggttcttattcacaaatcaacagcaagacatgaattttacaggaaaggaactgatgagtcacagaaagaatcaattcgtctaatcattggaaagctatctttaaaatggctaagaaggatttttcaatcaaatgctccaacatttggacaattcttaataggatcaaatggtattctgcaggaaagtcctacactgcagtcctcccc

SEQ ID NO: 451070 - DNA, 671 bp, Homo Sapiens
cgtggtcacagcgggccagggtccactctgagctctcagcagcgtccctgctggggtcatgcaggcgcagcagcagcggcacgagactctgcagcaccagcttccgcagggggccgcggagccccagccggagcccgccccggccccggcgcaccagagtcccaaggagcccgacggccgaggcgcggattgagtcccgtgtgtcgtccagtagcggagggaggcgcggtcccagctccgcgctcaggagccgcacaggcgcccggggccgcagcaggagcctcctcagggcgcccagcgctgcacccacgagccgcgcgtcgccttcgcccagtgcgcccaggagcgccggcagcagcgtgctcacgtgccgcaccttcctgcgattcagcgcgaggtggcccaggcccagcaggcccaaccagcgcacagtgggttcggggtctccctgccaggtgaggagtcgctccaggatgacctcctcccgcaggagccgtgcggtgggccggctctgcaacagccctgtgaagaaggccatagccgtgagacgctgcgggtcgtccgcgctgcgaagccgagggagcaagtctgcgaagaggcctcgcaggtggtggtcggcatgtgccaccatagcactggccagcagcaggacgccctccaggtgggtgtgg

SEQ ID NO: 451071 - DNA, 1289 bp, Homo Sapiens
ttataaagtggtctcccgggggtccacagagaggcgcccctggggcttggggagccccccttcccaaagctcgggccccttccgctacccataaggcccggcccccccatttttccccgggcaaataggccaagtttgggggaggaggagcttaggataggttttttccaaccttcccagagaggaaagttaccctcccggagaccaaggctcccaagttcctggttcctggtggtgaaaggcccaaagccggaaccttgcagtttcaggggtttgtgtctttttggggatgtcctttaaggccttgggagtgatgtgtccatccacagggacccgtgccacattgtgtctcgcatcacttttggtcaaaacatcatctgtcacctcccagagtcccatagaaccatcacgtgagccagacactgccatagtgtcgctgatccatgcgatggaaaagatccagtccttgtgtccatcatctcctacacacacaggatccagcgtaggtagtcgatagatggcaagactgttggggttgtctcctccagtggctagcagtgttctagaaggattcagctcgatggcatggataccacagccctgctgggtcacacctccaggctcctggtctttcagaatggggatcttggtgatctggcttgtctggacatctacgacaaatagcgtgttgcattttgtgccacacaccacttgcctatgattcaaccactgagatgcaaacactttattaagggtcccaaggtgaaactctctctccttcaggagactgggaagttgctgtgctgcataaccatgcaacactcgagagtagctggtttcattctgtagcctgacttcccggttcttcaagtagtatactaaggatctcttcacaggaggaagtcttttccttttgtgaagcgagtgatcccagccaaactgcgggccctgagcgtcgctcccagctcccggcgaggcgggcgctttccgcttcctgctaactactttccgggccatagtgggcagcgccgccgcggccccgcagccacatggggcgggggaagcgaaggatagcaggacggcgggtcatatactgggccccggggccgcgcaccttagtgcgcccggcccggaaaatggcccggacccggagcggcagcagaaaaaagataggcggaaagaaaggaaagagagaggaaggacttgagccgggaaagggaaggggaagcgagaatgagcggctttccgacggcagagcctgcaaggacgatcccgggaattccggaccc

SEQ ID NO: 451072 - DNA, 745 bp, Homo Sapiens
  misc_feature (430)..(476): n is a, c, g, or t
cggctgcggcggctggagcaggcgagcggcggcggccgatagcgagtgtcagggccggccggggcggcgcttctcggcctgtcgctggtcggcctcctactgtacctcgtgcctgctgcggctgcgctggcctggctggccgtggggactaccgcggcctggtggggactgagccgcgagccccgaggttcgcgccccttgtcctccttcgttcagaaggcgcgacatcggcgaacactgttcgcttcgcctccggccaagtcgacagccaacggaaacctcctagagccgcggaccctgctcgaaggacctgaccctgccgaactgctcctcatgggcagttacctgggcaagcccgggccgccgcagcccgcccccgctccggagggccaggacctgcggaataggcctggccgccgccagccgacgnnnnnnnnnnnnnnnnnnnnnnnnnnnnnnnnnnnnnnnnnnnnnnnttcagcgcagcaatgaggccctctcgtgcgcacacgcacagctctccacccgaaccgccaccgggaacgcggccccacgcccactccgaacgacgaacagaccgaacaacaaggactgccgacacgacaccacggaagccacgaaacacgggatcggcgcgccacacgcaccacccacacatcctccgctactccccgtcttaccccatcataccctcaccccatttctccccttccaccctcgctcattgtctaactcatcaccatct

SEQ ID NO: 451073 - DNA, 1087 bp, Homo Sapiens
atcaacccaagtcttccaatactcactgctaagtcccacctgggtcccccagagccaggaagctccctggtggcaggtccccctcttgccctcacggccctggagcgcttgaaggtgctggtccctgggaaggaggagcgaggaggaccccctccggagctggggagggaggtgcactgggttacagagccagcagagtgggggagttcaaggagtctgatgattggtccccgctgctactgcttctgcggtgagccttggagcaggattcggagggagatgcgggtgactcctgctccaggacgctaggataggtgaagacgaggttcgaggtgcccggagtgacagcaggtgtggaggtcaccacgatgggggtgtgcaggggctcctcaccgtagaagcccccagcaatgctgatgggcttgatgacagagcgctgggccttgtccagccccgccgacgaggacgaggggctgtcctattacaggggctcctgtttcaccactacagcgcccaccgagccacccccactgcgcatgggctgcagcccaggggctgggggcgatcggcgctcctcggggctaatcgtgcacactgggccgtgagccaccaacatgaacgccagcttctccttctccttctgcagctcagcaatctccttctgcaggcctgacttctcctcctccagctcctctgtctccgcctgcagcttctctgtcagctcccggcgtcggttccggcacttggctgcagccagcttgttcctctcccgccggatgcgacgcttctcctcctcttcaggagacagctgctcatctgctcctcctgcggcccacggtggtgccaatggtcttgatcacgccaggtcttgggagggccatgtgtccagggacagaggccaggcccggcagggggctgtaggggtgcgagcgagggtatgggttggacatggaggtgatcactgtgggctgcaccatccactgcaggtcctggctggtcgtgatggcgttgatggtggggatgaatgcactgcctgagccaggcatatctacccggaatttcttgccaatccctccggttgaaagcg

SEQ ID NO: 451074 - DNA, 896 bp, Homo Sapiens
  misc_feature (808)..(844): n is a, c, g, or t
ggggcttcgttcagcagagacagcatattccggagtgaaaacagtttccgtctgtctcaagggtctgacgaacgtcatgagcttctgagaggcttccgcctgcagcttctctgtcagctcccggcgtcggttccggcacttggctgcagccagcttgttcctctcccgccggatgcgacgcttctcctcctcttcaggagacagctgctcatctctcctcctgcggcccacgttggtgccaatggtcttgatcacgccaggtcttgggagggccatgtgtccagggacagaggccaggcccggcagggggctgtaggggtgcgagcgagggtatgggttggacatggaggtgatcactgtgggctgcaccatccactgcaggtcctggctggtcgtgatggcgttgatggtggggatgaatgcactgcctgagccaggcatatctacccggaatttctgctggccgccgccgccgctggagtaggactcggcgtgcgcaggagagccgctgctgccccgggacgaggtgtcaaagttcccgggataatcctggtacatgatccgcggtgggggccggagaggaaacagggtgtttttcttcccccgccctcgccgcggccgcgcaccggctgctgcgcgctcgttcgtccgccggccgcgccgcgggctctgggcttcgctcctgggtttctcccccaccgcggagggcgaggacagggaggcggcgacacctcaggaacagcgtcccccgagcgtcccttacagcaccgctctcgacgaattcgagctcggccgatttggcctgatnnnnnnnnnnnnnnnnnnnnnnnnnnnnnnnnnnnnncggccgccaccgcgattagctccggttcgccctatagtgagtctatacatcc

SEQ ID NO: 451075 - DNA, 1092 bp, Homo Sapiens
aaggaccaatttcccttggcccggccttccaaggggccaaggtccgcaatgaggtttttctttgaaaacccgggaaggctgcccccgaaaaatggtgggattcttccgttccctacggagaaaagggggtcccttctcctggaaagtgtgataggaagtgattccggccttgtaaccgaatctttctgatggggtttgtagcccagggcttttacagaagaccagcagtccggctccagagcccccgcaccaaccgcgcccatctttcaggcacttgatagctgacactcccgtcctgaatttgtctttcgcaggcccaacatctgtcagcagtttagtcctggggttcatttttagaatatctccagtcgtggtgccaaggtagaaaaagctatcatcatcatccactccaatactcatgactattcttttcaactgtcctgtttggcactcagttggccagatttttctatttggaagatccaattcccatactcgaattgtcccatttccagcagtcataaacatctcatcccggcacctggagaagatcacattggtggcattgccaacattgaggccggctgcagggctgccacagatggcatctctcttggctatgctccacaccaccacacttccgtcatctgggcctcctagtgataccaagtacaaatcatttggagaaaaggccagagcttcaattttgcctttgtgaagggacagccgagcaagcagctctctgttcttataatcccacaaaatgatgtctgccttgaaccccatgaatgtgacttgtccggaggcgatgtactctccagacctggagatggccaagcaggagacgttgttgccatgaccctgtaggaagttctgctctttagtatttattgcctgaatgaggactgtgcaaccaagaggataaatcatatgctcctggtcaggatggcatttgagaccagtgggcacatgtccattgaagccgatcacggcgtcaagttccagctccgccacttgggcctccggcgaaattttgttatccatccttgggaggttctgattactttgctctcctccctagtgctgcaatcc

SEQ ID NO: 451076 - DNA, 838 bp, Homo Sapiens
  misc_feature (547)..(591): n is a, c, g, or t
gggctttgtcaattcgccaaatactctgctccagtggactcactcagagttggcccccgagctggttcctggtcgccttctcacatgtgactatgtctgaggctctggccctggtgcaggaggagtccccagaggagccacagtgcaagacggacggcatacatccatgactctaggtctcagtccacatgcggtctgatgttggacacactcgggatccccagaggcaaagccaggagcccgggagtgcagccagacaggtcatccaggcaagatgccctcgcaggcatccgcagcatggtccagccaacccagcgagcctgcccccgtcgcaacgagccaaaaggtcaagtgctccaagtttgggtgcagggaggagggcatggctcctcaggtccaactagtgggtccgccaggggctgcggctggccatgagctcagtgccgcttccaggagacttcgggcagggtggctacaggggctgctgtcagctccgcagattactacacccctgcggaagggggcggccggagtctccgcgggcacnnnnnnnnnnnnnnnnnnnnnnnnnnnnnnnnnnnnnnnnnnnnngggcacctgacctcgccctgcacgaagagcagcgagcagcagaagctggggagggcgtgcgacccagcagggtcactgagggcagcgggcgtctcacgggatcctgggcactcaatagccacgaggtcagcagcccccagcaccagtcccagtgcaccaggcaggctgacggtgcaccaggtccagcaggcggacgcacaccggccatcccgtaactccgggggggccggtaacacctacggcactt

SEQ ID NO: 451077 - DNA, 900 bp, Homo Sapiens
gtgagcaaagagcggcgggcccgaaagaaaaagggacagtttcgtgcttcttgtgagtatataattgcgtgtagttaggtgggtgctggagccttttgtgtgcggcgaggttgggttagagccagggccggctccgcgtttaactcgtgatcattccgcgggtccccctgaggacggctggtgatgatctcgggtctgccctgtaccccggtcttaaattaagggttcgggaggcttcccaacctggaaacctttttaattaccccccaattaccaggggaatagagggttttctccccccaggggggcccttttccaccacttattcccatctcataaaggtttctcaccagtgcgtttttcgatgccctaaacaggcttgttctccaaacaaagctttgcccatattcgtcacagttatgaggtctctttttaaagacgttctgatctttttcatttaatttatccccaaattcacagaattctttgccttcagaatcctggagaacattctgagactgctagactcttctgtcaatggttcaatttttgctgtaattccctcctctgaagctggctttccaatcttggtcttgttctcaccatctgacagaaggtggtgttcctgagattcataattgaactggatctccatgggctgcaactggacacctcagtgtgcaagtggagaattaccatttcctctgtaagcttttcttgtccacataaaggtctgggacctggaggcaactgggcaccactgggcttggaagggaatcattgtgctgactacagatgtaatctctgagactagaccaccagaaaaatcctcgacttggtcaccggaccgctgtgaagcctcacacccggcgaacctgccatcgccctgtccgctctccc

SEQ ID NO: 451078 - DNA, 943 bp, Homo Sapiens
  misc_feature (154)..(154): n is a, c, g, or t
gtgtgcccaggaatcctcctagggaaaaccagttaatggaccaatgttccacttttccctaacggggcaccgggggccccaaacggaatggttttagaaagctttcttcaaggcccgaaggccggccccccaaggaaatttttaatgatacgtntttgtcccgggggaaaaaaatatttccatttggtttatatttcaaatgtaatttaaaaagtttataagccaggaaattcgataatatgaaagcaaggagaaactaagttgcaccatttagctaagttcagggacaacattcatttataataaatcaaaaatttgatttttttcatgccatcagttgtacttaagcatatccatcatatttcagttgcaaaagatggtgaagaactcaagctgaagaggtgtctgctgaattttgttgcttcggtaagagcttttcaccatcagtttttagaaagtacgcatggctctccttctgttgatatctctcttgatttggcaaagagtacaatgaggacagcaaagagttgccatatagtcatcacaaatagatccagggatgccatatcgggtcctgtagagagtcctcattgcgacgcttgttccacacagacagcattcattcatatcagctgcaacttgacacccaaggcacgggaaacaaaatgtgccacagagacagactccgcagtcgctgaaacagtcacacatgcctgtctgccagttggagttctggggggccggaccgggaccgactccaggttgggtcacaacgaccaccggcgcctgagcttgcattttcagtgcagggccttaaaagcagtggaaattagtaaacaaggttccgagcaggaaatgtcttgtggcctgggagagaatctcaccacaaatgaaaactacgtgaaaggggagaggtaactgtgtttctatcgcagggcatccc

SEQ ID NO: 451079 - DNA, 720 bp, Homo Sapiens
gtggcagtggctgaagtggcggcggcttcggcggctgcggcggctgcaacagcttcgggctcggggttttggcggtggcgccggcgggctaggctgcgcggtgcggaccccggcgcgcggtccgggttgctggggcggcgcgtaagatgcctctaatggaggagtttctgagcagcacccctggcccagtggctttgaaagggagctcaaaccagagactatttcaagccctggatatcatatcctgagggccacaggagaagagaacatggctgtgagtttggatgacgacgtgccgctcatcctgaccttggatgagggtggcagtgccccactggctccctccaacggcctgggccaagaagagctacctagcaaaaatggcggcagctatgccatccacgactcccaggcccccagtctcagctctgggggtgagagttccccctccagccccgcacacaactgggagatgaattaccaagaggcagcaatctacctccaggaaggcgagaacaacgacaagttcttcacccagcccaaggatgccaaggcgctggcggcctacctctttgcacacaatcacctcttctacctgatggagctggccacggccctgctgctgctgctgctctccctgtgcgaggcccccggcgtccccgcactccggcttggcatctatgtccacggccacctggagctgtttggcctgatggtgga

SEQ ID NO: 451080 - DNA, 876 bp, Homo Sapiens
gtgacatccccccttcagtcaccaactaaggcgaccaagagttcaggaagatgaaagcacctcccaggcccccactccccgaactctacagcccagaggaccagcccccggctttgccctctctgccaagagaggccaccatcatccggcacacatctgtgcggggcctcaagcggcagtcagacgagaggaagcgagaccgggagctggggcagtgtgtgtattgggattccagggatggagctgcggtcgtatgtcagtgagcctgagctggcgaccctcagcggggacatggcccagccctccctaggacttgtgggccctgagagcaggtaccagacgctgccaggcagagggctctcagggtccacgtcaaggctccagcagtcgtccaccattgctccctacgtcacactccggaggggtctcaatgccgaaagcagcaaggcgaccttccctagacctaagagtgccttggagcgcctgtactcaggggatcaccagcgaggcaagatgagtgcagaggagcagctggagcgcatgaagcgacaccagaaggccctggtccgagagcgcaagaggacactgggccaaggggagaggacgggcctgccctcatctcgctacctcagccggccgctccctggagatcttggctcatggaagcgtgagcaggactttgacctgcagttgctggaacgggtcgtgcaaggggaaaaaaaggacaaggaggagaatggctggttgaaagtgcaggccatgcctgtcactgagttggacctggagcctcaagactatgacttggacatcagcagagagctgtccaaaccagagaaggtgtcaatccctgagcgctacgtggagctagatcccgaa

SEQ ID NO: 451081 - DNA, 605 bp, Homo Sapiens
tgtgatgtgcttgtgtttgggggactctgaggggcactcggctccctgtccctgccccgctgcctggcccctcctaacatactgagccaagatctccagggagcggccggctgaggtagcgagatgagggcaggcccgtcctctccccttggcccagtgtcctcttgcgctctcggaccagggccttctggtgtcgctctcatgcgctccagctgctcctctgcactcatcttgcctcgctggtgataccctgagtacaggcgctccaaggcactcttaggtctagggaaggtcgccttgctgctttcggcattgagacccctccggagtgtgacgtagggagcaatggtggacgactgctggagccttggcgtggaccctgagagcccttagtgaggaaagagaagtgcaagcatgtttgtgctggggtggatgggtccctgcttctccctcatcacacattcttgcaggagtaccaagagcacccagtcaatgacccacccttatttctcttcttcctccccagggcatggtgatgcaaggtccccaatagaggatgggggccagcccaggggtgacctttgtccctgatggggggcagtgtc

SEQ ID NO: 451082 - DNA, 655 bp, Homo Sapiens
tcatcttcttaggttctgggtaaccgtgtatagatgagcaggtcaaatgtatgtacacattttctgttatattagaaattggtactatttcaggttgactgaagttagcaagcactgacagttcagaattcatctggtggatgcgaatcattcctgtgggctttttgtgatggatgatacattgatacaagcccttgtccttgatctgaagattgtgaagtctcagggtccaactgtccgaatcataacttgtgcggcccatatacttggaatgaacactgtcaaatttctctttgcctaagtatacctcattcagaaccaagttttcctggtcctgccaaaatactactagctcactcaggctttggttttgagagtttgcaaattggcatggcaggtctgcagtctcattgaaataggcttgaatcttcagaggagcagcaccagagagcaggaaggccatcacaaagggaatgttactcagtcccatagtgcactggggatccattttggctgcttctgctgtgacctaatatctggaaatgaccccactcatccgtgtgtctgtgctagttcctgttacagcagcagagaagcaaagcatttcaacctgtgcaagccttccatcccatacctacgggggcgtacagcctgc

SEQ ID NO: 451083 - DNA, 1027 bp, Homo Sapiens
  misc_feature (114)..(114): n is a, c, g, or t
  misc_feature (167)..(167): n is a, c, g, or t
ctggggccccaaattccagggggggaaagacctgcgggggaatcccggggattcgatagcaaacccccaagccaccacatcaaaattttccctttcggtgtcccaattttattnctgaggtcgttggtatagtcataaattacagccccccataaaacccccgcagnccaaccaacaatccccaaaataaccaatgaaatgaaaatgtgaaccagaagggtggtgatgaatctgaaggtaaacatcatggccaaagacaaggctaatgcgaggatacacagcccaaggattgtatctcttcccgacatgattccacttagaattcggtggagggtgtcaacatcatttatcaacacagatgcaactagggagtagcacctcaggtgtttgagggacacatcggttaaataagggaaatgacttgcttggaggaactggtagcctgggacacagtgagtctgcttttggactgtgggtatagttgaaggaattcaaactataaacacacaggaaggacccactggtgtttgcaaagaactggacctcttccagggagtcaagctgctcttcagggcagttggatacacagagggccatgcggttgagctgcgtacctttgacttccaggttgcaggaattcataaagaacacgtgtttttttagggtcatgtcctgccctgaaagaggggccccttccacgggggagttcttcttgccacacatgttgccaaagctgtcatagccaaagaggagtcttcccgcggctccagccaccaccgagtagcccatgataaacaccaaaccagtccaaaagagaaagaacaggaataaccatgccgtatctgtgcatttcctataaatctggggtcgccactccctttgcctaggggctccttctgcagaaaccaggtactcggcgcccaggcagtgcatcgtgcgctcgccggcgggggccggtgactgggagccgccgccgcctcctgtacgcggagacgcagcgcccgcgagccgggatcccgggaattcc

SEQ ID NO: 451084 - DNA, 905 bp, Homo Sapiens
atctacatggcggccacggtttggacggctcaaaacaagacggtgtgttatttagagtaagtagtggctgcgtatcgtattgtaccaatgctggggttggtttgcggtgtgtgtgcttccgtccaatccgtcgagccagaaattgtgaatgtttggaatctgttgtagcgcggcacgagtgtgtggattcagtagtatggttagtgaaggagctgctgatccggggtcaagggccgaaccacttatgtagtgcgagggtagggcagtaacggggacgttccccgggagatggcgtgtggtgtcgcagtgggtcgtgcttggggtcttgtctttgctatggctgcgctaacatttgtttgggtaataagtggtgttggctccgttcgggttggcaacaatcacggcgggcgaaccaggcggcagcggcatagggcagaaggacgcactcccaggctctgcgccgcaagggcgagtccagaagggccgccacaggggttcggccctcgcgtgtcggcggcacaccaggcagcagttgcagaggttcgggcacgtagccgccggggcagcgggggctgggacaccgcgacacgtcgcagcgcgcggtacaacggcgccgacagggggctcccgggccagcgccagcgcggcctaccagcggccaggagcagcgctcgcgcctgcatgggtgcagggccggcgtgcgaggtggcagcgcgggagaccgggcggggcccgaccggggacaacgaggccgctgcgggccgggcgccgggcgcctacggatgggactggggcgacgcgcggtcacatgcgccggtggctcaggctggcggcgtcaggcaggcagggcatccccagcgcgaaggagcgaaggaccagctccatcctaagattccggaccgaca

SEQ ID NO: 451085 - DNA, 955 bp, Homo Sapiens
atcaggccaaatcggccgagctcgaattcgtcgagagcggaggggcttgcaggaccctgaccccaagatggcggcgcccagcgaagtggccgcgatagcccctggcgaaggcgatggcggaggcggcggctttggctcctggctggacggacggttggaggcactgggagtggaccgagccgtttatggagcctacatcttgggtatcctgcaggaggaggaggaagaagagaagctggacgctctgcaggggatcctctctgctttcctggaagaagattccctccttaatatctgcaaggagattgtggaacgatggtcagaaactcagaatgttgtcaccaaagtgaaaaaagaagatgaagtacaggccattgccaccctaattgagaagcaggcacaaatcgtagtaaagccaaggatggtgtcagaagaggagaagcagagaaaagctgccctcctggcccagtatgctgatgtgacagatgaagaggatgaagcagatgagaaggatgattcaggtgctaccacaatgaacattggttctgacaaacttctgttccgaaacaccaatgtggaagatgtccttaatgcccgaaaactggagcgagactcacttcgggatgaatcccaaaggaagaaggaacaggacaagctgcagagggagagagacaaactagccaagcaggagcgcaaggtcaaaaggatacaaccaaggacacagcagaggggaggcgaaaagcgataaccttggtctactctattctttccccccatgaactttatcaaagggagaacgtggttgtgtatttaagcagacactgagagtgcttgccaagttagtttcccaagggcatatccccttatggttaccatggtcagaaggaaagtcaggaatcacgtcttaattacaaaatgtgcctgtttggtgggggtgggcaatcagatcattatg

SEQ ID NO: 451086 - DNA, 856 bp, Homo Sapiens
agaagcggctcccgtcggaggccgagtcgtcgccacgatcgcccccttggtggactcgcaggccgagcggcttccccgcagagctcgaggagggcagacggcggcgggggcgccatgagtcagaggcaggtgctgcaagtgttcgagcaataccagaaggccaggacccagttcgtgcagatggtggcggagctggcgactagaccccaaaacatcgagacgctgcagaacgcgggtgagcccggagcccgaacccccgtcgccccccgcgcactgagtccccgacgcctccgtcccgctgccctgcccgtggagctcttggggagccgcagtgtggggaccggagttcgcaaaagcatccattcttttcagcgggtctttgggggtcaggccgagcagggtgaagcttccagatggttgtgggaggtgcgcgttgtccctgtattccatcttcattgcacacaggtgtaatgtctttgctgagaactcttcttctggacgtggtcccaacaattcaacagactgctgctttggctcttgggagactggccaattataatgatgacctagcagaagctgttgtgaagtgcgacattcttccacagcttgtttattcattggcagaaccagaatcgcttctaccagaaagcagctgcctttgtgttacgagcagttggtaaacattctccccagctagctcaggcaatagtcgattgtggagcactggatacgctggtcatatgcttggaagattttgaccctggagtcaaggaggctgcagcctgggcacttagatatattgcaagacataatgcagaactgtcacaagctgtggtggatgcaggagctgttcctc

SEQ ID NO: 451087 - DNA, 1098 bp, Homo Sapiens
cggggtttcccctttggcaagggcccaaaggccagttcaatcccgggcagcaaacccctcctggggtttaacttcccagctgtgaaaagctcggggtggttgttttgccaatctctttaatttaaggtagaagccattttcttcaacgtattcatccttgtcccttcagccaggtaagttcaactgggaaaaatctttgtttcaacacccatttttgccagatccacggaatgtttggaaacctgactgagagctgaaaggatctgatgcttcaatttagcatcagggttcaggatcatctgggctaaatgagcaacagctcctgcatccactactgtctgtgctaactctggagaatgctttgcaatatcactgagggccgaagcagcaatccttttcaaagcaatttctggctcctggatacagagtactaaaagaggaacagctcctgcatccaccacagcttgtgacagttctgcattatgtcttgcaatatatctaagtgcccaggctgcagcctccttgactccagggtcaaaatcttccaagcatatgaccagcgtatccagtgctccacaatcgactattgcctgagctagctggggagaatgtttaccaactgctcgtaacacaaaggcagctgctttcttgtagaagcgattctgttctgccaatgaataaacaagctgtggaagaatgtcgcacttcacaacagcttctgctaggtcatcattataattggccagtctcccaagagccaaagcagcagtctgttgaattgttgggaccacgtccagaagaagagttctcagcaaagacattacacccgcgttctgcagcgtctcgatgttttggggtctagtcgccagctccgccaccatctgcacgaactgggtcctggccttctggtattgctcgaacacttgcagcacctgcctctgactcatggcgcccccgccgccgtctgccctcctcgagctctgcggggaagccgctcggcctgcgagtccaccaagggggcgatcgtggcgacgactcggcctccgacgggagccgcttctctgtgtacccgcgatcccgggaattccggaccggtcc

SEQ ID NO: 451088 - DNA, 938 bp, Homo Sapiens
  misc_feature (154)..(154): n is a, c, g, or t
ttttttggcaaggaaaggtgttatttttggaaataattccaggggggaaataaattccctccacttatttttcttcggggggtaaacaaactgttaaatacctgttggatgtatttcttgaagggagagaaccaggtttctgctttttatctcnttgaacttttttaaggccaccagttgttacaaaaagtcgtcgagctttgctatcatgcggcagcaccttactgaactgtccaaccacatgtttcagaatattgggaggagcatcatatagaaatggttcaagggctggtaagtaggtacatttttgcaggatattctttatggcttttttactttttacttggagatcctcagaactttctgttgacatgtacaaagaaagcagaactggcaaagtatttgtgactgcaacagcccgtgcgtgttcaggagtgtgtcttccaatctgtcctaaggcccaagcagctgcagccttaatatgatcttccggttcttctgacaagcagactgacaactggggtacaccattctgttctgccaatgaataaacaagctgtggaagaatgtcgcacttcacaacagcttctgctaggtcatcattataattggccagtctcccaagagccaaagcagcagtctgttgaattgttgggaccacgtccagaagaagagttctcagcaaagacattacacccgcgttctgcagcgtctcgatgttttggggtctagtcgccagctccgccaccatctgcacgaactgggtcctggccttctggtattgctcgaacacttgcagcacctgcctctgactcatggcgcccccgccgccgtctgccctcctcgagctctgcggggaagccgctcggcctgcgagtccaccaagggggcgatcgtggcgacgactcggcctccgacgggagccgcttctctccgct

SEQ ID NO: 451089 - DNA, 954 bp, Homo Sapiens
acgggatggaggtggctgcgcttctcccgcgtcgcattttgttgctgtggctattgggaacaggctgggcaaaatggcaccccggaggcgctgacgctccttcgagttcggtgcctcgtgtgacggcgggggtcggtgaagacccgtcgagctgcggcgccggcgcgttccaggccgggagtcactggaggcacccctgggacgccgagcagcccgagaaccccggggtggcctccgctgcggctcgggtttgcctgccccgaccccccggctctgccgtgcattcccgggcggctctctccgtgtggcggccccggagcaggcgggcggcgtcggaggatgctgcgggcccggagccgagaggaaagtgctggcccagccctctgagcgctcctcgaaggtgtgcgagaaggcccttcctcggccccaaagccgtctgccgggctaaggcgtgcagagcaggcgaggacagccgctcgccctacctgccgcatgagtccccggtccaatcaccatgtcctccgccaggttcgactcctcggaccgttccgcctggtatatggggccggtgtctcgccagtgtggcgcagaccccggcgccagggccagtcgccacggtatgttcctcgtccgcgattcttccacctgcccctggggactatgttgctgtcaagtgtccgagaactcgcgggtctccccactacatcatcaactcgctgccaaccgccgtttcaaggatcggggaccaggaatttgaccatttgcctggccctgctggagtttttacagagatccactacctggacatccaccagcctcatcgaagcctgcgcccaggtatccaatggccacaatgggatctgtctcaggacccaaccttgtctacagcagaagataccctggaatatgtacgggactctgtatgatttacctgggaatgatgccggaagatcc

SEQ ID NO: 451090 - DNA, 1089 bp, Homo Sapiens
  misc_feature (896)..(897): n is a, c, g, or t
  misc_feature (939)..(939): n is a, c, g, or t
  misc_feature (950)..(951): n is a, c, g, or t
agcggagggggacccgggagccggcggcccggagctgggagcgcggggaaggcggttggggttctgacagctgcgcgcgatcctgctctctctcagccgcctgtggacatgcgcaaagggccctctcctgagtccagatgatgctcataccaatggcttcagtgatggcggtgactgaaccgaaatgggtctcggtctggagccgcttcctctgggtgacgctgctgagcatggtgctggggtccctgctggccctgctgctgccgctgggggctgtggaggagcagtgcttggctgtgctcaaaggcctctacctgctcaggagcaaaccggacagggcgcagcatgccgccaccaagtgcaccagcccgtccacggagctcagcatcacctccaggggcgcgacgctgctggtggccaagaccaaggcctctccagcgggtaagttggaagccagagctgccctgaaccaggccctggagatgaagcgccagggcaagcgggaaaaagcccaaaagctcttcatgcacgccctcaagatggacccggacttcgtggacgcgctcaccgagtttggcatcttctcggaagaagacaaggacatcatccaggcggactacttgtacaccagagcattgaccatctcaccctaccatgagaaagcactggtcaaccgcgatcggacactggctcttgtggaagagatcgaccagaggtatttcagcatcatcgacagcaaagtgaagaaggtcatgtccatccccaaggggaactcagctctgcgcagggtcatggaggagacctactaccatcacatctaccacacagtgggccatcgagggcaacaccctcacccctctcggaaatcaggcacatcctggagacccgctacgcgnntgcccgggaaagagcctggaaggaacagaaacgaggtcatanggcatgcatgnncagccatgaaagtacatcaaccacgaacttctgggtttcgcggcatcggggttcgtaaaacatcaaggaaaaagtgtgctgggaaaatccccacaggggcggggttcctgtgggcataccgtggggacccccccgggt

SEQ ID NO: 451091 - DNA, 1112 bp, Homo Sapiens
  misc_feature (41)..(51): n is a, c, g, or t
  misc_feature (53)..(63): n is a, c, g, or t
  misc_feature (539)..(593): n is a, c, g, or t
  misc_feature (603)..(603): n is a, c, g, or t
  misc_feature (612)..(612): n is a, c, g, or t
  misc_feature (614)..(614): n is a, c, g, or t
  misc_feature (616)..(616): n is a, c, g, or t
  misc_feature (623)..(623): n is a, c, g, or t
  misc_feature (935)..(1012): n is a, c, g, or t
ccacagaagtttccccccggagggggagttttcgggaattnnnnnnnnnnnannnnnnnnnnnttattgttgcccccaggttttttgttcaaggttaactggtggggttttccccgggggggccagttctttaggggaggtcccatggaatggtcgcgggtttgtttttgggcccaggctttgacgggtcaagttgccctctttggagaacccaagggccccgccacctttcatgggccaagcatgtagttagtaacttttggggggcccccgggggccatggggcaaccccttcctgtgggggccagaggccatgttagcaagtaggggcccctgcagagcctggaggtcagcaatctgctgcagtggctgccatggggtgacgagagagggggcgcttccaggaacaaggcagagagggtggggccttcaggggaggctggatcagggacaacatgggaccagtgactttgcttcactgggcttcagttttcccagctgtcacactctgagacagggctggcgaaggtggctcacannnnnnnnnnnnnnnnnnnnnnnnnnnnnnnnnnnnnnnnnnnnnnnnnnnnnnntgcagtgagntatgattgnancnactgcanttcaccaggctgcaacagagcgagatcttgtctcaaaagcaaacaataaaaaaaacaaaccaccttgagatcggacagttcctgccccataggacaccatgagttatggtgtggattccatagagtggctagagtgtgaacttaactcaagcacgctgttaatgctgaagttatcaggaggttcgaactttcaggtcaagcgggagaggaaggcatcaggcacatgctccggtggagcaagcagtatgatctgggagcaacaacagtcagggagacccctgcaagcaccatgtgttggtgtctgccctcgcnnnnnnnnnnnnnnnnnnnnnnnnnnnnnnnnnnnnnnnnnnnnnnnnnnnnnnnnnnnnnnnnnnnnnnnnnnnnnnaaagaggctcagctgtagaagaaatcagggtagctccgggggatgtggaaggaaaggagatcaaggggggcttccatcccgggaattccggaccggtcca

SEQ ID NO: 451092 - DNA, 1157 bp, Homo Sapiens
  misc_feature (130)..(143): n is a, c, g, or t
gtggaccggtccggattcccgggatctacattgtcttttagaggcatcatagttttagtttttacattaaatctgtcattaatctcaaattaatttttggcatggtgtgagtttggtttcaagatttacnnnnnnnnnnnnnnaacatcttgatagccatttgtgccagcaccactggtgtttcctttttccattaatccagtttcgtatcttcataaaaagtcaattaactttctatgtattggtctatttctggactctgttctatcgattgtctgtttttcttttggtatatttctcttgattgctataatttcatgaagtcttgagatcaggtagtgtgtgtcctccaactttgtacttactattagtttattaatttctacagtgaagcctgttggattttctcggagaattgtattgagtccagatcatttgggggagaatcaacatcttaatattgggcctcaatatttcataattttcaatgtagcagtcttgcatgcctgtttaaaaatttattcttaagtattttataattttacattactgtgtagaacttttgaatttgactttccagttgtttgctgtcagtatgtagatatacaattgatttttgtatagtgactttatagtctgataacgtctgtttcacttattacttctagtggtttgtttatatagaactctaagaaatttgcaattatgtttcctgtgactatcgttttacttccttctttctaatccttatgtcttgtcttgctttttattggtttattatactgtccaggacttccatagtgttgaacagaagtcacaagaatgggcataattgcattgtttccaagcttaggcagaaagctttcagtagtccaccatatggtatgatgtctgtaggatctgcagagtaaacctttatccaaatgaggacattccttttaaactttatttcttgggagtttttatcataacgatgtttaatgctgtcaagtgcctctttctgtatctgttgagatgattacacaactttcttcattctgccactgaattacattggtttcattttcaacttttacactcactttacatccctgagatataccccacttggttgtgatacgttgtcctttgggatatgtagaacgatctccaagtgc

SEQ ID NO: 451093 - DNA, 1258 bp, Homo Sapiens
cgccgggaaaccccgtatccctcgttgaaatcaattcttatggaccggtccggaattcccgggattttctgtactctgggtgactcagagagggaagagattcagccagcacactcctcgcgagcaagcattactctactgactggcagagacaggagaggtagatgtccacgcccacagaccctggtgcgatgccccacccagggccttcgccggggcctgggccttcccctgggccaattcttgggcctagtccaggaccaggaccatccccaggttccgtccacagcatgatggggccaagtcctggacctccaagtgtctcccatcctatgccgacgatggggtccacagacttcccacaggaaggcatgcatcaaatgcataagcccatcgatggtatacatgacaaggggattgtagaagacatccattgtggatccatgaagggcactggtatgcgaccacctcacccaggcatgggccctccccagagtccaatggatcaacacagccaaggttatatgtcaccacacccatctccattaggagccccagagcacgtctccagccctatgtctggaggaggcccaactccacctcagatgccaccaagccagccgggggccctcatcccaggtgatccgcagggccatggagccagccccaacagaggttcccttcaccttttcagtcctggtccagcctggcatcacctttccgagctcaaaattttaagccttaataaaatggcagggccccgaggccaagccccctcccccgaaaacgcttgccagccttggcagtcccagggggaaaaaagggacgtttgcccctggctttgtcagccaacaaaccagcaggccgagcaaccaggcaggcaggcaagtcaggctgaccagtcgagccacgccgcacagcagagcaagtaaacccgcgcaagccgccaacgcagcatggccggcccgcccaaccccccggtgagggtgagctgaccaacaccggtggttcccggagccccttgggtttaacctatcacacgggaatccttccctgggcgcccgggtggcccctggaaccttgaaatccgggtcccctaaaagcaaccccccggtccaaaatagttttggccgggtgggttccccggcgcccgccgggggcggggtcccgggcccccttttttctccccgcggggcccacccgggctaacctccggggcaaaaacaccccgcccccctccgtggaagcactttctttt

SEQ ID NO: 451094 - DNA, 998 bp, Homo Sapiens
agagagtctttcccaaattcttccttttgcttcgggaaggaggctctatttccatgtttggcaagagaatctaggaaaaagggatcaatttccctttggattaatgacgccaaatcctttttttgactgagcacagactttgtccttcaggtctattatttttgtactctatctcaaataaattttctttcagcttttaccaatttctctttctcttctgcagtcttataaaagaaaccagagttcacctctgttttttcatattccagtgaaacgttgcaaataaggataaatgcatcttctactcgcttcttcatatctggatgacgggcaccatgatccaaaactaatccttggatcaactttgtatctgttcctaatttatgcttcatctccattatttctaccatgaagagatcaatagggtaacctggtcttctaacagccaaaacagaatccaccacaacctctgttaagacatcagccagttcagcatgaactttagtttgtaatgatgttctagctacatctaagaggatttttcttttcatctcctttgtcactttaacttcctcccaaacttcaagtgcttttatctttgcagcttcaaatccttcagctattattctagggtgcaggccctcagaaatgtacaggtcagcttgttttaataactctccaataattagaacatttgaagtagtaccatctcctgtgacgtcatcctgagctgttgctacttttgctatcaaggaagctgttggatgttgaatttgcatctcatcgagcagcacattgccatctttggtgagtttgatgtcacctgcaccagaaacaagcattttcatggtgcctttaggacccaagttggtccgcagcacatcctgcagccctcgggcggcgcatatattgacagcccaagctgcccgggcccgcgccacctcagccttggagttgacggcctttatcgcagccatagcctaaccgttcagagggag

SEQ ID NO: 451095 - DNA, 1268 bp, Homo Sapiens
gtcaatggcccttatttaagggggtaggcccccacctttacctgtgggtcttttccagcatttccaactggttccaccaaaatttcttccctccttaaaaaattccctttttccttaggaaccgttccctggaaaatggagtaaatggaatttttaaaatttgagagaaacgggagaggccccggggttctttttgattccatcaaaattattgcatgtcagctgggacatcactttactgggacagacgtctggtacagtccagcagcaggtatggaagtcggggattgattctgcaggactttctccttttccacgcttggtgcatagaagctgaagattaagcgtaattattgcctaggtgtggagagaattcctcaagctgtcagttcttggtttttccttgtgcagagtgctcaccagactcatgagaaattgtcttaacgggtaggaagcttcacgctctctttattcagactgagggttgatcatttccattttcttggtgtgcccggatctgccttccagcacattcggtacaaacccaccagaacaaatactgaaagtgttattacaatcaaagcaataaccaccggcaaaataatactggaataagaccggctggttgctgaagtgcttgcattttttccaccctcagtgcctattacttgagactgtgaggtgttttctggaattgtaactggtattgaggttaatgtaccagttttagaaggtgatgcatctggttgtagaacactacctggtatttctgttgttttaattgaactctgagtttcagtcttgggtttggaactttgtaatgttgaaacagcatttggaagtgtaacacttgttactgttacgtttgaaatgatggagtcattcttcctgacatcagtggttgtggctttcaatccttcatctttacttgttaaaaaagtagctgttgacatcagagacattttaagtaattcattggtgattgttcctttaggagttgttccagttgttggtgtgacaacatttttctgtaatgattctgtgtttggtgttgttatagatggttttgttgtagtaacaagtgaattattagctgcctctaaaacacctgtgctgttactgctgcaaatactgggcagaagaaaaagaatggtcacttgaagcagttccatggtgcccgtagatggtgtcaatatcttctttctccagaagcaggcagggacaattccctcccagcctggcagggccttattagcaaatggaaaagg

SEQ ID NO: 451096 - DNA, 1183 bp, Homo Sapiens
  misc_feature (123)..(123): n is a, c, g, or t
  misc_feature (327)..(327): n is a, c, g, or t
ttgcctaaaggatttgggttgggccccgtttaagattcggaaaattagtttcctggacatgtttttccactggttgctcccgactggagcatgagccctgtagcggtcctcctcccaatgttngggctcgccatggtctgctgcagaggtttgcggggctggtttgttctgtgccccagttgaaactactgggaagcctgtttttgtgatgacgtgatgtgggatcttccagaagccgttatcttcgtcccagcaggactcacgcagaatcttctccaggttgctgtagttacagtccctgcgaatcaggggctgcacctgctccanggagctgctgcaagagcatggagtcacgctcctgccggcggatggtggccaagtaatcgatcttctccagctgaaactcggactgcagatctttgatctccacctctgctgcccgaagcttcctctgcatcttctccagcagcttgctctttggcccgcacttcctcctggatggagtcgtagacgttaagcagcaccccagtccccgctgtcctcatccgagttctgcagggcagccaccagctgcttcctgcgctcgtctgcgtagcgcttgcgccgcttgtgcttctccttcaggtccttgttcttggcctgctctccacccacaacctgctgctccaacagctgcagacgggccagcacctgctgctggtccacaacgggcagcgggtcatcggtcagcactgccacctccatgcccacgctctccctcttcacaccagctgtggccggcaggggctcaggctgagccaccagggccaccggggcctgagcctccaaccacacgccaggctctgctgtccgcaccacctctaaggccacttccgaggccagatctacctcaggcctgggcgggaagtcatcagccgcctcggcttcaggcctggcatcactgggctccagcaggtctgtcggcgcagggacctgtctccttccgcaggttctcctccagcgtggacagcctgacgtcatatgagttgcgcatggcagtgatgtcttcctccagcctggcccgagactcctgctcggccttatagtcggctttcagccggggcaggcgctcttcatactcctcccggatcagctgcaatctcggcctccatgtcatgctggatcacaggttggggcaacagca

SEQ ID NO: 451097 - DNA, 1073 bp, Homo Sapiens
  misc_feature (184)..(192): n is a, c, g, or t
ttgggcgtgatatttctgcgccgctatagatggtcgggggtcttttccgatggggggttacacgcgggggggcctccccgaggaggggcacaaggagagccacgggttttatcccacccacttttggcccactggccccaaggttgggcccaatccacgcccccttgtttgtttttccctgggnnnnnnnnntttccccttggggcttgatgggaaaccacgtgcccgtttgcccaggtgggggcttgttggaggccttggggggcctggctggcccctggggtttgtgcctgcaggggttccccctggccggggagctatgaggggcccccttgttcgcctgctccagactcaggaactgctgtctcgctgccaggaagtcaatctgctccctgtcaaccacgttctcctccaggggcgtggaccgaggtgggccgggggtcctggggtctccgtggtcaggagtgccctggagcgtggccacggtgctgctcttcctgactgcctggccctggatgacggcccagcgctcccgctccaggtcacacagcctcctggggtcagcgtccccagcatccaggcggtaggtcttcatctccttgtcctccccgtcctctgggcggagtgcccatgttggacgtccctggtgggcatccctggcgcccaggcggtaaacctgccaaccctcatcctccctgttctccgagtggagcccccgtggggacggctggccagtgtaggcatgcacgctgtaggacaccccctgcctctgcacgccctgctgggccctgtggtcagtgggccatgtctgcggctcatcctggccccagccgctggcctcggggcccatgcacaccagatggtatgtgtagctggtgtctccatccagcaccaggccggtgccacggtgtgcctgagggatgcccaggatggggtatctggtcacgcggtccatctcttccggggtcttggcctcagccttcctcccgtggggtggagacctctgggcttactgccggctcccggctccacagtctgcagcctcgtctcggaacgccacccaggcctcgcac

SEQ ID NO: 451098 - DNA, 938 bp, Homo Sapiens; identical to SEQ ID NO: 151912
  misc_feature (804)..(804): n is a, c, g, or t

SEQ ID NO: 451099 - DNA, 1197 bp, Homo Sapiens
cgagggacggggcggcgtctattgccacggtccgcgggtgctctcctgcttgtggcatcacactatgttctggaaggaatgcggtgcggtatcgggacgggtggtggtgccgcgcgactgcggccaggagcgtggcacgccacgcgggtgacgcagatcccgcggctatgaaggggggtggtatatggtgggtaaagccggagatgcattggttggccgttgaacgaatcgtttcttttatcttctagccgcgggcccatgccccagggcttaaacgtctattcccccccgcccatctgcgctctctcttgctttctctcaggccgccggttagggtggccatacatcggctctgtacactgccgcccgcccggggcccaacccgccgccgctaggtgtcctttcttccgcctcgccgtccgtgcacggccgctgacctgtcgagttcttctcccatcaccgcgtcgacaatccgccctggcctgtctctcattttactaaccggctgtctgctctacttccgcgtgtcgccatatcggggggctatgcgggtgcggggcggggtggcatgatccgactgggatttgttatcttttttcgggggttcgtacccccgatcacaggtatcacaaaaaaaagtgaaacaactggttcctgtcttttctcttttttctgttttctactgggagggtaagctgaagtctgtgaattttgcatcatactttcgtggataataagaatttttaactgcagggttgaaggacttctgatgccgaggaaacttatcagaagactgtctccaataccacgatgtggaagcatggaaattccaaggctggccgctgggttgaggctgagaatcaaggggagactgggcgtcgaaggggggttgcgccccgggaagaatctgggcgtcgaaggggggcggagccccggggagagactgggcctccatggggggctgcgactcagaggaaggctttgacccggctgcgggaagcgaggacgtaagtggtggtggcggtggcggcagcattgcccagaacatccacctgtcccgcggcggggcagtgtcgctcaggggccctaacgtgggagtcagctcgggagacgcatgccacccgataggagtctcgaaatcactagtcggctcagccataccactggcgggtccggagtctagcacgcgactgtccc

SEQ ID NO: 451100 - DNA, 1555 bp, Homo Sapiens
  misc_feature (11)..(11): n is a, c, g, or t
  misc_feature (48)..(48): n is a, c, g, or t
  misc_feature (68)..(68): n is a, c, g, or t
aaaacctcaangggtcaaaaaacctttgggtttttcccaaaacaacanggttgtggtgaaaaaccccnaaaatactaaagaaccacggtgaacccctgcaggcaatgtgccacccatctgggaaggtaagtggcttgctgagatctctggaaatggacgggactgcaggaatcaatcggcacgtctccttgatgcacattgtggtgtacgacatctcacccagctggtcccaagtgatagaagacccatcccccaggatgcccctgacctcctcccggcatctctcttgatgctcagggttcagagccaggcagtaaaggatccaggagatgcttgctgccaaggtgtcatgtcctgccaacaggaatgtgctcacttcagagtgtacatcaatatctgagaagctgctaccactttcatccttggcagaaaggacaatatccagaaaatcctggtacttcctcttcggagtgttatcctgctttaccccagcctggagggatttctttctttcctggattattgtatctgtgtactgattcaacactcggcttaacttttggaagcggtagccctgagggctgagtttgaaaattatgtcactgtgatacaacaaactgtacaagcggtgaaatatgattttgctgagttcaaatatggcttttgcataaggatcatgggtgctgtttgtctggcagttggtctccttgctgaaagcgcatttcatgattatatccagagacatcgagttgatgtgctcatagacctccacgcttgttgtcctgagtgctgcaaatcttctcccacttatccagcatcatttttcacagaatgagccatcacctcaatgtatgctttcaggatgttaaaatggaatccaggagttagtaggcgacgatgctggaaccacttgggtccgtctagagccgctagtccttttccaagaagtggaggtgagaatttctgcaggtactgggacttgggatctgttctgctcagaagtgtctttgcatagtctgggtcatagatacagaaaaatgcctgaaagggcccaatccagaaagggaaggcacgagggtatttttcaataatttcctcaagcttctccatgttatcatcctgaataaacttctggtgcccaaggaaccagtgggtggggggcgctgggaaggggcgcaggtcccgcagcagccgctgcctccgcaggtacagcttaatggcctgcagcagccccagggccaggcagaacacgaacgccaggtaaaagggccgcgcccagcgcgtctccagccaggagaattccatggctctgcgcagcgccgaacgccggcggtttcctggggcgcgggagagggtgggctttctcccgcccggagctggcgtagggtcgcccaccccaccgcctctctgggccctcgcgaagcttctgactcgcgggaagaaggaaaggcagtgggaggggcagctcaggcctggggagaggaggcaggcgcgcgtgcgggatttctagccggttaccaaagcgcgcacgcttcgttcggcccaactgcttctg

SEQ ID NO: 451101 - DNA, 770 bp, Homo Sapiens
  misc_feature (169)..(169): n is a, c, g, or t
atccccggaaggggattttaaaatattgaggggggtatagaaggatccccatcaacaatatctttcttaaaaaggagttgggcacatggtcatcatcaaaatggaagggttccacatataaaagcatagagaattaaccccactgctcccatatatctacctctgggcntgcatacaatcttcctgaaattacttctggtgcagcatagttgggtgagccacaacttgttcttaaaaattcaccatctgacatcatgtttgaaagaccaaaatcagctatctttgcattcatgtgtgcatcaagcaggacattttcaggtttcaaatctctatggaccaccatatgcctgtgacaataatccacaccagaaaggatctgttggaacagacgccgactttctttttcatccagccttccattcttacagatataatcaaatagctctcctcctgagacatattccatcaccatgaaaatatcagatggtgtactgatgacctggtacagtttaattatatgaggatgcctgaaaagcttgaggttctgaatttctctgcggatttttcctaccacatcaaggctccgaatcttctgtcgattgagtatcttcacagctactttatgcccagtcaattcatgtttgccaaccttcactttgccgaaggtgccgacccccagcgtgtcacgccagaatgtagtggccgatcttcacccgcccgtcgtgtttctgcttctcggctgtcgccatcgtttctccaggaactccgct

SEQ ID NO: 451102 - DNA, 962 bp, Homo Sapiens
gtgctttgtgtgtggctgttgttggacaaggcgcgtcctgatcctggagtgcgccccagaggcttgcggacccagcgtcctccgggtcttggcccgtttcctagtctcttctgcccatcaggcttccggggaatccaaattcgcaccggcgcagaccagtgttttcacagatccactcaatctgagccggaccccgtgagtactggcaggtccggtcctgctggataaccttcaaagtcaatgttgttcatgctagctccgttcttgtgtggcgctgcaccgctgtttctgcccagggttaggttccctctgtgttggaagtcatttcattctgccgaagcaaattcttcattccaggcgtctagctctgctgttcacctcgatggtgtactgctcaaagatgcgcagttgcaggaagattgtccagcttgatcttccgctcgtggaacagctcctccatctgcacctgtgcatcatcaagctgctgcaggaccgactcgatgtggctgatggagctgctgtggggtgttttgttgttggacacagccgagtcctggcctcgctgggctccccgagggagggaggcgctgacctgagctgctggataaggtcttcgccttccttgatgacattgagtgtggcatctagagtggcggtctgctgctgctggaactgcttgatcagttcctggactgcatccacagaatctgcacagacatcctccaacatctccttcttaaggtcttccatccatgtccacaactctttggtgtgtgtgtggaaggaaacagacatgtccaggagaagcttccgctgctccaccctgcgcacgaagtcttggatgcgcacctccaggtgtcgagctgccttgtagatctcctcggggtcacattcccccgtctgagccaactgctctgcatctccgctctcgacgaattcgagctcggccgatttggcctgat

SEQ ID NO: 451103 - DNA, 1036 bp, Homo Sapiens
  misc_feature (910)..(947): n is a, c, g, or t
ctggacagtcctgtggatgatgtcattgcggtccactgccacgacccagacggatgggccagccttatctttgagcaatgtacccagctgcaaagttacccggcagcccctgttggcacaaccacctcccaccaggggtaggggatgtgtgtccaaggatggcgtacactggaagtaagcaaagaagtgatgggccatctgcacccaggacccgggaccagttgatcgaattcaggctcatcagattgtgcttcttgacaaaagccaccatcggcaaacacagtcttgatcggctcatcgagctcatcgctgtttccctccactccaaacacatgtacgttctgcttcagcaccgttgtcatctggagctcctgaatctttgtgcagtgacctttgggcagcagaacgataatgtccatgttctttgccccttgaacactctcaatggcagcacttcctgtgtccccagatgttcctacaaccacagtgacgtgcttctccctcttctccaggaagtactgcaggaactgtgttgtgcaggacagggacaggtccttaaatgcatatgtgacgccatgccacagctccaacacgttcagcccattcctcaacctggacagatggaccacttctctgtgacggaatctgctgaaggctcggtcgatcagatcatttaattcatcttttggaaggagctcagagccaatgaagagggcacacagctccttcaccaggccaggataggagagtgtgctccactggcacagggtctctctgtccaactgtgggagctcttcaggcataaagaggcccccgtcaggtgcatagccagagaagagggccccctcaaagttgacccgtggggctacgcccctggtgctgacataccacatgatcctggaggccggtnnnnnnnnnnnnnnnnnnnnnnnnnnnnnnnnnnnnnnaggcccggtgcgcagcagggatcccgggaattccggggccggtagcggcgggaggattaggcgggcgccgtggtgggggggagtaggag

SEQ ID NO: 451104 - DNA, 1477 bp, Homo Sapiens
  misc_feature (212)..(222): n is a, c, g, or t
  misc_feature (1293)..(1341): n is a, c, g, or t
gagcgcaggttatggggtccagtgtggcttatgagttgcttggcgtgtggctacgagggggaagaggtcgggttagcatttgaggagggattggataggtcgtggggcaaggccccctcacggggggagttgtggcaaagggaaaaggggcacgcaccagtccgggggagcaatggggattgcggtgactgccgggaggtggaaaaggtttnnnnnnnnnnnaagcattgagggggccagacattttcccaacatgcccccaggtaccccgttaggggggcataccctcattcacacaggcaccacacatgcatccacttagtcacccacacacaagtgcactcacacacacgcaggtgcacagagcagtgcacagccactgggcaacatccccgggggcagcaagctcaggtgcagccagggtaggggtgggcggagtgcaggggcctggagcagggctgggcggttttgcttgggggaaaggagcccttgcccccccttgccttgggtatttccctttcctgtcttcatgggcccccacccacggcacccttgcccagccgggcacactgaagacaagcagtgggaaggaaggcagcaggtcgcttgcgttaggtctccgtcgtataattatcgtaggtcagcggagccagtgccggaaaactgctccaccgcctggcgccgggctggggctctgtgcgcccttgctccttatatttacccagaatgtttttggcttcttctgcatcctgcaaagggctctctccatattcttccttcagccactgccgatactgatggacctcatgcttctcaaactcctggagctgtctctggaagcccacgttggggttggcacaggatctcccagcacgcacggtgtgcagggcatcctcccagccaaagtcagtgacggtcatgatgtatgcgatcaccagtgtcacgctcctggagaccccggccaggcagtgtacaaggcagctctcaccgcggagccggcactcgtgaatgaatttaatactttctttgaaatgtcttgtcaggttttgagatggtgaatccgctgctgggatgcacaggtatttaactccctccaacataggcctggcactatcgtggacagacagaatatgtgtcaccttgttcttgctcaattgttccgcgtctctggcatctttgaagttgccgatgtacaggccgggcaggatcttgttcatcccattccccatggtggctgaaggcgaacgctagcgccccggccgtgtggtcgcaggcgcactatggcatgttacnnnnnnnnnnnnnnnnnnnnnnnnnnnnnnnnnnnnnnnnnnnnnnnnntgagtgctcgcagtgtcaacaagtcagcggcagggaccggccgggcaacccagggcgctccagagacccggcgtggagggcagggctttctgtgcggcggcctagaacttcccggcgggagccgggcaggggcacc

SEQ ID NO: 451105 - DNA, 1064 bp, Homo Sapiens
aaacttggctaagttgccctttattaacgaaaacatagagctttcggtcaattccaccacggagaacacaaaccagagataaaacccacaccaagggctatttcccaagctggggaatttgagaacacacgggcagagttcacgccacacaactacactgggctcgtccttgggaggcgttcacaggaagcaatcacgagcgccaagccacccacaaggcagtgcggcaaggctcccgggatccttacaggcatccaagcgaggtacagaaacctccacagcagtggggataaggggaaaatattttctcttgctaaagaatatccttagttctcaacataaacatgactacgtatatattcagcttcaaatgaaaaacaagtttacaaatcactactggatacttaaactcttatgttgctttttcttttttggcagcaccagcctaaactctgtgggtttgcaatatttcagaaacttcaggtacattacagtcttctgagaaaggcccagaacttcagaattcccggagcggccagaatgtttttggcttcttctgcatcctgcaaagggctctctccatattcttccttcagccactgccgatgctgatggacctcatgcttctcaaactcctggagctgtctctggaagcccacgttggggttggcacaggatctcccagcacgcacggtgtgcagggcatcctcccagccaaaagtcagtgacggtcatgatgtatgcgatcaccagtgtcacgctcctggagaccccggccaggcagtgtacaaggcagctctcaccgcggagccggcactcgtgaatgaatttaatactttctttgaaatgtcttgtcaggttttgagatggtgaatccgctgctgggatgcacaggtatttaactccctccaacataggcctggcactatcatggacagacagaatatgtgtcaccttgttcttgctcaattgttccgcgtctctggcatctttgaagttgccgatgtacaggccgggcaggatcttgttcatcccattccccatggtggctgaaggcgaacccc

SEQ ID NO: 451106 - DNA, 1392 bp, Homo Sapiens
  misc_feature (273)..(282): n is a, c, g, or t
aggaccttaaaagaaaggtagtttttgtgggtagtgggggggtacaaatgccccaaaaggggaagaatggaccttttattgttcgcggctgaaaaacaattcctcttttttaaagtttcctttttgggtttggacaagccaggagaaaaggcaagtttccttctagggaaggggcccactggaagctttttgtccttcactgggtcctttgcaaattttgatagaagatgggggaatttcctttccattggaaagctgggagggccaattgannnnnnnnnnaggaggtagggtctggattgcggctccagtcatttgttgagccctgttcagttggagctggatgaacttcccaaagcgactgctgttgttattcctcagtgtacacgcattcccaaaagcttccatgacagggttggagttcaggatcctctgttctatcctctctgcaatcttgtggctctcccaagatgcaggtgaggtggccaccacagcatagaacttcattaggcagcgagacgtccatgtctttccagcaccactctctccactgacaacaatagactggttgactggttcaatcaggctcttgacatttcctgtaggtctgtttcaccccacagtgaacacatggggccttcagtttctggggctgaggcgcagcatggtactctctcattagctcgggcgagtagagctgaggaacaggcttgaaggggttcaaggctaccagggtgcagccagcattggtgtagaatgtgtctgccatgtaccgggcctgcaggcacctcaggactgtctctagtgtcacaggattcaccctggtgaggtcatccagtttgtacagcaggacctccccacccaggaactcctgcaggtcttctctgaggtactccctggcttggccatcagaccccggattgtggccattgacctgctggagcatcctccttcaaagtggtcagccagggttctgggttgcaggaggtacaaggagtactatccacctagtcatgggaccatgggctggggtatggttccaacaaagggctcagttctggaggaatctcagacaagtcactccagcgcctgtgaaagcgctctgcaaatgttattacgatgcagcatcagctcctagctggagtcaagtgagattagagcagttttctccagttctcccagctcctgctccagtcggtttcgcggttaccagcccagcctttctggaaagggtgtgaacacggtcccacggcccgagccgccgtgcttcaggcccccgcccggccagactggaaaggcgggcgggccaggtcaggcggcgggaagaacacgggcaggagagaaaaaaggaggggcaagagcgtgcagtgaggaaaggatcccgggaattcc

SEQ ID NO: 451107 - DNA, 729 bp, Homo Sapiens
  misc_feature (33)..(33): n is a, c, g, or t
gacaagaattttttgggtcacatcctgaagttnggaggcacgaagaactgtcctcgggtggagcatgggacctttattcgttaagacatcaggctccagatatgaactttcagcagaagcgcttgccgggagcaaagggacagaaaagctgagatgaacagtgcctggcagcaatcacagccgggcaagggtgctccgagcctcgcatcccccggccgggggcagctggaggtgcctcagaaggtgcattctgcttcctgcaggggcttgaaacaccaaggcactccagggatcctggagtcaaagcagcagccccggttgttgcactccttgggggtgacatgggggtagccgcagtccaccctgtccttggctggcacggcacactggtttgcagacaggcccacgtactcctcagcagagctggaggacagcaaggccaggaccagccccagcatgcagagcgctctggcagccatgaccaccgtgggctccgggacgcagctcaggactcgcttcatggtccaggaggcctcatttatgcaccgttgtttgcacagctgctctggattgtttgcttggggaaggctctccctcctggctgtggctgctcctgttctctcctgcatgcctttgtcaagctcccagacagtttttctctcccaaaggggagaggtcagttcagcccccactgtttggcagcaagcggtatcccgggaattccggacc

SEQ ID NO: 451108 - DNA, 759 bp, Homo Sapiens
catttttcaagctctaactgggcaatgccccacagcttcatgttaaatcttgccaagtaccatcatgtcccaaggtgatgctgattcctggtctcacagctgtcctggcatgagggctcctggccatgccatggttgcccgtcccacgtggccaggggagggagaggtcatgccgaaaacccatgcagccccattgggcagagactgcctgtcctccttttaagacaagtgatcactcttacaactcaccttttggagaaattgtggtttcgccttaaataggccctccatgatgcagtggtgacactgaagcagggatttgaaggaaaagagggtcgaggcttgcagctttctggcaaagagcattccaattacagaaaacagcaagtgcaaaggtcccaaggcaggaccgtccctgaggacgtgggctcttggggctctcttctttagcgggatggtgtcactgaggcccccaggcgtgcttttcaggtcggaagagtcgtcgtcaaataagtgcctcctgatcatgcagatcttcagggccaggaagccagcagatatggcgacacccacagcagtcccgatgagggcgtacttgaaatcaatttcagccccaggggtcttgcctgttgccagcacttgagctcctcctgcatccaggaggaagaggatcctcagcatgctgacccccaagttcatgctggcgctctgctcttggctcctggctcctggctgctggcagcgcaggcacaatccgct

SEQ ID NO: 451109 - DNA, 1079 bp, Homo Sapiens
  misc_feature (75)..(84): n is a, c, g, or t
  misc_feature (283)..(326): n is a, c, g, or t
  misc_feature (329)..(329): n is a, c, g, or t
  misc_feature (334)..(343): n is a, c, g, or t
  misc_feature (345)..(348): n is a, c, g, or t
  misc_feature (350)..(352): n is a, c, g, or t
  misc_feature (354)..(357): n is a, c, g, or t
ttttttaaatttctcccccggagggggcgttaatatattcttcgtaagagataattttttccccaatattttttnnnnnnnnnnagaaaggtgaaaggttcctttccccaaaaaggttccccagagtaggccagtttttcccaccccccgggggttttaacaaggggggccccggccctaggtttattattccgcccccctttaggggccccttttttcaaaaaaaaggggttgcggtaaatttgggcccctcgggggatattttgggggggccccccttttnnnnnnnnnnnnnnnnnnnnnnnnnnnnnnnnnnnnnnnnnnnnggnggggnnnnnnnnnngnnnntnnntnnnnggatgcagttcctttattatcaggaaaacagtgtcattatcaaatttctcctcaaaacgtatacagactatacatagcccccagcccatacctcccatccctggggcatcttgtgcaggggactgcagctcccccaatttttctggaaggatagaaaccccttaggaaatgcgatctgtgatggatgagattccctactctttaggcactagagttgaggaattgtgtttccccaggtagggatctcagtaagacactcatgttgcccacagccatgttggggggcccagagggaggtggggtatgtccagagctgccccgctgatcatgggaaggaggaggactcagcccctggggctcatccagaatagccacaaagtccagctgagtgttgtcaagatcaagagagtccagggggttacatacctgtccttcgggaggagggtacaaggcaggaccccctcctagcctgcccacctcaggatgaccacagctggggtttgtgcctcccactttgagaggcccatagcaagtgggcaatgggggcagaagtcgaggtggtgctgctgccctatgtgaagccctatttgcccccactacaaaattttcatggcatggtgaaggggtgggataggaacctgacttgtgattgggcaagttgggtccaaagccaggtccatatgtgttcactggagctttagcacggcttgatcccgagaatt

SEQ ID NO: 451110 - DNA, 485 bp, Homo Sapiens
  misc_feature (116)..(173): n is a, c, g, or t
  misc_feature (336)..(389): n is a, c, g, or t
cgacgagggaaagcggcgaggcggcggctgaggcaaggggtgggcggggggcgcagcaggcccggcaaatcacggcccggcagcgggggaggggagcccccggccgttcggcgctnnnnnnnnnnnnnnnnnnnnnnnnnnnnnnnnnnnnnnnnnnnnnnnnnnnnnnnnnntgctcaccagcgccgcgtcgcctgcctcatgccgccgctgccggtctccctcccgggctcccgggcgcggcgcgagcgccgggcctcgcgtctgctccgaattccttctcgggcagcgaccgcaaacacggatcttattattgttctcgcgcgcgctcagcannnnnnnnnnnnnnnnnnnnnnnnnnnnnnnnnnnnnnnnnnnnnnnnnnnnnngggccggttaattcctaggtacacggccggctttcgcggagaaaccgagcgcgaccagcccggcttctcggctggcgggcgggcggtgggcccgct

SEQ ID NO: 451111 - DNA, 1178 bp, Homo Sapiens
  misc_feature (311)..(321): n is a, c, g, or t
  misc_feature (561)..(570): n is a, c, g, or t
  misc_feature (617)..(683): n is a, c, g, or t
ctccggggactagctctcgtctatcgaaggcaggcggtgcgagtatgtggggcaaggcggagaaagaaccctctcgccggggcggcgtgtgtgatggattttcccgccacgacaccgcgcgcgtcgcgggcgggtgggtggcgttgtattggacccgcgggggcccccagaatatgaaaaatcccgcagacgaagataggaagcagcgtgggtcgggtggaaccaaccatttcttcccagaaagataattgtagtaatttcggaaagtgctttaagacaatcaaacgaagaagtgggggtctcctacaaannnnnnnnnnngcccagaaaaaatgttttgttctttcccatggagagcctccaaaacttgcggtttgcggggggcggcccaaggggttgcccacccccgcgggggggaggtttcgtttacaaaggagtccccaaaggggggccggttttctccaaataaagaaaggggttggaaacgcacgagcccggggccccacgggatataatttcccgtccctgggccgcgccccccctttgatcaagaaaaagatnnnnnnnnnnttaaccctgggcccccctggagggtatcttttgggcgggccccccgnnnnnnnnnnnnnnnnnnnnnnnnnnnnnnnnnnnnnnnnnnnnnnnnnnnnnnnnnnnnnnnnnnnctccagttactttgctttatttgcagactgaagtgggctacataaatccattacagagtcaacacatgtagacttggcaaaaaggacaatacaaaaatacaactcttgacagtaaatgagactgccctcagctcatcccagtctgtatcagtgggaagccagtgtttaaggtcaacataggaggaagtgctgtggaatgaggaggcatgaaggcttccaccaatgtcactgacccagtaaaatcctggactgagttgcatgggctcttcttggctgtgtggccatttctgccgccttcaaacttggtcacttcctcctctaggaaggggaagagaacctccccaagtcatcggacaccctccacaaggatctgagcaggggctgtgcagtcaaagccaagtgtagccctgggaccactgtgagcacccttccctggggcacctccagcctgggctgttgcctctgggcatccccgatccggggaattccggaccg

SEQ ID NO: 451112 - DNA, 533 bp, Homo Sapiens
ctaggaaggggaagagaacctccccaagtcatcggacaccctccacaaggatctgagcaggggctgtgcagtcaaagccaagtgtagccctgggaccactgtgagcacccttccctggggcacctcccagcctgggctgttgcctctgggcatccccgatgaaagggctaagagacacagcacaaaggatcaacctcttcaaggctggggggaagaggggaagggagactgaggaaggggttctgcctgggcctccctttggtagattccagaaatgtttgctgatgccaacttctgcttctagcccctggtcccttcttggaggaagcccagttagcctcttggttctgaagaactcgagtcccaggccatggaaggcatccttagtcagagctggtcccagttcactgaccagaaggtctgaagggctagcatttctgtggaggtgggcaggtcttctggagcagcaggcggctctcccagttcttatggctggagctaggatcctcctctgcctataactccctcaattc

SEQ ID NO: 451113 - DNA, 1022 bp, Homo Sapiens
ccgggggtttttccctggatgaaggccatttgcctggcaagttttcctccaaaggggatttttttactttgccagtttccaaggttaaggggcaggacccctgcgcccatcttgttcccggctagagaggccccccgggtacccagcttcaatggtgcagcggccagccttggggaccaggctgtcaaagaagctcagggtactgcagccggaaatttcacatagcctctgagcagctcataggcacgccccccttgaactcccgtgcgcggatgaagcgcaggaagaagccgctgtctttctcttgcaccctctccgccacgggccaccgccagctcctcccccgaggccgcctgcgcctgcaccatctcctgcagctctcgcactgcctcctcccgggtctcctctctctcgttcagctcatccttggccttctgcaaggtgtgtcggggcagctggctgcacgggccaaagacaggtccatggtccttggttgtgagctgctccagttgggcacggagctcctgttcctcttcaggtaccatgcggaacgtgcccaccccttctgacatgttgcctatggaagacacagagtccttggaaaaagaagggatctgctttctctgtcctggcctctccagccggccccttccctaggataggaagtcagggccaagttgtgacttcctgtcaggaccaagaggcagcctgctgtggcgcaaaagttggacctgggttcaagttcttctcttccacttgcaggctgtgagatttaaccccagtcttggttgttccctgccaggtcggcagctcctccttggggctacctggtacctgaatgtcctggagctctagaggttccctccgctggaggcgtggtccggtcagcaggttgggattagtgtgtcataaggaacttctcaccgcccacagtttccgttaaatcgggctcacaggaggccctcagtggggcaaaggaagacccagagagaaaggggagaggggagaggccatcccgggaa

SEQ ID NO: 451114 - DNA, 1256 bp, Homo Sapiens
  misc_feature (104)..(104): n is a, c, g, or t
  misc_feature (628)..(637): n is a, c, g, or t
tcccgggatatggagtgctccaaggtcatgcatagcagtcccagcagccccagctctgacgggaagcagaagacagtgtaccagaccctgtcagccaagctgcntgtggaagaagtacccgctgccggagaacgcggagaacatgtactacttctcagagctggccctgaccctcaacgagcacgaggagggcgtagcgccaaccgacagccgcctgcggcccgaccagcggctgatggagaagggccgttgggacgaggccaataccgagaagcagcggctggaggagaagcagcgcctgtcgcggcgccggcggctggaggcctgcgggccgggcagcagctgcagctcggaggaagagaaggaggcggatgcctacacgccactgtggtttgagaagaggctggatccgctgaccggggagatggcctgtgtgtacaagggcggctactgggaggccaaggagaagcaagactggcatatgtgccccaacatcttctgagcgccacccttgcaacaaatacaggcgcctgcacagcctggcccacctgttcattaatgcactcaatttagtactgaatggtctttctcccagcccattcccagcccttcctatttcctttcctannnnnnnnnnctccccacactttcttgggactcccaccttggaaggaggaagggctgacctgggttctctccagcccccaggtgcgccgggtcacccgtgccccttcattatggacctgggccctaccggaacccctgccccagttaccacaactcaggccggctggcccgggccatgggctgcgcaaatcaccagcccccaacccagggaggaactggcccctcctagggagcctcttcgacttttttagaaaaatgatctccatttctttccagccatgatgtttagtaaatatttttagtacccgcacttagcagaccgctttccaagtgtgctttcttgccacaaaagtgtccctggcaagagcccccttatttttaagacatcaggaagccagaccgcttttgagttgggagaattttgtagctcaacatatcaagtccctccatggtatctgagctgcccacaacccccacctgccaagcccccacgagccccaaaaccaaaagggggctggccccagccccagcagaacaccaaagttttctggaactccctccccaatttcccgggagggggggtactggatggtaccccccccgggggaattttgaaggggagccacccc

SEQ ID NO: 451115 - DNA, 1049 bp, Homo Sapiens
  misc_feature (636)..(636): n is a, c, g, or t
  misc_feature (807)..(807): n is a, c, g, or t
aaaaaaaataggggatttttttaaacctctaatcccttccctgaaattatttttaaggagagggagtttcaaaaataacttatagggatggcagcctcattagaaataagtattacttcctaagtaaacttagatgccatgagggggaacaccacttaataggatgtcaaaattctgataggtttgttaaagaaatcattaataataataattataatcatacttagaagtgtccacttaagctttatctcctctgaggtatgtatttttgaaaacattgggactcatttgaatgttgtaaagggaaaaatcaatttgtcatgttttctgctatagttactcctcttacatagctggaataaaagcaaatcagaaacatatgcttatagtatttgcccgttttaaactggtagatgcctgattatacatttaaaaagaaatcttctgataccattttattagaataggtaggtgtgtgtccacgcatgtgtttctgtaatacttaaaaaggaaaatctctaagattatgatttaggcttctattcagataatcaagaaagagcaagttagtaaaagcccattataattctttaaaatgtaaacactgctaccgtaatagcaggaaactacagaagnataactgaagaacatcaggattaatataaatccttccatagcccttctcaatataataatatatacttaggaccctatacttctataatcttaaagaccatctagtccaaacccatcgtataactctaaggaacagcaactctgagaggtgaagtgcctgctgaaggtcanctcagccagtggctggcaagggccaggatgagatcccaggtggcctgtcctgcccaggcctcttctcccccgaccctgttcaatccagctcaggtcccacacctgtaaaatgaagaggatggtggactagaggatggtctcaaaggtccctttgtagctcaggctatgattccacaggtaccaggacactatgctcaactcaaataaactctttcagctcagggatgagcaaaaaccaagga

SEQ ID NO: 451116 - DNA, 354 bp, Homo Sapiens
gggaggtgctggccgtggtgccgtactgcagctggtgctggatctgggagggcaggacagtgtggtggtgctgggccacaccctgctggccactcttctgggctgtgtaggacaccagtgagaggtctggccccccccacgggcatacagatcatgactttctttggaggtagcggaggcgtcagtttcactggcagacaaggcaatttcacaggggcgccaggatctggcccatccatgatgtctgacggttggagcacctcatatgagcagggatccctgggcattgggactggctccatttcggacagggcaggcagagacagctggctggagctcagggactgcccattt

SEQ ID NO: 451117 - DNA, 1102 bp, Homo Sapiens
acccacaacgcccaatcaacagacgacctgacaccggcccggaattcccgggatcacagttttggttttcagctcttcatgtctgtaagtgtgctttgggggaggctatgtctgtatggtcgattctcagttatcacatttgcctctcctcccactaccttcatgaacattcagtgctgtttcgcactgcagttagagagaagggacggacagttggtgacactcagccacattgctacttttatctgttctggtaagaagttagatagatggtagattgaagcaattgggtagaattagttgggggaatatttatgagttgctgtgtttgttgattagttccatctctttcccattttaactgagaattgattatatatagctctaagtatataggtatttaaacaaccccacaagcggctgtatcagtaacatttattaattccactatagtgagggaggatttccattctaaataccttattttgagggatttataaaacttagttgtaaaagagaaagcccacatagtgggaataaattgcttcagccatttttagtatttgagagcactagggaagatgtttagtagctgtgtggatgccttttttcacaccctgtctattgaatgctgcatccattcacgaagttaaatgttacatgcagttagtccttaatgtggactggatctgtacttttgtttttgggattaaaacattttaaaggatttttgaaggtgcagctactccccacgtggcattttggatacacataaaggtcatactgtgtgtgcccaaagaggacctggatttttccagcattttgcttttaaaaaaatttttaaaacctgtttaaatatttaacaccttccggggtacctgctgtaattctggcccattgaacccctggaaattggaatttactgcaaagtggatgcatacttccacttatgggggctttttcccctttaatcttggccctttaaatttccggtaggaaggaccacatccccctaaaacaaacggggtccaaaaataaaagaaaagggaaaacaccacacctacttttccaccggcccggggctccttacttttggacaagt

SEQ ID NO: 451118 - DNA, 1253 bp, Homo Sapiens
  misc_feature (122)..(200): n is a, c, g, or t
  misc_feature (204)..(312): n is a, c, g, or t
  misc_feature (358)..(367): n is a, c, g, or t
  misc_feature (371)..(527): n is a, c, g, or t
  misc_feature (545)..(664): n is a, c, g, or t
ccccttcccaccaggagaaaggtttgtgagatttttttattaaaaacaagaaaaaaacctctcccacaaaaaggggtggtggggggttatatttaacacaaacacaacccttttgggaatannnnnnnnnnnnnnnnnnnnnnnnnnnnnnnnnnnnnnnnnnnnnnnnnnnnnnnnnnnnnnnnnnnnnnnnnnnnnnngggnnnnnnnnnnnnnnnnnnnnnnnnnnnnnnnnnnnnnnnnnnnnnnnnnnnnnnnnnnnnnnnnnnnnnnnnnnnnnnnnnnnnnnnnnnnnnnnnnnnnnnnnnnnnnccttgaggggtaaaaattcttgtggggggatgtgccccaaaatttnnnnnnnnnnaagnnnnnnnnnnnnnnnnnnnnnnnnnnnnnnnnnnnnnnnnnnnnnnnnnnnnnnnnnnnnnnnnnnnnnnnnnnnnnnnnnnnnnnnnnnnnnnnnnnnnnnnnnnnnnnnnnnnnnnnnnnnnnnnnnnnnnnnnnnnnnnnnnnnnnnnnnnnnnttaagggccccccccccnnnnnnnnnnnnnnnnnnnnnnnnnnnnnnnnnnnnnnnnnnnnnnnnnnnnnnnnnnnnnnnnnnnnnnnnnnnnnnnnnnnnnnnnnnnnnnnnnnnnnnnnnnnnnnnnnnnnnnnngctgaaagtggttactttattggttgggaaagggagaagctgtggtcagcccaagagggaatacagagtcccgaaaaaggggagggcaggtgggctggaaccagatgcagggccaggcagaaactttctctcctcactgctcagcctggtggtggctggagctcagaaattgggagtgacacaggacaccttcccacagccattgcggcagcatttcatctggccaggacactggctgtccacctggcactggtcccgacagaggccgagctggggaaagttaatgttcacctgggggcaggaaccctccttatcattgggcagagagcagaaggtggcacagcccgcgctgcagcacttgaggttgtcggcgcattcgctgtccgagacgcactcttgcgtgcagttctggtcagcctggagctcggggcacacgccagtcttctctgctcctgtgcctgagactagggtgaagccgaacagcagcaggctgaggaggagggcggcggctagcgggcctaggcgggaagcaggcatggtgctatgcccggcgggcctcgtgccgattcacacccagctcgtactagcc

SEQ ID NO: 451119 - DNA, 1044 bp, Homo Sapiens
gggtccggaattcccgggattgagcctctggcagcccctggtcctggtgctcctggtgctgggctgctgctttgctgcccccagacagcgccagtccacccttgtgctcttccctggagacctgagaaccaatctcaccgacaggcagctggcagaggaatacctgtaccgctatggttacactcgggtggcagagatgcgtggagagtcgaaatctctggggcctgcgctgctgcttctccagaagcaactgtccctgcccgagaccggtgagctggatagcgccacgctgaaggccatgcgaaccccacggtgcggggtcccagacctgggcagattccaaacctttgagggcgacctcaagtggcaccaccacaacatcacctattggatccaaaactactcggaagacttgccgcgggcggtgattgacgacgcctttgcccgcgccttcgcactgtggagcgcggtgacgccgctcaccttcactcgcgtgtacagccgggacgcagacatcgtcatccagtttggtgtcgcggagcacggagacgggtatcccttcgacgggaaggacgggctcctggcacacgcctttcctcctggccccggcattcagggagacgcccatttcgacgatgacgagttgtggtccctgggcaagggcgtcgtggttccaactcggtttggaaacgcagatggcgcggcctgccacttccccttcatcttcgagggccgctcctactctgcctgcaccaccgacggtcgctccgacggcttgccctggtgcagtaccacgggcaactacgacaccgacgaccggtttggcttctgccccagcgagagactctacccccaggatggcaatgcttgatggggaaaccctgccagtttccattcatccttccaaggccaatcctactccgccctgaccccggaagggtccgctccgaagggttaccgcctggggggccacccaccgccaacttaatgacggggaaaaggctcttctggcttttgtcccgaaccgaagttggccttcgcagc

SEQ ID NO: 451120 - DNA, 194 bp, Homo Sapiens
tgtaggccggaggactgcctctcaacattgtggctcagaaatggattatctatcctcattgccttattcggagtactattatccaatatatgaaatcaaagattgtctcctgaccagtgtcagtttaacagtgagtagtttcagactgaatatcctgtcatgtgaaagctctgtgtctccgcctactaatcctg

SEQ ID NO: 451121 - DNA, 919 bp, Homo Sapiens
agatattcaataaaattggtgtttattggatttttgtttatgctaagtattatgtcagaggtggagaataaagaggaaaaagaaacaagtgtggctctcgcatcaacgacctgatcttgtcacaggaagtttttgagagctcacaaaaaagtacttatgtttctggatcttttgttttcccttggatcaaatcatgatacacagatggagctgtgtatctcacaacgtgggtagactgagcgcctcactgcctgcttccccacaatgttgccttcccaagtttggggagtggaggaggtgtctagggggcccgggaaggggatctgacatatccagagaaggctcatgtggggcatcccgggataagcctcaaaggtggtgcttctcagacttccctgcgcttatacctcttctggggatcttgttgaagcacagattctctctcattcagtaagactgggggtggggagggtatgatggtcaattttgtgtgtcaacttgggagggggggcatggtacccagttgtttggtcaaatgcacaggctaaatgttgctgtgagggtattttttgggatgagatgagcatttaaatcagtagactctgagtagaacagactattgtcttctgtagtggggacgggcctcacccaagcagttgaaggccagaagagaaaagaccaaagtcttcctaacaagaagatattatggctccagacacactgcctttgtactcaaggtgcaacatcaactgttccctgggtctccagcttgcgacataccttgcagatttcgaaattgtcacaactgcatgagccaatttattaacagaggaatcaatggatctctacctctatctccatctctatcatccatatccctgtctctatcccattggctctactactctgaaagtgggta

SEQ ID NO: 451122 - DNA, 1327 bp, Homo Sapiens
  misc_feature (839)..(895): n is a, c, g, or t
  misc_feature (1197)..(1197): n is a, c, g, or t
tggaccggtccggaattcccgggatcggtggccccgccgccactccctccggctccctccctcccgccgcggcgcgcatctcattccagccctcattccgcgcattccagcgtcctcctcgcacactcgaggccagggggcgggagggccgcagctccggcgccgccgcgtcccgccagaacgatcgccgcggccggaagagttggcgctcggggcggactccttggaactggcttagcgcacccatcccaccttcccgcaccctgggaccggtccaacgagcgctcctccaagcggagccttggagggcacggccggcaccattacctccaacgagtggagctctcccacctcccctgaggggagcaccgcctctgggggcagtcaggcactggacaagcccatcgacaatgacgcagagggcgtgtggagcccggatattgagcagagtttccaggaggccctcgccatctacccgccctgtggcaggcgcaaaatcatcctgtcggacgagggcaagatgtatggtcggaacgagctgattgcccgctacatcaagctccggacagggaagacccgcaccaggaagcaggtctccagccacatccaggtgctggctcgtcgcaaagctcgcgagatccaggccaagctaaaggaccaggcagctaaggacaaggtcctgcagagcatggctgccatgacctctgcaaataatatctccgtcacggatttccacagaaacatgggtccccggcccggggacccggcccgaccagtcagcctcacggcttccttccttcccgatctccccgcccccaaaattttcctcctttattccnnnnnnnnnnnnnnnnnnnnnnnnnnnnnnnnnnnnnnnnnnnnnnnnnnnnnnnnncaaccctacaccgtcgcattgcatccacccgttttgcgccactcctacccttatttcacttacaccattttacctcacagcattccgctgtcacccaatttatccattccttcccacatgctacacaccttccctttcaactcaactcacatttacaccttcccagccccattccgctcgcacgtcccacacttaccatcccacctatgtacgaactgtgcacgttcccacatattcccccgtccataacattcttcgcaccacacgttgtcacgctatctatgaatatttcatcacccgcnccccacagtgagctctttgtgcggctgtcttttccccccgccgtaatcccccgctcaccactttaccacccctacttttgatcattccacaaacattggcacccttttcaccatccatcccccgtatctg

SEQ ID NO: 451123 - DNA, 1045 bp, Homo Sapiens
  misc_feature (174)..(256): n is a, c, g, or t
tgggtcgttccccagggcttgggtggtgtaaatgggagagcatttctcgggtctaccatgaaacgccttaaacctttgttgggggctaaaagtttcctttcccccctacaaccttcctggaatagctgggactacaggtgcaggcccaccaggatgccccaggtgaatctcgannnnnnnnnnnnnnnnnnnnnnnnnnnnnnnnnnnnnnnnnnnnnnnnnnnnnnnnnnnnnnnnnnnnnnnnnnnnnnnnnnnaagatggcggaattaaatagttggtgcttagtgtgtacttcacgtggcgctgatatgctgccttgcgttttggtcttttcatgtgcatgaggtgtgaccaagccttgatatgattcattatttaacaagaataccacaattcatctattcaaatgagggctgcgtcttcaacgccttcactttgcaggactggatgcttagctcagtcattgcttgaaacacttttggaatacctctcttggaaacaactttggcatcgatagcactttcctttcaatatcttccacggtagcaattgtttttcatttatgcagcatttatcatgcacttccctatcccaggcaccaggctggattcctccaggaatagggatccccgtgttttcccgtcagtcccattctgggaaaactcctccctccgcgcgctccgctccgctccgctgggcgcaccggggccggtcggcgcggggtgggcttggccccgcggccccgccttcactgcgccgcccgtcggccccggccggagcccggctctgcgcgctgacgccctgtcgtccccgcagaacgatcgccgcggccggaagagttggcgctcggggcggactccttggaactggcttagcgcacccatcccaccttcccgcaccctgggaccggtaaggctggggcgcggggacttggtaggactttgccggagggcaggagtctgcgcggtgcgtgcggagctccctcccgggacgagactggcctcgtgccgagttcgccacccaggcctcgctacctaggaccg

SEQ ID NO: 451124 - DNA, 1107 bp, Homo Sapiens
  misc_feature (81)..(89): n is a, c, g, or t
  misc_feature (288)..(288): n is a, c, g, or t
  misc_feature (320)..(320): n is a, c, g, or t
  misc_feature (542)..(571): n is a, c, g, or t
agttttgcccaaccgctgttacacactgggtttagggggccaaatcttttataaaggggataatggggccaggggggggcnnnnnnnnncccgttgatttcccccccctcgggggccaaggcaaattctccctaccagacaagccaggttcccacccgggcgctggtttcatacaaacttgtgtccagcccgcacgggggttctttcgtggggatccaaattcggaagaagcctgtagtacttgaagcgcaagcccagagggggtcccccgggctttgaatggcctgntgcaggagacaccggcgaagagtttcagccanttgcggtggaagctgggtcttgtctgacagggagcctgggccgtggcagacgctggagccaggagggggtcgggtggcggctggggccggctcagcatgtggtagcaggcctcagtctgggcgctgtccgagaagtgagctggcatcccccggaacagtgcaggtgccacgcccccagccaagacaaccttgctcaagtcatagagctcttcctctggctcnnnnnnnnnnnnnnnnnnnnnnnnnnnnnnaggagcccggagcagggacagctcctcggggtgccggatgctgaggaggcggcagatggcagccacagcctggaagaggggctgggagaagctggcacggaggcgcagtgcgcggcggttgggcaaccgaaggatgacgggccggtgctggggcccaaagaagaggcgtgcgtcggccaggatcccgtacttgtccagtgtccagtgggtctgcagcagccactgcctcttctgttcccaccaaatagcatggtctgaccagtcctgcttgcgattgatctgctccacaatcttcaggagcaccccgccgatgtgcgactccccagtgacccgcagggtgaccgactcggcctctgggtcctcctctcccacaaacacccgcagctcccatgacgagtcgatgtagtccccggaggctgtcttcatccccgccatggctgcggctgctgctttcctggcaagggctgggggctgcaggtgggtctcgggctacacccctgtgggccgtgggcttccatcccgggaattccggaccc

SEQ ID NO: 451125 - DNA, 1308 bp, Homo Sapiens
  misc_feature (1229)..(1265): n is a, c, g, or t
gtcattactgtaggcaatttttgtaggattttatatactctgggcttccaatcgctcttggctgccttgggtaatcagcaccagtaactgctcattgttcctttgcaaatttatctgaaatccccggccatctgtcattgtctgcagctgtccacgcatttataagccccttcttattaagacgtgcatagtagggataccattttttggagtcccaaaaagagctcggtgagtagaggaagctgtgatttgctggtttgatataattccaccttcaattcccagtgggcctgagcatttgtattgacaatttcttcccataaattcgcctgggcactcacaggaatagttagctacaagatctgtacatattccaccatttttgcaaggctcaacttcgcattcatttatgttgtgctgacagtgaatcccatttaaatcctcggggacatttacaaacatagcctatgaatgtatcccctcggtatgcttcacttatttcacaggttcctccattatggcatggattaggagtgcagggacctgctgaagttggttcttcttcatctgatgcaacctccacaacactagaacagttggggtctgtgaagccatctggacactcacaggaaaaggaaccatcagccaatcctggcaaacagatacctccattttcacatggattgggatcacaaatatcacctttgccgaactgggggacaccgaggctgagcccgaccaagagccagacggctaccgagcgcttcatgatcccgtctcccggacgtgaccccggctggtcaggggtcgtcgcggagggcagtgtagccgaggtggcagcgcagggcagcagcagactccgcccctactaaagaattcaagaagacgttctctttcctcagcgctttgttaaacaaattcttggagagggcgagagtggtgactaaagagaggagcctttcctccccttttgcctgcgctccggcgcgcggaggtgggtgagctccggggagccgccggcgggctcagccctccgctgcgggtgggtcccggcagaggcgcggcgggcggggcgcgggctcccgcggccgccccgggtctgctgcgcgggcaggcagacccaccggcagacaggcggaccgggcgctcggctgtcgctgttctccgcgcggcggctgcggggcttctccgctctcgacgaattcgagctcggccgatttggcctgatnnnnnnnnnnnnnnnnnnnnnnnnnnnnnnnnnnnnncgccgccaccgcgatgagcccagttccccaagagcgaccagcc

SEQ ID NO: 451126 - DNA, 1112 bp, Homo Sapiens
aaagaacacattgttttttctttcacggcccttggggaggtttagggattaaaaccaattccatgggcgatttttccaggttttaaaacccatccggcccaggtggtttttcaaagaaattgctcccgtattcctaattaccaagggaaacaggattcttttttggttggaggccaaatataatggaaaactttctgaactcctaaaaattaaataaaaagtatttttaggaagcctttaacaatttggtattttcaaggccggggcggagggggctcaacaaaattaatttcggtcttcaaaatattttcttaattatcccatacttcgcagccaatattacgtggaacatctgatagaaaacctaaagaaaaatagcgcgactatgtgttagaacattcgttattaaaaatctttttgttctttcattttgagagactccaatttggtgcattatgtgtacacgtcagagccaacttgttagtaatgaagttatctgtacatcaatgtgttagaaaagcatctttgaaaccaaacgcgcagctactcctaacagatttctgtggtcatgtatttaccaagaaatttaaaatatctcaaaggtcctaacgtaaatattctaagcatatcattacgttttaacattcctatttttaaaaaacttggccccatctagtcctgaccatgcctcagaaaccaaaggattaaaaaaacagcgtttatgtcagcgaatccgcgggtttttatagttaagggagggctttgctcctcacactccacccgcgaggagatctgcggacgcacacaccacgcctaggcctcgcgcgctcacacacctgccggctccaccccgagggtaggcatcggacccaatcgggggtcgtcccccatggggagcgcgcaggtggggatgggagtagcaggcagggcgggggcccacgggcttctcactgacccagtcccgccgtcggcagccgccccggcgcccgtgacgctcctgcgggttcagtcctttggcctcgccccacgcctgccctctcggcagccccactcacaagcccagctcgcaagcgcaggcgcctctcttctctagcccgaccgccaactccgct

SEQ ID NO: 451127 - DNA, 1071 bp, Homo Sapiens
  misc_feature (62)..(80): n is a, c, g, or t
cggttccgggcccccagtaggttccgggaagcacaggccttttggtgagggtctcccgggannnnnnnnnnnnnnnnnnngtggccaagagggggaaagcccccggccccagcagggttcttccttgttaaacttgcggcccgggccacagaaacggtgctggaaagccctccataactgaggcggttgtcattgaagatcttctgggcccggaagagggaagtgctctgggagcagccccccggttggtcccccacctcaggcatgactttcaggttcagagtttcacacatcttctccccagggcacccgctcagccaccacaaagggcacgcggtccatctcagagagggcattgtcccacaggatagtggcttgggcattgttgtcttggttgccatggacgatgaccaccaggggcagagacagggcctggagctggatggggagtttgccggggccaagtgtgaagctggcagagaagagcacagcgcacttctcctctgtgacagactcagtgcccttccgctcacaccgcttgatcttcttgagaagcaggttcttgaacagggcagagcagcagttcccaggaatgctgttctccaagggcacagtgttgttgatgatttctccagtgctttctgctccagccccaggaccctgaggcacactcagctcccgcgcctgcttctctgtcaccatgtcggccctgaccagcggaggcttggctggggcccccaggaacctcaagcccaacaggaatcgaactccagcctggaacttggtctgagtcttcagtacctgggggggctgcttctccaccaggaagcaactggtgacgagggttctcaggacttcatccagccggccagtcagcgatgcccgggtcttgggctcaagctccccaccagccgcccctacctcctgctgtagctgggaataaatgtccaccaggctttcacacctctcctggagtggggccaggctctcctcaaacggtgcgccattccctgccagctgctgctgccgtttccaaatctggatcctcttcatcccgggaattccggaccg

SEQ ID NO: 451128 - DNA, 918 bp, Homo Sapiens
  misc_feature (210)..(210): n is a, c, g, or t
  misc_feature (285)..(285): n is a, c, g, or t
ggggtggactttgggatggggaatcccctttttcccgggggaaggtcccaattgggggttcgggtcccatccccaatccaaggcaaggtttccagggatggccatctttcaaaacggacccaaaggtccaagctttctggttctgaaggtccatgaacctctcccataaaaaattacccccgaggtcattcagggacatacttctctccnttctttctcatggtcccagatacacagcatcatcttcaccaccaaggatgaaagagaatgtacgtgtctgtttcntgggttcgactggtttcgaagtacgccataggggagtccagacagcaacatacatgcggattttccccacaatacatttgggggaagactggatggacagccgcacagacctgtcctctctcatgacaatcttggccccccactttccactttgtaactctgagactataggcactgggatgtaggttcccttgttctcctgtgggtagcgaccaatgacgtattccaccctgaagagatcccttctggggtcatatggacgactgaagtcaatctgcacatagaaagactgccctctgcggacaatcagcttgttgttttcatacttgtcagtgtggtggtccaccttgttagtgtcccatctctccttgaacaggtgaacgctcgtgacattaagaaactcttgcaggttgacgccccggggcaccacgccctgaagctccactgtgggcaggtcatcttccgctgcattagagttattgggtggaactgctcttctgcctccaaaggcggtcctggaagtttctgacatttttgactttacaaggtcctgcaggcgctcccctccagaggtgccctcgcgtgggcttgctctgtgcgcctcggggatcccgggaattccggaccggtacc

SEQ ID NO: 451129 - DNA, 599 bp, Homo Sapiens
  misc_feature (427)..(435): n is a, c, g, or t
ctcgcgaacgtgttatccctttgcagattttgccctgtatcctgtctctgccataaatcagctgccattaaatgctgagtcctctgagtcttcttagcaaatccctgaacttggggacagtgttgaggtcccccgcgacacacatactcgaagatactgagtaaaagatatacctaccatcttaccaggccatgtgctcttggaggaaagtcattattcatacccagccaaatcttgcatcagattgtggaaccacatctaccaaaacatttgataatgaaaaagttagtatgttcatgatcaggcagagttttataacatgctttgaggaaacacatgtcttgctagatcatgcagttttgatattgctttaagattcatatctaaagatagctcttgagtaccgggagagggatttctctctcannnnnnnnncttcaaataaaagtagcctataaaaaagacatatgccactcccatgtttaaaatatttttttgcttctgagtcacaactcacacgattcctcacacttaccagaaagccccattcattgcatctctttaccacgacgcgcctctacctagtcttcatgcctcct

SEQ ID NO: 451130 - DNA, 1021 bp, Homo Sapiens; identical to SEQ ID NO: 151929
  misc_feature (30)..(30): n is a, c, g, or t

SEQ ID NO: 451131 - DNA, 1130 bp, Homo Sapiens
atggatatgtccccttggaggagaccaggataatgtcctttgtttccagatatgtgacaccaaaagggaacacaaccttgtagctttcttaatatattgagacatcctttgttacccgttgtaaatgcgggtttaataacagtgtccactaatttgaaatgattttcttggattcacataacttgcttttatattataaatccaggggcatgtccttttgatataaacccatctgctgtttaattttgtttgttttcattagaagaggatacataattggtcataaaagtcagatagaaaaatccattagtcataccaattgatatgaatatctgaatatttagtgcagaaaacacttcctaaatcttccttttgtgtgctgataaagtattttcttttctttttggaaattcatgtttcattatgtcttccagaatcagtaacttccacaattctggtatatgaaagtataaacttccccttttaaaaattcttttcaggcttttacagttatattgtttttctttttgtggttattttatgtagcatcttcttaggatacagttgattttttatattccatcagtaatgtagacctattccctggttttaactccttaatgtcttaaagtcgtgttacaagaacatcttgcagttcgtagttcagacagctagggagatgctcagtcaattgcattcttcatattgtcagttgtaaatactgaattagctgctattggccctctgctaaagatttgataaattcttgatgtagttgaagcatttccagtttggattgattcattttgttcacttgttagtagaggactgggggaagagggtcataaacatctcttcgaaaatgaccttaatgaaaatatgtgtctgtagtgtgccattgtttcagcagtactgctaatgtatggaacatgtagtgctgcttagaggctgctgcagtctctcactcttcctactgtggaatcaataagcatctgaaaatacataatgaaagtaatttaacatactgaaggcttcttgtctccagagacaacatttagattcagtctttctaaaaaggaacggcactgcttttcagaggaaagcctgttcatcccgggaattccggaccc

SEQ ID NO: 451132 - DNA, 1106 bp, Homo Sapiens
caattacctttactggatctgccaagtttgttttgaacaatcctggttcaatgcatgagacgtgcacaccaaaagctttcatgtcccgtcttaagctgtcattgaaaccttccactgcatatttggatggagtatagccccctccaacgattgcaaggcgacctccaacactggagacattaataactctcccttgagctttcttgaccaaaaggaagcatatttagtgtcacactgatgagtccaaacagggttcacttcaataggttctctgtagtcctctagtgtcagccagtcagtgggagccagcacgccgggaacaccagcattattgatcagaccccagagacctttctccccaacttggttcttcacccactgggcagtcctcttgacattctctgggtcggtcacatccagaagcacagtacgaagtctctctgaggtttctgcctttaaagctgttgatcctgattcagtcagacaggcagcgattacatgaaatccctttttatcaaaagttctggctgccaagtttccaaagcccgagtcacatccagtgataaaaatgtacttatcagtgatgtcttcaatctttagttttcctttacgagtccacagaaaaccacagaggattaggaggcctagcacccaaaagagcatttttccccctgtgtgtgataggtacactcctttcttgtataatacaagaagatggtgtccttattaaagatgaagtgggacacagaaactgttggtggacttgctcagctgatggcagctttcctgctgtgcacggggaaggaagagttgtgccaccctggccaggctgatcctcttgaggtcgaggtgcctgggtttccgtagagctctgagtactacatgtgtgaggaatcctcaggttctctccttgctctgtgagtcactcccattgtgacacaacgtgatgactaaatatctcttgaatagctcataaaagccaagaagtccagtgtgcaggctgtggtgggtccaacttctggagtatatccagtgtcactcttgtaaggctgaccaggagggtgaggctggtgatagagcatgcacagtggcatcccgggaattcc

SEQ ID NO: 451133 - DNA, 972 bp, Homo Sapiens
  misc_feature (235)..(235): n is a, c, g, or t
  misc_feature (332)..(332): n is a, c, g, or t
cggatttaaccccttttcacccaggaaacctccacgacccctgggaactaattcctggttttatatcccacccagccaggcacaaggtgcaattttctcccattttttaagggaagaaaaagtttaagaaccattccccttttgttatttgagatgtgggctactttcttcataggggctgtgatgtcggtgggtaaggacagtggggagtttctgtttcctctgcacggacccnggtgtggaaatcaagcatagaggctgctgcctcactcctcggcctcttttgctttctctccagcttctccaatcccattttgggacatgcggggtcncaggctcctgagcttccctaacttcccactggggaaggcagggaggatggggaagctcccagtgagggaggcgagggctaagcccgtagcaccgcagcctcgagtgtggtcggcccgcccagggctgctaatggcagagaagccgcatgctgggggatggcaccctcctgtactgggagaagcctgatgccacaggtcagagtctgcagcctgggaggggagccggaagctaacatgaaggcaaaacactctgcatgaaagcacggcaatgaacctccaaccacgactgactcctccacggcagccaagctgccaggcacttttaccacctaaaagctaggaaaccgaccagattcagctcgccaccattcaagaaaggacagggccttggctgctcggcaggtcccggggattgcccttgtggggaggatattttcagccctcatttccccggtgtcgccagcagggggcgatgtgctcacaggctcggtcaggggagaacaggcaccggtcacccgcgggatgggtccacaccattccagcggctctctccacggaagtgggacactgccgggctgcactatgtgtcactgaaattcagggagacctctcagacggggttccagatcccgggaattcc

SEQ ID NO: 451134 - DNA, 1011 bp, Homo Sapiens
ggaaaggccccccccagttcccatttttcccggcaagttttccaacaagcgtttttttgagttccccagatggtgacccacccggctgtccaggggcttttccatccctttttccccttccagcgttttttcccgagggtacccggaacccccttccagggtggaccagcaaggcattggaacgcagtctgtgtgcccccggtaatgtctctggccgccacctccaggaccccctgggcctcctccaggccggtacagcaccaccacacagggcgataaagtagaccacctccccagagcgcaacacaaacagattagagcgggagtcacgacccctgtacccataaacccagtcaaggctgagggtctctggcggtgggccactcggcagctcctcaaggctgcggatgccagacgggatgtacatggtaatggggcgccctcgaaggaacatcttcactgagatgccttccaaattgtaattgctcctccgagatccagggcccccagggctggagagggggtcttttcccccacggctctctgtgctcccggaccgcactaacaggttggcggaggagattgccttcctggagagcttctgccgaggccgctctgagggggatgaggaggaggaagaatttcttcgcggcgtgtcagcacgctgtgggggctgcaagggcctgaggatccccggggggccaggggagccagcaccactgctgctgctgccccctccttcagattgggtcccgctaggctcttcgctggccccctgaggggctgggggtccattgctcaggccagggggtccaggggatgacttgagctccacctctgtctccgtctgggtgcctcggctcaccaaggaaggggtgcacgtgggtggcagtcctgggggggctgcaagactgctgtcccccggaggagctggtgtgccagagccctgcagggaggaagggggcacctgcagccgcagcaggcgaagggcttctgccaatcccgggaatt

SEQ ID NO: 451135 - DNA, 981 bp, Homo Sapiens
  misc_feature (344)..(344): n is a, c, g, or t
tccccttggtctagaacaattaaattattatccctcagacaagtacaagacttgtcagtagactgtggggaatttgatgagtgaacaccagggctagtggcatttcgtttttggggaagacagtgggcttggccgtggtgctggtggtttgaccggggcagccatcttgacagaccttgacagccggaaggcgcaggcgatgtccccagcagtactggcgctgcgctggaaggcgggttcgggttctttgaggagctgggtgtgcagagggctgggagggctctgacgtgggggccacccactggggaggttttgaggggctccaaggtgtccagaaccacgtncaggggtgtgtttgacactgctctgccgttctagttcccgtagctcattcagggccgagttcattgttgcctcaatatcctgagcaatgacctcagggtccatgggccgatggttattgaagctttttgaccttcccgctgtggcattcttccggatctgtggactatccagccgattcttcagggatgagtggcggctgatggagttgaggctcccgtgcccactggatggaacacttatctggccctttctttggggaggctctggctcatgatgggctgggaggatgggcggcagctagcccccacccctggggaggaggagtcagtcagggaactgctcagcccatggctgtcactccgaaaagttttccggatgctcccagattctggacgcttcgtttgcttgttgatgtttgcaagataaatatcggctacatgacccccactgggacagctggcccccgctctggctgtcaccttttcttcaggtggctcagaaatgacctcaatctcagacttggggctggacctctccacgacaccgtcctcgctgggggagaaggggcaggcaggcagggaggagggaaaacaacaacaacacaaaaagcagcgttaaatcggcaagatggccccc

SEQ ID NO: 451136 - DNA, 1628 bp, Homo Sapiens
  misc_feature (241)..(241): n is a, c, g, or t
ctgacctcttcctgtttatctccccatatattcagcataggtttggatccgatagctttctgcatatttgctggtattgacagcaatctttacttgctcgggctggctaagggaaacaaatgctgatgtgtcatcaatccaggatatctgaatgttaccaaaggcactgaaaagctggtaaaggtcgctggttttccattctttggggaatgtcaccatggagaaacatgatcacgtttanggctgcaggtctggtccttccaagttttagataggggatatccatgaccctcataagaaataacttgttaaaaaaaggttcaatgagttttgatctggcagacacatgaatttttggagggctgagaaaagaacctaggtaattggccatggagatgaagcacagccctgtgatgtaggcatcgtagcctgcctcgtggagttgttcagaggctgtgtcataacttggaaaaccttcggcactttcaactttaggagggttgaaaggtgtctcttttaaccgcttttccaattccgcaagggatgtgttgttaatgatatccttaaaaggttgtgtgctggccatcaatttagtatccaagagtctggggaaaacacatgttgtcatctctttaaactcacttaagtccgcaggcagagggcagtagaactgatgaactgtgtgcatgacgtccaagagcatattgtgtccaataacaagttttcccgaattagcaatggcgtgaatgactctagaaaatcccacagcatcattcagctcctccttttcagtttctaaagtctcaacatgaatgcctttcggatacttccagctcaaagtctgataaattagttttctttggaacccggtaccatggctctaaatcccaagttcttgttttcttcactttgtaataaatcctctattttctctaccacttggtcaataaacttcttttgatcctcaggaatcgtgacaggacattttgaagtgttaggagatacataggacagagctcctgcaccattcgcctgtgaacgtttttcatcatactgctctcttaactgtctttcttcttcctgatttaaatatggaattccatttcgaaaaactttattaaaatcaaatccctggcttgctagaaagtcaatgctggagctctgacaaacaaatttgacatctggtgaggatctattgaagggtttcgggaaaacatagaagttaaatgacttcggttatatactttgaatctgtgtagtcatacttaaaagtgcaaaggccaaactgaaatagcaaaaagtccatggaatgctttttaagcttctgatacctctcttctggagtgtcaaaaccatttgttaatgcagagactgaaggtccatcactgattcctgaaaactccccatcgatggcgaagaagtcggcctcctctatggcctggtacactttgtgaagattactcttaaaattgctcctgattatctccattctgcagagtggccggaacctttgccccacccgggcccgctgccgcctcagcggttctactcgccgaattccgcggcgactgcggcagtagctgaggcagccgcagcggtgacgccggccgcgatcccgggaattccgg

SEQ ID NO: 451137 - DNA, 500 bp, Homo Sapiens
  misc_feature (20)..(20): n is a, c, g, or t
  misc_feature (192)..(231): n is a, c, g, or t
actagctgattcctgagaanaacaggatgatttgagaatcattttggattgttaaatccagaaagcaaagtgaaagcacaaatgactttgatgtcactgatctttttcttgaatttttattaattatgccaccctcatgaatcagaagtagtaaaattttgattgaaaagtttttttaaaagtaaaatctgnnnnnnnnnnnnnnnnnnnnnnnnnnnnnnnnnnnnnnnntttaaaagaaagacaaatcctcaaagaaagcttacctggggaaaacacatgttgtcatctctttaaactcacttaagtccgcaggcagagggcagtagaactgatgaactgtgtgcatgacgtccaagagcatattgtgtccaataacaagttttccctaaagaaagtcaaggttagaaaaaagacttctacattcgaaattatactggggtttcagaatgtatagttcagattccaagaggactttgtactaaactcgctttccagac

SEQ ID NO: 451138 - DNA, 959 bp, Homo Sapiens
  misc_feature (129)..(129): n is a, c, g, or t
ccaagttcccaaaaaggcccaggggcaaaaagggtccattccaagccccccggggccgttttattccccattttgaaatccctgcccaaccaaattttggtattcccttggtttgttttctgggaaatngccaggttttcatgacaagctgtgaaggacttcttctgtccatgttcatctctggatccgctgggagggcttcacttttttcccgcttagttttgtactgctgaaaacaggcctggacaagattctcaggggaccatattcctgatgagattctagcatggcatccactgtactgacttcaggggtgctgcctgtcctcgcaatttcacccactttctgggtgacaccaggcttgatgctcaccaccagcacaatacctagaataacagcaatgagagtggtacagaaataatacacgacagcgcgcagaccaatttttccggatacgttggaatccagtgcagcaacacctgtaatcatgctggatataattaatggcaaaatgatgagtttcagcatccgcattagaatttctccaggaaaagcaaagtagaatttctctagagttgagaggttgctgtgttctcgaaccaagactcctgtggtaatgcctagcaccaccgcggccacggtggacagcaacacccagttattcttcaggaagcgcttccactcgcatcctttcctcgccggtttccccatggctgtcgccgctattgtgcgctgggctcggccgtgcgcgcgtgggctgggcgacccggggactgctggctgctcggcggcgcggcgagatgcgggtgcacaggggagaggtgagagccggccgctgcagtcgccgccgtcaccaccgccgttgccgccgccacccgggatcgcgcaccgcgcccgccgccctgccagcccggtagttttgcgtggcaggcgcgcccggctcctccatcccgaaatcc

SEQ ID NO: 451139 - DNA, 901 bp, Homo Sapiens
cgatttcactccccatggtttcttggcttcgtaataattattagaaggggaaagtaacttggtgtgatgttcacgcatgacttccttggataccttcatcggtcaatgctgcttgcagtcagcctggctggcttcagcttctgctgatgatgtgtatgagtgctccccgattctggtggtgatcccagtcacaagcagacgctgcttcccagccctaccccagctgcagtaagggccagactcgtccctgctgtaaatggtgcctatacaatgaccagcaagggacatgatgccagaggcagcgcccagtggaggctggacacccacattggagatggtgcagcttctgtggacctcttcaataccatttgcaagggcacgaagcttttttatggactcctggatcttcctcttgacttggggaaactctttctaaaaccattccgtaaactgctcatctttctgctgcacatattcgtcctcaatagctgcatatgttctaagcttcttcagagcttcgtagagagcatctgcctcatccctgggcaattcagccgcagtcacgaatctcttccaggcttcattgttagtcagcaggatttgcagatgcactgggctgactctctcccggaagtatttggtggcctcgttcagtaaagcgtttcttttctgagtccatggtgccagcagccaggtcactgagagactttccttggagctctccagtcactgacctgactggaagggttcgttttttttcttaacccaaggaagcttctcttgaaagagtgtgagcaagatccagctgttcctgagctgtgtggatcccacctccagccgtgcctcgtgccgaattcgccacccaggcctcgctaccttaacgaccgtagtagttacgttc

SEQ ID NO: 451140 - DNA, 700 bp, Homo Sapiens
ggttgtcccgaggctggttgcttttagtccaagtgctgcctcccacacctcggatttcagccaggctgtgccactggagggcagagtgcacccagaaaagaacacgctttactgaagaggccaccaaatacttccgggcagagagtcagcccagatgcatctgcaatatcctggtgtactaacgaatgaagccgtggaagagattcgtgcacttgcggctgcaatttgcccagggatgaggcagatgctctcatacgaagctctgaagacgcttagaacatatgcagctattgaggacgaatatgtgcagcaaggaaagatgaagcagttatagggaatggtttttgcaaagagtttccccaagtcaagaggcacgatccaggcagtccatagacgaagcttcgtgcccttgcaaatggtattgaagaggtccacagaggctgcaccatctccaatgtggtgtccagctccactggcgctgcctctggcatcatgtcccttgctggtcttgttatggcaccatttacagcagggacgagctctggcccttactgcagctggggtagggctggcgagcagcgtctgctgtgactgggatcaccaccagcatcgtggagcactcatacacatcatcagcagaagctgaagccagcaggctgactgcaaccagcattgaccgattgaagggtatttaaggaca

SEQ ID NO: 451141 - DNA, 986 bp, Homo Sapiens
ggaaaggcaaaaaacaacggttcctcaggaggtcccttaaagcccccgcaacacacagctaaccctctgcaaaagaggcctgttagctccccctcaggctgtgccaggagatggcaaaatcctgacaggtgtcctccatgctggcatcaggcttggctctgcaggctggctcatcgcttctgatgggtgagggcaacacggtgtcggactgcacaaatcccctccggtcaattaggctgggaggtagggggccacagagcacagcacagcagttggtgataatacttttatggctgtaggggttgacagaggcctcaccgcccctcttgctggaccacgagcctttgatgtcttcattagtagtcaggttggaggcgacgaggtacgtgtgaaaccctgagaggcccagaatggaccagatggagaagaagcagatcaccaactccagcacgcttgctggtgtctccttcagagtggagaggaagttgcttccctgagcgcgcaacgtcaggtgggtgaccacacaggcgaagatgaaggccgtcaggaatgagagggagagaataaacgcgtagaagaagcgatagttccgtctccccacacagttgcccacccaggggcagtgatggtcaaatcgttccacacagttgtcgcagacactgcagtgtgaggttcggggtggccggaacatcttgcaggtgaagcagtacttcagcttcaccatctgcccgttgatcagcacctcccgggtccgagggggtggccggtatgtagaactgcctgtgttgtcgatctgtttctccagggcggctgcttcacagacagtggcccggggcaggatcccagggtcggtgaagcttgtctgcagcaggcagctcatgacgaagaagaagaggatggcagcgatgatggggatggcaagggtcagcttgcgagccaggtagggacagtcaaagacgaaatcccgggaattccggaccggtacc

SEQ ID NO: 451142 - DNA, 1096 bp, Homo Sapiens
  misc_feature (287)..(287): n is a, c, g, or t
cgggcagactagcagcggcgggggaaggggttccacgaaaaaggggtggcgccaggggttatttgtgggagggtggaaggggcgggggaataggccccggtgcccccccatttacattccgccaccgggaaaaaccccggaattggggtttccccccaaaggggagagcccaaaatgggcccccagttccccgccaggaggcccttttccactatttcccccccgctggggatggagggcctgtgctttcctccccaggggtgtggaggaagttggttgggggattnctgggggtgaaacctacggggaatgcaggttccctgtccatcggcagatgtaggaggctgaaccgtatcatggcttacggatccctttttcacttgccccctgccaggtggtgggggaattacaccagaatacgacccttgattttcagaatctgaagaatatgaggctgcatggcgagattcctgttcattctttgaagcaacaaatcttggcagaggaaggtcctttactgtatttatactttccactcttaaagggaaaccagactgggcaacagctacaagtttcaaagcaatgtagaactgacttcttccaaaataaccaagtcttgttgcaccacaaagctccatgatctgtaggaccacgtcgttcggcagctgcgcggcccggaacagctccagcacccgcccgttgaccaccaccttcttggtgctctcaatgtcgcagtaggagaagagatctgaatagtatttctgctccgcatcgctcagcgttaagccttccatcttcgcctccggctcacggccgccccgccccgcatgcactactcggggcccggccccaggaacctgggccggcaggggctgcgcgtggcccggcctcctgctagcttcccgaaaacgccggccccggcctcacacgcgccaggtgcgcccgagcaacagggcccggaggtcgcgaggagggggcccggctgcgctcgccgcgccgctgcctgcgaggcccggcgcgcggctgcggctgcggctgcgactacggctccggctccggctccggctccggcatcccgggaattccggaccggtcc

SEQ ID NO: 451143 - DNA, 1130 bp, Homo Sapiens
  misc_feature (248)..(253): n is a, c, g, or t
aaaccctcacaatttagttctgggctctgtgcttgggctcttgaaattcggtggcagtggcctgaatccccatgcccactgtgacagagcaggagcaccatcctctcggacaaacaccgccactttaagttccagttccctttctagcctcatgcatttcaaggaaatcacttcttttctaacagcgagcagccagaaagagcagagagtaaaatatagatgagacagctctggcatagagggaggtnnnnnnggggggaaagtctcttgggtaattgccaaactttgccttcatacattgggttccagtataacagtgggccttaataagcacattcctttcccttcaggtgcactaagatggggaagctaaaagcagactggctgggggtggggtgtacctgcagctgcaggaatattgtatgggaacggacacacaactctccctcccagataagcacagctaaagagacatagaagcagtccaagcctctgataaactctcccaccctgaatccttaaaaactcttagtctgtaagtgagtgggctctgacctaactcggccagaagcccctttcaaatttgttttctctaaaataaacctgtccttggctgtcaagccacctttcatgtttctttcctctttctttaattcttacacatgtgtcaggatgatctcccaaaaccgtgttcataacagtcagggccaaaagctagtggtcacagtccttgtccagttggcagaactgacatgtgaaggcaagtgaaggatggtgagatactgacgaaagagcaaaggatctggagatcaaagccctgcatttccattttgtcctgattccttttgctccgagaccctaactaaatcaagcctgctttttttcacccctggcctgtaaaagcccagaaaaccattaacctgttgggaaagacgaaaaaagaatggggccctatgtggcgcatcctattttaacatctaaactggtgcctggagttgcctcataaatggcctctttaaggtggtacgggttccccccgggttgggcacttgcgaacccgaaactcaccctggaccttaaagtctcccttttggggccggcaattccccccgctgacctttaatttccgg

SEQ ID NO: 451144 - DNA, 1142 bp, Homo Sapiens
  misc_feature (44)..(67): n is a, c, g, or t
gctgggtggcgaattcggcacgaggccggggctggagctcgcgnnnnnnnnnnnnnnnnnnnnnnnnaccaacgccaacaacaacgtgtcgggagcagccgcggccgaagccggagcaggggtccggagtcgcggctggagtggggcctgcgcgtgtgagtggccgagagttgcccgtgccggagacctcaaactccgggcgggagcgctttcggtcggccgagccgccgtcgcccgcggcaccgtgtccccaaggcccagacagcggggcgggggtctatcaggcgcgggactggcttctctcaggccgacccttctagccgggctccggatcttcctcggcctcgggcccccttcacgttcaggacggaggccggagaacggtgatcatcacacaccccagccggcttcctggccagggcattttctctgcggccaagcagtgttgggattgtagctgctgggagccccctcctgccgccacctctcctgcaaggaagggactgacgcgttcccactttcttactctgcacctccccactctcttcccattcaagaacgagtttctcttccctctccattggaaatcttgctccggagggccgaaacacctattttaagcgtgacccttcctcacctcctggagcacccttagaaagaattccttacttatcccggcctgagattccttcattttttggccccggcttttttttccccccttgtggagaaccccctaagtttccgtcccttcatgaacccataaaacccaacgccttataccattaggggccctaacgtccccggccccttcttatgtcaactcccttcggccgttatgcgtgcccctgtcctctccccggtctcgttttcctgctacgcgctgccctgcgccacccctcccccattggtgcggagagtgctgacggccctccggatacgaaatcaaacctcacgacggtgccctccgctggcgggtctggggtgtatctcgtcagcgtcgttacccacaccacacgtctgcgcggtgaatcccgcctaccatcacccaaagcaacccccgacttcgctcgatccccccgttaccatgccccgccgatcccctgtacgcccgtcacaccaccgcgaatcaccccgtctcc

SEQ ID NO: 451145 - DNA, 1048 bp, Homo Sapiens
  misc_feature (96)..(96): n is a, c, g, or t
  misc_feature (111)..(111): n is a, c, g, or t
gttcaaaaatgccccagataattctcctttttatgctgtccaacaatgtccttttggctgatatttctgtattcatcaaatgttagttttaatganggaaagctccttaanacacaggatctcagtgaatttgtcttcatccgtgccccatctgttctcaccagctttatagagaatctgggcatcttgtttggccagatgctcatccactttcagactttcatctcttctgccatctgccaaagtcaacagagctttccggaagtcaccagatgtttcggaactaatgtcatctccaagactcttcttgtatactgtataataggcttgagagatatccttcatttgcctgcttgtcctggtagttaagatttcaatcaaggcatcttcgtttgttcccgcgcccttcatggatttctttagctgctttgcatcaaagactgctggtggagtcactagggccaccatgagatgctcaaagtggccagagagatcacccttcaagtcatctttcagctcctttccatatgctgcttgatattccttaacaatcagctgccgctgtgcatttgacctctcagtcagaatgctgatgagcattttctcatcagttccaattcctctgattgctttctgaatagcttcagcatccactgatgggctaaagtctggataatctcttactgttcctcggtgtccaacccagatagatgccatgatatcccacctttgccttgagctgagatcacactaatccaaagcgcggtgggggaaactggtgtgcgagtaaactgcgaacaaactgcgagcgaaggtgtcagccgcgggcgcaggtgctccgcgctggctccgggtccggatcgcgaccgcaccccttcctcctgcccctcctccggcctctcgactccacctgattgcggccccaggccccgggaaagggaagccgcgccctgctgccgccgggctctatccctgtacacaggcgccccagctctgctccctcaccggtctctaagcttccatcccgggaattccggaccggtccagc

SEQ ID NO: 451146 - DNA, 1029 bp, Homo Sapiens
  misc_feature (79)..(87): n is a, c, g, or t
cccccttgccggtttcccgcaggggttgaccggcatttcttgccccaggccatggaagctcacgaggatttcaagccgnnnnnnnnnggcccaggggatgatgattagctttggccactccccattcttttgaaagcaaaatagtctatggtgtccccggctgacaggggcagatccctccagacattcagggtactccctcaaccaacaggcattcggaagttgcctgccagtgtagccaggtaaggccgtatgcctgggaacttcttgctcacttctgtggcctctgtgctgaagttgcagaaaggcacccaggcccatgataccatgggggtggtatccaaagatatagttcctggtggtcagcaggttgtgtgtcttcaccagctggatgggaaagtagtctcgaaagtagcgccacacagcccagtttcggacccactgtgacctcctgccacctttcttgggtgtgttccagtcaaacaccagccaagtgaagtagagcacagcgatgagccagcaatcagtgcagaatatgtacatgaggatggcactgcaggccactcccagtacaaggaaggacaggacccactggagcactgagatgacctgtagctgcttttccaccttggacctattgagccaggtgacagagaagaggtcctggagggcggagaggatgctggatccagtgccccatctcccagacccctcgcgcgacagcgcaggtcctccgtgagagcgctggctccggtcagcctcggcctgacgcttcgccgcgcaggaccccggagtaggcggctatgagggtcttcatggctgaagcccgcccagtcacggccccgcgggaagccgcttcaccccgcgcccctggcccatgccccggcccccggggccagggcttcgcgcagagcacaggggtcccgggacggcgtcgaggctgggcggctaggacacctggagctgcggccggcggccagtggtggcgcgagagaaacagcctagatcccgggaattccggaccggtcc

SEQ ID NO: 451147 - DNA, 971 bp, Homo Sapiens
aactcaccatttctttgaaaaaggcaaaatggttctaatggtgttcccgggctgaccaggggcagaatacctccaagacatccaggtacttcccctcaaccacaggccatttgggaagtttgcctgcccagtgtagcccaggtaaaggccgtatgccctgggaactttcttgctcacttcttgtggcctctgtgctgaagttgcagaagggcacccaggcccatgataccatgggggtggtatccaaagatatagttcctggtggtcagcaggttgtgtgtcttcaccagctggatgggaaagtagtctcgaaagtagcgccacacagcccagtttcggacccactgtgacctcctgccacctttcttgggtgtgttccagtcaaacaccagccaagtgaagtagagcacagcgatgagccagcaatcagtgcagaatatgtacatgaggatggcactgcaggccactcccagtacaaggaaggacaggacccactggagcactgagatgacctgtagctgcttttccaccttggacctattgagccaggtgacagagaagaggtcctggagggcggagaggatgctggatccagtgccccatctcccagacccctcgcgcgacagcgcaggtcctccgtgagagcgctggctccggtcagcctcggcctgacgctcgccgcgcaggaccccggagtaggcggctatgagggtcttcatggctgaagcccgcccagtcacggccccgcgggaagccgcttcaccccgcgcccctggcccatgccccggcccccggggccagggcttcgcgcagagcacaggggtcccgggacggcgtcgaggctgggcggctaggacacctggagctgcggccggcggccagtggtggcgcgagagaaacagcctagaccccagcagaggccgcagccgcggcgctggcgtcccggagcgcaacactttatcacctcacaa

SEQ ID NO: 451148 - DNA, 1176 bp, Homo Sapiens
  misc_feature (129)..(129): n is a, c, g, or t
  misc_feature (203)..(203): n is a, c, g, or t
aaaacctttgggcgcccccaggccacctccttttttagccagccagaggccttcccgccaaaggccttttgcataggaaattcatgtccgttcagtatgacccagcccatgcttttcacaactggtagncaaggaaatccagcagtgttcagcgccaggcgcggggtgatgatccgctcggatcgtggggtcattggcccagnttcaggaagaggcagacgtccccccatggttccattctgctcaaagtcagacttgaagaatctggctgtctccatgttcacccccatggctgcaaagacgatggcgaagttgtcgtcatggtaatccagcacagccttggacttcttcaccagccccgcctggcggcagatctgagcggcaatctcattgtgggggagcccggctgctgagaagatggggatcttctggccgcgggcaatgctgttcatgaggtcaataggagaaatgcccgtctgaatcatctcctcggggtagatgcgggagtgcgggttgatgggctggccattgatatccagaaagtcctccgcccatgaccactggccccttgtcaatgggcttgccggagccattgaaaacccgacccagcatgtcctctgacaccggagttcgtaggatgtcccctgtaaattcgcaagtggtcttcctggcatcgatccctgatgtcccttcaaacacctgaacaatcgccttggtgccagccacctcaagcacctgcccgctcctctgagtcccatctgggagggtgaagtggacgatctccgcatactgggcaaacttgacccggtccagcaccaccaggggcccgttcacgctgcacacagtcctgtaggctgggggaggggcgggggtgagtaggggtctcaccccaaacaccctgctcacacacacagaggcatcctctgccttcccttcctctctccacaccccacctccttcccagcctgggccgtcagggtcattagctgtgacagggccagccaccattgctgtaagggtcatgcccctgcccgcagggcccctgctgctcggacacctgcaggaggctgggggagggccaggcagagggcagaggcctcctcagagtccgcccccaccacacagaggcctctcatccctgagcctcgtgccgaattcgccacccaggcctcgctc

SEQ ID NO: 451149 - DNA, 872 bp, Homo Sapiens
  misc_feature (97)..(124): n is a, c, g, or t
ctggaccggtccggattcccgggaattttaggagtgagttgcacaaaaggacctaaaatgcattgttttttgccttcttttaagagatggggtctcnnnnnnnnnnnnnnnnnnnnnnnnnnnntgctatcatacatagctcactgcagtctccaactcctcataccagaggcatgtgtcaccatgtcttactcctaaaatgcatttttaaaaagcgaatttttagattaaagtgcctagtttctgattaataaatagaagatgaaaaaagtgggcgggaaaagcataatcttttaagatttgtaattttctgtatgtgccacatttatgtaaattaactataaaatatggaattcaggatcatgctgttttgcatgtactttataggttatatagcatgaaacatacaaattatcactgttctttagtatatagctccttgccttttcttacatagatgcttaatttaacaattacctatttatagttcttattattgacgggaatatgattagaagtaccaaaactaaaaattccattatgtactgtttactttttatttaatattacatgtttttaccttgttgcggtatctttggccttcacacacacatgtgtgcgtgcacgtgcatttcattaccatgtagacaagacagttattgcttatagtaatttacccatttgagggctaagtgttttaagctgtggttttataagcaaagctgtaagtaaatgtaatttattttagaaagatattatttgaaatcaattttgaagaattgcactatttgataatgctgctactacatgagataactctggggaattaattttatgagataagatgaatggcttttctagaaaggtgttgc

SEQ ID NO: 451150 - DNA, 1142 bp, Homo Sapiens; identical to SEQ ID NO: 151945
  misc_feature (156)..(156): n is a, c, g, or t
  misc_feature (224)..(224): n is a, c, g, or t

SEQ ID NO: 451151 - DNA, 1553 bp, Homo Sapiens
  misc_feature (109)..(139): n is a, c, g, or t
gcagttggcactaagatagctaatccaaaatatctgtgtctaaacaattttaaaaaactgtttatttattttgtaagaatgtacccctagtccaaagtaagtatgtttnnnnnnnnnnnnnnnnnnnnnnnnnnnnnnnccctttcagttcaacctaataaaagtgatatctagaaaatatgccacattattaagtctgtcttaaaaagttcagattctaaagcatttctaaggcacggtgttctggaagacaaatgtgcttctgttggcgttgtgttagatacaaagcatccctgacaggcttcaagtgagccccgacaggcaccttcttcctgatggtgtgggattggagaggagtcagacgtaggcccccagggctgcatgaaactctgttaggcactgtaccagctgctgaaacttgggcctctcctctggatctaaggcccagcaacaggccatcacagcaaataattcatcaggacagttgattggctgggctattcggtaaccatctttcaggtatgcggccatctcgaaggggtcaatgtccacgtagggagtctggcccagagtcatgagttcccacagcgtcactccaaaggcccacacatcactagcgctagagaactcgttattaaccagactttcaagagccatccaacgaactggcctgttttcattgtcccccagacagtgatagtccatggggaacaagtctctggagagggcattgtctgtgatcttaacttgaagtgtgtcatcaatgacacagttcctggcagccaggtctttgtggatgacttcccttctggccaggtagctcattccacaggcaatctgaatagcccatgtgtaccaggtcttgctgagaaattgcctgtggattattggcctctactaacttgcactgtcgtaaaaacaatttaagattcccccaattcatgtaaggcaatatcaccatgggcttttctccttcttctatacacacatgagtaataggaagaagatttctgtgatgaagacctcgcagcttacaactttcagtgagcatcattgtcacctgaatttcagaagcttgatctttaactgttttgacaaatgcttgtttttctttatttggatctttttcatctattaaaatcccatggaaaatacgcccaaaagtaccttcttggagtacatcttttagagttatcctctctctggatattgctatatccttcaccttgcctttggcctccaaaagagtgacacttctcaagtcgttcttctctatccgcaaggtaggataactggtgataggagttgcattgttgggcgtgtctgctctcagatactgagtcgtctgggtggatggctgagacagcccttgggaactactgctggcactaatgctgcaaacaatttttgagagaaatatttgacaagtcagtttcaatgagaaatttcctttttccatacatacaaaatgcacatagccattaaaaccagcctaaaatccttacggagatcacaataattcatgatgttccaatactgatattttaatctcc

SEQ ID NO: 451152 - DNA, 1166 bp, Homo Sapiens
  misc_feature (432)..(432): n is a, c, g, or t
  misc_feature (591)..(591): n is a, c, g, or t
ccattccccccggggaacttcttttttgggccccttttcccccaggagtttcgaattccctttaaggttgggggttgggaccccacgaaatttggaattcctaaccccttttcacaaatttaggctaatgcctggggttactaaaccccccttttaaggaacccctgacctggggtttagaagaaaatatttggtaaccaggccttttcttcttttggtcctagggtaaataaaactcaaagtgaatgaggtatgattttacctaaaatcaaaacccttttttggtaaaggtactcccttagctcctattgtaaggtaaggtgtaaattaggtttgccttttgacttagttggctacaggcccacaatttatagggacaactaactgagggaatttattccacttgtccccttcttttgaacctcactgtgnttctggcttgccaggaggtgcaagtgtcgtccccgctttgtacttggcgctccaggcctgggtcacttcacttgagttatcagaggcaaccgtctagtttgacaaactaccgggaggctcctgatagagaagggcgtgggcgccaatctaggagacaanagcctgagccgctgcggtgagccaacccaaaccccatccgcgggtcttctttccagagacattttcggagccgagggcgcctctgcgagagcgctgcgaacaggttccgacgcgccggagatcgcgcgacgaatctgcgcctcgaaccctcgctttccagcagtcgccggattgctgctccacagggagccaacgcgcttgaggaccagcccagccggggctctctggatcagtaggctgtgcaggctgcgagctcgttgacgcatctcagcccactcccttgtcctcccgcctggcgaagatgtccgccaagcctgaagtcagcttagtgcgcgaggcttctcggcagatcgtggccggtggttctgcaggtaaggacagcccgccctgccccgccggaggctagtcgctttccccaccgcgtgtcctgaaaccgttgcccagacaggtctccttactgaagttctgccctcttcctcaaaattcagcgctcccggagcagtgcttgagcccctagaggcgcgagagcagaggaggccgggagatcccgaggaattccggaccggtccagcctc

SEQ ID NO: 451153 - DNA, 1128 bp, Homo Sapiens
  misc_feature (162)..(162): n is a, c, g, or t
  misc_feature (176)..(176): n is a, c, g, or t
  misc_feature (420)..(420): n is a, c, g, or t
gaagtgaccgccttccggggaaggggccattttgggctcgggtcatcaaagccgctggaggggccgattgtgggcccaacccccccttttcaaattctccctggtagaatctcttttggggaccaggaagggtatttgagcatgagcaggaaagcccgtaancggaggagtggttnctggtggtctcaagtgcccagcaaagaaagaagcgagagcgttgttgatgatgaggttctggtggctgaattcactggtgtgggtgggatttctcttttcccatgggagccaggtaggtgtcgatgaggtccctgggggcgctggggtccagggtttcacggtgcttctccacactgtggccaatgtaagcattgatttcctgtaggtttttgtaaacttgcctgtgtgccccaggaaagtatntcaagaagccagagaagagctcaaacagctggctggatatagagctgatgagtaagaaactctggcagaacaagttcagcgtcttcaggaactcttgatcttggtagtggaagcgttttccaaagatgatggagcagatgatgttggcggtaatggaatggaagaggaaggtggggtccacgagggctcccttggatttccgaagttcctctatcagacactgagcctcgtcctgaatccgctcctccacactccgctttcccatcccgaagtccctcatggtggtcacagagaatcgccgaagcaccttccagcggtttccattggcaaagagcatgccatatccctggtagactgggtccatgatgacgatttttccccggccagagaaggcctcagcgttgtccaccagggcctcccgtatggcctctactccacacagcatgaccacgggcctcggtcccaggtgtaccgtgaagacgtccccatatttctctcggaacctcagaaaggatttgagtaggcctcttctgtccatctgcagaaggttccccaaaaggggcagagggcggggccctggtgggagggtgccatgggagttagggtgacgctgaaccaggagtagcaagaggcctgtgaggagtgcaaggaagaggaggacgctgagctccatggttccagatcccgggaattccggaccggtccagc

SEQ ID NO: 451154 - DNA, 1255 bp, Homo Sapiens
ccctttttggggggggtcacgttcagaagggggagttatcccaaaattcctttgtccggcacaccagagggccttttgagacctttctcaggggttcgaagagaaaaagacggttttccggttattcccccagaaaaaatttcggttttggggggaactggtccaaccaggctgaggggaataggctccctaatccggaagcccccttccagaatgaggggggctgcctggggtccccacagcatgggacctttgggccactttttccagcacccactcagccagttccttctgtttctggccgcgggataaacactgggggcaccatccttaggctgagccccctggaagtcccactctccaaggatgtactgcaccggcatcctctgcaatcgacggctactcagctcccggatacactgtagttgctgagaggtcaagggctgggtccaaagtgccggcctcaggctctgaaatgttttggctccaaggacatgagccacgatgtactcactggattcccgggcctcagggatacccctcttctcaaagaccccagtccagtggctgaccagttctatggcactggataacccagccagaggtggttggggttgccatgagctgaaggcccagccccgggtacttcccctcctccctgggccagacaggagggcccacagcattcggccccaaagctccatgtctcagggaaaggttctccagagtgcttccaggttcccaagtctgctttatgatgtcagctgctgaggtgagtgctgagagtggcccctggacccagctgggtggagatggagaggtcacaagctctggtgccccaaaatggctctggtcctcagatatagttggttgccaccctgcctgaaaggctgccccacccacccaccagccggagaagctgccccgaactggacgcccggacgtgcgtggcccgtcgcgcgctccctcggacgccccgcttccggggtcggcgcctttaagaaaaggctcgggcggacgccgtagcccagcttcagtgttcctatcgctggtgggttcctcccaggagacccctgcggatgggtggggaggctgtgaattccactccctctacgctcgcaggcctgcatacaggaaagtgcggggatgtgtgtggggttgacccttgggggcccggacctgccggtcttccttaaaatcacagcagggatttggctccagcccaaggggatgctccgagctggcgtttaggaac

SEQ ID NO: 451155 - DNA, 1037 bp, Homo Sapiens
  misc_feature (76)..(76): n is a, c, g, or t
  misc_feature (332)..(332): n is a, c, g, or t
  misc_feature (474)..(474): n is a, c, g, or t
cctctgatagctgtgttctccacgtgattctttactgctccggatcgggttcacatagatctccactcgatctgtncgagagtctcagccatcatttcatgcccaggagttctctctctgtttgggggttcatccccatctgttttacgagcactggaagttgcgcctccatggcctggtgtcgcatggcctggtgtatcacctcgtccaggagtagcagctcccgctggtgtgtggctaggtgtaggatccccatatttttgagcctggggttgcttccaggagtctcggttcccctttgcacgacctggtgtctcatcccatcttaaggnaaggagtatgcccaggggtctctgcctgatcccaacttgatagttttttgggagtggcaccaggagtctgatcagctgtttgatcccaacgccgttttcgttttgatggaggctgggacgctgctgctccattgacgacttntagttctccagctttagctttttctgctagctgttgcctaatttctcgttcttctttagtcaagtgttgttctcgcattacatccatgtaagtcctagcattcattttaggatcaggggttttccctccatctgcaaaaggatcaagacgctctggggaaattatcatggtccgcctatgctttttgtattcatcttcccggtctgcaatctttggaggtctgtgctcagcaaatggatcatactgttctgttgactgtggtatatcattaagcaatgccacaggggcatgatatcctggcttcttctgaccaagcaaactcgtagatgatgaatagtcatcgtcatcatcttcaagttcagttgcagcaattgatgtcacgtatccagcaaatctgctgtcacttccaccataaatttcctggtcataataacctgtagaatcgaggcccactccttgagcttcatcaagagctgccttcttgccttgaatttctcgaatctgtgcttcaatatcttcgtgagtcttggcgatcttcgccattttgtccactcgaacacccc

SEQ ID NO: 451156 - DNA, 1192 bp, Homo Sapiens
catcagactgggatctggaatcgtgactgaccacttgaatagatatgtggactcgagcaagttgtctggacctgtaaatgtatgtcatgtggttgaatatggagatcagagtacctacctttagacttgttgataaagtgaagattttgcttccaattggcagaccaccgaatacatatttgccaattattattattaggtactctggacacggggcctaatagtttcaaggatagtatatctaaggagcccaggagtatcctgctttagggcagttaccctcttccctaagaggtccctgaggaggacttcgcttcatcagtgttcagtaaatgtttgttcaatcagtgactggggcaatggttctggtggccctttgttatttttattggctttccagcatctgaagtaccttcccatgtgtgaggaagctcaattttccagataacctcattctgacttcctagccaggacacaggcatatgactattcatcagatccacctaccccattattttgaatcagaaactagtgattcaaagacatcaggaacacacagggtcacatctgatgaaagtggaaccccaagttttcactgtattcatagggctagtgctgatgccccaataaaaagttctttgataaaaatcagcatgaagttcaaggccaaaaaggcttgaggaagccaaattaaaaaattaaccagcagcagaaagccacagattaaagacagcattaggtggaggagccccttttgggcacaggcccccttaccagtccaagacccggaagaggagaaagcagaagagggaacacagtccaggccatcttttcataaatagcaactcataagtaaacaggagtgacccaccttagaatctcactaatctaattagcaattcctcctacctcactgggcttggaggaggaacaagggaggtgagagaaggaccagagacctttaatatgctttcctagaagcctgcagtaataaatgtgaatgctccactctaatctgtgcttttaagttggtgcattaaggtggtatggcaaaggaactcactggcatacaggtgttcactgaaataacggaggtggcggcagagaccggcatccagtctgtgctagactgacctaccaaacaactccacagaaactgagaaagagcaaagatcccgggaattccggaccg

SEQ ID NO: 451157 - DNA, 1502 bp, Homo Sapiens
  misc_feature (1416)..(1416): n is a, c, g, or t
agcggggttctacgccgccggtcgccaggagagtgaatacagctagggacgtgaaagaacggggaagataaccgaagggtggttgagaaacccaccaggccaactgggaattagaattgattcaaaactccattgatcgcctgacctccataagctcctactctgctgcagttgagtgctgccacttaaatcctgcagtcccgagatccggttataaccaatgcatttagatttttcatttcggtggcaacaatcttaattgtaagttctgtcctacagagaagtgtggtgatcaagctcttcggagatactgggactcctctcacaaatatgcttcttagagacaaggcctcactccattgccgctaggccatgcctggtgagtgacagcagccctggtgccccagcctgctagggcaatgtgtcacccataggcttcaaggcccttctcaccatggtacccacctcctcgaagctgcctcccaaagccctctagctgctgctgcaggcacaacaagtgccaccaccaggggccttccagctgccagtgcaggctttccagagccggggactggggaacctgcagtcatcacctcagcaattctggtggcagccaggccagccagggcagcgatgatgaccgtaatgaaaagtggggatgacagctccacactggtggatgagttgagaacaccaggcagaggcatgtacctggtctttgatggttcagtggatctgacctaccattgcaaatgcaaagtgcaagagttgaacctcggaacccctcacttagatttatgaacattcaaggaaaaagccggattgtccacgcccgaagcctgcttgaacagcgggaacccttccgggacaaatatcctaacacgggcagcgtggaacacggcaaaatgtgggggcttgaataagtccacaatcaaaagcgactcgacttgacatactatcttcccccgaggtcacccctgccccgctacagagcaaacctccttcgcgtcagtacccccgtacgaatctatacttattctgcgtcacatacgcttagccttggaccacctcgcttacgcacacccctacatcgtgcactaataacaacaacgcgactcattgcttgacctttattccacatggcgcccccctacattccctcgaacacgcactcacaatatccttacacgactttgacctagtgacacaacacctccccaacatcacttcttccacaagatatacgccttagaagcttccgtcgtccatatatcacacacctctcacctctcagcacacgccagtccactaactgtgatgcatacagcctcctccctctcgatccgatcggccgagcgagatgccagatggagacatactcactttatagcaacgtctctatatacataaccatanccactatagcacccctagctgctatagcagcctcctagcgcctccacactccattaaccccgcctccgaagcacgccaagtaacag

SEQ ID NO: 451158 - DNA, 1373 bp, Homo Sapiens
cggtccggaattcccgggatttcggggccggaggcggtcggggccgggcccgggaagcgcgaggagcgcgcgtagcgccgccggagcccgccgcccgggacatggccaaggcgggccgtgcaggtggtcctcccccgggcggcggtgccccctggcaccttcgaaatgtcctcagtgactctgtggagagctcagatgatgaattctttgatgccagagaggagatggctgaagggaagaatgccatcctcattgggatgagccagtggaactccaatgacctcgtggagcagatcgagaccatggggaaactggacgagcatcaaggagaagggaccacgccgtgcacatccagcatcctccaggagaagcagcgagaactgtaccgggtttccttgagaagacagaggttcccagcccagggaagcatcgagatccacgaagacagcgaggaaggctgcccgcagcgctcctgcaagacacatgtcctcctgctggtcctgcatgggggaaacatcctggacacgggtgccggggacccgtcctgcaaggcagccgacatccacaccttcagctccgtgctggagaaggtcacacgagcccatttccctgctgccctgggccacatcctcatcaagttcgtcccctgtcctgccatctgctctgaggctttctcgcttgtctctcacctgaacccctacagccacgatgagggctgcctcagcagcagccaggaccacgtccctctggccgcccttcccctgttggccatctcctccccgcagtaccaggatgctgtcgccaccgtcatcgagcgagccacccaggtctacagagagttcctgaagtcctctgatgggattggcttcaagtgggcaggtgtgtctcatcggggactgtgtggggggcctcctggccttcgatgccatctgctacagtgcggggccctcaggggacagccctgccagcagcagccggaaggggagcatcagcagcacccaggacaccccagtcgcggtggaggaagattgcagcctggccagcagcaagcgtctcagcaaaagcaacattgacatctccagtgggttggaggatgaggagcccaagaggccgttgccgcggaaacagagcgactcctccacctatgactgcgaggccatcacccagcaccatgccttcctctcaagcatccactccagcgtgctaaaggatgagtctgagaccccggcggctggggggccgcaagctccctgaggtcagcctggggccgctttgacttcgatgtgtccgacttcttcctctttcggctcgcactgggcctggtccttggcatgccggaggacggtgctggctgggcttggacggcttccaag

SEQ ID NO: 451159 - DNA, 1697 bp, Homo Sapiens
  misc_feature (1053)..(1148): n is a, c, g, or t
  misc_feature (1282)..(1332): n is a, c, g, or t
ccacgcgggggggaccacaattgtgggggagaaggggcaacccccgcggggcccgtgggtgaataacgccccgacagggagtgtgcccccggaacaaaggtggccacaccctgatgagattaaggggggactacaaaaaatcgctgggaacccgccttacccccgggaaaaatcgcctgggataaaagggggccgcggggaggaacgggttaaggggtggagcccttccggggggaggccataggggggctcccgtagggggccagtgggcactaccctagggttgaaggcccaaacaatgtgccccggggcccgggagagccccgagggggccaggccctggcgaagggttgatgtagagggggggcgggttcgggccttttggtctgcggcagggaggaaacgcaagcccgggccaggcgggggccgcttgaaacgctgggggaaaaccgccatggcctatgggcgggacggtgaaggtagtagggcccgtacaaatgatgcaagccgttccggccagacatgaagaggcgcggttcgagacggctgttggtgaccgggaacgggggaggattgatgggtgagtggtagggagtggctcgggcagctccagattcttagtgtgcggagctgagccttgaaggcaggttccgcggggggggtggagtggggtgccgtcagcttggaggggcaccgtctgcccggggatgaccccccggccgctgcgcctcaggaacctcgtctccccacctaagggctgcctttcaatgacgtttattgcgccagcaagttcgcgctcgaaggcttatgcgagagtctggcggttctgctgctgccctttggggtccagtgagtcaacacccccgttccccgaaccctcttaactctgacctagagatgccgagcaccctgtcctgcgggagccgctctggggcgatctccctggccctctctgcccggctcacattagctgtgtgccaggcacttgggctgggcgcatggcacgcattgtgccacctctctgacctagctgctgaagtgttggtattgttnnnnnnnnnnnnnnnnnnnnnnnnnnnnnnnnnnnnnnnnnnnnnnnnnnnnnnnnnnnnnnnnnnnnnnnnnnnnnnnnnnnnnnnnnnnnnnnncttgtagcctcagatggatttgggagggctgctccggcaggaacccgcgtttcaaatgttctggttatccccagcgccctttccgcctcacttcccagcgcagcggtgctgctcgcggtcgggggccgggacgnnnnnnnnnnnnnnnnnnnnnnnnnnnnnnnnnnnnnnnnnnnnnnnnnnnccgccccctcccactcgttgctctccggccagcagcttgagcctgatcgagtgcgaaacagtgcacaccgccttcatggagaaggtgttgggcagcccagaggaggtgctggaccgcacggacatccacaccttccaccgcttctaccaatacctcgcccacagcaagcaagtctttcgcgaggcggcgcagaaccctgaggaggtggcggaggtgagcgccgggctggactccaggagtgggggcggtgcgtcctccggcgcgcagcggtggccacagctctcctcccgccgccgcaggtcttcctcaccgctttgcggggcacgaagccgaccctgcccgcgtgtatgaacgccacccaggcc

SEQ ID NO: 451160 - DNA, 1238 bp, Homo Sapiens
  misc_feature (67)..(116): n is a, c, g, or t
  misc_feature (285)..(337): n is a, c, g, or t
  misc_feature (1048)..(1165): n is a, c, g, or t
tgggctggcgcatgcacgcattgtgccacctgctgacctagctgctgaagtgttggtattgttatgnnnnnnnnnnnnnnnnnnnnnnnnnnnnnnnnnnnnnnnnnnnnnnnnnnggccatggaccccgctagattcagaatcctgacaccagggctcccttgtagccgtcagatggattatgggaggtctgctccggcaggaacccgcgtttcaaatgttgctggttatcccgcagcgccctttccgcctcacttcccagcgcagcggtgctgctcgcggtcnnnnnnnnnnnnnnnnnnnnnnnnnnnnnnnnnnnnnnnnnnnnnnnnnnnnnctggctggcgtccgccccctcccactcgttgctctccggccagcagcttgagcctgatcgagtgcggcccagtgcacaccgccttcatggagaaggtgttgggcagcccagaggaggtgctggaccgcacggacatccacaccttccaccgcttctaccaatacctcgcccacagcaagcaagtctttcgcgaggcggcgcagaaccctgaggaggtggcggaggtgagcgccgggctggactccaggagtgggggcggtgcgtcctccggcgcgcagcggtggccacagctctcctcccgccgccgcaggtcttcctcaccgctttgcgcgccccgaagccgaccctgcgctacttcaccaccgagcgcttcctgcccctgctgcggatgcgcctggacgaccccagcggctccaactacgtcaccgccatgcaccgggaagtgttcggcgacgttccggcaaaggccgaggctggggccgaggctgggggcggggccgggcctggggcagaggacgaggcctggcgcagtgcggtgggggaccctgagctcggcgatcctccggccgccccgcagtaaaggcttcctcagccgctgtctcccgcgcccttctttgtcccctgggtctgtgtggtccctggggatggggcggcggtagcagctgtgggtggctaattaagatagatcgcgttagccagttttaccagcgnnnnnnnnnnnnnnnnnnnnnnnnnnnnnnnnnnnnnnnnnnnnnnnnnnnnnnnnnnnnnnnnnnnnnnnnnnnnnnnnnnnnnnnnnnnnnnnnnnnnnnnnnnnnnnnnnnnnnnttgcctttctccgcccggtcccagcgggggtccgatcggcatcaaggattcacatcccgggaattccggaccg

SEQ ID NO: 451161 - DNA, 462 bp, Homo Sapiens
  misc_feature (18)..(18): n is a, c, g, or t
  misc_feature (35)..(35): n is a, c, g, or t
  misc_feature (40)..(40): n is a, c, g, or t
  misc_feature (49)..(49): n is a, c, g, or t
  misc_feature (81)..(81): n is a, c, g, or t
  misc_feature (326)..(326): n is a, c, g, or t
  misc_feature (382)..(382): n is a, c, g, or t
  misc_feature (385)..(385): n is a, c, g, or t
aatcccttgaaaaacttncaactgaaacttaaagnaactnaaaaatccnttggccgctacccgggaaacccttgaactganggccgcgtggacgtgctgggtaagcctccctggaagcatattggctcctaggagccttctccgccctgcgttgaaaccaacatgttcccaggcccagggagcacgaggggacaggccgtgctgagggtgatgctgaggcgggctggtcgggcctcttgtctccgcagtgtgtaacgcaggcggcgcagaaccctgaggaggtggcggaggtgagcgccgggctggactccaggagtgggggcggntcgtcgtccgggcgcagcggtggccacagctctcctcccgccgccgcaggtcttcnctncgacctttgcgcgccccgaagccgaccctgcgctacttcaccaccgagcgcttcctgcccctgccgcggatgcgcct

SEQ ID NO: 451162 - DNA, 1004 bp, Homo Sapiens; identical to SEQ ID NO: 99144
  misc_feature (545)..(546): n is a, c, g, or t
  misc_feature (552)..(575): n is a, c, g, or t
  misc_feature (590)..(590): n is a, c, g, or t
  misc_feature (593)..(593): n is a, c, g, or t
  misc_feature (621)..(621): n is a, c, g, or t

SEQ ID NO: 451163 - DNA, 714 bp, Homo Sapiens
ccaggagatcccccttcgtgtcctagaggagtgggctggggacccctccccaccaaggatgggggcgagggcatccaacctggccttggaatgctggtagaagtcacagacgccgatgtgggctgctaaatgtctttgcccttgttcaccctcaggtggtctttgtttaagttctttccaaacttctcgctgagttgttgaatcaggtctgccagctcaccagtagcttgagatttttcctcaagaagctcatagcgcaggctggagatatcttgcttgatttccttcagctcgccttcattgacttcgtcattttctctgtccacctgggctttcaggacgtatctttttatgagccgtttcatgattttctggtatctggtgggcttgctcaaagtgttatttgctgtcagattttcagaattcctcatgccagcctggtagcgagtcttcttgaatttggaattcagcatgcccatttcaaggtcattttcacagcttttggccttagatttgcagagttttatgaggcacatcttgattctcattatgagataataaaatgatttaggacttggcactagattaaaaggagcaggtagagttcttccttcatcaaagtaagacagccagagttttgctcgggcgaacttccattccacatctgcatcctcctcaatttcctgataggagttgtttatcatggctattagc

SEQ ID NO: 451164 - DNA, 733 bp, Homo Sapiens
agggacaggtagcttgaagaatcgtaggatcttggagagcagctatgactcccttattggccccccagacgctgacagaatcttcatcatactgatactgagccgcaagatattggtgtggttcaacagtagtttcagcctgggtagtgggatggcagctacaaagctgtacacaatgctggccttctcaaggctggtgtaaatttctacgcagatattaggcagctgagacggcaagcagcagaggaatatcacatcggcccaactcaccagatcagcgttatggtaaaagcatttgattcccagcttctggagctcacccagagtctctggcctccgagtggagatccgcaggctttcagcagggatggggccaagctgcagcagtgtgccagccagctgcttcccaaggtggccacctccaatgatgcccaccttaaactcttcaggagtggctgaattaagggagccaattgagagatgtctggaactttgattcttatttaatgatgctctcaaattatataatagtttgcagaagaaggttgcatgggcacaagcctcgatcatcagtccccgagaacggccctgcaaatacagccagatacgatcttcctctggaaccccatactcaaactgcagggactcaaggtcctggagcatgtccatttccaagccactatttccaaacagagaagattggctctgctcctcagtacttctgatcctggaa

SEQ ID NO: 451165 - DNA, 2036 bp, Homo Sapiens
tctcaccaatgaagggccggacgcagacgcggtgtgtactcacgcaccgagcgggtgtggtggataaatgaagcgcggcgaggcggtgtcggtgtttgtatggacagcgctgccccattgattgggggccccatgctgtgacaccaaaaagtggtggggtagcagatcgaaagtgttggggcaccccctctgggggaatgttattttgtagcacggccggcccctattttttatgctgcatgtggtcggttaaattagtagggtctctaattccctttgtatctggaacaataagaaaagaccctgttgtaatggcaccaattcacgtgggcacttgccacaagctgaaaaagaaggcagagtgggttgggagtagggaagaatggccggagaaggtggggggttgtatctctaaatctgtgttgtgggccacatagggtggacaggggctgtgagttacagcctttaggtgctaccctcagcctgggcttccctccaggcctggcgcaccttgatcttcactttgaaagagtcgatcagaaagaccaccttggggatgccttccagggagggcagctgcccatcatctggcacctccaggtcgaacctctgcagcagccaggccatgatgaggaagagctcctgccggccaggatctcacctatacaggagcgaggtcctgctccgaagggcaaatagcttactgacggtgagatgagctgggtccccgctggattcaagaaacgctcaggcatgaactgatccggctggtgccactccttctcattgtgatgcagcgcccacagattgatgataacttctgtgcccttgtccacagcaaactcaccgatgctggagtcaacgttggccttgtgggggatgagcataggggccacgggcctgaggcgaagcacctctcggatggtggcctccagcaggaggagacggttacggtcactgatagttggtgtgcggctgaaacccacattctggtcaatctcctcgtagagcttcttcttcacctgaggattgtgcagcaggaaggccagggtccatttaaccacagaggtggtggtctccacgccagccccaaagatgtcccctatggtggtgagaatgtggttatctgaaagcagctctgagtcttgatctgggccagcattgccattatctgagttcatcttggcttgcatcagtgtgtccagcatgttggtgatagagtcactccggaattttctccctgtaattttcaagtattttattcagcagatcatttcgtattttaacatggctctttaatttttccagggttttgttggggaaaatcttcaaccaggggactaggtccaccaggctgtctttgctcaggttgtctatgatgccttcattgtaattctgtatgacattcaactcagggtccccattcttgtaggaggtattgaagcagatcaaggagatgacattggttaccgccacgaagacaggaaaggagatgtctatggactgtccgttgtgggtggccagcatatcacacaatgtactgatttcctgacaaatgatcttctccagcttctgatcgccatccttgaacagggcaaaggtggccatcgccagccttcgatgcagctgccagtgtgcgccagagtcagcgaaggcgatacccttacggttgttggacgcgatgtctagagttgccatttgaggccgcccagagaagtccttgcccttcttaataagcacctccttggccagctggtggtggccgacaatcactgtagtcttggtgcccatacgaaccgaatagatggggccatattttttctgcagcttgaagaagttgttatgcatatggccgtgtctggggaggaatggcaggctgcccaccaggggcagggacaggaggctcttggggtacttggcaccagggcaccttctcttgggccaaaacaaataagctagggtaagcagcaagagagccacgagctcccacatggtggctgggtgccggcaggcaagatcccgggaattccggaccg

SEQ ID NO: 451166 - DNA, 827 bp, Homo Sapiens
  misc_feature (195)..(203): n is a, c, g, or t
ccattagcattctgtgaggaagctaaagaacactttcaaatactttcttgtatgaagatatccaagtttccacataaggagtaaaatacggtcattttgaaggaatctatgcttctttcggaaagttttcagaatactttgaaccaaataaggaaataaaatcttccaatgtaatacacaggaaaaacattaacnnnnnnnnntgctaaaatatttgacttttgtttcttggaataatgtcgtcttcgcattattccaagaaacaaaattgtcacaaattaagccaaacgcatatctttgacagcaaaatgctttctagtgtctttttctgaacttaaaatgtaacataacaatgaagcctcctttccacctccaccttccaaactatgcagaagccatggctgcactcccagcacctgcaaacatacgcacaaaacagaaggagtcttaccagaccatcacagttgctgatggcaacagaggttcctggaatgtccacgatgtcaccaacataagcacagttagtctgcaaaggctctgttttccggattctatacgtagcacttcctggttgatggttgttaatgggatcggttatattcccaggcaccagagatgtctcatgccactccacaacagccccaggagctactagttgagtgttgggctttagtcgcagatgaaaatcttttccaaatgccgtgatgttaaagaacaactgctcagggttggaagacacgtccctcgctgacctctttttgtgactcgcagaaagagtatgggaagagatagcgtccttctagatttgtgctgactggagtcaccag

SEQ ID NO: 451167 - DNA, 981 bp, Homo Sapiens
cggggctccgacaggccaggatgggccagggcccgggaacttcagcacagccaggttcggggtcaagggcacctccttcaggagctcgcaaaaccgcactgcaggatagccagcatgagggagcctgcagagtcagcccacagggccccaacccagccgtccaccccaaggcccctgggctcaccagggccgggccgccaggtagagaccagtgtctgctgtcagctcccgaaacttccagaaccgcagccggtccttgtcctcaaggctccgagctgtggggcacaaggggggctgggcggcaagtccctgggagagcagcagctgggcagagccccccagggccaagcttactaaagtacttgaggacgcgaaagttcctgccccgccacatcagggacacccgcaggatggcgtagccctcgtagtcggtgtccagcacgtggatctctctgtggccaggaaaagcgaattttcccgtactgtctatttctgagcccacgatcttctctatctcacagcttcctgagctgttatatgcaaccttcacggtcaggttactcccgctcaaggtgaggaacaagccctccacccgcttcggggccgtcagcaccaggctttgatcggaggccacaccgacttccctccagaatcctccaatcttctgccggtccagctcctccatggctgctgccacctgcgcccggagcaccacgaggacacccaggatggtgcacggcagcctggcctccgtggcggggtccgggctccgggttcccctgctgcacagcctgggccgattctatacggacagtgcaggcttgtgcgcccacccgggaatgtcatcaggacagcttggctgctggcagctcagagacgtgggtttctgcacaagcgccatcggccctggtgacacccacgcccaccgcaggggttagcctggcctagacagcagcctgcccagccaccctcctggcatat

SEQ ID NO: 451168 - DNA, 988 bp, Homo Sapiens
gggcttgggactgccaaattccctggccaactttcctcttgtgctctggcttggcaaggactgtgcagtccaaggttttccaagctcttcctttcagcctctgccagcttctgctgctgttgttggcacattctgctgcacttgctggttggcgctggccagcagctgctaggagctcctcagccttcctgtgctcttcctggaacagttgcactgtggctgcagccttctggctgcggagaaagagtccctcatcaagggtggaggggccctcagccccacacaggggagcacagctgatgcttcacgtcttccagtgtcgccttgaccagcttctcttccttgagcagctgctccttgctgctgtccagggcacaaatcgtcctttgccagccgctctggcatgtggaagtcccagaggtccttgtgctggcccatcagatcttccagctgttcctcgaatgccaacctcagctgtctctgtttgttcttctcttcttcaatctgcaagttcagggcagaaattctctctttgcaatcctgcaacatggtgtgcttcctgtgtgcctcactttccttttcctggcaatgcagccggaggatcctcagggtctcttgttttttgctcaagatctccttcaggtgtactttctctccatgcagcgagtccagttccttctgcagggcctcacagatggtccgggcctctcctaggtctttattggctttcttttttgcttgctggacctcattaatccggttaatcaggacctcaactcggggctctaggcttcccactttctgcagcttttgcaccatttccatcaagtcttcaattttctgtgaggacgtgtcctgccctccggccttctcagccctgtccacggctcctgcggtgggctcggccttcgatgtcagggacctccccgccatttcctctcagctcgccagcgagggtgcctcgggagggagcctccagtggtgattg

SEQ ID NO: 451169 - DNA, 738 bp, Homo Sapiens
tggatgatcgcttttaggggctttagtctgctctgtggaatcgaaaggattttctgtaactgttgatcattctcaaccagcaagatgttcactttggcatgagtgatgacatattgacaagcctcggcagagttggtggcataaataccatacacaagtacccccggctaggatggcacctacagcagtgataaaccactctgcagagttaaaccccaggataccaactccgtggaaacgctccaaacccagcttgatcaaggattttgcagccttccgacaagcctcatagtactggttgaaattcagaatttcccactttttgccattcttggatgcgagggctggataagttccaaatcggttgactgactctcgaaaaaattcagggatggtcatcggggtctcatggcctggtccgtgtttggatagcctcagaaggacttctccatctcgacaggtggtccacagcctgggagtaacttctgttttattcatgtctacttcaagatctttagctccttcttgagtctttggggttccagtcattccaggtgtgcagaaaccatgctccacagcactggagctgggacatctggtcactcaggtgttttcttcttcctgcaaagacagtcaacaggtagcccctcctggaaacctgaacatgagctgccccttcccagcccccgtcaccctctccgtccagccaggatgatggtggtggtgggaggcaggagg

SEQ ID NO: 451170 - DNA, 1002 bp, Homo Sapiens
ggcccggaacttccgggatgtagaaggcctgttgtggagggaaaccacccatcctcctgcctcccaccaccaccatcatcctggctggacggagagggtgacgggggctgggaaggggcagctcatgttcaggtttccaggaggggctacctgttgactgtctttgcaggaagaagaaaacacctgagtgaccagatgtcccagctccaggtgccttgccagatggccagaaccacacctcttgaagagtgacagtgctgtggagcatggtttctgcacacctggaatgactggaaccccaaagactcaagaaggagctaaagatcttgaagtagacatgaataaaacagaagttactcccaggctgtggaccacctgtcgagatggagaagtccttctgaggctatccaaacacggaccaggccatgagaccccgatgaccatccctgaattttttcgagagtcagtcaaccgatttggaacttatccagccctcgcatccaagaatggcaaaaagtgggaaattctgaatttcaaccagtactatgaggcttgtcggaaggctgcaaaatccttgatcaagctgggtttggagcgtttccacggagttggtatcctggggtttaactctgcagagtggtttatcactgctgttggtgccatcctagccgggggtctttgtgttggtatttatgccaccaactctgccgaggcttgtcaatatgtcatcactcatgccaaagtgaacatcttgctggttgagaatgatcaacagttacaggaaaatcctttcgattccacagagcagcctagagcccctaaaagcgatcatccagtacagactgccaatgaagaagaacaacaacttgtactcttgggatgattttcatggaacttggcagaagtatccctgacacccaatggagcaggtcctcgagagccagaaggcgaatcaatgcgcagtgctcatctacccttcagggaccacaggcatacccaagg

SEQ ID NO: 451171 - DNA, 906 bp, Homo Sapiens
  misc_feature (69)..(69): n is a, c, g, or t
tggggcaaggatcttccctggcactgatgcgggctgatgctatttaaacctgcctcagaacttgggcanacgcttccacccatgccggaagatcttttggtgacaacccttctagcgaatgatgtttggatggtcaactggccccatgatactagcttctcttagaaaatctcttctttgccgatccatgtggccacctttcaaagttttaatggcaactgggatctctcttttccctggtgtcttcaaacgcccactacagacttctccaaattcacctgccccaatgactctctcaatacgaattcttgagggatcaatctcctttgcaaattcatggactgctagggatgggtcttcatatgtatctggatcaatgtaagttttaattcccgggaagcgcaaatgcccattctgtaagtggtttcttctcttctcttctgacttcatcttggcttttatgtaccactgacatctcccagtgatcaagaagaataaagtgaggatgacgaggagagtgaatccgccaacagcggcggtggctatcacgagaatctgtccttgttctgctgccatgtcagaagctgaggcaataaagtcccacttttcattaagccagtacagttttgtcacttgaaatggagagtctttcatctcctgtttcaaattcaaatttctgactgtagccactgtatcctgtcgcagttctcactcggatgtgaaatacatatttggtggctggcttaagacctgtgatgatgacactgggggctttggaccttgtggaagagtaggtcagctgctcatgttcatttttggcagatgtctagttgaggacgttttcttcttccattgtagttttgtttgtcttagctttcctggtttctgcctttctgaggctgggaa

SEQ ID NO: 451172 - DNA, 806 bp, Homo Sapiens
cccaaactgctagaactggtaactaattcagtaaattgctggatacaactcaacatacagaaattagtagcattttatatatgtcaatggtgaataatctgaaaaaagaaatcaagaaacaatctcatttacaatagctacaaaatatgaaatacataggaatcaatttagacaaataaatgaaaaatcttgatatggtttagatgtttgtcccctccaaatctcatgttgaaatgtgacctccagtgttggaggtgggcctacccggaggtgggtcacggggatggaatcttcaccaatgacttggtgttgtcctgcagtaatgaatgagttctcactctatgacttcatgcgagatccggttgttcaaaagagcctggcatttcctcccgctcactcttgcttcctttctcaccatgatttgcttgctccctctttgccatatgccatgatgggaagcttcctgaggccctcatcagaagcagatgctggtgccatgcttcccttacaacatggggctgtcactgactttacatgctgctgcagctccttagtcagctggtccttgtcatgggacagaaactgtggggtcaggacaatcaatgccttcaccacccagaggcattgatagtgtcatgactcctccccaggaaccagatgtagccctcttcatccacagttgctctgtccccggtgtcgcagacgtccccacattccacttcggctgtgttctctgggttacccgccgaggcctgccacctcctccaccaacaaacggaagccaccacatcttctccgagactcgc

SEQ ID NO: 451173 - DNA, 988 bp, Homo Sapiens
tgttatctttgtaggtatatgttttcacgatttaggttttgttgggggacccgagcctttttttccgatgtccccttcctgtggcaatccctgtactttggcctctcgggccccaatacccttggggctatattcctgtcgtatcctcgtccagatgtgccctgctacttccgtccattcacgcgtcgtgtctcccttagccgtgcatcgctccttctctctatcctccctccggctccttcttccagtttcccccatccgcactgtgccaagccaggagggagttgtctgttgcttagccattcctcacttgccaggagaggcagcaggatcactctcccatcccagttgctgccttggcgctgtccaggattccagtcatttttcaagggttattgagagcttatggaataggagaccattccagcctcagtttcggccaggcactgggaatgcaaagccgactgagatatggggtcccgctctgcaggagcccgtggtctaagaaggcaaggcagccatggaaacagaaacaggtctaaagagtggggtgaggcactggggcagaaggctcttcaggggactgtggggtccccatgaggtggcgagagggggggcatcggaaaacacccagcaggaagaggtgctagagctgagtcttggaagcaggtaagttttcccagttcctaggccaggcaaggcactgactttacatgctgctgcagctccttagtcagctggtccttgtcatgggacagaaactgtggggtcaggacaatcaatgccttcaccacccagaggcattgatagtgtcatgactcctccccaggaaccagatgtagccctcttcatccacagttgctctgtccccggtgtcgcagacgtccccacattccacttcggctgtgttctctgggttacccgccgaggcctgccacctcctccaccaacaaacggaagccaccacatcttctccgagactcccgct

SEQ ID NO: 451174 - DNA, 864 bp, Homo Sapiens
tggccggtccagccttcttgcagtttcccaaccatcccgccatagactttgccccccaactcctatatattgtttgggtgcccaacttagcattacttaatcctacacagacacccccaaaagcgatggccactaggtctgcaggttctttggggtcagttgcagtccagtctttttgtccagtaccgaatactctaagtcgtgcaattccaccatctgggaaaatgttgagtctgatatgagtccatctctgctgggaattgacaagaaaatagttgtggccggaagcagggtttcctggcttaagctcagtcatgggaaccaagtaactccagtcgtcggattttagctcagcaatggcttcaaactcctcaggagtggctgcagctcctgtcctgattcctctttctgggatttctggtagtttatcttcttccaagtttgctgcttgaatggacactcgaggagcgtaatctcccgtgaagtaagaaacgtccacgtcgaagccccggatgactccttggatccccagcctgaggacacaccagtcgtgacctggaatccttttcctcctggtctcccagccatccatccatttcccaaactccgtatattcatgctctttgaagcacgggctgtcactctttatgaggttttctgcaggagcaaaaaagtcatctgttgcaaataaaatttttcctcctacggattcagatgccatgtccatcagctgggtgaagtccagaaaccgggtcagtcttccctccttcggagcatcagccatgcttcccagcagtcagaaatcaagtattcataaatggatctcttgctccccagaagccagccaaggtcccacggtgcttg

SEQ ID NO: 451175 - DNA, 961 bp, Homo Sapiens
  misc_feature (788)..(788): n is a, c, g, or t
  misc_feature (901)..(901): n is a, c, g, or t
aaagaattaactttattacttttacaagacctatttttatattaaaaggttaaggaaatggaagggattctgaagagaagatatcccaattctttacctgctttaatattggctgcatcagcagctggtgatacagtggataaaaatacagtggaatttatggagaaaaggataaaaaagctagaagctgatctggagggcaaagatgaagatgcaaagaaaagccttcgtaccatggaacaacagtttcagaaaatgaagattcagtatgaacaaagactagagcagcaggagcagctacttgcctgcaaattgaatcaacatgactctcccagaattaaagccctagagaaggaacttgatgacatcaaggaagcccatcagatcactgtaagaaaccttgaagccgaaatagacgttcttaaacatcagaatgctgaattagacgtcaagaaaaatgataaagatgatgaagattttcagtctatagaattccaggtggaacaggctcatgctaaagctaaattagtaagactcaatgaagaactggctgcaaaaaagagagaaatacaagacctctcaaaaactgtggagaggcttcagaaagacagaagaatgatgctatcaaatcagaactcaaagggcagagaggaaatgtctgccaaaagggcaaagaaagatgttttgcactcaagtaaaggaaatgctaactccttccctggaaccctggacagcaagctgtaccaaccacatactttcactgattcccatgtttcagaagttttacnagaaaaactacggattaaaaaatgagctagaaggatttattttcagaagaagaaatgaactgaaagatggaaatcctgaaacagtggatggattccaatttgaaaaactcccntggaaaaggggtcaagggaaagatacttgccagcccaacctttgccatccccttcaaaaa

SEQ ID NO: 451176 - DNA, 718 bp, Homo Sapiens
gaacagcaagcatggagggtaagaaacgggctacaagtcccttccctattcttggcctccccagccagggggaccctggggaagcatcaactactctttagtaaaatatactctgagagagcgatggtgggggaaagccagccatcagaagccgggttggggaaaaaagagaaagcctctgagctgggggagtgggcacggaggtcccactgctgcagtaaacacggcacctgggacccgggcactgccacctggagcccatttcatcagcagagaccggagagctgagggctacaagaagcaccccaccctcctgggctagaacctcgctgctgctgctgctggtagagatgaccaggctcctacagcgcctctatccccacatggtcatctgcagccactgttccaggctcaagcaaatatggccagtattcttggggtccatggttagaaagaatgtgaacatggtctttagcctcaggaaacagctgatgaagctgtcaaagtctatgatcaggtcatcatctgcatacctggccaccaggacctgcattaccttgttgttcagcttgatgcctgctttctcaataaccaggcgcatctcataggagttcaaggtgcctgaatggtcctggtcacactctctgaagatgtccatccatttcttgagttttttccacaggatcttgaactctagaagccccagcttgccagagcc

SEQ ID NO: 451177 - DNA, 777 bp, Homo Sapiens
  misc_feature (51)..(51): n is a, c, g, or t
gtcggttcttgtgttcctttcttaacggtcaccatttatgtttcaattcangccttggttttgcccaaacccaaagcctgggtcttccctttggctttgggccagtttggctttcccttgccttggggtctccacttgatttccaagttcccagtttcagccatagaccctggcatctccactcatgggcaccaccctctcttctgggttcagtgatgatgtctgctaatatcttccccaactgaagctgtgctggcggaagcagagatgtccttcttccttgattgtagagttagggtccagggtagtaagctgattgactgaagagctgtgtcttcaggttgtggatacggcctcctgatggctgctctccagagctgaactgcaatcttctcaactttggggtcatcaaggaatctggaggccttatgcttccagtcctgggtgctgatgtcatgggtgtcatggagcagttgctcatccctcgaatccgagcatcttcctgcagctccttttgtatatccttaaaaactgtcagcacctggtcccacagggtttcagtgatggttacctgtttttcctgtggtctcattgtctcttctatggatgtgcttctctgctgcttggaggtcatttctaccttttgttcctgatcctggcagggatgctgtgccatttgttctcagacagaaaccaaggactctggagctgaagatggagatagctccaggccctgcttggttccccaaattacactttgccccactccttcacccc

SEQ ID NO: 451178 - DNA, 814 bp, Homo Sapiens
  misc_feature (339)..(339): n is a, c, g, or t
  misc_feature (438)..(438): n is a, c, g, or t
aaggtgggataaggcacatagtttttggcaaggatttggtaggccaggcacgtgactcaagtagtgcggattcccaggaacggagagcttatattactccagaaccgcagccaatcagcttcactctggaagtcattatgtacaaagggaagtccaaaaagtgggtactggtacttttcaataggctgcctggtggtgaataatttgggtgtttcgcaggtctcatgtacttttctataggactgcctctctcagaacttcctttcccttcagatacggatgaactatttcctggatctccagtactttcctgaggactttttatctgaatgtgcaaanggttgcatccttttgtgaaatatccagagtttggctgaccaggactggctgttgagcagaatggcttttagtcaatgaaccctgggcttcgtatttacnttaggctggggagtggaatttctctctggtgactttcagttagatgatcttctgacctcctctctaacgggcttccattgacttgctcctcattgctgcccctctgctgtttgttgagctgctcagcctgaagtgcctctgggttaaggcgctttcttgttctcctcctaataatctgctcaccgttgttttgtttaatgatgtttaaaggcctgggagtcgagtgaagcttctggtagaggccacacgcgttgcatacatatccgccatttgcattctttcgccagagagaggtctttgtggtcaggcaattggcacaaaaacaccggagcctctacgcctcttaggcagaatcagaggggtgacagtgctcttg

SEQ ID NO: 451179 - DNA, 972 bp, Homo Sapiens
gggtaccggacccatcccttcacttcccttgagctctggatacttggtcacagctttccagcccagggagctggatgatgttttggtggcacccgcccatctcgcaggccttcctgatggcccgtccccttcttctggttgccggtgtaggaaatggactgtgggtcatcaacccttccacgatcccaaatcgctcgtggatgacctttggcgaggggagccaaacagttggtggtgcagacgcgttgctcacaatgttcatggagccagggttataagtcattttcattgacacccatgacgaacattggtgcatccggtgagggcgcggagatgaccacacgttgagcacctgcagagatgtggtccgaagctgcctgtatggagaggtacacgcctgtggactccaccacgtaggggctcccgacagccctccaggggatctgtttgggctctttgcactggtagacagagatctcatggttgtccacgaccagttgtccattcgctgaattccacacttcccttgtatcggccgtgggtggagtcatacttaaacatgtacaccatgtattccgggtcaatgaatggatcattcacagccaccaccttaacacccttctccatgcaggcgcgcaggaccaggcgaccgatgcgtccaaatccattgatgcccacagtcagctcccgggccacagacaccatcttaggaggaggagtagcggggtgaggaggcagtggtggcggtggtggctttatttcctccctgactggtgtgggctctggttgtggctggggctctacttcagccttaggctcaggtgggggcggtgctctggtcaccgggcacggctgtcgcagcaactggacaacggtgacattggtgaggacgatgtcgcgcttcgacatggcctcttataaggttatcattggcctggacctgctgtgatgttaccgaggtgcgtgcggagc

SEQ ID NO: 451180 - DNA, 1047 bp, Homo Sapiens
  misc_feature (42)..(42): n is a, c, g, or t
ccggccagacccattccggggtgtgtacccggaaaccccatnccgttcaggttcccttggagctccgggaagactttggttccaggcttcgcagcccccgtggaagccgggatgatgttctggtgggcaccccgcccatttggccaggccttccttgatggcccgtccactgtctttctgggtggtccgtgtaggaatggactgtggtcatcaaccctttccacgatcccaaatcgctcgtggatgactttggcgaggggagccaaacagttggtggtgcaggacgcgttgctcacaatgttcatggagccagggttatagtcattttcattgacacccatgacgaacattggtgcatccggtgagggcgcggagatgaccacacgttgagcacctgcagagatgtggtccgaagctgcctgtatggagaggtacacgcctgtggactccaccacgtaggggctcccgacagccctccaggggatctgtttgggctctttgcactggtagacagagatctcatggttgtccacgaccagttgtccattcctgaattccacacttcccttgtatcggccgtgggtggagtcatacttaaacatgtacaccatgtattccgggtcaatgaatggatcattcacagccaccaccttaacacccttctccatgcaggcgcgcaggaccaggcgaccgatgcgtccaaatccattgatgcccacagtcagctcccgggccacagacaccatcttaggaggaggagtagcggggtgaggaggcagtggtggcggtggtggctttatttcctccctgactggtgtgggctctggttgtggctggggctctacttcagccttaggctcaggtgggggcggtgctctggtcaccgggcacggctgtcgcagcaactggacaacggtgacattggtgaggacgatgtcgcgcttcgacatggcctcttataaggttatcattggcctggacctgctgtgatgttaccgaggtgcgtgcggagcgccagggctgtgggtcctatcccgaaaattccgg

SEQ ID NO: 451181 - DNA, 796 bp, Homo Sapiens
tcggcatcagactgcagaggtctctcatgtcaatgaggctttcttccacagcttttgcaaacttgctagaagaagtctctttgcagctgtgaaagctagagatgcagaaaaggatggtctctggctggggtttgtagcaggcaccatacccatttgggaccacaggaccatagcagcagaacatctccgtgcttgtgggcacctggctagtggagaggacaaaccggttgctcatcaggtaggtttcatccatgaacatctcgggcagctccttgcacatggcccgggccagctcccgcagtgccagcaggtggttgtcaatggccatccctgttatggccatgactgtgtatgcagtctgggcacggatggcatccttcaggagcagaagcttctcagaagctggcacagcagccttgtggtcagtcacggctctcacaaaagccagtgcctctggagtggccgatctgatgttgtccacgcgtccctcctggaatcggcggatggacgcgctctcgtaggtgggcaccagtcttcggtggagcctgtagaaggccagctggagggccacctggatgaaggcatcagggctgcatttctgcttcttaatgaatgttttcccatagttgtcaaacttatagacaatgaagtcaaggttctttactattctgaggaagaaaaagaaaagatgtttttattgcatgcaaaacagtatgcatgcatctggggtttccccgggcttctagagcctggtctgtgtcctagcgttctggaaggtgcggacgtagtccctgcc

SEQ ID NO: 451182 - DNA, 926 bp, Homo Sapiens
attggcccgtaatcttttgttttcttctcgtagtctttcaatttcagccactaaaccgttcattcactgagtatctttccaggcaaagaatgcatttcattcagttgcatatggaaactgtttatatcatcttccactgccaaattcacaatgtccctatggcatgctctctaaagtcatccaacgtttcctgtatcatgttctgaataaaacgaatttgaatggaagtcaatggtgcattttgccggttatttccaatgctgtcggctattttttctgagagtgaactggcaactccagcagtgacagaagatgctatctttggatttggagttgaggatccattgattgggggttcacatatcaactgggcttcaatttcattctctggcttttcaaatttctcagaatttcttgtttggttagatgatggagaggtatttagatttccactttcagcaccagatgtgaccaactttgctaactgtttgaaggagtctttagattcctgttttcccatatatattttcttagactcagctgttagatcacggttttcattttcctctttccctggagatcccataaaaacattaagaggactagaatgcaatactgaagtacttgaagttactggattttttcttggaggaaacactgagttcaactgcggtagaaagtcaaagccatctcctttgcctatggactcatcacttcccttgttaactacagcatcatctctgataggtgagaacatgtcacctaaactacttttcccagtatcatcaaagctggagaaatcctgattttttccactgtctgtttccttagataaagtgtctgtgtttatgcttcgaggcaaacctgctttttcttgaacagcaactgttcctttccccatagctgatcccgggaattccggaccc

SEQ ID NO: 451183 - DNA, 974 bp, Homo Sapiens
tcggaacccgcgagtgtggggcgagcgcgcaggacagggaccatgagaagaggcaaatcccaagggcaaatgatcggagatcgggaggcacagctggagacccctgtcggcttggctcagggttcattggtccgagttcatcgtagtcaatggagaatgttgggcggatcagacgccaagccgatgacaccccctagaagctgaactgatattaaaactggaagtgattgccagttgtgatgttgggcttatgagtctgggagctgttactgatttcttgccctgctcaaatatgcgataaatccgatttgttttcgtcaagagggctgcataactgatgcacatacccaagcccaaggaaactcgccggaaagaacacactgccacatctggtttggcaatcatcaggaaagtgatgatgtagcaaagaaagatgcccgtcaaaagaacatagctgagttcccgcccagatgcccggacaatgggcgtgtcattgtagcggatgaaagtggccatgacaaagatggtggcaatgatccccaacattgccaggaagacaggaatcacagcccagggggagtgccactccagtttgatgatgggaatatcctggcatccggttcgattttcattgggcctctggtcataggggcaatgctggcatgtcatctcatcaaactggtactggtaaccatcgcaaggctcacaggtccaacagcaaggagttcctttctgtgtcttctttctctgtcctggcttacatggtagtgtgcacactgaggcgggtatctctcggactcctttaccccgtctgcatgtcttctatattgagctgaagttcgtctgtccactgcccgatcagacggtaacccgggttgctggtgtttgtggtctggtactgaaagatgtcataacgcccaggtgcatccccgttcttgttaaacatcactggagtgccagcactaccattgaaa

SEQ ID NO: 451184 - DNA, 849 bp, Homo Sapiens
gcatgtgcaatatgctggtaggccaattccatggtctgaagtttacctggtgtatccaggtgtctgtctatggtaatgagagggtgcgaacagggtgaggagtggatcgcacttgcagacaggagaagttccggagacaggcaagaagtgagcattaggcgttacttcgctgggtgctgcttcaggccagcggagcaggaatgtgctggtgaggatgaatcactcaactgtggctcaggacgtataaggtcacagcagcctgtgaggatctggctatgttgtcttactcgttgttgactggtttgcctccattcattattgcagacgcacttgtgcttttacttggcgtcaccccaggcttcgggaccgtttccccaacatcatgcaaagatggttctcggtacatggcaacttccaatggcttgggtagaaaatgagctgctggtttggttttctttactctgttccctttcatagcttgcccttccttatttaatcccaaaaaccaggctctaccagattcctgttgtctgtacaacatggatgagtagattacataataattttcaaaaacagattctttaaacttgcattcaggggtaaaaagttctgatgggtagaggtaaccttctccattcatggctatatacaaccctgttttcactccctggatggcaacaacacgtagtcccactggtatgaggttgaagagtgtagaattagtgctgtcatcccttggttccatcgagagctccatcggggtgcatttgcaagtagtagccttgcctgccatataacctggtcactatacccttgagctggggatctgtgtttgtgcctacaattcca

SEQ ID NO: 451185 - DNA, 1008 bp, Homo Sapiens
ggctctcctggacaatcctgcagcgtggtcaccgcctctgtctctgaactgaagtcactgtccccaatgtcgttgttggctttcaggcgcagcttgtaggaggtgaagggcctcagtctgtccacgacgcatgctgtggcctcatggctgatggacgaggagtaggtctgccactcaccccgaggcagctctcgcacctgcatggtgaagtaccggatgggggaggccccgtcgctgcccgggacccactggagccggaggctgcgtgcggtcacttctgcctggggcaccaggagctctctggggggtgccggccgctctctcttctcggtggtgatgacggtggcctccagtggctccccccagccctgcctcgtcttggcggacagcctgaagatgtatgcggactccggggccaggtcggtggctgtgaactgcctcactgtggcgccgacctccacggtggtgaaggtgtgggggctgctgctggccaggcggtaggcaatctggtaccccaggatgatgccgttgggctcctccggaggttgccacactatccgcacggaggtgagtctcacttcggggaacacgagcctcactggtgggcctggggcatcgtctttggtgcgctccaggatgaggggcgtgctggggaccccgttcccgatgcgggtgaacgccagcacctggagctcgtagagcacgaacttgcgcaggcctgccagcagggccgactgcgtgtggttccctcgcacgatgtggctcctgggctcgggatccaggtctttggcccggaacaggatctgtggtatcgacacagcacgagggttatcaggaggcgggtgccaggagggaccgccgtggcatggggcaggcccccttcgtgaatcaaggcccagccaactgtgctttctccctgaggatggctgtgtgcagggcttctggatctaatttgtccatgctggcatttggggaggaaggtggttgtaaagtgactgcgctccaggg

SEQ ID NO: 451186 - DNA, 1144 bp, Homo Sapiens
ctgctatacttttgtccgcgcgcgctcgttgtgtggttcttcattgtctctctttctaaccctctgcgtgttgtgtttaatgttgtctttgtttttgcgcgttcccatgtgaacatcacttggtaagctttccgaagtgtgctggatttccaggaaatcttaaactgttgagggcccaagcatgattggatttggtgaacttttccctaatatcttcacaggggatttaagattttaattcggaagaaagggttaagtttaatttctgagtgtgttaattggtggatttaacaggcttgtgcctagtgaaaagagcatctccctacaagttttttgagtggcgccctgagttcttttctcctgcttctcaagagtgctggggcattccttggctgccttgtctggacgtctgtttctgataagtgagttttaaggctctaacagctcctgagaattttgttcggcagagacctggtgagaatcattctggctttccgcctgagtttccttttctctgtttttttggactgttctgatgaacgtgaccctggagtgttcagtaatacctctgctcctttaggaactgttggcctactgcctggttttatctctctctgtacaaaagctccgtgtctctttccctggagaggctcattcggagtttttctggcatcatattgatgtataaaagagatgtattctataaaattgttttgaagttctgctgatgtaccaggagaggcaagtggtactattccacaagaaggcttttgcatcttgctgtgtttgactggcaaaaccagtggacacgatggtttttggaagtcactcctctgggtgctcttagagtcgtaaggtggtaggaagacaggttccagtgctttaccatgtgaccaccagtcaccctgtatttctggcccttttttgggatctatgtagggaaatggttcattgtatgttcttgcatttgtgttaatgaatttagcataatatatacgtcctcttccaacatgtgattttgaatgatgtatgctttttccaggtttttcttcgtgtttaatttcttcattttcacttacatatgttatagcagcatcctctattttatgctgttgatgcttatcttccttttcctccatgggcc

SEQ ID NO: 451187 - DNA, 902 bp, Homo Sapiens
  misc_feature (272)..(272): n is a, c, g, or t
cgggactcccccatgggttttgaaagcttgcttttgattcctttctacctcacatttatcaggaccttggtggacattgatgaaggcttcttcacaatgcacatatgggcaatagcacgtggatagaaaacccagtaccctccaaattagaccaagttgccacttggggttagtatgtcttctattagtggaatttttccaacagagcctcacattttgttcttctagggtctcacttgtgaattccagtatgtcagccgctgtccccacanacataagaagaagttgagagagttgatctcgagtgatcccgcctccaatgggtagaagccatcttccaattattagcattaacaggaatgtctgatggagtcccaatgtccaaaactttctcacatactgtagataagttattcacaaaaactttggccgtctcaatgagatcatcagctctactggtttgttcattggatgtcaatgtttgattgaagtcttcttttctgctggtattctgtgatgttccttcagcctggatactgcaatactgggtctcatggtgcaattcaagaagccataatgatggaacgatgctaatcagatataaaaatatggctggtgaaaaccatttgtagcctctgccgcgcttgaacttgagggtgagcgcagtctccaggaagagcaagaggttgagcagcgcaagcagccagtaccgcggctccttcttcacctcggtcactcgccagaccccgaccagcgagtgcagcaggaactagcaaccgagtggccagggcgttaaggaagaccagtccctccatgctggccggagcactctgcctacgtccccttgcctgcgcccaccaggaccctgccgggcgtgcccggagcccaccggtgagcaggaa

SEQ ID NO: 451188 - DNA, 628 bp, Homo Sapiens
ccgttgagaatgtttatttttcattccatacgatccacatttaccccctcttcctgaatttttgtgactcgatctctttgttcctttagttcctgtgcataagaccatgctgagtactgccgtcctgcatatggctgtaactttttaggagttctgctgtattaggtaaaatctgatgctccatcatattcaactcaacaactgggagtcccctgacgtctctgttccctcttcaggtggcttcatcctcttgtagtattgcaggggattgcgccacaggtccttacataggatctcagcaatcttgttagatcctgcgaagttgtggtcagagaaccagttgaagaagttaaggctgctgttgtggtgtctgcggcgataggcctccacttcataatccggataccactcaattggagtggaatgagaagccctgtattctgtgatgttcaccagatattccttggtaatcactttattctggaagtaggggttactccgaaagaacaacatgatcttgcagagatgaacaggatgcttctcttcttccacctccaggctgaccatgtagctcagcatgtcttcatcttcgtcagtgatcagggctgacatctgggggtggtttgca

SEQ ID NO: 451189 - DNA, 1044 bp, Homo Sapiens
  misc_feature (110)..(110): n is a, c, g, or t
tttcccggccaacgagggcaacgtttgtctgttgcatccaatgaggtggctgaaattgcggggactcccccctcctgggtctgggccaggaggggggcactctggggttncagaatccttcatttccctcgggtgaaggctgttccccgctggagcctctggccaacacaggtaggaactcatctccatgtaggtgagtcttgggggggaagtcctgacttggtgacactctggcctgggaggaggtcagggttccccagggaggggcctgtgagggcggttggaagacaatggggctctggtgggactgtttggtgaagccactcccctcctttgcgccgatcgatttcttctgcaagaaatctggctggtctagagggtccctgagatacttggaattgtactccgacgtcatgaagcgtgggccatgtcggaagttctcccgctccagcgggtcctggccctgctgctggtggagcagaggcacttccctgggctccagccccgtgatggcctgaggcccgtgctcctgggtgtcgaaatggaccttccggacctccttggtggggggacccgcactgggcttctcccgcccatagcctgagctggtctggcgcatgctccagggcaggggatgcttgccgtcaggcacctccagggggcggtagctctggctggccacagactggaaatggtcctgggcttgttcccccctggccgggttgtctaaggcctccagactggcttggcatgagaccacgggctggaaatttgatttgtagccggtgcctacgtgactgcccacacggggcttgaaatcctcccgaccgtaggctgtgcagtagctggtggcgtagaatttcagggggtccgtgtagccccccgaactcatcttcacataaggggagacgacccccagggggagtttccccatcatgatgctgtggggcagggccccagggggcctttcctctgcagaggctctgaggtcggggagaggctgcaggaagcagagctctgcagagaagccagccctcctccgct

SEQ ID NO: 451190 - DNA, 717 bp, Homo Sapiens
acatatctggtgctatttcagccatctacaagcaggagccaggaggctggccccttttagatctcactaggggcatcttcccagagctgtgtgggcatgtgcctgctcccaccgcgccccctccacagcaccctctggctccggatgggccatcatgaaagcttgagcggcccagatcaggtcctcttcccgaactcctgggacgggcacggtggggatgccagcgatcatcatggcgagggtgaggatgcagatatcaggctgggagctggcctccttccccactgcctcagagggtaccggtagaacccgtggtgacagcccacacagcatcaggggcctaggcctgctggggccacccaggtcaggggctctgcttctggagtagccattgtcccagcccaagctctccagctgcctcacatgcgggaatttgtggcagtttcggctgtattccttccgtagtgtctcccagctagtccccccagggcagcccctggcttgtggcattgccagggctgggccccaggcctgggcagcaggtgccacctgctcagctttctggctcagtgggcctgttccaccagaggccaccaccactggctctacaggactacagaggccaagggacaagcctggagaagcagccccaccttggccggaaggcagaggacctggatgagtttgtggagtcctgaagtaggacatggcttcccc

SEQ ID NO: 451191 - DNA, 807 bp, Homo Sapiens
  misc_feature (38)..(38): n is a, c, g, or t
cggtatgtgtgagctacacctccagccgtcctttccanaataggtgcttaagaaaagatgccggtgggctgccagtccccgatttgtgtgacagtgattgatgagaattttagcatttgccgggacggggaagccttcatattccaggcgtaactgggggtcagggaaggcagcctgccagcagttcacatgggagacctcatctgttaggtacacttcctggagccaagacctcttagacgatttcaggagggtcctgtggtcacttgacaaatacaacattttgttgtcaaatcctcctgttatccccaggcaaaagtcctgcccatatctaaggacttgaccagtggcatctctgtgtacactcaaaatgataaaagtgtttctgccaattggggtcttggcttgaactgcgctcaggccacagggtacctctaattcgtctttcagatgggactgaatttcatctggagtcatacacaggctcaggtccccacgcagaaacacatcagcttctgtgtcaggatcatcaggattcacaagcatcactttgtcaccgtaatgaatatagccatcttcagttacggaaagttgcatcggtctcaagagattctgttttagtcttctacttctctgtatgagaagtttccccttgtctctcttctctaagaagtctttcatgagctcctcctccaggtagacatcctcattccagttgcctatccggactcccggaccatacacgttctgcgccatcgctccctgctgttcagcaagtgggcctccctccgacaccatgcgttagcg

SEQ ID NO: 451192 - DNA, 751 bp, Homo Sapiens
tggcgttagaaagtaactctgtttttagtcttcttgaacaaaattacgtctagggctcccagaatggggaccagagatgggaagaacataggagatgttgtacacaagatctaagagaagagggagatgaagagactacaaatgatgttccccatatccagtgtggagatggctgtgacccccaaggactcagggacaacagtcagttctgcttgcaaaggatccaccagggtctgattttttatgagaagctgctaggatcggatattttcacaggggagccttctctgctccctgatagccctgtgggccagcttcatgcctccctactgggcctcagccaactcctgcagcctgagggtcaccactgggagactcagcagattccaagcctcagtcccagccagccatggcagcgtctccttctccgcttcaaaatccttcgcagcctccaggcctttgtggctgtagccgcccgggtctttgcccatggagcagcaaccctgagtccctaaaggcagcagctcaaggatggcactcagatctccatggcccagacaaggccaagataaatctaccatccgccaggcacctgtagagccaacaggttaattagtccattaattttagtgggacctgcatatgttggaaattaccaatacgtgactgacatgtgatgctgacctatgataaggttgagtatttattagatgggaagggaaatttggggattattattcctcatggggac

SEQ ID NO: 451193 - DNA, 814 bp, Homo Sapiens
ggttccatagctaattggaacccaggcttcggaggtgtgaggtagtggcttcaacgtcatcagcataggtcacattctccaagttggtaggcctgtctccttggaatgttcctttgcttctgcgtgtccagttaatccggttctgacataccatgcatctcagggtgaagcggttgacatcagtaagctgtctccttcttctagcttcatctgctaattccagtgcttgtacaagaacaatatcatcattagaggagaaaatggtcagaggaggtgtatctggatcagggaagttacgctgaagtggatcatagtggatgccatcataaataagcagaacccttttggtatatcctgcatcttccccaaaacgatcaattcttactgtctgtgtatccactacacatatttcacattggtaaaacttggacaaaatcgatatctctattgctcctccccaagtgtcatcccttttgatccagtcacagtactcttgatttgtttttcccagtattgcctcactatagaagtctggatcgcttgctacaatttgtgctatgaggcgtctcatctcaggggcacaagctggattcaagactcctccttcgacgacatagtacacactagtaaagaggcaagagttgtctgctgggaccacggttctggtaagcacaggcaaagtttccctgacgtaactagaagcaccacgtttagtaaatgcaggtgaacttctgggcctggtttggtcttcttccctcgatcagcatgtcaccagattggatgggcaagtcttccagaatggtatccccattgc

SEQ ID NO: 451194 - DNA, 1357 bp, Homo Sapiens
  misc_feature (214)..(214): n is a, c, g, or t
  misc_feature (268)..(268): n is a, c, g, or t
  misc_feature (351)..(351): n is a, c, g, or t
ttagtttgcccagcaaggctcggtttcttttaagatcttctccttccaaatttcccggttttataaggggtccccccgggtgggttaagttttcccttaaaggtcccacccttttctttagaacctgggttccaaaggtatggaaattttacccaaaactctagggagttccatctgggacaggaaccgtggtctttgctgggactatagcctnccagagaaccgtcggtttcggaataaatcgggcaattcgtccttccaaacggtntggagggtttgaggacagggtggaatttttctggcggctctgggtcaaatccttatcttttctgttaactctgctaccatctnttcacgggtaatcatccagttcaagggggtcccatggggccccagacctgtaaaatcatgagtgtacgaagtgagccagtgggacctctcaagatttctttgtatgttggcttctttggcagagcaaatagggtcccatgaatttaaagaagtgttaggagcgaaggttttaggaggttttgggtagaatactggcttatttttctcaacacctctgggaaaatcataatatacaccttgacctggccaagtcagtgctttcttctttgaatccatgggaatatcaatcagttcatatctataaggattacctcttgtcttcaaaaactgttgaatcataagccttggttggcaccgtgggaggaaagggctgctgggtgcgggctttaatgcccgtgtagaggtcctcaggtgacgtgaaggtggggaacatggtgccgcgaccagatgtgtgtgtggtaggggtgttcaattggatatggcaagcagatctctcctactgttgaattaggcggcttgggtatcaaagaatcatttccatagacatcactttttttgttctgggtcaaataataaaattgttcaacaggaagctttcttggccaggtttctccaccaaatccataatgctgatgtcctttgcccatgacacgaggaggctcatactttggcctgtggtcctcggggagtgaaatcggtattatcccaccatactctctttcagcgccccaaggaagcctacattgttgaagtgactcccttaattcctgatacctgtcctctgaggcagttgggcgagtaaccgtctggagggggttgtgcaattcacttagagtaaaaggtgttggacagtatgtcagctccttcaagctccctgcaacagtagggcctgccgtgaatgacttccatgcttcttggctaacaaggcacaacctgggacactcgagcctgggggcgctgacgggaccgcgcctcccctcccctccccgcagctggcggccttcgc

SEQ ID NO: 451195 - DNA, 1319 bp, Homo Sapiens
aatatagggaccctgtttcctcgctactgtctcccgcaggacccagcaggacttgaaggcgccgcagtgtaggccaggatggagcccccgagtccatacggagaaattcctggtgggctggtgcaggccaccaccacgtgggtctcggctggcagagcgcgcagcatctctgcccggaagcgaccctcgaagccggtgaagagcgaggacccaccgcagagaagcacgttttgggccaagtccgcgcgcatctccagtgacaacttgcggagactctgcttggccatggtggagaggccgacgggtgacagccccgggacctctggggggttgaacagcagctccggacactggaacagctccttgcccagggtgaccgtgcgcccatcgggcagcttcagagtccgcttgtactcctgctccggccgggcctgctccttctggaagtcggaggccacgtagcaatagtggtgcttaatgttctccactaggtccaggtcctgcctgtcccaggggcaggccggcctggagcagcatctccgccaggaaggcggtcaggttgttgcccgccaggtccagacgctccgtggcgtggagcaggttgtagccctggaagacgggcactgtgtaggtgaccccgtgtcccgtgtccaccaccagcccgctgacacgaccgtgggcgtagacagacagcaccgactgcgatgccacgtacatggctggggagcgcagcgactcgaaggccacctccactagcttctcgcggttggtggccgggctgaagggtgggtcggagaacagcagcgggtggtcgtgggtggccactcggaggtcgtgctccagcaggtggcgccagatgagctcggcggcatcccagtccacgacgatgccgctgcgcaggggttgcaccagcgtcagctctgggagcacgcgggctgcctcgccgatgaacgtctgcagcccggactgccccgaggtggcgggtttcttgggctggcagcccaggatggtggccacggtgtaggtggggctggcctgcccagcaaaacctaccttacaggtgcctgtgcccatgtcaataaccaccgcgccggtctttggtggcagcctgtcggccaccatgccgggggagtcccgctgcaggggcttgttcaccacgttgggactggggtttgggccgggcctgggggcctccagggaggactgggattccgaggacttggggcgacttgcatccatggttgcggacgccaggtgagggggcttttcctctggggttggggttgtggggagaagaggttgaggcccggccagtgggg

SEQ ID NO: 451196 - DNA, 858 bp, Homo Sapiens
gtgtactttcctgatcagcatcttccaagagctgcaggaggattctctccagctttctctggtggtctccatggaaggcagccctggcctcccacgtgggggaactggtctccatggggcagcccagcctccacagggggagccatggcctccacaggggcagccacaacctccacatccctctgctcttcttctgctccttttcctccagcagcaccagcagcagccaccgccgcctcttcttcctcctcagctgctccttctgtgcaaacccctccggcagtgccaggcctggccaccctgccccctgctcccactcatggggagacaccagctccttgtctctctctttctgcacctccacgaggctggtctgggccattcttagccgggaggccgcctccttgcgttccgtctcctgctgctccctgagcttcttcaggtctgatgccaaggcctgtgcggctgatttgtgcagtttggcgaagccgtgcagccaccgcaccctgtgcctttgtagctgtgcctgcctgtgggcaaagcgcactcccaaggccaggctgccccaggtgcaggcctctttgacctcactgggcacctcgctgtcctccagtatggccctcagcttgtcttccaccttctcccaggataaggatatattctcaagatagaactcggggcctttcgtgtgcctggccattttctcgttgatgaaggccaccacgttgctatgccggaacccgctactggggtcctcaggtctcaaggccatgatcgcctcttcagccagggccagaggaagtacaggccaaccccgctgtcttaacacgcccgaagagagaggaagatctctctccc

SEQ ID NO: 451197 - DNA, 580 bp, Homo Sapiens
acatctttattgtgactcagtagcgttttgagtgtcggttcagctaacctgactaggttgcattctttagggcttcatcctagcagtccccaaggctgctctagtgctttcagttctttgatcctccaataaactccctgaaaggacaggttgaataagtcctctgtgctaacattaaggtatgtcagatgaacatttttctccatacaaatgctggatcctttggatatcatcggcactgagctggaaggttctagggtcgtgataccagtaagtggggtacattatggagctctgattcccagagtgctgcaggcccaaagaatgcccaatctcatgagttgcaaccaggaacagattatatccagtgtctgaagctgaccagtgttcattcttgtcaaaatggacaactccaggatttccagaatttggtaaaaaggcatggcctaagataccacctggcccatcaaagggccaaccatcttcatgggcccactgccagaaagaaaccttgatgtctgcatctccattctgcacttgctggaataatcaaaggggtcacattgctccagatggaaac

SEQ ID NO: 451198 - DNA, 596 bp, Homo Sapiens
gtccatccacactgagcaacctgtcaccgggtttgatcgtgccctctctgtcagcaggccctccaggacgaacacatgttatcacaactggacgagatttatttctatcatcatgtgctccccctcgaattacaaaaccaaaggtattgccttctttatgtaatgtgacctccactgttcggaaaataacacgttgatccttgcacagagaccggtggaagctcgtactctacttcaagaaccactctttctcccacattcttcagcaagctgatgatctcgtcatggcggaatttggccaggttgattccattcactgctttgatgtagtcacccacatccagctggtcacttctagcagcaattcctccttgccgcagattagatactcttggcttgccatccttatcaattcctcccgataccgtcagacccagggtagtgccttccttcttcatcagctcgacgactgtggagcccttgaattcctgctaaggacaggtatcaggcaaatccttttgtgaggacttaaaactctaacttcagttctcattccacatccagtcttctttctgcactatcactttaatcccggg

SEQ ID NO: 451199 - DNA, 866 bp, Homo Sapiens
  misc_feature (15)..(15): n is a, c, g, or t
aatcaacagtttctnaagcatactaccacagtttttatgacctctccatcatcttgtggtttctagagattgacagatactatgtttgttttatagatatggtaattaatgaaacaacttttaaattgtcttccattctttcttcctcagttcatttctttttgtcttccccactgatagtctttggcagctcttgaataaattctacctttctgggatatttgtaaggtgctgtagtttttttaacatgctcctgaatctcctttattagttgttcttgatcatgtgacttgtaatcaggatttagaacgacaaaagcctttactacctctcctctgatggggtctgggctgctgacaacagctgactctgcaactgaagggtgttcattcagggcattttctacctcaaatggtccaattcgatagccagaggataatatgacatcatctgctcttgcaacaaaccagaaatacccatctttatccatatatcctctgtccccagtgatatagaaattgcctcgtagagttgaagctgtttttgaaggattatctacgtaatgagtaaaaaggccaaatggtcggttgggtagaacttgaatgccaatatctccttcttgtccaggaggtagaacattgccatttacatctacaatcttaacatcgaaagcaggagaaggttttcccattgagccaggtttaattttcattcccttaaaatttccacagattagcaccgtttcagtcagtccatatccttcgtagatatccaggcccgtcttgtttctccatttttcagtcacgtcaggggtaattggttccccagcactcacacagtgctttaagcttttaaacttatagctg

SEQ ID NO: 451200 - DNA, 558 bp, Homo Sapiens
  misc_feature (449)..(449): n is a, c, g, or t
  misc_feature (470)..(470): n is a, c, g, or t
  misc_feature (490)..(490): n is a, c, g, or t
  misc_feature (509)..(509): n is a, c, g, or t
  misc_feature (516)..(516): n is a, c, g, or t
  misc_feature (525)..(525): n is a, c, g, or t
  misc_feature (548)..(548): n is a, c, g, or t
tcctggtgtttcaaatatttattttaggtagtaaaggcttttgtcgttctaaatcctgattacaagtcacatgatcaagaacaactaataaaggagattcaggagcatgttaaaaaaactacagcaccttacaaatatcccagaaaggtaggcatcctaattataacgaatatttgctcagtgttgtggacaatttcaagtgtttatttttacattttaatgaatattttcttcacacatgctgcaccacatgtcccaaactgaactgatgacatatgggtaagaatcagaatctttgagattaaaatgaaaccctgaacctattttgtttggtcctttggcttactggactcacagtaaatacttaatatccaagacaactttcctaacaataccctttttccctattttgggctgttaccccaaacccattcccaaggactaattcnaattcttccacctagaattcntaatccaaactggccaaaanaattgggccttatgtaagntaaaaanttccgggcnaatttcctcccccggatgccaanggtggaattt

SEQ ID NO: 451201 - DNA, 1467 bp, Homo Sapiens
  misc_feature (16)..(16): n is a, c, g, or t
  misc_feature (26)..(26): n is a, c, g, or t
  misc_feature (51)..(51): n is a, c, g, or t
gaaagcttctggaacnaaccttcccnataacaggttgatgcaggaggaagngcacgtcctctcgtgcgtcgctgaagtgcggcaagcaggatctgcagcatctccacatagaccgcactgtccatcagcttctggtcccgccccttgaagacagccttgaggttgtggaccgcttccaccaccagcatcccatccatgttcttcaggcccttcaccatggaaggcaggagggccttcaccttggcggtcttctcagacctgcgggccaggatgaccaggcctcgaatggacagcaccttcatgatggggtcgtggtggctcaggccttctgccatccgccccagagagtattcctcggggatccggcgcacctgctccatctggaggagctccacgaagaagggcggtggccgtgatcctgtgcttctcgtcgcctcgctccaggagcgaggatgagcacggtagacggatgcggcacagctcctggcaggagtactgcaccatggcccttgccagacaaggccactccgcggtggtggctctccacctgctccatgagctcccagccaccctggtcctccagaaacgtggtctcataagagcagcccatcctcagtagcagggttttcaccactttcaccacccagcgcacaggtacgaagggagagggctgtgcacccttcttggtgtccttgggaggagccacgcagccaggcaggtttgaggccgatgtggtaatggacctgaatgagcagggccaggagcagctgagggtagatgcgcctcacacggcccatgcagctgttgacggacaggagctcgcacaggccgctggctgccgccaggggcacgatggaagcccggccctccttggtgacgggcttctccttcaggctgcccaggagcagatccaggaggtctcggacatcacagctgggcttacacagtatcagctgcctccacatctctgctccattgctgttcagtgggagggggcacatgagcagggccaccacaacctcggtcatgaaggagctagccaggagggagacgggcagcagggccacctggcgggcccgaggctcctggatgtggctcagctgcatgtagatgccttgcatgatttctgggatcacctccagcgccctgtggcggtaccactccagcaccgagctgagcatgacctccgaggccagctgcatcatctccctggagtccttccgtggagcctctgagctgcctttcagcccttccagggcggccagcagcaggtcctttatctgctggggccccaggaagtctccaaattcctcgatcacccgcagaatgttctggcacgggctcacagggttgtagggccccaggaaatgcttgttgctctcatatagctcctttttgttggtctcttccttatctctggctcgtttttggagctccagaatagtgtagaggatgatgatgccgtcc

SEQ ID NO: 451202 - DNA, 1408 bp, Homo Sapiens
  misc_feature (53)..(53): n is a, c, g, or t
  misc_feature (469)..(469): n is a, c, g, or t
catattggcattacaatagtcatttatagaaacaacagcaaatgcaataaaancaagttaccctttttaaaatctgaaatgaaaagtttttgttttaaaaaaaatagcagtagttcatttaaggaattagtgtcttctgacagacattaagaaatctggtgtcagttttcaaacactccattagccaggtccaaaagatccttgatttggagagggctacattcttcatgtacactttttcaaaagtttctttatagagtttgcaaggtttctcttagtctcatgtccttcacatctgtgctgtcggcaatgcagtaagtctcccagagcaacatttttcaacaaagggtcttctttcttaacatttccaagagacatcctactcattttacacagaaaataaactgtaagcagtttctttagcttagcagctccagttcaggagtcccatttccttaggtgtgcacangatggcgcaaccatcatagactagattctttgggaggaaagtcaacatttgtcaccattgtgaccactgttactatgtcctctgtggtaataatatttgttaggtctctgcatctgggtaattctttcacctacacatccagctgataacctggcttctgcgtcgtgatcccaacattcttcaatggtttcacagagcattgccattccagcatgtttctgccaataatctcttaaaacaggcctcttttttttatgcacaacaacttcctgcatgtcttcaagagatggatgctggccaatttcctcctcaaatggcaacatgtattcatctacaggtccatctgcagcagtacagcgagaagccagttcccataggactaatcccatgggcatacatatctatcctcaaaaatgcatccctttgggaagtttatagcaccctctaatacctctggagccatgtacctccgggtaccaacctgtccatgggtatcgcctgcagacttgccagcctcaaattttaaggccaacccaaagtcagcaatgcaagctgtcaggttgtttttcaacagcacatttttacttttgatgtccctgtgagatatggcaggtttgtggccatcttttaggccaggtatatcctcatgtaaatatgccaatcctctagccatggtttctgcaatatgacacagttcattccaagagaccacattagccttaagaaagtctgatagtgaacccttttcatgaaatgctgtgatcagccaaagatccacatcaacactggtgcctcgtttttctgcaccaatgaactgtaatatgttctcatgcttcattccaggcaaactgtagacttcgtattcattttgccatgactgtttgtcctgtattggaaatattttgacagccacatattcgttaagcaactgggctttcc

SEQ ID NO: 451203 - DNA, 872 bp, Homo Sapiens
cgctcatagtgggcttcaccgggccaggggaacgaagcactggattagtaatcagaaagagcttctgtgtcaggactctgggataggtgcctccgcgccaaggctttgtaacgctcgccactgacggaagttctcaataaacgtccgtggaaattttggagcggtcacctagggaaggcttggatagagtggccaacaggacctccttgcccggttgtcccatgtggcccctggccaagctttttccaggggcacaatggggaccagttgagcaactgctggtggagctgagcggaaggcctggaggaccctcctggctgacacctacagccttagagggcagaatggtcttcacattagatgctgtcacaaatggaggtgcaggaccctcaaggcctccacagggagtgcccggggcagtcgaattgagggcagtctgagtaaggataaagttctgagtttgagagggctcagctgaccccccttctgtcttgactttgacaatgaccttgccagcacccagccccactgaggcaagggcccccgtcccctgtcaccaacagtgagctggggaaagcagagagcatcagagggttgtctggagagaatactgaaggcatgatgggctgtggaggtggctccctgggtgggtggtctggtgggtcagaagttggtgggagaaagggaagtgcaggggatggagacagggcggcactaggtttcatgctcatatccggtcccggcaatgcagatgctccatctgaagccatcctctcaggtttgggcactaaccgtggctgtctggaagcctccagaatgaggcagtcaggtccaggacccagagtaacctggctccagtaggtgcacaggga

SEQ ID NO: 451204 - DNA, 987 bp, Homo Sapiens
tcgcgcacggccacatctgggcagtgctgccggtggagtgcagcttgtccaggagactggtgatcttgggcaccaggctctggaagtcagcactgcccggaatgcagttgcgtcctgagaagccgtcgctgcagcggatgcactgcagcagccgctgcccctcccggtccagctcctccacaggggccttcagcacctttttcttgagctgtgtgtgttcgtcaatgagccgccgagagccctccacatccacaggaaactccttccgggctagcatctcctggaggtcctcgaggcgcgagagcaggtgcacggcgctgttgaagaactcctccagggagagccgcagttcgatccactcctcatggttgtagtccagggagccatcaaactcctccgtcagctgggaggggtccaccagctttgtgaggccctccacagataccatgctcgtctcaaagatgaatttggagctgccaaagttggtcttctgtttctgccagaagttgtcgggtttaatgatgagggccacatggatctcagctggaaaggcttcctgcagcgttttgaggaggggcttgatgaggtcccacttggagccccgcatgtcgatgatgacagtgaagccacgtttgcacacgtcctcacttggcacgctggccaaatacgtcacgagtttccgcaggtcttcctgtcttattctgtcatgattgctgcgagcagggaaggtcaggatgggtccgcctcgcttatcacgacccccagacacgaaggccaccttttcctttaggataggaaggacatcagaagctttcaaaccatcattccgaaaagaccagtaagaaaaagttggagcaacttttcccttggagattacatcaaagatacttgaggttatgttttccatactagttgccctgatcttgtctggaacaatgggttggatccaattctggcagcaggaacactggcaacatagaatgcaac

SEQ ID NO: 451205 - DNA, 829 bp, Homo Sapiens
ggatctccggggtactcagcttgttgtgcgaaaggtccaaggacacaaccctcaaacactcttgtagatgcctgaatgtccttccacggtctccacggtgattgtgggccatctgcaatgtgtttcaggactgggaggcaagagaggttttcaatggtcttgatgtaattgttgctgaggttaagagcatccagtttctgcagaggttccaggttctcaattttacggagcaagttcatttgcaagaagaggcaacgcaactcagtttgggcctccaggtttttcgattttctgtattccattgctctgcagccagagacagcgcagccctgtgtactcttccaggttctcaatgcgatcaaaacctttaaagtgtaaatacagcgtatcagttcaatgctggggtaatataaagcttgtgctgcttgcagagtttttgcagggaacttttagtcattctggggccccgatcttccctgtcttctcttgggtgtgcgaagtgaccacctgacccattatcaccactctgtttctgctggctgtggtaggatgtgtcagaagaacccacacatatttccttaggatcattaatttcttccttgcagccccctcggcctgcgctcccgtggtcacccgcagactcctccacgccgggctcctgcgcgcaatccagctctgctgcaccacctgtcgcaggctccgagggctcagggtgcatgtttacttcggcgacaccgaacgccccgcagctttggggggcccaggttcgcggcggacgtcgctacggccccagcccagccagagagtaccctctttccttcttcgccag

SEQ ID NO: 451206 - DNA, 1017 bp, Homo Sapiens
tttttgaatgcgtccctgagctctgggctccggaaggcatatatgaaggggtcaatgacgggattgcacatgatcaacatgccgttcacctggaagagagacatgtagcaggcgcagtaggggttacttgggcagaatgtcatcaagaggacatgaagcacaaagggggcccagcagaagatgaagaccccgagcaggatggtcagtgtgatggcccctttcatgttggctctggggagggtggagatcttcctggtgtgggatcgagccagcaggaacatgtgcacatagaggcacaggatgaagaccagcatcagcgggaacagcgacgtgaaggtgatcactgtgggcacatgatgggagaagatcaccatggtgatgccagtccccgtgcagaacgtccagatgaccgtaagcaccaccacagtgcggcgcatggtcacgatgctgtggtaccgcagtgcgtggaagatggtgatgtagcggtccgcagcaatcacagacaggctgaagatggagccaagcagggagaggacaaacagggagtcgatgatgtcatcggctgtggtttcaaaactgccacgtggcttgagatagcccatgtttctcaatatgatcaggatattttccaagatcttatataggctgcccagcatatcagatatggccaagctacagatgaaaacagtacatgggtgcctggcagatacttattcttgaacacaggcagccaggacgatcagattctccaaaagtccaacaatggaaattggtgaaaatatctcctcgggcaaaacacacgaggacagtcggaattaattcgtggctgtgtacgttgaatgttttcattacggagttggataatgtgccttcagtctctaccggactaggtggataaggccggggacttttccacttggcacttgcacttccagcggaagacactgactggagtccacccggaacctcacataccttggtagaactgtctggagcatctaggttaaaattctcaca

SEQ ID NO: 451207 - DNA, 541 bp, Homo Sapiens
cgccgcggcactgctacgggacgagccggagcgcttggccatggcggcccgatccgcactggcgctgctgctgctgctgccagtcctgctcctgccggtgcagagccgctcagagcccgagaccaccgcgcccacccctaccccaatcccgggtggcaactcgtcagtgagcaggcccctgcccagcatcgagctccacgcctgcggcccataccccaaaccaggcctgctcatcctgctggccccgctggccctgtggcccattctcctgtagggacgcccagccagccacctctaagtcgccgctgggactggcctgccccattgagcaacagagacgcttgacagccgcccgcctccattccttgacttcacccagaaatgggtccagaaaactgaatcccaccagcactggtttggagcaaccggacaccgaggtttcacctccagggattccatgaagagcctcaatggagatgccacatcctactgagttaaagatgggctgaggaacttgggtacccacaagtctgatccctgg

SEQ ID NO: 451208 - DNA, 884 bp, Homo Sapiens
ctcccatatatggttaccaacggttagctctacaagttcagagatgcaagggaaaatgccagagtcactaccacgtgagataacttccataactgccccatcacgacaccagaagaattctatcgcggtagcttatatggtagtatcatcattgctgatctggatgccacgtatattgcagcgaatggccccataagtaactgataacagggaacatgtcatcagcatgctctattcaaaggccattctcgtatagtgagactgatatacatctgcaaaattaattgtggaacagaaccgagaaaagcctgaatcactgacatgtacttgaaagccttctgctgcatgaaattatcccggattgagaatgcaatctccctttccagcatcgtgtttctctttgtgatgctaacttgagtctcttccttctcctgtttaagatttttcaaccatttgtggtaatttctaatggtgtgcaaacacctcacaataggtcctaaaagaagaatgtgccacaaaagtaatgcagccttatttctcctcaagtctttgttgaaaaacatcaggataatttgatccaaaattgcccccacaataataaagctgatggtaaatgacatccagaatgtgtcattagcttttcgataaatttcaaacatgtataaaccaaaggcaacctcaccacagtagagaacagttgagaagataatgctaaaaggaaagcttagatggagtctctggccaaggactatttcttctttcgaagatgaaactcctcctgtgctttcttcatccatctcttcaaacactgtctccattctcagggtgcttattttttcttgcttccttgatgctaatacaagagacagtgggagggagtttca

SEQ ID NO: 451209 - DNA, 571 bp, Homo Sapiens
ttttcattatttattttatttcctgattctttcccctgccaagtgaccctctgggaaagcgggagtttttgttttgctttctaccagggctgcaagagcctagaactgggtctggcatacagcaaaggctcatttattgctgaatgaatgcatagtttggggaaggggaggacaagctgaggccacatttgggacgggtgctggggtggggtggagaagggagctgctgcccagagggactcagtaagattcagggtgggggccaagaccagcagctggcagcaggttctgagaggggctgggcctgcctgaacagggaaggggtccggcagccgtggtcaccttgctgggactggtgtgtggggccacaggcctgttgaggctgggcctctctgccacctgaggcccgcatggtggggtgtctgccttgtcctaaggggagaagactctgagggtcactagtggagttggggtagggcattgaggacagacagttgggagcccagccaactgcctgggaggcaggcctgaggccaccatcttgtccccagatatccagatcttgggggac

SEQ ID NO: 451210 - DNA, 887 bp, Homo Sapiens
catggcggggccaggagagaggtgacatggtgttgaaacagctgctacagaggcctcaacatcctctcaaaggagacaggtcacccatcggtctagggattttgccggagtccgattgggagaaaaagaggtggaaaaaaccccaacccccacccgcgcccagcaggagagccccaaaaggcgcgaggggccggttggcggcgccggggttcagaggctgccctcgtccagcatccggcccaggccctcgcagatcctgcgcaggtgggacggtagggctcggcggggccgtagagcgcagccaggaagtcgcagtcggctagtggccgaacacgtggttgatgcggccgtgggacttggcggtcaggtggggacccacggcctggtgcagcaggtcgcggcactcgagcagcccggcggccagcacgcgccggtcgaaggtgaagtccacctggtggaagctgacggccgtcatggccaggcagcgcgcccggtggcggaagcgccgcagcagcgccagctcctcaccgcccagctggtccccacgcagcagcagtcccagcttcagggccaccttgaccaggttcttgagcatcttctgggcctccttgcggctgcgcgtgaactccctggtggcgcggtacagctcatccagcacctcactgctggtgtcatccaccagcacggccaccactgccttggacgccatcttactcaggagcttcttctgcgcctgcagagccaggctcttggtgctgaaggtgtccatggcctactctcgaagcagagtccgtacgtccaaccgtcgggggtccgtccagccgcctccgtgggccggggccgttgccgcggcggtgggagcagcgccggagccggggccggggccg

SEQ ID NO: 451211 - DNA, 948 bp, Homo Sapiens
cgtcttggtattaggcttttccttggtagaacattttattgtgggttctccaatgtggcttcaagcgggtatagtcaattgggggtaacaaaagacaagatggacaaacccggattccttggtagcgctgcaagaggaagccccatcccaccagatagctgggtttgtagggacagtcaggcaggacgtggcggagatgcgacttggggatcagaggcactcgatagagggtgtcccgggggtcaggccgaagcatgtcagcgggcggctgctcatccctgggaagagcgttggaggagtccacgtggctggctgctgtctgtgggatgtggcccacctcatccatctgtaggaacgtctcatttgtgaagagggacagggagagggagtcaatgatggtgaacttggctccagggtcgttccgtcgccatgcaacttccacgtggtcggtgccctcctcattctgcttgtgcagcacctcgaagtagtacctgtgggaggctgacaggctcaccggcttggaaatttggctccgaaatttcccaaactctcccggggcggtccactcctttccagtcttgcccacactggccagcagctggaggcctgagacctggtcatcgaggctcagccagaactccgcgttgtcatctgcagcaatggcaaactggattttcccatcagtaaaggggtgcaggtagccaaagatgcggaggccatagttggtccatttgggggacacagcaagcttcctcagggttgtgcgaatatgggggtacagtgggaaatgcaggttcctcctgagctgctggatagagctgccacaccagtcttcaaacacatgcaggttggcacggccccggaactggtgctgatgttcaccccatggcctggccttggggacaaggtctgctctgcatcccgtaatccgggccgtacagacacctt

SEQ ID NO: 451212 - DNA, 829 bp, Homo Sapiens
tgtggccctggaaagcctgcactggtgaattttcggccacccggagttttgcggacttccggaaagatggatgccataatctttccgtcttcagacacctcccgtctttcttgcaccgggagtcggcccttccagtgggtgctggacttctgtcttgacgtctcccgggaggacttttctctctatcttcctgtggtggtgttttccccgagttaattctttctgtctttaaactcattggctttggaggagctaagtggttagatgaccatctttgtcccaggagagtggcactctgactcttgcggccagcgtatttgggtgttgtctcttcatcagctgacagaggtgaaatttttccaaaagcaggttccaatgccagagtgtgtgattctcgccccgcgtgtggggacgctgcgggtttcttcccggcttcccactgctgccgctgcaggcctctcagctcttctcggagctcccggttctgcttcctcaaggcatccatatgactctggagttttctgtgaatatcagcccacagcgactgctgtctcccgagctcttggtggaggctggtgatctgctgctgtaatgacggcatctcctcggcattgccgtccatccctggggacctcggctgctgcaggtgtcttctccatggcagccccagctcccgggcacgggtcttctgggtgggtgccctccttgggctccccggcctcgagctgaccctccagcatcctggtccccgccagtcacttctgctgggaccagagcatctgggccgtgtccccacagactgtcccacaagtcctcccgcctcatctcc

SEQ ID NO: 451213 - DNA, 1184 bp, Homo Sapiens
gtcacaaggtccctggagcgggcaatgccttgagcctaaaggctgggagcacaaagccatcttcagccatcctcgatttccagcaagaccccagggctcacccaacagcccgacactccatactacaaggtgggttaattttttaaaagactctgcagaaatataccaactacagagctcaggaaagcaactgatttataaaacccaatccaagttgtttgcttttatagcattagagacatgtctgaagaacttcaagtttttatctatagaaacataattagtttaataaattactaggtctattttgaataacaaattgagtacttttattagacctaagtggaactttatctgaatctgaattttccaaggggccagtgtagagtgacacaggtgtccgaggccacctttccatcttcagacacccccccgtctctctgcacagggagttggccttccagtaggtgttgctcttctgtcttgacgtctcctggaaagatttttatctctattttcctgtggtggtgttttccacgagctaattctttctatctttaaactcattggctttggaggagctgaattgttagatgacgatctttgtcccaggagagtggcactctgattcttgtggccagcgtatttgggtattgtctcttcatcagctgacagaggtgaaatttttccaaaagcaggttccaatgccagagtgtgcgattcttgccccgcgtgtggggacgctgcagatttcttcctggctttccaccgctgcagctgcagagctctcagcttttctcggagctccatgttctgctccctcaaagcatctatatgactccggagttttccatgaacatcagcccacagagacttctgtctcccaagctcttggtggagtctgatgatctgctgctgtaatggtggcatctccccagtgttgcagtcctccgtgagaacctcggctgccacagctgtcttctccatgacagccccagctcctgggcacgggtcctctgggtgggtgccctccttggggttcctggcctcgagttgacctgccagcatcctggtccccaacagtcactactgccaggatcagatcatctgggccatgtccccacagttgtccccaagccctcctgcctcatatccagagaccagagagcagcggacagttccaa

SEQ ID NO: 451214 - DNA, 679 bp, Homo Sapiens
tgggttcttgttcgttagcaagttgggcgcagcagagtgggttgaaacgcggagtcttaatggggaagaaatgtgggtgtaaatgagcatggccgcaaagtgggttacgcaggcttctccaaggatcttggtaggtgaaatacttggtggtgttagcacggcaaggcgcatccaagtcgtggttggtccactggcattgcttcgtacgccgtagcgtacaaccactttggattctaccaccagggcatgccatgttgtgtaatagtaacttcgtcgaacacgcaataccacatgtttaactggttgcacagttccgaagttcgtacgtgtctttgacgacattccgtatgtgaaacagtcctcggtttcaggcggagcgtagttctccgcggtctcgctggtcgtgtgttttcggtctcctcctcgccctcgccttcgtgggccaggccggcatccgtggacggcagcgctgacgttggtcccgcgcgcggactggaggcccgccagatagcagccagcgcgacagtcagtcagcagcccggcggagcagcccgtgcccctggggctcatgggtctcggccccgacgcccgtccgaggccagtgcgacgcgcgacggcggaggaggaggagagcgagagcgcctcgcgccgcgggagcaacggagccgagaagcccgct

SEQ ID NO: 451215 - DNA, 849 bp, Homo Sapiens
ccagaagccttgactgctgcgcaatttatggttatgaagatccattaagaaaattataatacccagataatgactcctatggtcagcacaaaaattagggctgcatcagtggctggtaggcttgatcttctcatctgcaattcactgctcgtatagactgtgaatttaatagttgctactatttcagtattatccagtgtgtcacactcgaaagccaaggggtgactttccttgcgtacttctaggattgctgaatcatttacaagtataatggattgttggtcttgtcttagaagtttccacatatatttgaaacgatttaagggagatgtgtgaatacatgccaatctaacactttcaagactttctgaaattggtttaccccagccacaatctgttggtccacggcattcttctacccgtacaacacacttggattcaccaccagggcatccatttgttaatataacttctctaacaccaataccacatgtaacggtgcacattccgaattctacttctttgacgacattcctatttgaaacatcctcggtttcaggcggagcgtagttctccgcggtctcgctgtcgttgttttcggtctcctcctcgccctcgccttcgtgggccaggccggcatcctggacggcagcggtgacgttggtcccgcgcgcggactggaggcccgccagaagcagccagccgacagtcatcagcagcccggcggagcagcccgtgccctggggctcatggttctcggccccgacggccgtccgaggcgcagtcgccgccgcggctcctgaggacaggtacgtcgaagagagctgcgacaccccgcccgtagccgcc

SEQ ID NO: 451216 - DNA, 787 bp, Homo Sapiens
  misc_feature (96)..(141): n is a, c, g, or t
  misc_feature (436)..(436): n is a, c, g, or t
  misc_feature (480)..(481): n is a, c, g, or t
  misc_feature (504)..(504): n is a, c, g, or t
  misc_feature (518)..(518): n is a, c, g, or t
  misc_feature (532)..(532): n is a, c, g, or t
gttcgcgggttccccccgggggaaaaagggcttgcccccaaaaaagcgggtcttttgggtggggaatacactcaagccctctgtgtggccaccaannnnnnnnnnnnnnnnnnnnnnnnnnnnnnnnnnnnnnnnnnnnnntcacatagtgataaaagtggttttaccaccccacaagaggcgctccttttccccgggtttggaccccccggtgtttccccaaagcctttggtgtggttaaagtggaaaccccgtgtgtgggcccgccgttgggggtgttgcccaagccgttggttaacccccggttttaaaacggggggggacccttggccccacattttgtggccgcgcgttccgcttccccagggcttccaggtgcgttccgggggggcccaccccaaggggggaagcctcccccagggtaggccttccccanccaaggccgttaggccaaattgcttgttgcccaccgcaaaaggnngaccttgatgctgggcccactcnctggatggagctcntgggccctggcacnttcctcagttcaagctggctgaaggccactccggccaggctacgtgggctggcacatctcagttcagtctcaatgaaggccaagtttggggcccagccatccaaaagatgaaccaggtcatagagtcggcagtcacatgcccaggggttgtcctgtagccctaggacccgcctggggtggtggccgggaggaaagataccggtctccaggtgagcccaggagacgatgagctcctgcgggagcctcatcagctgg

SEQ ID NO: 451217 - DNA, 671 bp, Homo Sapiens
gttggaatacttcagactgccagtgggaagtcccctaaatgattactgtaacgcttaagactcgttcaacttgtgaacctttgcaggttcagtatagccccctggcagctggaaggctagggttctgccttaggaatttttgttttatattgagatgagtgaggtctttggctgtagaagaggttggcaaggcagatgttccagggctacatcacgagaggtccactgagctaatgcgctgggatgcaacataggaagaagagcagatgacaattgaagggggaaactggaagctgaaggagcttgtaacaatcatccttatccatgtcaaattccctgtaggcatatattcccaaatggagcgagattctagtctactctccctagatgcttggagacttgtcgcagccaccttaagtattctgtgaaagtatcaaagcaaatgtagtaagtctggctttggggtccagaggagctaaatgctaaacagtgttggtgctttttcacttcttctacccgaaaaaatgtaatctctccttccattaatcccccacagtaccttcctgcatctttcttacaacagatatcacttgtgcctacttcatcttctgatacaaaatcataagctcttcaaaggcaggcagggttatttagctatgttagtatttctg

SEQ ID NO: 451218 - DNA, 427 bp, Homo Sapiens
cttggctgtagaagaggttggcaggcagatgttccaggctacaacacgagaggtccactgagctaatgcgctgggatgcaaccttggagacttgtcgcagccaccttaagtattctgtgaaagtatcaaagcaaatgtagtaagtctggctttggggtccagaggagctaaatgctaaacagtgttggtgctttttcacttcttctacttttccaccaattagtggcagaacatgcatctttccggtcaagctgtctttcacagatgatactatcaggcaggtcccacataggatgacttggcgtcttgtccatcggttcactggcaactgcatcttgcctttacggacattatacattcctgagagctgaatccgttcagagctacccgtgctgtgaggttttcctgcatagagcggatgaggcag

SEQ ID NO: 451219 - DNA, 698 bp, Homo Sapiens
gggtcggtgaatgaagctgtcagggccacggggggtcacccgccgctggcgtgcaggggaatacaggtgtctgagaggccctcactgaagctgggggtgggggagtctgaggcgggaagagctgacacggagatggagcgtgggccctgggcgctgttgcctgctctgcccagctgggagctccctgggggccagggcaggctggctgctgagagggtgtccgtggaaggccctgagccactttcccgccgcgcatccaatgaactccaactggagtcctccttgtgctcccctcctgcaccacctccggcctcacgttgaaagtgtacagccagtcgctgaagcgggggtagctgttgagctctggggtcctctcaccgggagccacgctcagcttgcactgcctctgcttacaaatgtaacggaccagcttcgccttgggagaggatgtacccttcagcagaaggtgacttcacgggagggactcagctatgagctgtcagcagccaaggctcacggcagctgggggtggagaagtcagctctgaagggggctttgggcagcacatcaagccttttcaaatggtcccctcaaggagtttcatctagaacagaacatcagtccagtcacctagtatcagcagccccacatctgagctggcaacctcaagtctgaggaccccttccctggcaggggtc

SEQ ID NO: 451220 - DNA, 829 bp, Homo Sapiens
ttagaaatgctcataaggctttaacaagacatttctaatgtggaaacaatgacacctccccagaagctggccaagtgcacctcctggaattaaaacaagtcctgcaagtgtagttgccacagtgggtgttaatataaactgattttctaaatatataggcaaaaattcagaagctccaataataactaaatattctgtagcttttgacagagctaggcatatgagcactggattcttcatcagaatccaaagagcagcacataaatccttgatattagttccaagtttcagatctttaagtctgctgtcaaaaaaatgaagctgtttacgtttcctagcttttatccgtgttgaacctggcatattgtttggaaagcatgacaatggtattaatgtacaccatgcaacgacagcggcaaaaagaaaattaatccaccaagtccatagccattctggactaccattattgactgtagtgtttgttgcagaagtagtattctcagggactttaactagtggtgctcctagcacataacccagagcatatccaatcattgatgtacattctgcaatactcttttccaatgccaacttctcaatggttttcagttgatattccttctgaaaatcgccaatgctgacatctataagaccaaacaccacaccttgacatatgagcaggatgcagtagaaaatcatgaagcagcgaatgttattgcaacactcacagcaggtgctgactaagcagcccaaaccacagggctgctccaaactgtcatccacttctcccggcttcttggaaactgaggacttggcttttttccttttt

SEQ ID NO: 451221 - DNA, 1038 bp, Homo Sapiens
aggggctttaactaggggggtccctaggcccataacccagagcattcccaatcctggaggtccattctgcaatcctaaatagatccccggcgagtgtgtagcaacatcctcatcaataaaggttatcccaaggatataaagaggcattcctgctattccctggcacagtctgcccaaggatgaagaaagaccaggtattttgattggaatgatataccactgctctggcaaccactgacaacctttatttcttcgcaaatatcttcaattcctaccttactttgtttattttcttcattaatggatggaaaagcacataaaagtgatccaagtcctattaaaaaggaggaagctacaacccatattactttttttctgtctccatagaatgctataaatattgctaccaggccagatgaaatatcgtaactcttttccaatgccaacttctcaatggttttcagttgatattccttctgaaaatcgccaatgctgacatctataagaccatacaccacaccttgacatatgagcaggatgcagtagaaaatcatgaagcagcgaatgttattgcaacactcacagcaggtgctgactaagcagcccaaaccacagggctgctccaaactgtcatccacttctcccggcttcttggaaactgaggacttggcttttttcctttttcggaaaccgccgaaccttatcaaggcctctggaagtagtctcagataccggtgttttttcccgggcttcgaggacttcggggttcccttggccctcctgtccttagcaggctgggcccgcgcggcctccagcggctctactccccttgagacttcatcctggctcccagagtgccgggcgacgcctacgaacatggctcaccctgggcggctcctggcgacgcggcccgagtgctctcggctgcccgtcctgcctgggccaacccaaaggccagcctggccgagggcgtcggaggactcggtggccacaaggggctcttgccgcccaagcatcccggaaattccggaccggtcc

SEQ ID NO: 451222 - DNA, 636 bp, Homo Sapiens
  misc_feature (159)..(159): n is a, c, g, or t
  misc_feature (358)..(384): n is a, c, g, or t
tcctcctctgggccggcggggcgggcgcgccgggactgtgcacgatgaagcagagcattgcagggcccgcggaagaagcagtccccggctccgggcgccgccggctgagggggcaccttggctggggtccggcgggtcagcctgaggagagggcgccgngcggcggcaccaactgcaacagcgaggcctcttctggctcgggcggttacgcggctccttcgagagaaggtggcccatatagaaggccccgaggagggggaccgggacgggagggagggagacccagagaggcagggctcccggcagcggggcaggccgctcgctggctcggcccccggaggggtcgcccttcctgcgnnnnnnnnnnnnnnnnnnnnnnnnnnngcgacggtggggggtgggcgtcagctgcgggccgccggagtgcccgacgggggctacatgctttgcccagggaagccgggagaacgatgggcgcgagctttggggacgcgagggagggagcgagcgagcctgccggctaggcgaccagtccgggcccggccagccggctcagtcagtcagcggagcggccggggaaaggccgggtcccgactacggaccattttaactgcggatccgccgccggcgcgcatc

SEQ ID NO: 451223 - DNA, 726 bp, Homo Sapiens
gggctcgcacatggctgccacaagaagggagagaacttgtcagtcagccctgggagcccggctgtcactcacagcctgacagctcgggctccgcgtcttattttggactgtgtcgctctccgcaccaccagcagcgcctctcagtttgggtcttgggtgtctgctgaggtgacttgagtagactagtgggtaagagtagctggcaacaaagggaagggggtggtggaaaggtccaagcctccctccactctcgtgcagccgggagtagcaaatgcagggttttcctgttacgggagccatggtgccgctccttgtgacgtgcagtggtgagcactgagccaggaacagtgggcagccgcttgtgtgagtgatccttcagcaaactccacgccctgtgctacctagaacctcatttaactttgcaatgatgtggcatgaaccaaagagaagagcacagtcacaaagagatggaatttgcatgggatggagagtctgtcagagttttgaattccaagcctgtctcttctgtctggtaggtggcccacatggggacacgagggagtctcccggtatcccggtgctgaggtcccaaagactccgagagcctccgccacgctaaccggaagttgtgactgtcgcttcctctccatctctgctctttacaggagaggctgaagctcggggaggcggcaggggcggagtgtggggagaagcagctcccggatc

SEQ ID NO: 451224 - DNA, 590 bp, Homo Sapiens
gcctttaaatcaaactgggttttattgtccctagaacttgaaacattctatggttggttctccagatcaaacttccgaaactgcagtcaacaatttttcatcagagcccaagggagaggggaaggggtgaaagagacaatagatggagaaaggcataatgaccattaggaagagggtgggaggagacacatcttcctctgttatcagtgagctacatactagacctgttgatgggaccaggtgatggtacctgaatggaaaatgacactgtgacgaacagcaaagcctgactacaagtcataaaacttcaaacagaaagggagccttccagtttgtctcagcaatggaacagcaatgggaaagctagggccagcgtggaggcacacctagaggtagttcttaaaaattcttcttggaacttccttttattaaaaagattttataaaatatgtgtcttttcttctacgcctgagtgatatatatgaccgtagggtggccttgaggctgtggggagagaaagcggcagccaaggatcttcccagggcatcccatcagtggccccagagatctaaatggggcagatatttctc

SEQ ID NO: 451225 - DNA, 904 bp, Homo Sapiens
aggttcatgcttaccaaagggttcttccgccattctgaatcgccaatgtccacataggtttccttccaaaggtggaaacaaacccatcttcagatggtttcgaagaatgtgttcccgatcatttcatcttctgggtagtaagttctttgtcttcactcgatggaatgggcaaagcataccgtaaaatggattctcctgttgttggagatcttaggaccattggttcaattttatcatgaattaattttgcattatgtttttcctttagctcaggtgataatggtaaattatgtagtccttttttagtagttaatgctggaacatttgccgatttgttactggtggtcaacagatgctttactggtttcattttgttactgacttggcttccaaattacagatgaaaaaaacttattccgtccattcatttcaaatcctgttaatgataaagtgtacaaaatagaggagagcggcaggggttggcaggggacgtagggaaaggatgatttgccttcgatcctacatcctgcataaaaagcagcacaaccgccacggaggcagccaggcagcgggaaaactaagtgcaaagccaggactctcccgaaaccctcaggtcctgctaagggagccgctcccgaggctccccgccctgtgtacctgctgagactgtgggaagtcgggtgactgggcggtttggccttgctggctctaaggtgaaaaactatttgcctgaggaagatgacaattccgagcctgccagacttccttcgagacggaagcctgaaaactcctcagactccagcacctcccttttacaaactgacgtttgtgctgaaagaaaaggcccggcctctgcgcccccgggcggcagcaaagaccgccgggcacccgccgccggcgccgg

SEQ ID NO: 451226 - DNA, 1737 bp, Homo Sapiens
  misc_feature (616)..(616): n is a, c, g, or t
tcactctctgaaggtttgggagacttttccatagtatttcagaaactctattagcatctgtggatattcttggattttatcacgttgttctttgtccacctgaagtctgaaaccagtgattttcttgattgtctttctccagaatggtatattttttgaatcttcacctttaacttttgtttgactattacccacttgcattgttgtctcagtttttcccctcacttttaagtaacttctcttgatttaggaaatagttaagttgatgcttagctttttcagcttcctgtaaagcctgtatcaattggctcctgaaggactttgttctcaatttccagacgtgctactttctgtacttgatccaaatcttcttttattttaaactctttttctggagacatcttcttttctgaagtcctcagattttcctttgtcgttttttcttcactgttttcaacgagctttctttgttcgattatttgtaggcttagttttctcctccaacataatttgcctgggttttcaaatactttcaacatggcattaaatcgattagtcattgattgagcagtttgtgtttctgttgcagaaacatctttaaattcatcagttgagntgggcttctaagaatttcttcaattttctgtgccagagcttcacaacttttcactgcttctggtcgattgttctttatccatagttttagacaacatgactttcacggaggatttagacctctgtttaaggcgaattcttcagttctttcaatctgttgtacaagccttactatttctgcattatttaaaatgactgttttgtcaggttttggaggctctgcttgtaaaagagtttgatctttacttatttcttccatctgattgacctgccactgaaaccacttaaaaagagattccaaaatattttgttcttctttaagtgcttcttctagctgagctgcaaattgcgaacaatatgtcaagaatgaattcatatcatccccaacagataaagataattcttcatgttcatgctttacaaatggttcttctccattctgatcgcaatgtccataggtttcttccaaagtggaaacaaccatcttcagatgtttgataatttttccgatcatttcatcttctggtagtaagttctttgtcttactcgatggaatgggcaaagcataccgtaaaatggattctcctgttggtggagatcttaggaccattggttcaattttatcatgaattaattttgcattatgtttttcctttagctcaggtgataatggtaaattatgtagtccttttttagtagttaatgctggaacatttgccgatttgttactggtggtcaacagatgctttactggtttcattttgttactgacttggcttccaaattacagatgaaaaaaacttattcctccctgctgagactgtgggaagtcgggtgactgggcggtttggccttgctggctctaaggtgaaaaactatttgcctgaggaagatgacacttccgagcctgccagacttccttcgagacggaagcctgaaaactcctcagactccagcacctcccttttacaaactgacgtttgtgctgaaagaaaaggcccggcctctgcgcccccgggcggcagcaaagaccgccgggcacccgccgccggcgccggatggggccgttgaagccacgtcccaggcgcccgacgccacgacgccttgcgccgccggcgtcgc

SEQ ID NO: 451227 - DNA, 867 bp, Homo Sapiens
gagaggtccacagggcaaggaactcagagtggcctcttgccaacagctccagagtagctggatcctgccaatgtgaatgggttccttctctggtcgagctttgagatgagactagagactccaagcaacaccttgattgcagcctgtgagagacctgggacagaaaaatcaccagcactccaccggtattcccaactcacagaaactgtgagatagtaaatgttgtcttaagcccactaagttttggggtgatttgttgtgcagcaagagataactaacacaagtccatgtcaagcattctcacatctggtaaattagtctggtcttcacaaatacccagtaaggtgttcggagacactactaatttatcttctttcacagatggagaaaatgaggctccgaaaagacacaggacttcaccaggtggggctaaaattaaattgcacattttccagctaggtgaagttcaagttagctccaagttttctttctcctcctatccccagccaccaacctgacgtgcccacggcagctctgtacgtcccagtgcactgccagtccacagcagtctggacgggctacaatggaagtgtggactcacttccagtttctgacccagagagagagatcccaagagactttggtcaaagagggcgggaaggtaagtccagtctaggcagtcttcactcacaagcaactctgaatggggagaaggaagagtgaaaccccatgtcctggaagaaccctggcccttcataagtctctgcctcacctctccaatctctttcataacagcaggaaacacgtgaaccacactgatgtgtgctgaagcccagaagtgcagatccccactgcagaactactggt

SEQ ID NO: 451228 - DNA, 791 bp, Homo Sapiens
ctcatagttgcctgatttttgttgaaatctttgggccagatttagctccataggtaaggacggaaacgcaggtctgacaagttacattaacatcaggactaaaagtcgcaggactacaaccacacaacaagctagcgcaattactgtgtagacgttcattttttccaaagcctggtcgacagctatcccagacgtactacttgcaaactgtggtccacaaaatgcattgctggtagagttttattaaagttatggtagaaaatatatgcttggctccgaaaaaagtcttctattcgatctcttgcctggaggatattatgattagtggtatcttcacagtcaacagatccattgcaagcacctttccaccccggcgcaaaaggattaacttgaaatgctataaatagctcatgtatgaggccatgttctggaatttcaacagaatggcatttatatgatggctctatgacatggcatgacaaatcagaaattagactatccaagattttcttcagcactctaaagaatacatcattgtatctccctatacaagaccttgtggtaaaacgtacagccatctgatatgaataatcaggttcccgataggctcctgtgaggcaccagagcaccgcggagagtaggacgcacgttcgcatcatcgctcaggggctggcgtcgcaggaggcgtcgagggacagactccctcctacctcagccctggcccaacacctccccacctcctccacagtgcggagcagaacgccggggtcgcctcccctacccgtccgtcg

SEQ ID NO: 451229 - DNA, 857 bp, Homo Sapiens
ttaagatttaataaagttattggtaggaaaatatatgtcttggctccgaaaaagtcttctattcgatctccttgcctggaggatattatgattagtggtatcttcacagtctacagatccattgcaagcacctttccaccccggcgcaaaaggattaacttgaaatgctataaatagctcatgtatgaggccatgttctggaatttcaacagaatggcatttatatgatggctctatgacatggcatgacaaatcagaaattagactatccaagattttcttcagcactctaaagaatacatcattgtatctccctatacaagaccttgtggtaaaacgtacagccatctgatatgaataatcaggttcccgataggcaaagaccataaagtcatatctctttttgactgttttttcttcttgagtttctgctttaacagtcttataagaaagagtacatgtgtaaagtccagacaaaggctccaaaaaatctttcaccatcagctgtccagtttcagttatatttattctattatttcctgttaacgtcttttcattaggcccaatccataagtaggtggggtccactatttcttttttagaaagcttaaaatccatacagataaggactggactattttgatgtaactctacatatattttgtctcctgtgaggcaccagagcaccgcggagagtaggacgcacgttcgcatcatcgctcaggggctggcgtcgcaggaggcgtcgagggacagactccctcctacctcagcctggcccaacacctccccacctcctcccagtgcggagcagaacgccggggtcgcctcccctacccgtccgtcgcaacggcggg

SEQ ID NO: 451230 - DNA, 567 bp, Homo Sapiens
gggataagctaccacgcgagccccacgcgcactcggtgcaccacatcgaaggcgaagttctcgggcagcttgggtggtttgtgctcgcccaggaacgacttgcacaggcgttcggcctctcggcttagtgatcatagccgcagcggcgcgaacgagatgggcatggccccggcccgacgcagaatctccagctgtaccggcgtgcactgcacgcacgtgatgcccagggccacgcggcggttgtggatctcattatagctgtagttcttgaggagggtgttggagatctgcgccaggcataggcgctcctggccgtcgatgaccagcgacacaatgggcaccccgtacagcgacgtctcgcccacctggttgggtttgagagcgctggagcccgagtacggctgcagctcctgcttggagtttgggcgaggaactgccctcgcgccccggccccagctgagtggtgagagcctccatgccgccgctcagtgcgcggcgcctggagccggcgacgtgccgcaggtgccgcggagagcggcggcggagtccggatccgccggctctccg

SEQ ID NO: 451231 - DNA, 856 bp, Homo Sapiens
cgtgacgtgcttgcggactcgtagtagacccagtcgaaccgctttccactgcgaggcgcgccagccacccatacttgttgcggtcgcggtcagacgtagtgatgtcctaagcacggccttcgtagtggagtgaatcctgagcgtggtggccgtcctcgtcccagccctcagtcactcgtaggcgcactccgggccacaatgttcatcacggcaatggccaaagcgttcacccgctccttacaacgctcggtcatcaggcggtcggctccactgttctcctcatccttgaagatgatgtcggggttgtagttgggcacgaggtcccggaagcgctcggagccccttgccaccctcccctccgctggcccactggcgcccagggtccgctctggcacgccgggcacaaattgcttgtagagtagcggcacgagctgcttgcgcgcatagcggcgccggccaaccggcccccggcccggcccgcagctctgggctggcagcgccagaagtgccaagcagcacaggggcagtagattggtcaggagagccatggatacagcggacctcggccaaaagggagcgttcttgtcctcactaactctcctgtcagttaggcatctccacaggcaccagagagggcagcaggcacagctgcccccagagtgccctagagctcttgtggctccgtgcacctggctgctgctagctctgcccacgtgccccgggagcgggcggggggtgtctaggacctgctactgacaaaccatcatagcagggaaggggggtcgtgggtgagtgccagcccagcccgtctctgctgcagggactctggtgctgccagaacgcccggactccggac

SEQ ID NO: 451232 - DNA, 815 bp, Homo Sapiens
ccatccctattttatggctcacttaagtcccttaagcttatctgactgggcattctctggacttctggaaaggtgtgtctctgagataaaggtggcctgctgctctccggctcagggggcaagggttggtacttcttcggaagtgttatgagaggccgaggaggtggtaaaggaatcttgttctttcttacggatgcatctcctgttaatgttttggcttctgacgtccttggaaatgggtttgtccactctttccaacctcgtctgtgtgttccaggtcggctgtccaatggagatagaggtcctggtgtctaacggaaggggagtgtccattgcaaccttgaaatagtgtgtatctgcatattcagattcctttataggccgggctggtaaaattttaatcgactgccatgtctcttccatccgaagctcagggtcatcatagtcatcatcactgtggccttttgctccatccaggactgcagcaaagtttctttcccagtctagaagaggcttgttcatcctctggtactggcctgtggcactattgatgcgaggccatgacctgttttttggcagactgaagttctggaatttcaaatcgttggatccttctttagttgtctttctattgccccttgtccaaagttacatggctaggagatggcaggtttggggttgagaggaatgcctgtctccaaaatccgtgttctttcttctagactacgctcttctgcacagcatcaggcatcgtgaagaatgtggtttcgtaaaaattaaaactgccagtatggaaggactggcatgactttgtc

SEQ ID NO: 451233 - DNA, 714 bp, Homo Sapiens
aatcctcccactagacactcccgcatggtagctggagcagcaaacaactgcttagggatttgaagccaggtgtcctaacttcctccatgggcgctcagcctggggaacctcagaacacttgctctaggatccagacactgtttaggagggtcaagaccttactcatcaaagccccgcctcccccccaacctccgcctccacccccatcctggaaccctggctgtgcacacgtgtatgggtacgcgtttggccacatgcatgacaacaaccttgaacatctcccgtcacagcaggtactggacacaggagagcagctgatggtccccgtggaagtcctggaagtggataacaaggaggccttgtggaagtttctactctcaggagctatggccggggcggtgtctcgcacgggcacggcacctctggacagagccaaggtgtacatgcaggtctactcctccaagacgaacttcaccaacctgctgggggggctacagagcatggtccaggagggcggcttccgctccctgtgcgcggggcaacggcatcaacagtgctcaagattgcatcctgagatatgccatcaagattctccgtagttcgagcagtgcaagaacttacttctgtggaatacaagggtccgcgaccttccaggagcgtctccttgactgggtccctggctgtggcccatctcccagagcctcatcaaaccca

SEQ ID NO: 451234 - DNA, 769 bp, Homo Sapiens
cttctgatatgtttcactatgagagggagaagcagaggaagagcggcgcaattacaattccccgcatagatagcaccctggatcagccctttcacgaaggcctgggcagccaaagaactctttccttacttacccagctgtagcagtggaagcatcacttccagcagcaacagttctcaggaacagcagaagctctttactacactggctctgacatcagaaccatatggttcagaaggagtgaggtgatgcgtaactgaaagaggatgtggggatggggagagcagaagtatctttagccaagtcaggggcttctgtctctggtcatcgtgaaggcctgttcaccttcttggcagatggatgtcgccccagctgccctctggctgaccaggtgactgacgtggtggaggctgaggaacgctggctcctggcgaactccctgactatgcttaatctcaccgcctgactgttcagatttagcctctgtctgaccaaagggctctcaggggcctcactggcacgagagccgccctggtggcctaaccgacctgcggctgccccacggcccaaggatccgctgactgacgctgactggaagcccagttagtgcagtttcaatgaaggaacccaacaaccgccaacaactgccagggacccaacaaccgccagaacccaacaactgccagggacgccaacaggccaggccacagccttatgcgactagggatcctcagtcggctgcacagagatagcggcgtgaggggcgtga

SEQ ID NO: 451235 - DNA, 928 bp, Homo Sapiens
attggtggagtttgttggcccggttaatctgatcttctgtcccaataagggctcttgaggagaacccagggcactttccagggcgaagggtccgctggggctctgaccaagccctttcggggacttcgtggaagtcgtgggaaatgccaagctgaactccagcgagggcggccttggccacagcaaggtaccccttcccgtactttctgtcttttcgtggtgaggcgattttaaaacgcagtctgagcagcccttgccaattgtcctgctgggtacccagcacttagtgtgtcagctggtccgtgtggacggcccagtccctccagtggcatcccctaccggtgacccctcctgcctgcaccatcgttccaagtctcagggccggcgcacaggcggggcgcggggctctttggcgcccctgcgctcggaacggctgcttccgggctgggtggctgctgtcgcccaacacgcggcctccgcagaacagtgggctgaggtcggtccaggacggcggtcccagccctaggaccggcgtacagtagagggcccggcaaaggcctcggcccagcggggaaggcgcgccctcctgcggcgctgacggggacagcagggctctcgggccgtcctctggctgtgccccgccccgggggacgctgggcggactgcggggcgtgcccgggggcgctgcagtgtgtgcggactcgcagtgggtgctcactgtcggccagagccaaggcgttcggccgcctcggcctgaggaatgaaggcgccttgtgtcgctttagcaggcagcagtgacccgtggcgcgtccccggggacccgactgcggggccagtggtgcgaagccagtcctgtgcccgggcctggtcctcccagcctctaggaaagcggatctcgctctcggtgagatgaaacggcccaggagag

SEQ ID NO: 451236 - DNA, 844 bp, Homo Sapiens
taatattaataataagttttattaaaacagaaggagattctaagtagctgggttcttgccacatcaaaagataaaactaggtttcctctgatcactttgaactgcttatgagtgagcatcatagcccagtaatctaagtccgaatcacaagcatctacaatagctgcatcggcctccactcttgacaatgcctccgccatctacatcttaggctggggagtaacatgtgtctgggtaaaaagggagataagggatacatctgttctcacaatatgggcttgttatcatagctcctttaagtaccgcagtgctggctccaagagcatattttctcccgaacggaatctgcgcaaggcctggtcgattttctgagggctcagggacaggttgtaaatgagattgtagttgtgaatgaggcgtctggctcgttccttctccagaactcctgtgttactcagatcacacaggtagagggcattttccagcttcctgaacctgtctatccacgtctcacattcctcagccttgttcttcacagctggattcacgaagggctgggagactggcctgatctttaaaggtttcagaggatctttgcaggctgaagtttcagcaggagagctttctggctgcagctcctcttctggagttttcatatgttcagttttgctttgagacatctcggggacttcaggctccattggaggggcaggggcttccttttcattcttccctcaggtcagatgaacagccacgtgacatcacttcaatggtctcctcattgaaaatatgatgctttgtaagagatccaagtgcagccaccttcttagagccttaaattatg

SEQ ID NO: 451237 - DNA, 884 bp, Homo Sapiens
gtaccaatcacaagtcttgttattttgtttcattatgagaaagataatctactaaatattaaaatactggaaggagcaagatagctttgatccagggagaccttttccatttatgtgctttagtaatctgccgccaacaagctatcttctttatgttcttctacaactgatgttgtttgttttctcatgttgtctcttaatagacaaatggaggcatgagcttccttagaattaccccttcgacgcatagttctgtttcatctggacttttgaggcttagtatctttctactacttagctttcctgactcaaacggaaaagccatttggacagctcacctgaatataacatttcaggttggaaatgagatcacatcggaattaggagagagtggagtgttcgggaatcattctcctctggaaagggtgtctggtgtggtggcacttcctgaaggatggaatcagaatgcctgtcatcctttgaccaatttcagcaggcccaaacaggcagactcatggctggccctcatcgaacgtggaggctgtacttttacacataaaatcaacgtggcagcagagaagggagcaaatggggtgatcatctacaactatcaaggtacgggcagtaaagtatttcccatgtctcaccaggggacggaaaatataagtcgcggtgatgataagcaacctgaaaaggcattggaaattttgcactcgacttcagaaaggagtcctatgtgacagtcatcattgaacgtgggggagaatgcacatgcgtgggtgaaccattacatcatgtcatctatttcacctttcctggtctgtcaacaattgcctaccttttacttagaatgcgtctggacgacattacacctagaagtgccc

SEQ ID NO: 451238 - DNA, 1164 bp, Homo Sapiens
ctggtattgacactctgtgtcgcctctcttttgcagcccgctgttgtgctcgcttagtatgtgcgctgttggtagccgtgtgcgtgtgggcctgcgggtccgtgctcattttgttcggcgactgcttatgatgtgctcttgtctgtcgcgggccaacttttctgccctgggtgccttcttaagacttctgctgttcttgcctgcaaggctccttgtccttgtgctgttcctctaggccagtgttgtgaaccacgcctttttctttcaggggacttcctgtgtaattctcctgggcaacacagcttctatttttaggactccagttgaattagtaatgatttgaaagttctaagttgttttcttagagggccacatacggatgtcgtaattctatgccttttcagaaacctgggacagtttcttgatactagagtaagggtctcagatgggctttgaattaacacgatatttttgtttaaaagcagaaaggaactttgttgaacaagttcatgttgttgatagtctcttggattccatatttgatgtctgaagtatatgatgttaattccttccttgatttaacgtgtatttattgaagatcaatccttcaaaagatctgagtgtggccgacttcttcacgcctccaagcttcctgcagatgagagtgcccatggtggacagagcagctgatgtcttctgtttcacataggtgttggagacctgaacatcaagccagctcttggacagattctgtctcagccctaccaaggcggtgaggcctaacttcctcttgagttccccacagcgtctctctttggctgctagtacgtggcgtagggttacaatttcagcctccaatttagtgagtttggttttgagctctctttgctcgggctctgtcagatcctccagttcagaagtcgagtgggattcatatgtgcccacagaggtctctgtcctggcatgtggcatggactgggaaagaagatcttcgttaagagagtccaggtccaattcttggtagaaagagtcgaattattgggctgcagagaaataatcttggccagcagagtcgaaatctaggcctgcaggctcagactcttggcaggtggagtcagatttcaggcgggagggatccatggcccagctggtacaatggacacc

SEQ ID NO: 451239 - DNA, 957 bp, Homo Sapiens
gtttcttgcaggtctctgccgatttctgttctcgtcttcaccagtgtcaagagggctcttggaagctccagagcctcctggggttgagctttcatcaatgtgttccaacctggggcaggtccatccctgctggatggagtccatggccagggaagatgcaaagtggattagctctgttcagctcaatgggtgccgggagattctgaggacaggagggggcttggttgcctgggagcttttgcttggaggagctgagtgggcatcagggatctggagctgctcctcggagcacagggcgttggtggggatggcctcccggagcggggatctgatgggctggcctgcgctgccattgttgagctgcatgttgatggcccgctgcaggctgtgctctgaggcctggatgagcttgtttgcccagaagaggtgcttggaggtctgcgcactgatggagtgatggcaggcagacatgtggttctcctccgtgaaactccggcagtttgaattcagactccacggtctgaaggtctgtggcgtgggcagccccatgttggagtggacggactctatcttgcataccagctgcatgggttcttcaaagtcagactcctcgttcgagttggcttccgtgtccagctcagcttcaagcttgagggctgggtatagctctgactccagtaaagccggcacctgtccgatctccagttctgggtctgggtctgggtctgggtccaggtccaggtccacttggagttggggcttctgctctagcatgtctgcctccagctcctgttcctcttgtatctggtgttgacttaagtcatctcgcatctctgcaacctccactgaccctttgccgcagcatggaaatccatgggcacctgtcacccccatgcagacctgaggctctgtcctggaggcggggagcgggctggtggatgctgcctctccgcctcc

SEQ ID NO: 451240 - DNA, 914 bp, Homo Sapiens
ggtccggaattcccgggatctgaactcagggaatggggcccccagctcccattggggtcggcgaacctggtgccaccccttagacaaagtcccagtctcccagaggcttttaccagctggccccattccttctgctgctgggtataataaggtcctctcaacgctgaagtgcctgtgaaacacagcccagaggagttctcattggtcctatgggctttgtcttcctctctgccccacccagataatcgctgctgcccctccactcccaagatgcagctgtgattctccatccccacacatccctcatcaatggttgactgcaaagaagtgagaagccaagcttagattcatgctcatgcctgaacaccctgagagcctggtgctggagggctgggtatccccttggcctgccaccagcacctgcacccacaccaggctggagccacgctctgcgcacagaaggtggccttgatttctcaggcacagctgacctcagagatactggtcctgactctgccaggtctcttatccctagtcttgttgccccagttccttctggattcaaggcgatgttgcctcaaaacaaggaccaggtgctgccacagacctcagtgctccctgggcgccccacttggggcttctcacaacttgtggactcctctcctcacaacctacagcctctctctccccatcagggcctccctccctctcaaccaccgttctcttccactcagtcccgtcgtccctcctcccctccaccagcatccccctctcctggcttccaattcggctcttgtgactcaaattctgactttgctccacatccctattctccctctctcccaagttcccctactttctttcaccagaactaactcttctactccccgtcaaagtgcatcctcttccttcca

SEQ ID NO: 451241 - DNA, 1104 bp, Homo Sapiens
  misc_feature (131)..(140): n is a, c, g, or t
  misc_feature (204)..(204): n is a, c, g, or t
  misc_feature (218)..(218): n is a, c, g, or t
tacaaaattccccccggttttcaagtttcgtgagggaagagcccccgggggtccctctccggagtctccccggaggggccatttgggatcggggagctgaatcccgcaggggtggcagggcgcctcctttnnnnnnnnnnttttgttccctgtggtcgggcccgcaggcatccccgggtgactttctggagggatgtccgtctntatcatcttctttnttctcctgttggagggcccggcggtcacaagattcttgtgaggcagtgctgaggggctctgcctttgggtctcttcatggccaggagagattggcttcggcctgtgggtccacagggaggaccctgggatcctttggtgttgtaagacaggcttccaaggtcgccttccagccaccttgggggctcctcggccatcccaagaagagcgctgaccttcaccagagctttcaaaaggcctgccagggtctcttccttcctgagaggatgcatcctttgtccttgtgttctgtctgcacccaggttctgtggccaattctgcaggcaccagaactggctcgggaagggactcttcagctgcagcgacccaggccctggacttgtcgccatcggcaggatcttcagccagctcctccgacaggtctggaatcagggaggtttggtttcgctggaagatgaacagctcctcttccccatagtccgacaaaggggagtctgagtccagagacgggagctggtctttgacagccttgaggatggcatcccagggccccatctgggaggcccagggagagcccagcgagggtgccatgcctttatcgttggatgccatgagggcccaggcttccagatgccttctcagtgcaccataatccggggagctctcaggcctctgcctccactccccgcgctgtcctgacagcgctataaacagcctccagcgcgtcagtccgctcgcgtccgcccctcgggccgcgccgcaggtacagaggctgtccccttcttcagcactctccctctcagcggagctttacattactagactgcctccgccttccccccaccccgcccagctcctctttcgggcctttgcgcgtcctgcctctcc

SEQ ID NO: 451242 - DNA, 942 bp, Homo Sapiens
cattctttctcaatccagtgctgacttttcgtcggatagcagtgccaccatgccaacagtgatccgggccagtgagttcggataaagatgaccatgttcccgaacttggccggaagtccctttcaggtctagggaaaggcgttcctgcttcccccctgatcagtggttctcccaatgttcgcatgaggcttgttactgccagtgttgaggccatcctggtggccaatgagttccctaagttttggaacttgaagcgctggaattagacgccatcacatgggcagtaggaagagtaatcaatgattgactaggcttaaaagataatgtgccaccttgaagttgaatgatctttccacgctatcagaacaggaagttccaatgccagtgtctccactgtcagaagcctatactgtgtctcctgatatggttatttcgatggttagatggaacagttgtggcctgccacaatgatttcattagcaggtagccatgctgatgaataatctgggccggcagggaagctgcgggctgcggccggggctatcccggccgctggcctccggagccaggaagcgcccccacatcgcgggcgagagggccgggtgggccagggacgcccgactcctcacgtccgtcctcctgcttcttcggcggcaggaaacttgcgcggagcgtgggcctcggcgacacgggcaggaggaaaggcgggatggctggttaacggctgctcagctacgggcggggagcgcaggggccagattcgccgcactgccggcgcctgccatggccaagccggctgggctgaggcccgcgcacggggaagcggcgactcggcggtgacggctgctagatccccggctgagcccaggctcaaaggctccaggcgaagttgcagctgcgggttctctccgccccctccgccggcagagccagagccggggc

SEQ ID NO: 451243 - DNA, 1177 bp, Homo Sapiens
gggcattccacattcccaggcgccccccccaggaaattgtggtccctcccgccttttaagggcccctcccccggtccccgtggcccttgaaaaaggacccccattcttctttaaaaggggcccagtttcttggtggggggacccctccggggccctgtttgaaacttcaaggttgggtttccccggtccattgtcccccggtctcccccatagcaccgggctgcggggctcccgtgctggcccagcaaggagcatgtcggctgggacgatgttgtcccttcgggagacaggccacatccccccaggcacagatcctgccatttcttctgcttggagttctttccccatcagaatctggcaggggtctgttcgttgatggctctgtcactcttgttgtctccccattgtcgtccaccaggtcccgggtgggcacggatgaaagaggaggcagaccataggggtactgagcgagaaccagggcagcttggagatgtcgggaatgctctgcaggatgatgatgatgaggaagaacaggttggacacgcggtggaactgctcgtacaggttcagcggcaggaacgagtagaagttgtacttggccgtgcggatgacattggtcttgtatttctgtcctgttgccagcacaggatcaccttctccttgaactgcccgcttgtaggcacggttgtttgcctggaccttccaggtgaatgctgagttcctgtcctcatcttggagatcttctctctggccgaggctgcccatgctggtggggctccgcggatgccagcaggacctgagccttcctgagtcacgtctgagtcacccgtgtccccaggtcctgctggggcagggcttggctcagggccagctctggtgctcctgggagtctgagcggggccagtgcccattcaccgcatgaggaaaagggaggttcagggcgaagaggggtttaggctgtgggacgggggagagtgggggagacccccgtgggggcagactggggattggagagttggagagaatgctcaaatggccagaatccactcgaagtgtatctctaggggcgcgctctccacccccgccgccacgaccccagctctcagcctgggtggagcccagagagggtgcgcgggctcccggggacgcacagcagtgggagcacccgccgctcacc

SEQ ID NO: 451244 - DNA, 1107 bp, Homo Sapiens
ggattcccgggatagttttcaaagggcagccttatatacggagtcacctctccccagagaggtcacagccaacattcagaggcctcccaggccccctctccctggataaaccacttcagctgccccccatttttctcgagggagaaaaaggggaatcctctgtccagaatgagcaggaaggagagccaagcctacagtcacccagcttagagctccagtcccctgcgtggccacgccatgcaggagtggctcaggagcccctgaaagtgtccagcagctacctcagtgacacccagagcagcgagagtcatgtttccagcgtgcagcacccgaggccagaggagggcagccatgccagcctgagcagcgggtacgcaggggacaaggagggcagcgacatcagcttggtgggcagccaccggagagtgcggctgaacagaaggctcaacacccaggcggccagtaaccaaaccagccagctgggctccatagaccctcccagctctctaaagagccggctgactggccccgcccacagcaccaagcagactggagggaaagagtgaggccagcctgcccggcagcggcagcggcagcagcatcctgtccagcgccagcttcatcagcttgggcagcagtgccctcacctaccaggtgagcagcgggctgctgacttccacagccagccttccctccacccaggccagcagccgtcagagcgtccggctggatggcagtgcccaaaacaggcagagcagccacaccagcgtgcaggaggacaagacgggcggccaacgtgaaaaacccagtgagcaggtcaccacgggggagcagcctgcccaggtgtgcatgcctttgtgagaatcctctccagcagccagagtctcccagaaaaaacacacaggcccagcaaacacaggctgccccccagagtggattatcccaaaaccagtaggaaaaggtggtttcaaaagcacacactgactgtgtcaaccatcaagggggtaatccccatttgtagccacaaggcttccgtggggcaagcccccatgttaccaggaagggatctatggctggaacaaccgccctatcccggaaaaacccaac

SEQ ID NO: 451245 - DNA, 1137 bp, Homo Sapiens
tactacactcgttgacttttctccgggattgggcgcgtggaacctacaccctgatatgcgtttaatcgatgtcttgtcccatttccaggtaaatttcacatatggccctgcaccctcattttgcacatcttctgaatggtgaatgccctacgcctttttttctatgctaagatgtcccatacccttgttggctgaactttcttacccacttaagtatatccaccgaggcttactatacgtatatcgcttgcccctccacagcccctgtgtgtgcccccaagatgtcattaaggtctccagcctggggtaactcaagtttattcccgttgcaccctgaagacctgaactgttgaggcacttgcttggtaataaagttaactcccatcagttgacgcgaattctaatggttttaatccatattttaatggtgtaactagttgaatgaggaggtggcactgtaactatcaccagatgcgatgatagccttatatcatcggccacactctcgtgtatcacccactcatttactccattaaatgttcttcatcactagtactctagtctccccacgttctctcactttactcctaggaaattcccatctattgcagcctcatggccactactggatccactctgcactcctgcctcttcagccacacagtatgcccattcttctgtggcatcatttatctccctccggttttctccactgtgaatcctcacacagtatcacttaacttagtaagcaagtctccatctgtcattgaaacaacagcaagaaccgtgatgatggactggcagataagtagaactaaaggagagcccatcaaatcagacataagctatctgtctctttggagagacaacctctggcctcatccactgctattacattcttagagcattcgtagaagagcggttgattaaactattttcaaggctacagactccttcatagaattgataaaagcgtatagaacttctttccacaaaaatgcatgtattgcacactgaatgtctgcagtgcagtccttgaggggagtgaacctctgaggcctatcctcctgacgtctgcagtgtccatgagcccatgtcaaggaattcctgcaacacacattatgtgattgagatata

SEQ ID NO: 451246 - DNA, 1249 bp, Homo Sapiens
tcctaacactgctcttcctctacagatgacctaactgcttctttcagctcctggctggcccctctttgaaatcccttgttccgcagctcggagtagaagtcgactccctcagagacagagtggatgggctgattatgatactggtggtagctggtcaaaggacccacggtgggggctgcacttgacagccgccgagggaatacactgatggtgatgtggtaggcagttcgggttttccttgaagctcttactatgcttgcacttgaactccagcaccatcctggtgtacgtgttgaaggtggtgacagccgacgccatgcagcaggtgaaggagagccaggccatgtagaaggccccgccattattccacaacatgtggtctccagtcttctggacccaagttgacagtcgcttggaagacttggtgaatacatcatgtgggccaccatccccaggagacctgacaggacagaggaaacagcagcaaaggcgctcagtttgagcccacaggcagggttcccagtgagtagcaagtctgttagtagcaggaggaagctgatgaattgaagtccgatgtaggtgatctgcgttcccagggataaccataggatttctctcttggctggtggtgtaagttcaatgaaacttcggcacctctccccttttgctgccgctgtaccactggaccgaagggctctaaattgtttccaggactggggatggagcagtgctggttcttccacagtttcctcacaggatagccacatgccactccggaagctccggaaggagaaccggtcatccccagtctcccagttgtattgtaccacctcctgggtggatgtgttggtatctccatccagggacactggcatgtcaaagcacttggctgccagacctttctcgcacaggggcttgggcaccttctgtgtgcccacaaaccagtagttgctgagcagggatgttgtggagaagctgagtgatagcatgctgaggatggcagataggagtgtccgctggccagagaaggccttcgagagctccatctcctgggtgaggcaaacattttgagtcagttgagagggatcgctcattcactcttgcagcgggaaggcagagaagtttcagtttatcttctgttctgtctcaatcagttgggtagaatgagtgtttagcgtgaggatgaatcaggtcccctcttgccagcagaggggtaaggtggtgtgtggtggattggagaggatgtcct

SEQ ID NO: 451247 - DNA, 1401 bp, Homo Sapiens
aggtggttttggcttaagcacatgttgataatcagcagacgtgtaaggtagggctcaagcctactccccaaacccgcttaactcctaacactgctcttcctctacagatgacctaactgcttctttcagctcctggctggcccctctttgaaatcccttgttccgcagctcggagtagaagtcgactccctcagagacagagtggatgggctgattatgatactggtggtagctggtcaaaggacccacggtgggggctgcacttgacagccgccgagggaaacactgatggtgatgtggtaggcagttcgggttttccttgaagctcttactatgcttgcacttgaactccagcaccatcctggtgtacgtgttgaaggtggtgacagccgacgccatgcagcaggtgaaggagagccaggccatgtagaaggcccagccataattccaaacatgtggtctccagtcttctggacccaagttgacagtcgcttggaagacttgtgaatacatcatgtgggccaccatccccaggagacctgacaggacagaggaaacagcagcaaaggcgctcagtttgagcccacaggcagggttcccagtgagtagcaagtctgttagtagcaggaggaagctgatgaattgaagtccgatgtaggtgatctgcgttcccagggataaccataggatttttgccacaaagccccaagggaggggaggggagggaagccttctccatcaaccgcttccctccaaatcggagagtggggtgacatgggccttgcaacgtggcaaattccagtagtcctttctcacctctcttggctggtggtgtaagttcaatgaaacttcggcacctctcccctggttcttccacagtttcctcacaggatagccacatgccactccggaagctccggaaggagaaccggtcatccccagtctcccagttgtattgtaccacctcctgggtggatgtgttggtatctccatccagggacactggcatgtcaaagcacttggctgccagacctttctcgcacaggggcttgggcaccttctgtgtgcccacaaaccagtagttgctgagcagggatgttgtggagaagctgagtgatagcatgctgaggatggcagataggagtgtccgctggccagagaaggccttcgagagctccatctcctgggtgaggcaaacattttgagtcagttgagagggatcgctcattcactcttgcagcgggaaggcagagaagtttcagtttatcttctgttctgtctcaatcagttgggtagaatgagtgtttagcgtgaggatgaatcaggtcccctcttgccagcagaggggtaaggtggtgtgtggtggattggagaggatgtcctgagggccagacaccagcc

SEQ ID NO: 451248 - DNA, 833 bp, Homo Sapiens
cacaggcagggttcccagtgagtagcaagtctgttagtagcaggaggaagctgatgaattgaagtccgatgtaggtgatctgcgttcccagggataaccataggatttctctcttggctggtggtgtaagttcaatgaaacttcggcacctctcccctgtttgctgccgctgtaccactggaccgaagggctctaaattgtttccaggactggggatggagcagtgctaagtggcacaataataaatataaatgtaaatacacacatttttttaattcctcttccatctcgcttttagctggttcttccacagtttcctcacaggatagccacatgccactccggaagctccggaaggagaaccggtcatccccagtctcccagttgtattgtaccacctcctgggtggatgtgttggtatctccatccagggacactggcatgtcaaagcacttggctgccagacctttctcgcacaggggcttgggcaccttctgtgtgcccacaagccagtagttgctgagcagggatgttgtggagaagctgagtgatagcatgctgaggatggcagataggagtgtccgctggccagagaaggccttcgagagctccatctcctgggtgaggcaaacattttgagtcagttgagagggatcgctcattcactcttgcagcgggaaggcagagaagtttcagtttatcttctgttctgtctcaatcagttgggtagaatgagtgtttagcgtgaggatgaatcaggtcccctcttgccagcagaggggtaaggtggtgtgtggtggattggagaggatgtcctgagggccagacaccag

SEQ ID NO: 451249 - DNA, 1097 bp, Homo Sapiens
  misc_feature (1074)..(1074): n is a, c, g, or t
ggccagccgaccccatgcagccggtgaaagagagcccaggccagttagaaggccccaccctaattcccaaacatgtggtttccagttctttggaccccagtttgacagtcgcttgaagaccttgtgaatacatcatgtggcccaaccttccccaggaggacctgacaggacagaggaaacagcagcaaagggcgctcagtttgagccccacaggcagggtttcccagtgagtagcaagtctgttagtagcaggaggaagctgatgaattgaagtccgatgtaggtgatctgcgttcccagggataaccataggatttttgccacaaagccccaagggaggggaggggagggaagccttctccatcaaccgcttccctccaaatcggagagtggggtgacatgggccttgcaacgtggcaaattccagtagtcctttctcacctctcttggctggtggtgtaagttcaatgaaacttcggcacctctccccttttgctgccgctgtaccactggaccgaagggctctaaattgtttccaggactggggatggagcagtgctggttcttccacagtttcctcacaggatagccacatgccactccggaagctccggaaggagaaccggtcatccccagtctcccagttgtattgtaccacctcctgggtggatgtgttggtatctccatccagggacactggcatgtcaaagcacttggctgccagacctttctcgcacaggggcttgggcaccttctgtgtgcccacaagccagtagttgctgagcagggatgttgtggagaagctgagtgatagcatgctgaggatggcagataggagtgtccgctggccagagaaggccttcgagagctccatctcctgggtgaggcaaacattttgagtcagttgagagggatcgctcattcactcttgcagcgggaaggcagagaagtttcagtttatcttctgttctgtctcaatcagttgggtagaatgagtgtttagcgtgaggatgaatcaggtcccctcttgccagcagaggggtaaggtggtgtgtggtggattggagaggatgntccatcccgggaattccggaccg

SEQ ID NO: 451250 - DNA, 1016 bp, Homo Sapiens
  misc_feature (26)..(26): n is a, c, g, or t
aagggacccacggtggggggctgcanttgccagcccgccgaggaaacccctgatggtgatgtggtagccagttcgggttttccctgaagctcttactatgcttgcccttgacttccagcacccttcctggtgtacgtgttgaaggtggtgacagccgacgccatgcagcaggtgaaggagagcccaggccatgtagaagggcccagccataattccaaacatgtggtctccagtcttctggacccaagttgacagtcgcttggaagacttgtgaatacatcatgtgggccaccatccccaggagacctgacaggacagaggaaacagcagcaaaggcgctcagtttgagcccacaggcagggttcccagtgagtagcaagtctgttagtagcaggaggaagctgatgaattgaagtccgatgtaggtgatctgcgttcccagggataaccataggatttctctcttggctggtggtgtaagttcaatgaaacttcggcacctctcccctggttcttccacagtttcctcacaggatagccacatgccactccggaagctccggaaggagaaccggtcatccccagtctcccagttgtattgtaccacctcctgggtggatgtgttggtatctccatccagggacactggcatgtcaaagcacttggctgccagacctttctcgcacaggggcttgggcaccttctgtgtgcccacaaaccagtagttgctgagcagggatgttgtggagaagctgagtgatagcatgctgaggatggcagataggagtgtccgctggccagagaaggccttcgagagctccatctcctgggtgaggcaaacattttgagtcagttgagagggatcgctcattcactcttgcagcgggaaggcagagaagtttcagtttatcttctgttctgtctcaatcagttgggtagaatgagtgtttagcgtgaggatgaatcaggtcccctcttgccagcagaggggatcccggaaattccggaccggtcca

SEQ ID NO: 451251 - DNA, 889 bp, Homo Sapiens
  misc_feature (127)..(127): n is a, c, g, or t
ggggggggttttttccccttggagagggtctcttttaactatatggccttggccccctttggaaatttcccaggccccccattcttggggtgttaacggggtttaaaggggtggtgaacagccggancccccatccaagccaggtgaaagggagacccccggcccatgttggaaaggcccaggcaataatttccaaaacaagggggtcttccagtctttctggaccccagttgaccagtcgccttggaagacttgtgaatacatcatgtgggccaacatccccaggagacctgccaggacagaggaaacagcagcaaaggcgctcagtttgagcccacaggcagggttcccagtgagtagcaagtctgttagtagcaggaggaagctgatgaattgaagtccgatgtaggtgatctgcgttcccagggataaccataggatttctctcttggctggtggtgtaagttcaatgaaacttcgggcacctctcccctggttcttccaacagtttcctcacaggatagccacatgccactccggaagctccggaaggagaaccggtcatccccagtctcccagttgtattgtaccacctcctgggtggatgtgttggtatctccatccagggacactggcatgtcaaagcacttggctgccagacctttctcgcacaggggcttgggcaccttctgtgtgcccacaaaccagtagttgctgagcagggatgttgtggagaagctgagtgatagcatgctgaggatggcagataggagtgtccgctggccagagaaggccttcgagagctccatcttggccatggtcagcgtcttgcagcttgtctggaagaaccgaaggatgccatctgcactccaagtccctttggtttccc

SEQ ID NO: 451252 - DNA, 1032 bp, Homo Sapiens
  misc_feature (740)..(752): n is a, c, g, or t
tggttatgtggttgctctgtgttgttccggatgtgccatgtaccaatgatttcttttgactggcacacttgtcgttgcccgtaagctgctggcaacgcaccaacgtggagaagtaggcgcctggggtatatatgctggccctccttcaatgtccctgtcgttcgcttcgtgctcattcagtgttcctgtcacgtgtgcactcgcgcgcttgttaaccaatacccggctaccagcatgtctgagtacactacagccgcagagtaagtcccagtcaggggtcgggccggggtcccgatccatctttcgcaatacccgtcatgggggaaactttccggcaggccgagctattttcgcccagtcgctgttcttcttcgcattgcgtcttcctctgccatctgcatgcaacctgttacatgaaagcgaactttggggacgtagggttttccagagaatccgcttcggagccacacagcttccgccgggtgctgcaacatcccccctcttctcggtaaacagttggtcgcgccccagtgctagcgggcgccgagcgggagccgcgcggtatcagcgcagctacggcgtgcggcacggcggcgcggttgcgattccgagccgttgagacgcctctgcggcagctggtggcgcaggtggcttgcgtggacgcgggtagaggcgaccggccagcaaccgcagcgtcggcgcccgcggccccggcaggtgagcgggcgacggggactcgnnnnnnnnnnnnntcggtggcgtcgctcctggctgtagcggggaagtggacgcggcccgcccgggagccgagggggccgaggctgcagccgctgggcagcaggttgcgggggaggccttgcgtgggcggaagggggccgctcgcttctcggaatccctgcctttttctctcccatgcaccccctcccttttggggcttaagctcggtggaaaaagcccggagaaagatggggcgggcagacgggcgatttctggccgggcagcatcctgcttcaggtggtggcgtctcttcgg

SEQ ID NO: 451253 - DNA, 1052 bp, Homo Sapiens
aagctttgggcccctcgaggggatatttctagagcgggccgccagccctggggaccgccaggggcctgaatgaccccccaacaccaggggccggtcctgaggactgctctggaaagcatggcttccttcttctgccaaggcctccagcgagatgtcggggagcgacagcagcccaggcgtggcgccggtgggagggcaggtcgtgctcccaggtggacaccagcgtgggaaagtcgtagcgggccggcgagaggttggacaccaggaagatgcgagggtcagccacgccggcctcccgcagccgctcggcacagtggtctcggatctcctgcaggacagcggcctctctgaagcccgacggccgctgggtgcgcgtggccgccaggtcctcgtccaccttggtgcgcacaaagtagaacttcttgccctggcacaggatctcagcggccaggcgggtctcgacggccccgcagcggcggggggagaccagcaggaagaagtcatagcggctgaagtctacctgctttaggtacttgtcagccgggcagcctggagagccggctcctggcaggtcccagagggtcacgtcagggaactgtgggtgtggatagggcgacggttgcatcgtggtctccatgacgcccgtgagagccgcgccagggtcctcggcctccaggccacgcagggcattgatgagggaggacttgcccgcgcccgactcgcccgtgacgcccacctccaggcggatgctttccgtggaggccagcagctcctggaggtgagaggcggcctgggggaggtcacccgactcaaaggctgtgcgcagggcctccagcctttccttggccataaggatggtgttttcctcctccccaggcaccacgggcaactttgaagtagccatggtggccagtggttcagagggtggcgggggacaggggagagtcacaggatgcgtgatcctcagcgcctgccctgcaggctctccctctcccctcacactctccccactgataggatctccttccctcttagccaaggtcagacaccgt

SEQ ID NO: 451254 - DNA, 813 bp, Homo Sapiens
taaggatttcgatttcttctttgtgtatcagcaataatagactttgcagtaagaccgtctatttagaaatcatgttgatactcccaagtccctcattctttaagttgacagagattatacgaatcagatgcgattgaaattgactcgccccaaaaatccagaaattattctacttagctggatctcacagtcatatctcccgaacacttacttacttcgatgatcagtgattcttatcgattcaacggttaacgaagaagcctttagtgggggtgattgtggagttcaagcgctgaaaagttagggttgacttttttgattctgttattacaaattttacctcatctagtagtcacaatgtggttgtttgttgttgttgtttgaacaagacatatagggtgccatactttgaggcgttaatgtttaaattcctatgacaagtgagatgaaagtgaacttgcatacactctggcttttggaatatattgaatatctagtctcagcagactaacagataacggggggtaacagaaaagtattaagaggttcttcagaaacacttatattgtaacatatcactagagttgtttgtaagcagaagttgaaattttgtatcttgaatattttctcctgcaaaggcttctaattttgaaaatacaaggacatgctaaacacctctcagtgttaaagttcaaatctggtattggtgagaagtctcgggaacatttatgtcaattaaaataccttaaaatatagcgcttgacaagattatgagggacgttaacatggaaaacttagatatgatcttgagaa

SEQ ID NO: 451255 - DNA, 1265 bp, Homo Sapiens
gctggtaccgggtccggaattctcgggatggcaataaccgcctggtcgccgtcaggtgcgggcccaggtggccggcgcgcccgttgggcactgggggacgcgggcgcgtcaggtgaagactgggggccgcaggcgcgctaggagaactatgccatttttgggtcaggactggagatctcctggatggagttggattaagacagaagatggctggaagagatgtgaatcttgtagtcagaaacttgaaagagagaataaccattgtaacatcagtcacagcattatcttaaatagtgaagatggagaaatattcaataatgaagagcatgaatatgcatcgaaaaaaaggaaaaaggaccattttagaaatgacacaaatactcaaagtttttatcgtgaaaaatggatctatgtccataaagaaagcacaaaggaaaggcatggctattgcaccttgggagaagcctttaatcggttagacttctcaagtgcaattcaagatatccgaaggttcaattatgtggtcaaactgttgcagctaattgcaaaatcccagttaacttcattgagtggcgtggcacagaagaattacttcaacattttggataaaatcgttcaaaaggttcttgatgaccaccacaatcctcgcttaatcaaagatcttctgcaagacctaagctctacccctctgcattcttattagaggagtagggaaagtctgtattagtggggaaaacatccaatatttggatttgccgcattagaaactattcttcgcctggccaacaccagctaccgggatcttcacgatgactaagccagtggaacaatgggccttcacccctcagtgacctttcctctgcacatgctgaacaacatccctataaccgggttctcagacggatggggacctcatcacccttttaggccaggggaccccccacgttgtatatggcttaagggaaagaaagaccggttgtgggaaaaaacttttggtcagtaccctttttgcttgaaaagacatctttggaaaacctttgaatcccttcacgaaaaagggccttattttaatggcaaattcataggacctttgcccttccagaaacatttaccccagccgaagggagcagtaaccggaaacccccttgcattttcctggtcgcgcactgtgcaacattcttctttttgggaaggacctccgggaaacccccctgttccgggggggcccaaacccctgaacaagctggcttttccccccccggggt

SEQ ID NO: 451256 - DNA, 1114 bp, Homo Sapiens
gttttggcttcccaagcctgttgttcgggcccggtggttcgggcctttcaaggccttttttgggggtcccagtttgcactccaggggcggttatttggccttcccccttccctttttaaaggaggccagaaagacgtggcttggggctgggggggctgcagcccaggagtggtggaggatctcatcgatggggaagccgctggctgacgtccgggctgcggcatgcggtagatgaggtccttgcactcgcaggtcaggttcttggagcgcgggaagtccacacggtgctccttctggatacgcagcatcttcctgatgtcggagtcgtcatagggcatggagccgcagaccatgatgtacaggatcacgcccaggctccagatgtcatacaccttgggctggtaggggatgctctgcagcacctcgggggctgcatatgctgccgacccgcagaaggtcttgctgaggatgatgcgcccattgctgtcccgcaggcagcgcttggagaagccaaagtcagacagcttgatgttgaagtccttgtcgaggagaaggttctcgcacttgaggtcccggtggacgatgtccaggtcgtggcagtacttgacggcggaggagagctgtcggaacatcttgcgtgccacgtcctcatgcagggctccctggcacttgatgaactcgaggaggtcgccctggacgccaagctccatgatgatgtagatccgtccgtcagaggtctcaaagatctcgtaagtcttgatgatggagccgtggttgacagttgccaggatgtccatctcccgaggaaggaatctctccacaaagtcagtaggtgttttcttgcggtcgatgatcttgacagccacattgaacttgaggcgctcagagtaggcagatttgacttttgcgtaggaacccttgccaagattgatgcctacgatgtaacccttcttccttaggactgtggcatcgtccatggtgccaggagcgactggcgccgctgccgtctacatccccccgtcatgtgggccagcaggcattgtcctcatttacactaccggaggcgtctggctggctgcctgggctgggcttcgactcaggggtggaacactca

SEQ ID NO: 451257 - DNA, 1061 bp, Homo Sapiens
ccggtttggggggcccacaagggttcaggttccgcgggacttttccccctcccttgtgatggcccacggagggagatccccgggcctttgggtggcatccagcagtgggtgaggatttcgtcgatggggaccccccggttgaggtcggggttgcagactgtggtagatgaggtccttgccactcgcctgtcaggtgcttggagcgtgggaagttaacgcggtgctccttctggatacgcagcatcttcttgatgttggagtcgtcgtagggcatggagccgcagaccatgatgtagaggatcacgcctaggctccagatgtcgtacaccttgggctggtagggaatgccctgcagcacctctgggccgcatacgctggtgacccacagaaggtcttgcttaatgccattcgaccactgtcatcccgcaggcagcgcttggagaagctgaagtcggacagcttgatgttgaagtccttgtcaaggagaaggttgtcacacttgaggtcccggtggacgacgtccaggtcgtggcagtacttgatggccaaggaaagctggtggaacttcttgcgagcttcgtcctcatgcagggctccccgggttttgattaactcgaggaggtcgccctggaccgcgagctccatgacgatgtagaccttgccatgtgatgtctcaaagatctcgtaggtcttaatgatggagcagtggtttaacatggccagaatctcaatttcccggggaaggaatttctccaagaagtctgcgggggccttcttgcggtcgatgatcttgatcgccacattgaacttcaggcgctcagagtaagcagattttacttttgcataggagccctctcctaaatttatccccaggaggtagcctcgtcgcttgaggacagcagcgtcatccatggtgccaggaatgcccagtgcctctgaggctgccctctacagccccgaggcgcatgggccagcagtgtgctcatttacatcctggatagagagtcctttgggctggccaggcctgctgttcctgcctcctagaggccatcccgggaatt

SEQ ID NO: 451258 - DNA, 1111 bp, Homo Sapiens
gggggggaaccaaatttccgggggcccccctttttcctggggcggccattgggctgggccttgtgttcccgaaagtttgaaaagaagaaagcccgtcttggggaaccaggggtgcccatgggcttccgataggggtgaaggtttggaggggtgctccttgcaaaccggcatgctgagaggcttctgggtcctggggtcgactggggggggctcagtgagaagtgggacctttggtggtggcagtgggtaccacgcaaagctggggactggggcccagtggggcctcccgcggagtggctcagcctagccgcagccttggggcctctgggcaggaccaggttgctcatggggttggccagcaggttctgagagacccctggtggggtggcagtggagctgaggagggggctgcctcagagagacagccaccgtgcccatcacaggggctatcagggggctgctctgggacatggccacagggcctgccacgaggctgctgggagtcagggtgccagtggagggcaggcccagggaactggccagtgtgcctgttaggggtcccgcaatgggactggtcaggaagctggtgagggggctgctctgtgacgtgggtgctgggccagacagcagcgtgctgagggtgcctgtcagggggctcatgagtgagcccggtgtggcgctgggctgcaagctggttagcatctcggccaggggtgccaaggccatgatccccacttcttcgaggactcgttcgtttgccactgctggggacgggggcaggaagacaccattgttctggcgtgagggaaggcctgctgttgcctcaccaagcccactcgtgaacccgctgatgccgagcccgcctgcctgagtcttgatcgctgacttgagctcgtgattctcccgaatgagccgcaccaacttcttcagttcctcattttcccgcaccagcctctctatctgatgccgaagcccttcataattggtgagtagagacatgccctggggcagtggcaagggtgcggcccacgggagggcactgcacctggaggctgcccagggccccaggccttgcctgggctgaaggagggatcccgggaattccggaccg

SEQ ID NO: 451259 - DNA, 910 bp, Homo Sapiens
tgtgtgcacctgtctggatgtgcggactcgcctgtgagcgtattcaatcttatgacggattgctctttcccttgttcggcaaggcgaatgtctgtcctatacctgtaacacccattttatcctggaaaggtggaaaacgttgcctcaattcttggaggttctacaagtaagactctgggaatacggacttcttgagccgaagggctagatgctgaaatgagtgaagtcatttggggctatgaggatggaaaaaaacgtataatgtatttaaacgcttgttgagaaagacataacattgttggagactccaacgggcagaacactacaccgtgaaagtttgttccctctgaaattcatgtagcagtgaacttgtgtccccagtgtggcagtatcgagagtttaggccttcaagaggtaattggatcacggccctcatgagggaatttatcaacctaatggattaatggattaatgaatcgtcatgggagagatattagtggtttcaaaagcagagaaagagagacctgagctagcacactcctccccttcaccatgcgatgcctttcactaccggttgcaactctacagcgagtcgccaccagcgatgagatgctcatcagatatggatcctcaaccttgaaatgcttcatctccatactgcttttgaaataatcattaaaactatacatttaacaagatcggagtcatatggtgcgcatctgccagtacagcaataatacaagaggactaagcaccaagggaatgagcctagaccaagaaaggtactaccaactgggtctgaagcactgtgaacagcgtggaagaagagcaaaacataaaacctgttcagagaatgagtgacaagtttgtgggtcaatacaggactgctccattgtaaaaccccccaaat

SEQ ID NO: 451260 - DNA, 429 bp, Homo Sapiens
gaggggcccgttctcctcctgcatagcagccacaccatttcacagaagagaataaactgggtccaaaaaggggagacagcttgcccaaggcctctcacgaaatgtctcagtttccaggtgtggaaggcagaataatggctgcacaaagacacccacatccaaacccccagagcctgtgaatactgtcagcttatggcaaagggaaatgagggtgcagatggagtgaaggtgtctcaccgctgactttaagacaggggagatcaccctggatgatctgggtgggccaatggaatacaaggacctttagaacgtggaaaagggaggcagaagattcagtgtctgtgaatcaaggaaataggcagcctctagaagatggaaaaggcccagagacagattcttctcccccgcagcctccagaaggaatgtgta

SEQ ID NO: 451261 - DNA, 1278 bp, Homo Sapiens
tacaccaaaggcattgtgatgattagcgtggatttttctttgataaattttgctgtggtcatttcagtatcaataagttttggaagattcagatgtaatctgtacttctcagatacttcagtcaatagagtcatcctcaggaaacactaaggtcacagagaagagacagagttaataccagggtaattcaacctttcaactcaattttcagaggtttctcactgtgatcatgcacaatttttagttcataggctggcatcttcatctccacctggatttcagtactggaaatctcttctatcagacacactgctttgcctgaaacttggtcttttggcagtaacagttgaggaaagtgatctggattgctcatagtactgcttcgtatctgtccaagagttagttcccttctcattttttctcttaaatctatggaatcagtttggattcccatcagattttgtttcattctttgaatgcttccttttattctaaatttggtaatatggtaagagtgtgagagggtgaactggaatttctcctcaatgcatttcatggccatctgaattaactgattttttttcacttggtccttttctgctgcatgaagaacatcaggattgtaggcaacatcaatgactgtgtaagcatctgatatctcagttgtatcttctggtttgccaacagttagaggtactggatgagtggttgattggggagctgggatccttgtccactgacacaggttgataaaaagtattttttcttttggtttcagaatcctggtctgtagacaaagctgtggttctggggcagcacagagctgtttcccttctttcagctgctgctgaataaacttctcatagccctcagggtcactctgagctagatcatctaggaggttccaaaactgagtaacttgggtaagcagaccttttgaggatgtctccatgacttatgagtggtgaataattttcttaagcctcttctctcagttccttgacaaaccgcgacgcctgttaccagggtaaccagcctgggtacaacatctaattgggtccggggaacttcagggagaaaagtctcttcatatctagttccggaatgtcccccttctggtgccaggcttgcttttcagttgggcctgacccacttctcttccaggaaagcgcccgccttctttctgcacccgtcaacctctggagtgtcctgaaaaccctcccttgtgggagtctctgggctgcctgttggtgggacgatttctcaggagcacgactt

SEQ ID NO: 451262 - DNA, 1100 bp, Homo Sapiens
  misc_feature (237)..(245): n is a, c, g, or t
tggaaagaagatggcccttttgtgtttcccccaagggtttaagtttttaaataaatgagccaaagtgcccataccagaatttttttcaccgcgtttggaaaggccaacccgggggttccttatcccggggtattccccaacgatataggaacccgggtgttgggcactgaaagtggttattaaaattctggggtaccaagttttttctaaaaagtaaaagttcactttccaatcctnnnnnnnnngtcccgctattccccccaaaagtgttaaaaatccaaatgtgggacgggaatttcttgggggtcaatggggaagtaactgctctttgctatttattatgaagggactttaaatcaacttctcccattttccttccatttcccccctttcttggcccattctcaatgattctcttggtggtgattttttaccatcaactatttcaggggaagtcgacatggactggaagctgcctgtcccatcactaccgtaggccatgcagaaggaagaaaggcccccacttcccagggaggccaaaggaacgaaatccctgtatcaaaagaagaaaaaacacccccaaaagctggaaattcactgaaggcagagaaaaggggtgcagacgctctgcttctgcttccccagcagttcctctgacccccccaaaatattctccagcgggtttcccaagaggtcaaaggagaatgggtcctggccgccgaagaactccctgaagacgtcggctgggtcgcggaagctgaagacgtactcgaaggggtcctcgaagggcctgccgcctgtgcagccgccctccgcccccgcctcgccatagcggtcatagatatcgcgtttcttggcgtccgacaacacctcgtaggcctcggccacctgcttgaatctcctctccgcttcctccttgttctcagggtttttgtcggggtgccacttgagtgccagcttgcggtacgccttcttgatggcctcggatgaggcctgccggggcacgtccagcacctcgtagtagtccaccatgctggatggccagaacggcccaccaggcactggcacagcgagcggcaaggctgccagcacccaggcgc

SEQ ID NO: 451263 - DNA, 1332 bp, Homo Sapiens
gggtcgtctggtgcgttgcctggatcgggatgcgcgggctgcccctctcgatgatgtccctttccgaggcttcaggagatggtgtctttctttgagcttgctggatactgatgacgagtttgttgtgtcttgcaccgtttggtaacattctgcgcctccagctggcactcggtgagggccatcatctcctcataggtcatctgggagaaaagcgcggcatatttgtgcaggcggaggcttgtcagccaggctggaacatctttcagtcccactaccttcttcttggaatgtgttacgagcagtggtctgatcttctaagtgttcactcccaccacttcctgaagaggctacactgctttgtggagacaggggggcatgatcggatgggaggcactggggtcctctagctcgtaagtcctcatgagacatccatccatgtcctagaggctggtttggcacattcatgggtggggtaagggacacagatcgtttcaaagggctgtggtgtgcctggcctgagagaattgtacttgtgctggttccaatcgtattgattttgttggggacagatgaggaggagtagaggggcacatggccattctcacaccccatgcttttgtcctgccagttggaggcattgatgcaaatcccagaatcccgagagttctgccacccattgagcttgtcatcagagttctgtctttggtgatagtagtgtgtctgtccataatccacagagtctgagcggcctcggttctggccaccaaagctggtcgacgtgcggtcctccaagtgattcagccacatggctaaagcactacggtcttctaacgaagtggctggatgtatcaaagcataggacagcagctgcctgctctcctcaatgtgctggttgtgttcaatagagtgagccaggattttgggcagcagtttcatatattctactttcgcgtcgaggtttcctggcttcagcaaaggcagatgagttaacaggagggaaatcactttatccttggattcctgttgccattggttaatgattcctctaaacggttgctccggagaaccgtttggtgaagtttggtatcaactcactggtctgacgatgaacccacaagacatgcagtaacaggagcaaaattctcttgattagaggaccataatattttgctgagtttaggggtgagggcacagctgctgtccaggttatacggagctgagcacattacagttgaaccaggtgttaggtgaaaaatttgtgagttgatggaatgatcacataagagattgctccatctcctccctctccactttgtccttctccttttcttc

SEQ ID NO: 451264 - DNA, 1077 bp, Homo Sapiens
ggaagattttccaaccattccgggccagatgcccaggagggtagatttccctcccttaagagctcttacatccctcgggtctggttcccgttttatcccctttttcccttcggcacatggggttttacttttttacctcttttcatccaactgtaatttatgtttccaagttttgtattttattaagatttttttctttcatatttagtatctctaaaattgccacctatcttctatagatgtctctttttatctgaggagctactgaaatctataccaccaaggccttcattgcctgcagttgaagtagctgctgtagttcccaaagtcaaccctaaagcattctgtccaagtcctgatgttcctgtgtttgtactctggtaaagtgaacctcccataccagctaaggctccccctaaagagaggcctgttgatgcagttgtagttgtggctgttgtcccacccagattatttagagtaaatcctgtggatgctgctggagttgatgtcagagcagacgaaagagtcagaccgctagctgaggtagaggtaataggtagagcaaatggtttggcagatgctgcaggtttattgaatcctaaactgaagcctgttgtagctgcagatgtagtggctggcgttcccagagttaatcctgtagttatagttgttgctattcctgtatttgttcctcctagagtgaacccagtggcaggtttagatccaaagagcccggttcccaaaccacttgaaggagcagatgtagttgctggagttgaagtacttccaagatttccaaaattgagccccacagaagggttgctagacgttcccgttccgaaggagaaaacgccgcctgtgctggtcccgccggcggccacggtggtggagcccagagtcccggacccgaaggagaaccctgtggacatgtctggccagggctcgacgccgtcagcaaggcgaaatgggtctgggacacttctctcgcctcaaagccgaggcgggccgggcagcatctctctcgcccggcacggacctggcgggaacttccagccccatcccgagaattccggaccg

SEQ ID NO: 451265 - DNA, 1367 bp, Homo Sapiens
  misc_feature (1313)..(1313): n is a, c, g, or t
  misc_feature (1315)..(1315): n is a, c, g, or t
  misc_feature (1317)..(1317): n is a, c, g, or t
  misc_feature (1325)..(1325): n is a, c, g, or t
  misc_feature (1336)..(1336): n is a, c, g, or t
taaattctcgtaagcgtttttactttagggtttactataggaagccaaatcaatttcatataccttctctgtataggatttcaaatagagcatttttatggaaatagggtgaatatgttatagaggaagacatgcttctgcctctctgcctacttccctattggccctcctctctcgttctacccacatcctttaggcgaagaatggcttgccattcatgtttggtcagttaaagtattggttggccatgtttatcgatggccagatcaaccataaaaagaccatgcccatggcatggtgctccttttgcatttcttgtttccactctatggtgatggacatacagagagtccagcattctgcaggagcaagctgagatgtgctggggacgaggggcaggtagggagtggaggtgtctttcttaggccttaagaatgaaccatatgctcttacccaaccttaccaagctctgaaagatagttgtcattttggttcccagttgctatcagtcttcctatgtgtagctcttctggaaatgtctgcatcaggagtgactggcaggatcagatttgggcatttgtgaagttctctagctcaggttccattcaatgcaagtcacaattccagcctctgtcctttatcagtcgtcttagcagatctgtcttatttttcagctgataaacgtagagagccattaactcagtaggcccagtcaacatgaggttacttctggagtgctgtagttctgtttgcatatcaggatctacataaaagcattgccttaggtcctcaggtagaggttgatcaggggcagaaaggcttttcctgctgactccaccagcagcattcaactccccatacaatggcttcatgttgatttcttaaaatcagccatggtggctggatgcagtggccttcgaattccctagacctcatttatgccatgaatattaacgtggtctttatccatgaaacaggaagcttagtgttggcttatttggcaggaatcagccatgctcacttgccctgtgccttttaacctctgttgttatttgcctctggatccctcagatccaattttgtttcctagggccttgactcgaagcttggagttgcatctgggagaaaaatgtatctcaggggtaggagggaggggggttgcacggactccttatcataagccaatgctaaggtgaaactgtggaactgagtcctcctccaagggagaggaaaggatgtcttgtgacataactttcataactggtagctatagttaagcttgctaggatttgggtgcatggtacttactattngngnttaaagcnttccccttttnggggtttgttaacatttccccccgtggaaat

SEQ ID NO: 451266 - DNA, 1111 bp, Homo Sapiens
  misc_feature (1009)..(1038): n is a, c, g, or t
aaaccttgccgtttttaaaaagggcccttttccgcatggcccaggtttccggacttctctttttttcattccattcccggtttgggcaaggcagtttcccgtttttcctccctggaggattttccatttcaggccccccagatggttgctgctccttttccgccctgcccgggcttgggccaggagggctgggattttgttcctccagggtccctggccagagtcttcagggtcctccagctcctcatccatgcccttggcaaactgcagggcctgctgggtgctgtgaagctgcttacgcagagccaagatctccttcccccaggcgtgctgaccccgtcctcagctgtctccatgctccgctgcagtttggcattctcccccaccagacgtcggttgctgagctccaggtcctccaggctgctcagcaggtcagctgtggcttgtagctcgggtctggggtcttcgcctccgaagctctccaggttggctggctcctcagcttctgggcatccagatggcagttgctgggaggtcagggctccctggaaggcggtctcctcttccagctctaatcccccatgtagttgacaggcagcaatccagtcacgcatgacaaccaggaaagtgtccaagtccacagtggccttagggccctccccattggggtccaggctgttggccaatgtttggaggcgtgcatcctgggggccctggcctgtcacagcctccaggtaggccagcacctgggccacagccacagtgcctgtcctctgagggtcacaagcttcgaacgtggagttgagtatttgctcctccaagctgaccggcattcccagccttgcctcctcaggccgctcccggaggtacatttccgcagtggggccacccaccgggccctcaggcaggtccatgggccacccctgccgcggcgcagctgctggcaaagctaccagcctccctccttcatggggagggatgggaaaaggaccagctggcccgagcactnnnnnnnnnnnnnnnnnnnnnnnnnnnnnngtggtcaggatcctggggggacctgaagcaggggtatctctcccacatatgggggggcttcgctaggattttg

SEQ ID NO: 451267 - DNA, 878 bp, Homo Sapiens
gtctcctgagctcctctgatctggtgtttctgtgccgggcatccctccttgagcttgaagagatttaagctgctttttcagctgatttatttcctcctctgcagcccaaagggatatggccgatctgttcttgctttcttcaagattcttttcagtttcaaccagatcgtcttgaacctggttgcattgactccgggttgagttcaaattagagtctaactgttgcatatcccgatcccgaggactgggatctttatgtctctccctatcaaacgtgtcctgcagagaggggaccttgctgtcaacagattttcccagggaagcagcagtaaaggaagcctccagccaaggcaaaaggcgtgacttgattgtttccacaccatcattacgtcctccttcttgggctgctgctgtgaggatcccaaagagttgtccctgcaccttggcaacttgctcaatgagttcaaggcaatggtttagattttgatcacacgtgtttgtgttgtactccttcagccagaagtctagcttttcctgcaacgttcgtaaagtttcgtttgagaccagtcttttcaggttttccgccatcgctcactattcctctcggccccacgctgcgcgatggagacttggggggaccaggcggtggcctccgcaggaccgtggggtgatatggcgggaagggtgttctcttctggggggctcagagcgcggcaggtgtttccatcctccccctcgggtcggacctggccgggttcgggaagccagaggggaggtgcctgggccgcagccgccgcgcctcatccgccgtcccgcgcggtctcctggctccccagcagccgcctgagcccggccatagatcccatcccgggaattcc

SEQ ID NO: 451268 - DNA, 958 bp, Homo Sapiens
ccacaccctaccttctaagtcaccaggccatcaagtccagacaaagggatcgaaagagtgagacagtgccagccacctcccacccaagccactagcaagactccacaatgtcagagcaacaaatggacctgaaggatttaatgcccacaaagaggaaatacatgtggaagactgctgaagataggcgcatgtctgacctcacctgtgtgctggagtggctggagcggaggcaggggaagaagaaacaagctcccgagaagcaaaagcccaaagtggtgacagtccttaaacgaaataagaagaaggaagagaagaaaggcaaaggcctcatgacagcacggggagggaaccgcagggacacggagacttcccagcaggccttaggaaagagattcaggaaggacgccgcctcctaccgaagcctctatggagtggagcaaaaggggaaacacctcagcatggtccctggcagctacatcaaggatggccccaagaaatctgatacagacatcaaggatgcagtcgacccagagtccactcagcggccaaacccattccgtcgacaaagcattgtcttagatcccatgttacaggagggtacctttaacagccagagggcaaccttcataagagactggtccaacaagatgcctgacatggcttacgaacgcaagctaaagagcctcatggagaaaagcaccgaacctaagatggaaaccatgaggatgttgaagccagaggaggtgctgagctgccgatacctgaggttatccaaggagaacattcggaccttgctcaagttgtgcaaggatgcaggaatgactgtggatatccaccccgacttggtcgaagaggacatagatgctaaaaaggtgttcaccgggaatacccaggcatgggcctctaaatagctcctctcgccaccaccttcaggctccttctgtcatgggacccttca

SEQ ID NO: 451269 - DNA, 1051 bp, Homo Sapiens
  misc_feature (122)..(122): n is a, c, g, or t
ggggagagggtcaaccatttctccatccttgaaagttggctgggtggtggtggtggcattatcagtagtggcagtggcaaagggattgccgccaaactgctcctggactgcgttaagccatngggtccataatatctgtgtacatagtgcaaagcacatttgtagcccaccaggaatgctctccaagttaactgagcaccccgttcctggcttacgtatcatctcctgcatcatggcagggttacgtaaaaactccagtgtctgcccgcataatttccgggttgttaagaatatgcccaatctcaggttgtgctggatcagctgctgcatatgggggttgtcaagaaccagctggcgtactaggcctgtgttggacagcagacccgggatgaaggggtcatcaatgagctgagtcacaaactcaggcacagacacatgctgccgcatcagggagcttggctggtcagggaagccacgataggccaagcccagcctactgaggcctgtgaggagacctaagctaaaggcagggggcccatctgctgggtaaatggagcttggctgagggagtgatccaggacttgggccctgggtagggacagaggcagctgggcactcattgcccatggcacggtgctgcctcttgatgaccaggtggacagtgaggccatctcgcactccacactgtgccagtgagtcaggatccttgaggattttgccagcaaagattagaacaagctgatcggggtgggccttaaagcgctgagatatctcttccttcagctgctggatagtgcatgtgtctgtaactgagaaatcctccttgtctttgggcgtcttcactgtcaccttgatgaggtggggatcctggactggtgctgggctgccctgtggcagggcttctccacctttggccatggtggcagcaggaggcccagatctgtggggacacagcagtcagctgtggtcccgtccttctctttatgcagggctccaaacctccctcatcttgctacacagccacccatcccgagaattccggaccggtacc

SEQ ID NO: 451270 - DNA, 815 bp, Homo Sapiens
cgccccccccttgtttctcgttctttttgttggtgctgtgttcggttttctgcttcgtggtctctcttgtttgttcttttttaaaagcatgcaaaaccagatgtttagctcatgtaactaccttacaggtaggagaaaaagctgatcattctcatttgtgcatagcagaatgggcgttttaaagggtgaaggagagagtagggccgggaagctagcaggggatcacgtgaaaaatcatgaaggggcggtcagtattaatgacgggcagctgtgcctggagctggccgttatgaagctgggattctatcctcccacagagactgggggacagaggcctatcctccccatgactgcatttcagagcaatggctttcaggtccttgagaaagacacttctgaggtgtaggcgatacatatacatctcaaagcaacacagaaaggattcacacgttgtaagcccttttaagaaaatatcctacaataaagggagggcaggggccttaccatcgggtgttggctagaataaacggggcaattctcctggctgccttgagctttctcgggaagacattttactggggtcgaggttaggcggcagcggagggtgcggggaccttgaggtcatgctcctataagccacgctagagttcctcgatcttgtgagttgcagaggtttagactgtgctcttgtgtgctgcagacaagtcctgtcagttctcacagcgcacctgccaggacacaaagtcggttcccaaagtgttctgtaaatcctccgattgggcaacccgcgcttcacgattctgcggtgactcttg

SEQ ID NO: 451271 - DNA, 721 bp, Homo Sapiens
aaggtaaagaaatttgtgtttcaaaaaggtactggtcacgtggccgatgggtagggtgcgcggttctcaacgcggcggacactcgcttgctggagggtggtttcagtcctctgctcttccgcctggatagctgcggtcacacttactgccaggcaagcctactgtgccctttgtcgccctgtcctcccatcttccccggaaggttgggaactgcaggctcagcacacacaataaggcttcatttgcttagttgaggtcccaggacaagttgcctgtgtgtttatttagttttcttttgatctcccaccattttctcttagtttcaaaaagaggcggcgatgcagagtcgtttaggcaatcaaccctcccacgtcccctggctcagctaatgctggtggtcattcgttgccatttctgcgaaaggggacggacggaaccgcccgcagtacccgcttgccaccggctggacgagggggagggacgacagcttttactgtcccaaatcctgagattaagacctcagggctaaatcttgcgtggcggtaaaaattatttggaagttctgtgcaaccgttccaatattccgcttttacgtgcacggaaatagcctaagtccagatgccagccagggaagccactccgggccccgctgactaagcctggactgatggtctggagtctttaggccgggtcaactatgactcttgacgttgactcattc

SEQ ID NO: 451272 - DNA, 773 bp, Homo Sapiens
  misc_feature (330)..(363): n is a, c, g, or t
agcgaacagcacattaaaaatgcttaccatgtttgaagtcttgaatgctacagatgaaatacagtgtgtttggcctccaactctcgatatacacacagtctcctggtctgtagacaacatcatcttcagtgatgtaggatgttatctcgccggtatctgtcctttcataacgagacgttttcttcggtggtttcttcttgttcttcttcgtggactcctctgtggtggcactattgttgtcattgtcctcgtcttcactgtgatcactctcagcataatttttggctcctccttccaaggtacagctccggcgtggccttgaattctcannnnnnnnnnnnnnnnnnnnnnnnnnnnnnnnnnagtcccagtctcagtcccggtccttctctttgtctttgtctgctgtcatgattcgccacatgccttcttctgtcctctcacggctaggcctccgtgaaaggtagacagtaagcctgggcttcagtcttctgaatttctcactcaattccagggaaaatccaaccactccaacaaccccatgtttcaaaaatgctggccaacatgaggtcatctggatggagacatccatgaagcagaacgcagggtccagaagtgaacccaaatagatgtgggagtaaacgagagacagctcagatctgggagggagagcagaggctatttaacagatggcactgggacaaatgggctgtcatctggaaaatataaaactaactttgtaccttataccaaatcaattccagatggatccg

SEQ ID NO: 451273 - DNA, 1942 bp, Homo Sapiens
gtttttttctggagatcaacagtgtgatgtaaagtcatcttttaaggagggcgcagctcccaccgtggcctctctgggattgttgctccaacccaaggaaatgtgagtaggggccgagtaacagacccagaaggggcagcctgaaagcaatggggtctcaaaacaatagagaacgtgggcaggttgggctggggtgtgggcagaatagacgccagctcatccgaactggcctagagtcaaggtgctgaactcctggctccatcgaagcacaacgtcctcacttttgccagggctcagcgcactgtaagtctcattctgcagacatctcatgcgggacaccttccgattgcggtttctcatcagacactgctggcttttgaaggaacagtagtttgggtactggatatagtctgtgtcacaaatcttggtagggaaatccccatcctggaagctaaggaactcagtctggagccacccagagactcggacatcttcacagcctttcgtggcaagccgggcacaccagaagtccatgtggagcccaccgtacaaatccagcccgtaaaagcggcctgattctggggaccctacctggttgccgatggacaggctctgggaggcaagcaaggggctgacaaagggagtcttgtgggaggtgtcgcattgttgccgctgcaggctggcctctgagtggcactgctccagcttcaaggagcagaagtcacagagggcacaggtagacatgtgtcgccgcccaaggctgtcacagaccgacttcccgaaaccaaggatctcctcctccatgtacttccaggccttggctgtgggggttatgatgcaggtattctccacgatcgaatagcacagcaccagcaaggcctctgtgtggggcagctgcaggaggctgccagggttttggtttctccagtaggagttctcatcatatatttcattcatttcatctatttcctgggctgatcgaatgagctccctggatgttctccattatcataggagtagactctacttctcgtacccggggagcaaaagaggaagggttagaagatagagattcagagtgaaacttgggctctgagtctgtctgcagctgagacacagcctcccgtccctccttagtcccctgtccttcttcctgctttccctcctcttcctgttcctcttcttgctcttcctgtttctgcccctcttcctgcttgtgttcttgtgtcggctcctgcctgtgctccactccttgctcctgcttgtgctctggcgcttgctcctggcctcccagggacaaggaggattgtaggagctcttccacgttgttgctgagcctctcaggccagggctggaaggtctggcgttctgtcactgtgaagtggggtgagatgggggaggtcatcgtggtgggtgagacttcagctgaagcttctatctccttgagagtgttaggtgagagaatagagactggctgggaacacaggactctcttggcatagtagacgtggttggagcaacggtagtgagtgaactggcagaaagactcaaaccaggaggcataagggaggttggagcagacagcaccatcgggcactaagccgtggttttcatattggtccagctggacgagtgtgggattccggcagccgtgggttgcacggagacggcaggtagtctctgccttccaggttggagtcagcagtgcgaagaagcgttcgtattcggtaggagagagagggctgcctggagtggaggcctgagtcgaatcctgggctgcggcaggtgccagaggcaggagcagcaccttcaggagtgagggaaggaagccagcggctggcttcctcatggccggagaagatccgcccgcgtcccgtggacacaagccgcctctaacgggccaagccgcagagagagccgcaggcgcggggcggggcgcacg

SEQ ID NO: 451274 - DNA, 1195 bp, Homo Sapiens
  misc_feature (344)..(407): n is a, c, g, or t
tcgagggcaaacgacagcagggattccaccacgatccggaaagcacaagcaaccagccaagggccatccggggtggggcagacacgacacggaggacagccagagtaccaggtcttctccaagtaggagttctcagagcaaagtagctgcagcgcaggagcatcgagattccctggccctgatcgaatgagctcctggatgttctccagtatcataggagtagactctacttctcgtacccggggagcacaagaggaagggttagaagatagagattcagagtgaaacttgggctctgagtctgtctgcagctgagacacagcctcccgtccctccttagtccnnnnnnnnnnnnnnnnnnnnnnnnnnnnnnnnnnnnnnnnnnnnnnnnnnnnnnnnnnnnnnnnctcttcctgcttgtgttcttgagtcggctcctgcctgtgctccactccttgctcctgcttgtgctctggcgcttgctcctggcctcccagggacaaggaggattgtaggagctcttccacgttgttgctgagcctctcaggccagggctggaaggtctggcgttctgtcactgtgaagtggggtgagatgggggaggtcatcgtggtgggtgagacttcagctgaagcttctatctccttgagagtgttaggtgagagaatagagactggctgggaacacaggactctcttggcatagtagacgtggttggagcaacggtagtgagtgaactggcagaaagactcaaaccaggaggcataagggaggttggagcagacagcaccatcgggcactaagccgtggttttcatattggtccagctggacgagtgtgggattccggcagccgtgggttgcacggagacggcaggtagtctctgccttccaggttggagtcagcagtgcgaagaagcgttcgtattcggtaggagagagagggctgcctggagtggaggcctgagtcgaatcctgggctgcggcaggtgccagaggcaggagcagcaccttcaggagtgcgaagaagcgttcgtattcggtaggagagagagggctgcctggagtggaggcctgagtcgaatcctgggctgcggcaggtgccagaggcaggagcagcaccttcaggagtgagggaaggaagccagcggctggcttcctcatggccggagaagatccgcccgcgtcccgtggac

SEQ ID NO: 451275 - DNA, 1053 bp, Homo Sapiens
  misc_feature (101)..(101): n is a, c, g, or t
  misc_feature (254)..(317): n is a, c, g, or t
gccttctgtgggggccagctgcaggaggctgccaggggtttggtttcctccagtaggagttttcatccatatattcccattcattccatctatttctgggnctgatcgaatgagctcctggatgtcctccatatcattaggagtagactctatttctcgtacccgggagcaaaagaggaagggttagaagatagagattcagagtgaaacttggcttctgagtctgtctgcagctgagacacagcctcccgtcnnnnnnnnnnnnnnnnnnnnnnnnnnnnnnnnnnnnnnnnnnnnnnnnnnnnnnnnnnnnnnnnctgtttctgcccctcttcctgcttgtgttcttgtgtcggctcctgcctgtgctccactccttgctcctgcttgtgctctggcgcttgctcctggcctcccagggacaaggaggattgtaggagctcttccacgttgttgctgagcctctcaggccagggctggaaggtctggcgttctgtcactgtgaagtggggtgagatgggggaggtcatcgtggtgggtgagacttcagctgaagcttctatctccttgagagtgttaggtgagagaatagagactggctgggaacacaggactctcttggcatagtagacgtggttggagcaacggtagtgagtgaactggcagaaagactcaaaccaggaggcataagggaggttggagcagacagcaccatcgggcactaagccgtggttttcatattggtccagctggacgagtgtgggattccggcagccgtgggttgcacggagacggcaggtagtctctgccttccaggttggagtcagcagtgcgaagaagcgttcgtattcggtaggagagagagggctgcctggagtggaggcctgagtcgaatcctgggctgcggcaggtgccagaggcaggagcagcaccttcaggagtgagggaaggaagccagcggctggcttcctcatggccggagaagatccgcccgcgtcccgtggacacaagccgcctctaacgggcatccggagaattccggaccggtaccag

SEQ ID NO: 451276 - DNA, 1024 bp, Homo Sapiens
  misc_feature (29)..(29): n is a, c, g, or t
  misc_feature (91)..(91): n is a, c, g, or t
  misc_feature (116)..(116): n is a, c, g, or t
  misc_feature (263)..(320): n is a, c, g, or t
gctttgtgtggggcagctgcagagggctnccagggttttgtttcttccagtaggagttctcatcatatattccattcattccatctatttnctgggctgatcgaatgagctcctgngatgttctccattatcatagggagtagactctactttctcgtaccccggggagcaaaagaggaagggttagaagatagagattcagagtgaaacttgggctctgagtctgtctgcagctgagacacagcctcccgtccctccttagnnnnnnnnnnnnnnnnnnnnnnnnnnnnnnnnnnnnnnnnnnnnnnnnnnnnnnnnnngtttctgcccctcttcctgcttgtgttcttgtgtcggctcctgcctgtgctccactccttgctcctgcttgtgctctggcgcttgctcctggcctcccagggacaaggaggattgtaggagctcttccacgttgttgctgagcctctcaggccagggctggaaggtctggcgttctgtcactgtgaagtggggtgagatgggggaggtcatcgtggtgggtgagacttcagctgaagcttctatctccttgagagtgttaggtgagagaatagagactggctgggaacacaggactctcttggcatagtagacgtggttggagcaacggtagtgagtgaactggcagaaagactcaaaccaggaggcataagggaggttggagcagacagcaccatcgggcactaagccgtggttttcatattggtccagctggacgagtgtgggattccggcagccgtgggttgcacggagacggcaggtagtctctgccttccaggttggagtcagcagtgcgaagaagcgttcgtattcggtaggagagagagggctgcctggagtggaggcctgagtcgaatcctgggctgcggcaggtgccagaggcaggagcagcaccttcaggagtgagggaaggaagccagcggctggcttcctcatggccggagaagatccgcccgcgtcccgtgatcccgggaattccggaccc

SEQ ID NO: 451277 - DNA, 1305 bp, Homo Sapiens
cgcggagaggagaggagccagaagttgagttcaaccaccagtggccaatgatttcatcaaccatgcctacacgatgaagcctccataaaaccctaaccaaagcggttaggagaacttctgggtgagaagtcatttctccagtttgtggctgaccctgtattgagaatgatacctggagtgccagctagctgacacatgtcagataggattcgagtagaatgttgcagaaacccggaggccatttctgaacactttacactactcaaggtggcaaaggagagacatggagccatttgaggcactcaatcgttgcattgcaagaaaacatggaattacatccattcctccaatgactaatatttgcttcactaatatcaaatttgcaccttgctgctcagtttctgggcctttatgggaacacaacaataagcattcatttcaatgccaaatcatgctgtaatctttttgaagacattgtcagaagcacttaaactcaacacatattgtgcgtataatgcacatgactctcttgaagtgatgacaatgaacagccatggccaagcacccatgcacagatgagttatgctttaagccatacaaacagaaaactaacattggaacctaaaattactgtcaatgccaagatcattgtggttggtgcatccagtgttggaatttccttcctagagacattggtattttgctctcacatgaagtttaataatcttaccctgatttcaactcatggactcccaggaaaaaaacttctggacactgaacaaaggaaatttttagccagcgaccactgttttaatgataaagattatgcactgatgtcactgtgctcctgggttaatgtcgtggtgggtagaatgaccggcatagaccgagcagccaagcacgttgtgctttccacggacgagatcgtgccctacgaccacctcatcctctgcaccgggcagcagtaccaggtcccatgccctacagaggctgatattagtcaacacctgacaaacagggaggttcccaacagcagtcagcggcggtacacggggaaagttccttgcaaccatttcactctcaacgaggaagaggattgctttaaggcactgatttggataaggaataactccatcaccacagaagatggaggaagagcatcagtgttattctgctgacttgcccagttgtcagggatggtgatgctgtggtgcccccttaaagggaaatgtttttcaagatttaagactgactcccagcaggcagtgcataaagccatttggaagtgcctgcttttgtccacca

SEQ ID NO: 451278 - DNA, 1840 bp, Homo Sapiens
ggcatagaaacccccctgttagtggtggaggaaaccaggggggaaatgtaaagaccgcgccactttttttgtgaaaaagaaaggggccccggcaaagaacaagttttgtcgtgggatttgaagggcagccgttcagcccctgaatggggtaattgggcggacccagggaatttgaagggtttattggccattgattcccctgcccaaaaaataattcgacccagagccagccagttaaggaccattatgggcaaccgggggggttctggttttcacaccatccactttgggcaagggtttttgtttagccacttttgtttccgagttaaatttttgaaccaccaatttcgtgctcccaaagcctaatgtgtccattgtaacagggaaatcgccggccccaataggctagacaaaacaggtgtttatagactcccttcaaatggttttcaggttccttcaagtggattttagcccaacactttcagctttgccaggtgaacctttctccagactgttgacccatcacaggtatgaatttccgtaggaacttcacaccatgctgctccatgtagaaacccactttttcagccatttattggtcgaagccacggagaaggattgagcgtaccataactgtgacatctaggccaaagccaaccagaaaccctgcacactccagggcaacataagaggcacccaccactaatgttttgccagggcaataaggcagagaaaaaaggtcatcactagtaatacagtattctttatctccttggcattcctaaataccgtggcctttcacccgttgttatgacaaacctgtgcagccgtataataagtttcctgtccttttttattggttgcctttattttatgatgttcaacaaattctccataggaattgacataggccacagccttttccttcagagacaacctgtagcccccagtttagagagctgatgtggttctgaatcgcttttgtcattgtctcccagttgtgcctcacttgttgattatattcccagccaaatttccttgagtcacataatgcctgccccaaaagggcagcctgatgcatcaatttcttaggaatacaacctacatttacacaagtgccaccaagaccccaggatgtgccctgaggtgacgggacaacaaagtctagcaccataactttctttcccaaaatggcagcttccttcgcacatgaaaggcctccagaaccaccaccgatgatgatgagatcataatcatatgccaaatcttcctgaaggagcttctgtaacaaaccactctgatatgcctggaaagtttggtcacatccacctacatgcactttattcacgaaaatattgggcacagttttctgattagtgatttctgacagcacttcttgaaccctggccccatcatcaacttgatcaagttccaagacattacattcgactcccaaagaagaaaagagttctttcacccgagtactatggggacagtagctcttgctgaagatcaccacccggctgcgctcgatgaggcccacgaggtggcggcgcagctcctcgcgggcctcggacgagcggctgggcccgggggacgacaggcgggcacggcgcccccggcggcagacaacacgcgcagcccctcggacatggcccgagcggcggttgggggcatcgcccgcctttcccggccacgggcgactgcggcggcgaccgctccagagtctcgctctcgctcctggcccggccgggcctgctcacaaaccgaaacgcaggcggctgtggcgccgggacggggcctgaggggcggcgaacgctgccctcgctgccactctcac

SEQ ID NO: 451279 - DNA, 960 bp, Homo Sapiens
cgttccctgggccctgaccacgaaggcctttttctgccgagttctgagttaagaggtcctggacagcgccaacctgagggcttcttcgtacttctgagccaagcagcgaggacaggaagccccacacgaagtgactgggagagggaggcattcctttggctgcacacccatggcaagttcccgagtctccccaggcggtcccatgtttggagacataaggagccaatttgtgttggaccaaggcctcttcctcttctggctgttgctcctctttcttcagtcggtggatttcagcttgcaatgcaaaaagcttctgacgcagaacttcattttcttcttgaacctggttagtcctctgacactccgcatcaaagttcaggatcacagggactggcatgcactgaaacaggacgctcaggaagttgtgcagggacacaatgaaggtgtcagcccactgtcgagaaaagtaggtagcaaaggtggggttggtgtccggggatggcaggaagggcaggacaaaccaatccttccactcagcctggttctggagttccgtggcctgctttgcaaagaactcctgagccttgtcatttctgtttgtctggattgtgtagacaagataaaatcgaaacaggctggttttcagcttgtggattgtgggtctgtatatatcctccaagcggctgaagagccgacgctccaagtagctccaataatcccgaagggcagccaagtcatacacctgcattaactgctgcagctggtccacaatcttatccacccggaaccccttctccttgtccgccttgatctcggcgtccagctgccgcagtgtgtgcgtgaacccgcggaagagcaggtactcccggaccagctcgtcagtgcgctccacggcctccgccatccctcgtgccgaattcgccacccagcctcgctaccttatacgccgggagtactgcc

SEQ ID NO: 451280 - DNA, 1209 bp, Homo Sapiens
gtccgaataacccaggagtatgaaataaaacagtttatgtacccaactgtctcctggcaaatatgggactaattttaaacattcccagaattctttgtggatgctacactccagcacctgcttctcattaaaattcaattgatctgaattttttgcaaataagatttgattgctttccatatcataaaacagcataggctatattgctctgaatcacctattgtgcaacatatgtgtccagttcatctgtattacttcagtttatggccgagacccacagttatcctttttgtaagtttataataagattctatggatttccttttcgatcgtttcgtgattggaatgtttggctgggccagatgcccttagttcactacaggtctctgtagctttcatctacacaattccctgattaaatgtgtggtgtacatcctgttacagattgcaccacagtttcacacagttctaagtgtggtggctgaatcctatattccagaagttaatgacttgttcaggggatacatttgttaagtatttatcacagttgaagacggcagagccgtggaatagagcatattaattctgtttgctccaggcaggtattaggcacttctaaagtctcatatagagtcgtagtaaggcaatcgtgttattcctttcctactgctctgagaatgtatctgtccttcagtctagtgagagcaccccctgctgtcatcaggaaatcacttcagttctcttgcacttctcttccatggctcttttataggtgagacaagctaataagtggcaatttgctagctgaggctcctccactttaagaaacgaggactggtgtctctatgcatttcctgtcaggctgataacagtgttacaacatcatctgtttaatccacttggaacccaagtttaagttgaaatgctcagtaaggaattcattttcccagctgattcaatatccgattttcatagtgggcttatatatgtagcattgttgagttgctctgattgaagtagaagtggatactggagcccacccacaccagcttaagtcacttgccctattcccacccacatacccaccctgtctcctcacttcccactctacccattcctgtagaagaagtacttgaagagggaattttgaaaattctgcatcctttcagtcatttattcaacaagctttgaatatctagcatgtcctag

SEQ ID NO: 451281 - DNA, 912 bp, Homo Sapiens
  misc_feature (85)..(85): n is a, c, g, or t
  misc_feature (836)..(872): n is a, c, g, or t
ctcagtcagcctggggatgcttccccctagcaccggctcctgtgtggacagccttagaagggatgaagccaaggccgcaagagtntgtccagggcctctctggccacttagtgggggaaggacatggggacatggggagtggcggatctgggagaacagtcccaggccctgtcctccctgttggtcacagcaaacgtggaggaagcagcatacccagccccagtgccaggctggtggtggcccccactgtctggctgctcggggctctgttacacaggcggccggtgcagcagttggtggtgaggctgtaggtgacgcccctgtagctgacgggttcctcaaggccgcagctggtggctcgcaggcagcctttgttgatgaccggaccagtgcccggggcgaccccgtggcctgtgaagcagtcctcgtcatcgccacagtgcatgtaggtaccaggacactgcatggagtcggtgagctcacagaagacgcagtccttgacgcccgtcgtgcctgggggcagagccatcaccagaagcagcagccagcacaggaccatggcggcctggcggcgttgaccctgccccagccaggccgtgggcttcccagacctcccggaaccgctgaatgaaggacctctgaggactcctcttgcccacgggactttggcctggtcctggcctcccagggtcagcgcctggagtgtcctctgttcccaacgccctgcgtccctctaagtcctggggatggaggtgagcgggtggctgctgcccaacaagagtctgtgaatggaatccgctctcgacgaattcgagctcggccgatttggcctgatnnnnnnnnnnnnnnnnnnnnnnnnnnnnnnnnnnnnncggccgccaccgcgtgaactccggtccccaattagctata

SEQ ID NO: 451282 - DNA, 897 bp, Homo Sapiens
agggacctgtagactgccgctctgggcctcttcctggagtgaagagtatctggagcgtctccaagcgtctccgggattttgtacttctgggctcctagatggaattgagaaagtccatcttgctcaggaggccctggaggctcatcctgcgttcacccggagttctggaggtaggctgccgggatacagtgtgtccatactcaaatgatcatctggcaaagtctgttttctgacgctgaggtttggataattggtgtggaatcccaacaatctcaggaaggctccaacgttcagctagatctttcttcaggttcttgggcgaaacagacaaatttggttggtcttgaaaccttactgtctagtggaacaagtatttcatctgcctgatgacctgcagcccgatctagatctgtagtttgaacccacttgaggcgaggaagctgaactagggcctggttctgatcccggttgagaagcggaaccacctctgggagcctttcttctggagtccgcttgtcatttaagtcctgatgtgcagccaagaacggctctggccccaggggcagctctccagctgaatccaattccttcaggaatggagccaaattttcagttggttcctgaggcagggctgacatctgcgaagaagcagagggccccaggtaatcaaagtcccccggggctgctgggggagcaggtgcatggggagattcccatgggagatgggaggagcgggaagaccagggctcaggtggccccagggggttagaggtcagctggagcgggtccttgacccacaccagaggctgagcctccttgactagtaaagacaataccctgccacgtaaggaggggccatgggccccagaaacgcagccaagacatgacacacgctga

SEQ ID NO: 451283 - DNA, 738 bp, Homo Sapiens
tgcgcgcacctctggctagcaactgagtaagtggtcggtcccttctatgtattgcgtcttgtaatgagggcttcccgcgcttcccaagagagaaggctccgttaaggcgcgtctcgggcccaggtaactgatttgagggcacaaagcttgggattcgtgggcgctcaggagttctccatcggcccccgcccttacccagatccgggtgatccagaacgcagtgcgccacataggctgggtggctgtgcagactcctgcatttcttgcagaagaggagctcgcagcaagcacagcccccgcggcgcggcggtcgtcgccggatctccagcacgcacggctcctccgggaggctccgcttcctgtcggtgggagctgttaggccgcccagcagcgctaaggggccgagccagccccagaagccgctgtccgcgcgccgcagcagcgccacctgctgggtgctggactcctggcgcagcgggcagtaggacactgagcgccgctcgcggccttcgccctcctccgctacccgcggcggctcctcgccctccgtcgcgctgtcctccagcggcctctggttgtcctcgtcctcgtcctccgacccctccttcccttcctcttgctccgcctcctcggcccggagctcttccgtttccttcttccacaagggggtcttcacaccatgcttatccattcttcccaaggctgtgcctgctttcctgatcagagactggatgtgag

SEQ ID NO: 451284 - DNA, 1398 bp, Homo Sapiens
  misc_feature (866)..(874): n is a, c, g, or t
  misc_feature (1044)..(1052): n is a, c, g, or t
tcctggagcaatgacattgcagaatattttctcctcctccagccacacttgtcaccaactgctgccaactcgccaccactgctgccgacctcgcaaccactgcttgtctctgaagtgagactgctcctggtgccatgaacggagacgacgcctttgcaaggagacccagggttggtgctcaagtatcagagaagatccgcaaggcctttgatgatattgccacatacttctctaaggaagagtgggaaaagatgaaatcctcggagaaaatcttctatgtgtatatgaagagaaagtatgaggctatgactaaactaggtttcaaggtcaccctcccacctttcatgtgtaataaacgggccgcagacttccaggggaatgatttggataatgaccctaaccgtgggattcaggttgaacatcctcagatgactttcggcaggctccacagaatcatcccgaagatcatgcccaagaagccagcagaggacgaaaatgattcgaagggagtgtcagaacgcatctggcccacaaaacgatgggaaaccaactgcaccccccaggacaagcaaatatttctgagaaggctcaataagagatctggaacccaaaagggggaaacatgcctggacccaacagactgcgtgagagaaagcagctggtgatttatgaagagatcagtgaccctgaggaagatgacgagtaactctcctgggggatacgacacatggcccttgatgagaagccgaacgtggtgacccttcccgaacatggccatggctgcggccccccctcctcatcccgcggcatacgtaaggggaaagcaaagtgtctcacccaccggcggtaaactctgaagttgccannnnnnnnnctaatggcggcccgacaacgcccccattgttccaccgcgtttcccaattggtaatttttacccttacccgccggggggcccattctcatgcccaaagcaatatctcacacccgctttaattacaccttggcccgcgcttcaattccaaccgtaaacccggccaccttgcnnnnnnnnngtccggcctttttgccgccaaccttcattttgcccaccctttcttctatttttaaaacccaccattggacattgggcctcccggcgtatttcccccttctccacttacaaaacacgacccaacttatttcgtcccatgtcttcctcccccgaataataggtgtacaccacacacgacgggggcgacctcttatggaacgggggattaaccatttccaaaaaatattttctccacccgtcggctatctcccccatattaaccatcacatccgcccccgagtcgagaccccttctcgatataccgcggcaatacacccccactaagatcccctctcaatccgttcccc

SEQ ID NO: 451285 - DNA, 854 bp, Homo Sapiens
cctgtccaaagctgggcgaatcaggtattccggttcacaagtggactgctgataaatggagaaagatttgcagaaatttcttaaagaatgtggtatgaaatctccaatttaattcaggagatgaattctgatgacccagttgtgcaacagaaagctgtcctggagacagaaaagagactactgcttatggaggaagaccaggaggaggatgaatgcaggaccaccttgaacaagactatgatcagtcctccacaaactgctctgaagagtgcagaagaaataaactcagaggccttcttggcatctgtggagaaggatgcaaaggaacgagccaagagaagaagggaaaacaaagtcttggcggatgccctaaaagaaaaagggaatgaagcatttgctgaaggcaattatgaacacagctatcctgcgctacagtgagggtttggagaagctgaaggacatgaaagtgctgtacaccaaccgagcccaggcttatatgaaacttgaggactatgagaaggcactggtggattgtgagtgggctctcaagtgtgatgaaaaatgcacaaaagcatattttcacatgggaaaagccaacctggccctgaagaactacagtgtgtctagagagtgttataagaagatcttagaaactaaaccccaagctgcaaacccaggtgaaaggttacctgaatcaagtagatcttcaggaagaaagcagaccttcaagaaaatggaagcccacgaactgctggattcaggaaagaacacagccgtgaccaccaagaacctcctggagaccctttccaagcctgaccagatccccttgttctatgctggggggattgagatcg

SEQ ID NO: 451286 - DNA, 1225 bp, Homo Sapiens
tttgcaaaacgagactgttaataaaacctaccccagggtaggacggactgttcgggccaggcacattgagcattggtcctgtgcctgacgctatgctagatgctggggttgcagccacgagcatagacacgacagacacggtcctcgccatcttctgttgagtactggtcggaacaagaggatcgtctgtagacaggatatgatcatcgtggcgcatgtattactcatccttttgggggccactgagatactgcaagctgacttacttcctgatgaaaagatttcacttctcccacctgtcaatttcaccattaaagttactggtttggctcaagttcttttacaatggaaaccaaatcctgatcaagagcaaaggaatgttaatctagaatatcaagtgaaaataaacgctccaaaagaagatgactatgaaaccagaatcactgaaagcaaatgtgtaaccatcctccacaaaggcttttcagcaagtgtgcggaccatcctgcagaacgaccactcactactggccagcagctgggcttctgctgaacttcatgccccaccagggtctcctggaacctcaattgtgaatttaacttgcaccacaaacactacagaagacaattattcacgtttaaggtcataccaagtttcccttcactgcacctggcttgttggcacagatgcccctgaggacacgcagtattttctctactataggtatggctcttggattgaggaatgccaagaatacagcaaagacacactggggagaaatatcgcatgctggtttcccaggacttttatcctcagcaaagggcgtgactggcttgcggtgcttgttaacggctccagcaagcactctgctatcaggccctttgatcagctgtttgcccttcacgccattgatcaaataaatcctccactgaatgtcacagcagagattgaaggaactcgtctctctatccaatgggagaaaccagtgtctgcttttccaatccattgctttgattatgaagtaaaaatacacaatacaaggaatggatatttgcagatagaaaaattgatgaccaatgcattcatctcaataattgatgatctttctaagtacgatgttcaagtgagagcagcagtgagctccatgtgcagagaggcagggctctggagtgagtggagccaacctatttatgtgggttctcataatcacaggagtaacatccagctt

SEQ ID NO: 451287 - DNA, 875 bp, Homo Sapiens
  misc_feature (230)..(243): n is a, c, g, or t
  misc_feature (471)..(528): n is a, c, g, or t
gcccttctgtaaaaaaatttttctcttcataattataattatcctcctcgttttaccacaatcttcttttcttcatccatcccatcatattctatgctctctctcttgtttttacaccaccacaataatcatcggtcttttcaaaatttttattattttaccactccgccagtgatcttataatatttctcctagatatgtatttttggctcccccacctattttgtgtnnnnnnnnnnnnnngttcttgtgtggggtgcttcctccccccaaggttgtgtctcctccgtggtcgccgttgtttttccctcctctcccgctcttttcttaatcccgcggcgcgccgtctcttcctgctctctaattatgccgtcccctttttggggggcccccttggtttcaacaaaatctgggtgttcccttatcttttgtccccccccggggaaattttttatggccgcccccccctcnnnnnnnnnnnnnnnnnnnnnnnnnnnnnnnnnnnnnnnnnnnnnnnnnnnnnnnnnngaaagaatagcctctattttatatcagtacaaaatagctctgaacaacacatgggacaggggacagagcaggagccaggatctggggctgcctggctctgggactcccgagactggggagcccataggtttctgtttgacagaagtcctccttttctctgcattgaagggcctgccctctagctgggtcactttctcgatccagaggttgtagttcaccaacgaggtgtatatccctggggtgttcttctctccacagctctttccccagctgatgatgcccacctggtaccacttctcaccaggctctggggtgcagaccagaggccccccactgtcacccttgca

SEQ ID NO: 451288 - DNA, 1010 bp, Homo Sapiens
cataaagggtcccagctgggacacaaatctctctggacagcacggggtcaccgttcaaaaccttcttggtgagctctatgggaaagccggcttgaaccaggagtggggtctgattcgctacatctcaggccttctcaggaagaaagtggaggtcctggctgaggcctgcacagacctgctttcgcaccagaagcagctcaccgtgggcctgccgcccgagccccgggagaagatcatctctgcgccccttcccccagaggagctcacaaaactcatctacgaggccagtgggcaggacatcagcattgccgtcctcacgcaggagattgtggtttacctggccatgtatgtcagggcgcagcccagcctctttgtggagatgctgagactccggattggactgatcattcaggtgatggccacggagctggcacggagcctgaactgctcaggagaagaggcttctgaaagtttgatgaacctcagccctttcgatatgaaaaatctcctgcaccatattctaagtgggaaagagtttggcgttgaaagaagtgtgcgccctatccactcctccacatccagccctaccatctccatccacgaggtgggccataccggagtcaccaaaactgagaggagtggcattaacagactgaggagtgaaatgaaacagatgactaggcggtttagtgctgatgaacagttcttttctgtgggccaggccgcgtccagcagtgcgcattcctccaagtctgcgaggtccagcaccccatactcgcccactggcacgtcatcctcagactcgggaggacatcacatcggctggcggtgaagcggcagggcccagtgggctgcgcaaggagaaacggctggatgggggccatccacaaggggtccccggggggattcctacccaaagtgtgtcggaaagaatcttcccaaaagtgccacgggcatcacaaaccgaagagaaagcaccaccaatctcaagaaccgaggagaagacccac

SEQ ID NO: 451289 - DNA, 514 bp, Homo Sapiens
  misc_feature (97)..(209): n is a, c, g, or t
tcgcttgtgtgctttgtgtctgttgttctcttctgtctcttctcttattttgtggctgcttcatgcttgattcatcggtctctctgcttttgctttnnnnnnnnnnnnnnnnnnnnnnnnnnnnnnnnnnnnnnnnnnnnnnnnnnnnnnnnnnnnnnnnnnnnnnnnnnnnnnnnnnnnnnnnnnnnnnnnnnnnnnnnnnnnnnnnnaaagtagatcctgattttaatagatgtggaggtttctcaatttagggagaattaaattagaagcagcttttcaacggttctgtccttagcttagagactttcaaaactcagggaagtcagattggttgaatggatactaccattttgggtaaaaccagtggcttttagaaaacagcttatggtattttggcagcaactatgtgttttagaagctgtgaaggggccttttttcctggagctcagatggcactggtactatttcaacctcataggtgaggtctgttttcagtgaccttggttgccat

SEQ ID NO: 451290 - DNA, 848 bp, Homo Sapiens
tagataggaatacttggaaccattcttcaggcttcggatatattcccgtgtccgcttgtaattatcttctttcgacatcaggtagtcccaatgttctcaaaggtagtcttgtctttttcgatttaaaaagagccccaggttttttgtccagcctgaagatgggagcactttgtaatgctgataccacagacatgagagaatgaaggttgttgagttctagaagttttctggttaaacctccgggtaaaggccacaacgttaggggcaagactgtgtttctccttcttactccatccacagctggctagttcctccggctggatagctttaaacacaggtatatccattaatgtaatctggctagcaaactcctctggggtcactttcaagacatcgaagacaacggcatcatagctcttgctggcatagtcgcagctctggccctccagagagtccgagctgctgctgccctgtggagtggcagaggtgaccaacacgctagccatcagaccattcctcttgtacatagtctccaggccacagggagcttcagggcagcctctgcaggtaacataacctgtctggagaagtccgccgctctccccgccgccgcagtcccggccggtcaccttgacgcgggccgcagtggctgccgccgcttcctcatggccctgggagctgcccagcggcagcggcgccttcgcttggaggccggggccacgccgagccgggccggggccgggccatgcgcagctggagcgcgggcagacgcgggagcggagccggtgcccagccgcagcctcgtgccgaattcaaccacccagcctcgacctagcctaagtttcccc

SEQ ID NO: 451291 - DNA, 819 bp, Homo Sapiens
catgcgcaccgttccattctgacactgtgcgtgcccatttggtaccagataccttcagtgaagagctccttctggcctgtagctcccattgggtgttttggttttctcaagaccttctgcattactgctgctgaaggacccattggtaactatcccactacccttattaaaggctgggttctttttgaccatgagaggggggcttctagacacatctagcttgtgaacactgttctttgggctgttggttttgctgcctgatagagctgtgggggatccattgttcatgctgcttctctggggtgactcagacttgtcccaggagcactgtctactagggctgtccttggtgttattgttctccttgttctgtaacctgccccatggtggctttcttctgaatttcgttgttgttgctcactccatcttggggcttgctttgtagttctgcatctttgggaaagaggcaatcatgtttgctaatcatcactgacatcaactgctggaccaccacagtgccctccatgatagtcaaaggatcttccactttggggcgcaggatattaggaccaaagaccgttgccaagttctgcacactcattttgttaactcccgagtaggactgtacttcatccaagaatctgcaaatatacttgaggaggttgtaatttaccactggcaactcttcacctgctttgctaattccttacacctgcttcctcttccttgctgagcagtttggcacatgacaaaatcttcatacttcgcataaggaataactggttctggaagttctcggaggtacagctaagaagtgat

SEQ ID NO: 451292 - DNA, 789 bp, Homo Sapiens
gttccccactgaactgatattgttattctcttgtttttgtttccagtcgagaagcctgagcctcagaggggtaagtgactcctctcatttatgctgctggcgtctggtgaggcttagtctcggcattcaggtttgcagatggttatagtgtgtggtggggagtagaattctcttcttacatgttctgctgactgctcaagtattttatgatgtagcccagaagctcgattatgtctctgcatcagtttttccatcccttgctctaatgcttctctttagaatagagcaaatgtattctatttgttcaccagcctgggtcctattttaccttatgaggacggttacaaagaagtaggtttccacgcaggggaagagggagttatgactgaaggtcatgggagcatagagcaggaagaaatggtcccagaggagttgcctagtggccacctatggatgagaggcagattcgtctgaatctgtcttcgatcgtaaggtgatcgctagtgcctgtgtaggatttaagcaaagcccaggcagtttgaggttcatttttagtcctgattaattattcagccaagataattccaagttcagcagcttatttggaagagacatgacagctgggactctcaagtcagcctcaggtcaaagccgactatcttccatagcaaaaccgtgctctccccacattattgggaagagaggcaggcaggattgcagtttacctgtggcactggtgtcacgctttgccagccatgagagccggataagctggagggagaaactgtg

SEQ ID NO: 451293 - DNA, 1018 bp, Homo Sapiens
cggtgacagcttctgcaattcctgcctcgctcacgtagggccctcgccagcccgaggccccattccccagcctgcggggaccagccgtgtgccgcgagggtttgtcggactccctgcgggccgggcagccctgggacgtggcggcggggcccacggctgttccaggagaggccaagcctccggcttctgcttctcctccggctcctgcgttctcctccggctcctgcttctcctccggctcctgcagctcggcctcctgccgtcgcggcgtctcatcctgcagctgctgctggaggtagcgcagcttctcctccagcagggcagaattctgcttcaagacgttggtttttgatttcagcatcttccacagaccgggtcaccttccagcagttctccttgagttgaatgcagtacccctccaactcttctgcctcttgccgccttctctccagattctcgctcagcacagaacactcgctctgcagagactgcacgtgctggttaacccggttggtcttttccttcaagctggtgatggagtctttggcgcggaccaatccactgttgaccccactcaggatttccgtgatgtctgcgtcatccggatcccagggtagggtaggggaggcagggggcccagccagtgtgagttggccgctgaggtcttccactgtggagtctgtccccgtggagtcagtgggctccatggcggccaggttgagcagtgacacgttggtgcaggccgaggaccgtttgaggttcaggcaccagtgcatgggctgatgggacatctggggctccaccccgtggaacgacacggccttctttttcttcgggatccccttggcccggctggtcaccctccggggagcctctgggactagctgggagcagctctccacccccgtgggggtgtccccggcctcatggatctctttggactgccagatcgtcttcaccaccacgctcgccatggtgtgggggtctggctccacagggaggggctccttcctctgag

SEQ ID NO: 451294 - DNA, 882 bp, Homo Sapiens
ttctcttttaagcatccacttctcctgagaagtccccctgactaagcttctttttcttgaaccttttgaaaacccattgttcatgcctggtctcggtcttttctgctaactttgtacttagcaagttccatttgtaacatgttctagctctttagataaaaattgagctttgtctcgttcattagcatactttcgttctagagtctcatattcatcttctgtttttcatgaggtcatcctcaatggctttcatgtcctttagcttcagtttcagtctttccacttcttgagagagctccttaatcttattgttttcttggtgtaatgctgttgtggatttcccagagtcttgatttaatttgttttttaggaaatctttctcaattgcttccaatgattgaagcctatttttcaacatattaactcttgacaggagatcatttcctttctcttcttccgctttcaatttgttttttaaatcatctctctccttggttacgctgtacatcttttcttctacatcggttttggacttgagcgcccttttagtttcctcaattaacttctcagtaactgttgttactttattttgctccacttgaagctgagaagaagcagcttgtaatttatcttcagttttctttaatttttcactcattgttttccgttcatctacaaacatcacagttaatgttttcagtttagttaaatcctcttttagagtgaattctgtcttttctagccgactttcaatggcttctagctctttgatccttacttttaaactctccagttcttgagacaactgctttgtggtcatcctttctttttctaaattgcatttcagagagtagcattcttgtttgcttttgttgaaagcgt

SEQ ID NO: 451295 - DNA, 1373 bp, Homo Sapiens
  misc_feature (998)..(998): n is a, c, g, or t
tgcagccactccctccaaccgccacaagcagcaaagggcatagatgaccacaggagagccctagggggaggccggctccaccagcagccccatacatggcactcccaggtaccccctgggcaacgtggatgacagcaggtctaaggacagcccagcaggagagccccaaggtcaggtcccactcacagcagatgtcttggcagtgagcagctctgtcgcatccactgactggcaggatatagatcaggcctccttcaagacggccacccccagggccatatcaacatctggagacaaagacaagagtgcagttgttccagaacacggccagaagacacccagaaaaatcacacctctgcttcccagccaaaatccaagtcccctgcaagtgtctatgagccttcagaatccagcgtgggacaggcaggttcaagacgcaaggacaagtcagagtctagtggttttcccaagtcacctcctgggtaaagacaagatgtcacaaatggcgagtgttcctgagagagagccggagtcagccccctctgccccgagtgctgagctacagtccacccagcacatggaggctcagcccgtcgagagtgatgctgaccatgtcacagcaggtgccaatggccagcatggccctcaggctgccagcaccaccaagtctgctgaggagaaagctgagcatccaaaggccccacaccctgaagctgaagctttaccatctgatgagtccccagtggcaatgggggcaaatgtggtggacagcttaggagacctgcagacttggttcttccctccactccagcaggcagtgtgtccccgtcgcctggcccccacgaggtggccctggggagaaggcccctggaccccagcctgtacacggccagtgaggagaacagctacatgcgctccatgaacagcctgctggacaggggcgaaggctccatcagctccctggcagacatcctggtgtggtccgagaccaccatggngcatgggcatagccacaggcttcctggaattccggccacaggactgtgggcagacctgctgcaccagctcggggcccagcttgcgctcggtccccagcctggtgggaagcgtcagcatcggccttctcctctgggctggtgtcagggaccagctcagacatgcgcaccatcacccgtgtgctggagacagtggagcagaggaccgtggagggcatccgctcagccatgcgctacctgaccagccacctcaccccacgccaggcccaggctagaccccaactatgattagagccctgcacagggacccccgaagggctggttcagtggcctccagagatcctgggaccctcacgtacgctccgtgcccattctgct

SEQ ID NO: 451296 - DNA, 996 bp, Homo Sapiens
tttgtaaaccagaagttgtgggaccctgcgggacaactaaagtgaggaaacttggcagaggccagaccccattcagcattcagagttaacaagaaggtactaggggaattacagacacagatgttgcctgcctgtttgtttcatgattcccagtgattgtgagggagcctgcagccctgcagcagtagtcccatatctgggcctgatcagaacacggacaagaaaatctcagatgatccacaagattggaatgcaaaacattctttagttctaatcctacacaaattgagagctctgcccatgaacatttaaatagtaacgttgcaggaacacttaatggtaccattttaactcagaaatagttactcctgtacagtcttggttccaagtggccttgagccacttggaaatgtgaggcttcaattcaagccaaatgtggggcttcaattcaagccaaatggccagtaggggttattaagcagaagggtcaaaatacctcagtttaccgtatgcaggtgtccaggccaccttacaagaacagcagctctctgccagggtagcttctccttggtgatagttaatacaaattatctttctagaaccatggtgacacagaacctggaaactgacattgagatccctagctgtccatcaagtaagcactaagtgctaccatgccgccacctgccattaggatagcttttaccacgcgaccaggccacttgtcatttctctgcagaatgcgcttgactggatccgcctgtaatacactgacatgatttcagctagactacaagggctaaataccagaggagtagggcacttggagcagagaagaacagagaatgaaataactatcattaactccctaaatttcaacaagcatgaaagtgtcctcttcccaagaagtccacatccccaatttcagacagtgtaatggcagctggctttgcagggcagaagtacagacacttatctgctgatgagatgtctttc

SEQ ID NO: 451297 - DNA, 1030 bp, Homo Sapiens
ggtccggaattccttgcatggcgaggacccgagcgagtgtagggggtgcggcgtctggtcagccaggggtgaattctcaggactggtcggcagtcaagccatcatgcctcgtggtcagaagagtaagctccgtgcccgtgagaaacgccgcaaggcccgagatgagacccggggtctcaatgttcctcaggtcactgaagcagaggaagaagaggccccctgctgttcctcttctgtttctgggggtgctgcttcaagctctcctgctgctggcattccccagaagcctcagagagccccaaccactgccgctgctgcggctgcgggtgtttcatccacaaaatctaaaaaaggtgccaagagccaccaaggtgagaaaaatgcaagttcctcccaggcctcaacatccactaagagcccaagcgaagatcctctaaccaggaagtcagggtcgttggtgcagttcctgttgtacaagtataaaataaaaaagtccgttacaaagggagaaatgctgaaaattgttggcaaaaggttcagggagcacttccctgagatcctcaagaaagcctctgagggcctcagtgttgtctttggccttgagctgaataaagtcaaccccaacggccacacttacaccttcatcgacaaggtagacctcactgatgaggaatccctgctcagttcctgggactttcccaggagaaagcttctgatgcctctcctgggtgtgatcttcttaaatggcaactcagctactgaggacagagatctgggaattcctgaatattgtgggagtctatgatggacgaagagccactcagtctttggggaacccctggaaagctcattaccaaagattctggtgccgggaaaaatatctggaggtacaaggcaggtggcccagcagggatcccacacgcgtttccattccctgtgggtccgagagcctatttttaaaccgtgtagattaaagtccgggagttttgggcccacggtaatggtccacccccgttggcttctccaagca

SEQ ID NO: 451298 - DNA, 1072 bp, Homo Sapiens
aaggcgccggaaaaaaaggaacggattccttccatgttggtatatcttcacaaagcagtctaaggttcctttatatgcccgtttagcctcaccactttaaatttttaaggatgcagcttggagttgtaattataagggaaattaatgacctgcatcatcatacgtcttttaacggtgtcaaagggataagaaagtattccagagcatgtagtcacaacttgagcagtgaaaaaggaagacaagaaccggagtttttctttggcttttggtaataaacccttaaactgtgtcataagctccaaaataagaggctcggtacacaatgatgccctgtactgaaacaccaaacccttggtataaaccagcaattccatctgattttgctattttcataatacagtcacctaaacccttgaattgtcgctcctcaggaccttttccaatatcgacacctaatcgggttcgggcaaaatctagaggatatactacacataaggatgttgccccagcagctccaccagaagccaggtttgccaaaaaccacctccagaactgtttttctttattaactccagacatgaatagctgcttgtatttgtccttaaaagcaaagtttagagcttgtgttggaaaataccgaataacatttgccaaattgccacgccaaaaactgaagaaaccctgctcgcgaggaatccgcaccaggcagtccaccatgcctttgtaccgcgcctcggggctgatctgcttcgacgacgcctgcacctgcagcagcagcttcacccgctcgatgggcgccaccgctgtcttggacacagctgccgcgactccgccggccagaaggtccttcccgaaggatgaggcgtcaaacagccgcttttctgccttctttttcgcaggctcacgatgcatgatggagaaggatataaaaaccggcagcagtggctaaaaatgagtacgggagctacgatgaagggaagcggaaaaccggaaaaccgctgcagcatcgtactggcgagaaagtggctcttgggacgctgagagagccgcgcgccggcatcccgggaattcc

SEQ ID NO: 451299 - DNA, 926 bp, Homo Sapiens
tttttgggttgccaattatatccgaccccccgggaattttctttcccgattcccatccaagggccagaattatgaaggggatcctctttccccttaagcggattctcgtcgtgtctcaagagctctcatgtccacgtagacagtggttgggtcaggtccttgaggttccctgcaagcaaatcgccaggttcaccctgcaaccgaacgaggtgctgacggcccgcgggtgaaggcccaggtccttaaacagctttgagaacgactgtgtgagtgcgatccgaggcctctcttccgccacaaccacgcaggtcctcactcgggacaagtccagccctcgcgccttgagggactctgtttgcgagcccagccccttggtgcacagctccatcacggagtaggagcaaaacgtgtctcggactttgtactgactcacggcaagaagccacaaggcggggttggtttccagctcagagggcgggatcaggatggactggtgcccagaatacacactgcagaggcaccagaggacaaatcccagtccacagtaagggtccaggcagatggccacttctctagaggggtaaagttcacactgcagcttaatggaacggcagaaggcactggtggctgcgtgagacatctttacgccagctagcatcccagttgtggacacgctgaagtcgagatatgcaagagtgtctgggttgcaaggtttgcagatctgggcaggccgcttctttggcaaatcatctgtgtccaggatgaggggccacgtcctgacgtccacagccgccgccgcctccctggaccgcagcaacttacagatcagctgtgtcgtcatcagacaggcagagcgactcacctccacaatcatcttgacggtaggcaacgtcgtcgcgatgttctgtgggtgcgggggacggacg

SEQ ID NO: 451300 - DNA, 1131 bp, Homo Sapiens
  misc_feature (1018)..(1074): n is a, c, g, or t
ggatgcttttttagatatagtccgaagcttcgttctcgctggttgcctgctccaggtgtctccctcagttagaacgtcaattccaatcgcctgtttgttgctcccttccatatgtggatagtaaacttccttggtacctagtttcctctagtcctttccggtacatcctaagtcgagtaagtacgcaggcggtgatcctgggttgtaaacatattttccaacacaatggtataactagcttactgacccatttaaggctctattttcagagtgtacattctataagaaaccaaaggttttgtaccaaaaaagagtcatgtcttgtgttctcggatcgctggaatttctccaggcaatttacaatatatcttagtgaaagacgatagtacagttagtcttagtactatctgattagcatctaaccttccctttgagaccgtccgctaaacatgctacacttcacatgtcctgttaagatacgtatccacttttctccaggcgttcctaacttgtgtaaatccaggtaccttcccaggtcgttcagagaatttgggagcctcgttccacatcacgttttccccagcctcagcagcacaataacgcatatcagctgacaagattcagtgttccacgttctcaaggcctctccgatagttaatccctccttatcgcacacgatatactgccctagctcagacccgtctcatacgttctgtgaaactgacacgagacaacctcacatttggaggctaactggtgctccttatctttaagtcccaaaagtacaccgtatttaccaacacagatccaaaacctcgtaactcctttctcaaaatcctgtaatgccctgtcaattgcattcagaagaaaaccaccttttcatcctttctccctttaagagcacattggtaagagtgtaaatcccagttctaccaccttagtaggtttatttcatttgtaacctctatctcattttgtaaaaaacaaagaatcatagtactctcttctcaataaaacnnnnnnnnnnnnnnnnnnnnnnnnnnnnnnnnnnnnnnnnnnnnnnnnnnnnnnnnnacaacccaaggcaaccgataacaaaggccacgaccacacagggaccgcgacggaacg

SEQ ID NO: 451301 - DNA, 1507 bp, Homo Sapiens
gaattcccgggatctctgatgtaggcctttcaggccttgaatccagtgggattgagaactttctaagagtggtgcggctcttgacaacatgtgggctccaccagcagcaatcatgggggatgggcccaccaagaaggtgggcaaccaggcccccctgcagacacaggccctccagactgcctctttaagggatggcccggcgaagcgggccgtgtgggtccgccatacgagttcagagccacaagaacctactgaatcaaaggcagccaaggagaggcccaagcaggaggtgaccaaagcagtggtcgtggacctgggcactggctactgtaaatgtggctttgccggcctgccaagacccacccacaagatctcaacaacggtgggcaagccctacatggagaccgccaagactggggataatcgcaaggagacattcgtggggcaggaactcaacaacacaaacgttcatctcaagctggttaaccctctgcgacatggcatcatcgtggactgggatacagtgcaggatatctgggaatatctcttccgacaagagatgaagatcgccccggaggagcatgcggtcttggtttcagacccgccactgagcccacacaccaacagagagaaatatgctgaaatgctgtttgaagccttcaacacccctgcaatgcacatcgcctaccagtcgcgcctgtccatgtactcctatggaaggacctccggcctggtggtggaggtgggccatggcgtgtcctacgtggtccccatctacgagggttatcctttgcccagcatcaccggaaggctggactacgcgggctctgacctgacagcctacctgctgggcctgctgaacagtgcggggaacgaattcacccaggaccagatgggcatcgtggaggacatctaagaagaaatgctgctttgtggccctggatcccattgaggagaagaaagtccctctcagtgatgcatacgatccgctacgtgctgccggatgggaagggagattacagctgtgcacaggaacaggttcctctgacctcggagatgttcttcaagccatctgctcatcaacgtccatgcagctgggcctccacacccaaaccagtgtccgtgccttaacaagtgtgacatcgccctcaaactgggacctcatggggaacatccatgttctgctgggggcagcactgattgctcaagtggcattccgctaaccgtctgcagaaggagctaagcagcatgtgtctccaagtgacacccacgcaggtaaacgtgctgcgctgaaagagacatgtgtccgtgtggaccggtggctccatcctggcctcactctcagggtttccaacgcattgtgggtcacaccgctgttgagtacgaggaacaccggggcctttcattcctctaacagaaggtgcttctgaacggcgacgaggatggacactgcacatggcaagtgcctacccttcgacagggtgagataactcctaggacacagggg

SEQ ID NO: 451302 - DNA, 1459 bp, Homo Sapiens
  misc_feature (132)..(132): n is a, c, g, or t
  misc_feature (404)..(404): n is a, c, g, or t
  misc_feature (726)..(740): n is a, c, g, or t
tacgagtacataaagcgaaatatcgcacgcgtcatagggcgcgtgtcgcggttcccttactagatggcagagagacccgcgacagaatctcacacacccgcgcgcgcagcgtcagcgtggagaggggcgtgngccacggggtgagattgaggtgaaatatagcacccaggcggcccaccggcagcagcgcgcgacgttgaggaggtgcatgagagttagcaatagacatcatcgtcgccgccggggtgcggcccatcggttaacatgcattacaagcgagaggcggggcggtaagatagatcatacgacagaggagccggaggctgtcacacaactccaacaacagcgccacagagaggagacgaggacacattcctctacgtgcgacacgcgccgcgcggtgngggcgcgcccacaaatagaaagcatagcggtgggtgggtggttctgccacacacaacacacgcccgcgcggcttatgcgcgctagagagagtctcacaggagggcgggggaagaatgctctccgtttgaggagcacccccttgcgccccccaagggggttggcgaaagaatatcctcttcataacaaagtttacacaagggcccgggggttgatggggtgggtacaccacccccattccctgaggggggtctcccgagaggtgggccccagagggcggggagggggtatttttagggggataaaagcgggttccaccccccnnnnnnnnnnnnnnnaaaaaatccttggggttccccggacacaacccccaacaaaagggggccgggcccggtttccccttgcatttgggccggaggggggggagcccaggggcatttttgagagaaggaggaggggtccccaacgtagtcaagaatggaagacgtgatccttggtgggccaagaagcggccggtagccgttggcttagcaagggggccccgctcttgttgagacatcggcgggggccctccaaatgcctggaaatacaggcccttcgtgtagttcagaatggcagctctcttccagggccggactccagaaccctgatcttggaggcgcggactgagtctgcgacagatgcgtctccacacgccttccccatcgcacacttcgtggaagtagcggcaggtctggccgagggcaacaaggtctctgactgggaggaatgagatgatatgctccaccagctctggggggaacaactggatggaaatcggatttcctttccccctcttctcttcaaccccaagctccgagccacaagaagggcagcttctcttcacccggagcccctcctcccgtccacacagcctggtgaatttttgcagcttccgtctctggcttccctgaccatcctgattgccccctccctgctcctgccctcctgtctcctaggcccttggcccccccgttcctgctggctttcccacaccatgtccccagcctaggcttgg

SEQ ID NO: 451303 - DNA, 1065 bp, Homo Sapiens
  misc_feature (77)..(77): n is a, c, g, or t
  misc_feature (199)..(199): n is a, c, g, or t
  misc_feature (220)..(220): n is a, c, g, or t
  misc_feature (244)..(244): n is a, c, g, or t
cctgaagctccggtaagtttgtaaagtggcccacctggttttcctttcaaacttgtattccagttaaggggccaggnctagggcaaatttaactggcggattccattctcattatgccggaaccaatgactgggattttaaggaatgattatatgaggcaagatatttttaagaccaccaaagaaggtgccaagggganccccatttttgtgtgtccccngaagctgtctggctcccagatcancagatgaccagcaagttcagcacagggcaaatgaggggcgcactcaaacttcagggccctttgtttaacctcatgtgctccaggttgactcttgagaattaaaacccataactcacattacaagcatctttcaaattctattattgaactagagatatggaaatagatctagacaaattatgggggtgagggggtgaagaagggacaggcagccgctgtcctctaaggtttcacaaaatggaagcaggcaacccagagagtcactttagcttctgaaccgacttcagtaaaggctggtcttcttcatgatccgaaggaactcctcctcgttcacttcgccgtccccatcccgatcagcttcgtcgatcatctcctgcagctcctcatccgtgaggttctcccccagctcgttggccacacgcttcaggtttttgaacgagatcttcccggtctcatcgtcatcaaagagcctgaaggccttcaggatttcttctttggtgtccttctcggacatcttctgcgtcatcacggccaggaagtcattgaagctgatcttccccgtgccttccctgtccacctcggagatcattttcttcatctcttccttcctgggttcgaagcccagcgctctcatggccaccttcagctccttcgcgtcgatggtcccacttccgtccacgtcgaagaggtcaaatgcttcccgaacttcttgcttctgatcctcagtgagctcgggcttaggtgccacctttctcttttggccggtggaggcagcgctgggcttcttgaagccggaagcccatcctgccatcgaaagaatc

SEQ ID NO: 451304 - DNA, 838 bp, Homo Sapiens
tttcttggccaggcatgctagaccctttttcaggcttggcctcttgggggtggtattcccataaatggcgtgatgttcatgcacttctgaaccaggtgctgcgcaacgctggaccatttgcagattagctggctgctgctagacatccaataatattttctgtgcgtaattgatagagtggctgtgtaagcatattcttaaagaggtataagccagtcactgttacatgatgcagatcctacacattcttgttctcatcctcgggcttggccgtacaagtttggtgcgaaagtaatcactgcaagtctggtaggtaccaccttatgtgcccggaagatgtttgtcctggacacgaatagtgatatcaccagtgatgtgccatcatgttcgcagcatatttgagctttccaagcatttcctggctgtgggaagaggagctatgagtaaatgttttcacacccatcgttttacttcctcttctacagatgctcttcaaggatgcaaataaatcagaaatgtcctgcgggcggcggcgccgggcccggaggcctgctgctcctcctccttctcccgccaggctgggcggcgaggcgccgcagtcgtcggccacggggggaaggggcggagcgcgcggctcgctgcctctctcctcccccgggaggctcaggggccccatatctcgggccgccgcgcctaggcccgtgagcagcctgtggctggggcatggcggcacagcccaccggcgtgcccgcgaggtgggagtgcgaggaggcggggagggaagcacccccagcgctcggaggggccagaggggaggagcgagagggcccgggagccg

SEQ ID NO: 451305 - DNA, 1078 bp, Homo Sapiens
  misc_feature (51)..(51): n is a, c, g, or t
  misc_feature (357)..(357): n is a, c, g, or t
ttgggcggatattcaaaatccatccaagggaattttaaaaccttccatctnccattcctggctttcagttttagccagtccttccaggagcctttttttccatcaggtcttccggacataatttcaaaatgtccatagcaatttttctaatctttctggtcaataacaagtttgaggtagacgtcccttcagtttattatatccacgctcttttctcttcatatcatgattatactgagtagctcgacttgcaatgatattttgtaattttttgcacctcatctttctcattctttagtagctgaatgcaaattccctgttcttacattgtaactgtctgtctctttccctgaagcnccaatcatttccctcctggaggtttcccagttgttccttaagttttgagtagcagctctgtagatggtccatatcacttcccagcttcaaattctgtgtctccacattttcctgagctagaaggttcttccgctgaagcacaagcagctcattcatacaatttagtacagctactatatttaactctctctttgtctctttacctttggattcttcatataatgaaggaaaaccaaaagtagtcaattcctgatcaagatatgagatactctgttcaatattatcttctgtgcagaaggcactgaaaaaactgtgcacatttttcgataaaggtattgaagaacatagcacttgctgtgagtataaacttgatggagacatctttgtttctgaggtatattgagagatagttttgctttctgaagacagacctggatctgtaacagtcatccaatctcccatagcaatctctagagccaggatacctgaggaactagttcagcagttaaacatttagtctagctgctgtcactcttctatgtaggcatctcctcccacctcctcctccaggagcggcccgggtcgacgctcgcccgcaccctgcaacggccccaacagccgcgcggagcctcccgccgaacaacggggcgctgagccaggtgccggctctcacctccgcgcgcgcccgccccttgccggcgcatccagggaattccggacc

SEQ ID NO: 451306 - DNA, 874 bp, Homo Sapiens
  misc_feature (504)..(613): n is a, c, g, or t
gggagtaaaaataagtgctctgactgaatagctaactgcctgtcgtgaacgagagcatttattttcacacgcgcgcgcactatgttattacgtagtctcgtgtgtgtctctcacacacgtacgaaagcactgcggcggctggagatgctctatggtgttggtctaccgctaccgcggggtggggcaggctgatattcgctgcctcgctgaacaaggaggtttgtgttgtgccgccggaatatagtgtgatgatcccctctaccccaggagtgagagggtgtgctccgctaatagaatgatgagcagcagcctaagtggtgtttctcctctctgcaactggctgctgtagtatatgagcactgtgccgccccctgtgtgttcgtggattaatatagaccccatcactttggggggcgacgcgctctcttgattaacaaaaaactgggggggctgcatattgtggtccctccccggggatgtgtgtttctgcgcccccgcccttcnnnnnnnnnnnnnnnnnnnnnnnnnnnnnnnnnnnnnnnnnnnnnnnnnnnnnnnnnnnnnnnnnnnnnnnnnnnnnnnnnnnnnnnnnnnnnnnnnnnnnnnnnnnnnnagggctgcagtgttttactgtaacaaggctgggttcatggccgtgaatgtgctgataacataaaagcactgaggcgccgctccttcctgcctgccccctatgtcccacacaggtcctagagagtctttctattgcccagtttctgccgatggcctgggaaagcagtggctccctggtgccaaccaaattgcctcctctgggctgtgggaggcctgaagaggctctaagcaccaggctggcggggcagggtggccccggccc

SEQ ID NO: 451307 - DNA, 1198 bp, Homo Sapiens
  misc_feature (27)..(27): n is a, c, g, or t
  misc_feature (292)..(292): n is a, c, g, or t
aacggcctgagctaggccatgtggtanattcaggctagtggccgtgggcagctgaggcacctgagatgggttgtaaagaggaacagccccttttaaggcaggtggaggaagaagaacaccagggttggagcagagctcaaaggaaacactctctggtccagacaagcctccaagccccagcgcccgcagctgctcccccgctggatgcggatcctcggccttcacccccacctctgcccctggagaaggcactaacatccggcaagaggtggggactccaggggaaggtgtncagtgaagaaggcccaggccagccctggtggggagaagatgctctgggggtctcctgctcagagtcagggctgtctgaggagtcctcgtctccagcgggggatgcgttcttggtgggcttcgatcgaaaccagctgaaccagccaaaccctgagctctttgtatgctccttcccatctccgagcttgcctctctgggcagtatttcggggagagtttttatcagcctcatcagaggactccttctcatcctccttggctgaactggcggaactctcagaaatacttcgtgctctagcagccaatggtgtctagtggtttggaaaatgacctcttggccatcaggaggctgggaagtttcttgagacactgtgttctctccagggcccaggtgtgtctgcagcatttcctcccagactgttcctccagtggcctctgtcactggcacgctgctgccagtccctggtagatgggtctcaggaactgagtaaaaaggcctcggtgtccctgtctgccctgcaccccctcctgctgggtaggagcccggctggaggggaaagggctgctgtgggctgggctggagcaggcaggtctgctcaggtgtcagccacagagctgagcggtacccaggggcttcagagtagccttgacatccagaaaagtcctggtagaaagtgttttctgttgttgttcctccggctcccgaaatatctgagcgagtaggatgaggatccccaatgtctcctgctaccttttgctccagctgcctccgaagttgcgctagccaatctggctccaggtccctgtctccactgcgtctttctaaaaccagaggatctgacagcttcagtttctctgctagcttgatgagttccactaatagcacagggtgactgctctctcctggc

SEQ ID NO: 451308 - DNA, 1014 bp, Homo Sapiens
gtaaaaaatctgtccaaaccaagtggtgtcgaaagcctgctaattcttcagtgcttcatctggcaatgacctcagaaaaaagagtctccctcctgtattatcaagcgtgacttcctttagttccttgttgttctgtgtagatcttttgttcccagaattctcacatggtgttcatttctgccagtagtcactctgtccatagttgtaatgcccatagtacatccaacgttcaggtttttctcagaagagctcaaggaaatgcttgggacccaggaagatttaaaaatgcttgcattggctcaaaattctgctgcaaatacagtgataatttcaggtcattggccttctggtagttcttcaaggcttcaattctcagctcaatcactttgccatgaaaatcattctgaaggatgttattttgttcctgatacttgacccattccattttcctctgttgcttttcctggtggaagaaagagcctctttccatcctgcaagtctgccttgttttttgtctgtggtgctttttgttgatcactaagttcttctgcctcgaatgtcttgttccatagcatctccatttccttccgaagcatcttgtttttcctttccaagttctgtttcatctcctctgcttccttaaggagctccatgaccgaggattcctcacaccccttccctgccatgatctgtctcatgatctgaagactcctttgtttttcctccaagttagacattaacttttgaaataagaggttgtttttatcttctagaggtttgagcatctctagcagttcctgcttccttagctttaagtcctcattcaattccttcaagtagttgtcatctattttagaacttcttatttctgagggcaggtaagatcctgaagagtttgcaccacttgtcatcttgaagggtaacttctaagaataaagaggccttcctgaaaatatgtgcctttttttctatccagttaagtcattatttttgtgctgctgttcttgaaagtcc

SEQ ID NO: 451309 - DNA, 967 bp, Homo Sapiens
ttggcagttttgatagggaggaacccacatccctgtagggagccttcccttggtttaccacctgttttgatccacttaacacctcaaatgtgtcaatctgggattcatcacaagggtataaaagatggagtcttcctgtctgtaaagaactttttaaaggtctacatccgggaggttggcaatgtttctcttcgaaaactccagttttgggatgttttatgtctgaagataaaatgaagtttataatcttctccacatttatctggtccaaacataatgatataggatgttttatcataaaagttttccagaatcaaatcatcagtgtctgctaggagtttaatgtatgcacctccacaatcaataccatcttgaaaatttacttcatattgaactatcaagggtttatcagcaaaaatgaatggttttgctaatacagcagatattgcatgatgctttgctctagattttaataccagtcctctgtcaccaggtacctggttttctttcaactcttcaatttcccatcttccatcgtatattgaaatttcctcatccatgtcatctttctttgcttttgataagacccatccagccaaccttccactatcaaaagtttctgcaaaatatacttctcctataggttgaggtgtcttatatttaatctctgaggaaagttcactttcattaacatcaatttcttctgaattttcttcaaagtcttccgtctcaacatcatcatccataaattctgcattaattgagatgaacagaagacccaaacatagccaaaaggcttggaaatgcatattgattatctctcttgcggcctgttttcggcagtgacagctcagatgtccaagtcgttgccacttggtccccgcgtctcttcagaccagtcccgccggcggccgcgcagcagcgactccgctctcgacgaattcgagctcggccgatttggcctgat

SEQ ID NO: 451310 - DNA, 843 bp, Homo Sapiens
acaggatatattgcttgtatggctcaaacagaactcctcataacaaacaatctttcactttcatggagtaaggttgtggtcctcagactttgacaagaatggcagcctcactacttattcattaaagaaaatggctccaaaatggaaactacaccatctcttgggctccagagtccaggatgttatgtagctggtgaacttctcagtgcagataaacttataaggcttgaaaaatctgttgactggttcccttgcaaattccaagaagtagatgtatacagtgatgggtatttatctcctcagtatcagctcaactccctctctactggaacttcaattcaccatgtagtaatcgagacagagtgaagtgttctgcagtagacaattcaccgtgttgttccttctagactgcaatatggggcatgtcatttttgtgtccgacactccctttaaacctgcttggtaggagctagttcctccttttgtcccatgtatgaagctttatcaagataacaaaaaggaaaagacatcatcgtctcccatggtgtttttgtgacctatttgtcttagcggattttcacatctggaacagcattgcagaagtgtgtagcttggtgtgggagccttccccaggacgagcgtaacctgtgttcttgccccagtgttgtcattaacctgccgtatgacctacagcaagacgcttaagcctgtgagccgtgtctgtaactctttctggttctctggtgcagtgactctttgtccctgtgagctgaaacacgccctttgcagaagtcatatgaaagggaggtgttctccaaggttcaggctgtggataggtgccag

SEQ ID NO: 451311 - DNA, 854 bp, Homo Sapiens
ctgtatacaagagcccaagagcaaccattgtctaacaggtagaaatgcagacagtttcatgttaagcctttaaatttcctttcacggcaggtttccaaaattaaactaacttttctaacatttattctcacaaaaatatatttcaagttcagaatacacaactcattggcttcagacatttaattgtatgtatttaaccatactcagataattgtcatatttagccaaatggaggctttttctgtgacctatttccaaattctcagattctggttcatctactccttcaagcagtttggaatgacttgccagttggcatttatatcattggaactattctgcaaataagccattttgataaagcttgcttggtttgagacaactatgtatttggagataaaagactcagaacaaagtgcttgccttttctacagtttatatcaaacgagatgggcacttaagcagtcagcctggattcatatgtctagagtggccaggctgtaaatacaataagtctagctgccttccacatgtggtcagacagctatattaagaagatctactcactgctggttatgaagatagccaggagcttgtctgatttaaggaactattcagccattgaaggatagacactcccaaaaatggaatttcagggaagtgtagaatgaacaatcctgttcaaagcagccaaaattattttctgcatgccaagatgttattcacacacataaatactatatgcagataatcttcatttttgaattacaagttgttttattgcaaaagcaagtatagttataatatatagcaaagcgaatctatctttggttctatatagcagataatttttt

SEQ ID NO: 451312 - DNA, 1062 bp, Homo Sapiens
  misc_feature (518)..(581): n is a, c, g, or t
  misc_feature (605)..(616): n is a, c, g, or t
  misc_feature (858)..(866): n is a, c, g, or t
aaagaattgggtgctttttattttctgtttttgttactttaactgcctggagtcaatgggtagaactaaagtaacttacggagaaccttcataaggaatctgtagcgcacaagaggttatccagaggagccagtgtctaagccagcatagtagagggtgaaggcccctgagatatccagttcaactgcatcattttgtaagggatagaacttgtagcttagagagaaggaaccttatctacggcctcacagctcctttgttggcaaaactggggcagaactggggctcctttttggcagattttgtttgcttcattttactggtacagttttatttttgtttggattcaagcaacaaaagcccacaaaaccagcttaaggaaaagaaatgtatttgaaactgccagatcagctccaggacttgggttaccaggaatcatggggaactagaactagggtctggaaagtcattaaaaatcagtactgctgtgttctgttttcactttcaaacagaggtgnnnnnnnnnnnnnnnnnnnnnnnnnnnnnnnnnnnnnnnnnnnnnnnnnnnnnnnnnnnnnnnncaccgcttacgaacaaacaaaaannnnnnnnnnnnccccctaaatattctgccccactcgcggaggggacagagatttagtaggctagcacaacagctgctctgttgtatagatagaaaggaggggccacgcctatatgtagggaggaggttaatataatgacagagcaggcacgcgcgtgcggcttttaataataacccatgctggtcctagcggaaggaaacagtagtggtcggcggtggctcatgtctagaggagagacgcacactacatctcnnnnnnnnnagggaaccacacatgttggagccgcaaaccaccacctaggaaggagtagttagagcagcctgggcggacgtaatattactaactagtcgaggcttattaacggggtgtatacacaagcccacggaatctatactgcggggcaacagaaagagttgtgtcccatgcagattggttgatggtagacaaacacagctag

SEQ ID NO: 451313 - DNA, 1445 bp, Homo Sapiens
gagttggttttgtttttccggcattggtcctttattgaacatcctcccaaagctggggctagggttcacccccaacggtacccaacgagaagcggccttcagaagcatcttctctgcaccacggaggtcccaaactccttgaagtctgcggcggtgacccacatctgcttgaagctactcagagaggtgacgatggaggctccaatccaggtggagaaccaccggtcggggggagccgtgatcttgatgggggtgtccttggaggccagctactccagctccttgagaagccggtcatccagcccgtggaacagggtagtgccccccgacagcacaatctccccaaagaggatcttctggatgtcggtatcacacttggtgatgctgctggagaccatattcgagagcccggggctctggctgcccagctgctggggcacgaacagggcctcgggcgcctggtgcagcgggtccccgaggctgatgatgtttcccgtcgggcagtttgtactcccctcaggacctcctccgggcctccggggaaagctcctttctcgggctccaaggccacgtagcacagcttctttttgatgtcgtccacgagacctttgtccagctgccaggggaagttgtggccgctggccaggagcagctgcatgaggagctccgtgatgtccctgcccgccacgtggagcttggtgactgcgtggggcagggagtaaccctcaaaagatggggacagtgcaggtgaccgcatccccgctgtccaccaccaggcccgtgacacaggccgaggcgtagagagccagcaccgcctggtccgacaggtagaaagcgggcacgccgaagttctcgaacatgacttctgccatcttctcacggttctccctggggttcagggagggctccgttgcaagcaggggctggtcgctgggtttcacgcctagctcccactcaaagaggtgcttccagagtctctccacgtcatcccaccctgtgatcaggccacgctcgaaaggggagtgcagctgcagggcctcctgcttgtacagggcctcctcccccacaaagtacttcttctggttggcctctgctgagggagcctggaatttcaggtgccccacgatggagctgaccatgtgccggggtccaaactccccagacaggcccgctttgcagaaccccgagccattgtcaaaaatcacagccggggagtctaaagcatgcggattaaacatgcccgcagccttcccttctcagcctcatcaaaataaagaccagccctccagggccgctttgtgatgcaataggggatcccacagctcttcccacagctctcggggtgtctcaaggcagggctagcaccgtgcccgggagccctgcatcctcagccgcaggtctgctctccctccaggtggcctgggcctgctgaggccttcttccag

SEQ ID NO: 451314 - DNA, 825 bp, Homo Sapiens
tggccagacgctctaagctggcacttcctgcgatagtgtttttgaattttcgtccacagttccacgttgacgagaggatttcttcgggtatggtaccgaggtccacggcgatacccggcggcgacagaagggacagcataaactcgccttttcgacggtcgactggaagcacggtttacacagcgtgtggttacacgggagggtgacgggctccacgaggatttccatgcagatcccgcactggcactcggacagcgaggggatggcgtctttgggtagagccatttcaatatgttagtaaagccgactaaactacgacacctgcacgaaaaagaatcctattttcggccaaccacagagagagcaaaagcagttttgtgtttcagtattatgcccagaagcgtatcagaattcggagaacaggagcatccaacacgtcttgaagcaaaaaggcgctctcagggtcaggcaaacaggaataccccggagggcggcgtctttgtccattttcaaggcaaacgtcccgccagcaaataaatgcaggttttcgtcggaggagcctggctgctccgcggcatgaacaccgcggctgcggctcccggggcagcgaggggaacgcgccaagtcctcgtcctcccctcacccggaaaggatgctccgctcagctcaggggcagccgggccccgggacgcggctccgggaggaagcccgggctccggctgcagcataacttccgctttaccgctgctgcgggggagacgcgcgactcccgtgttcacctttcgggcgcctggcgcagtttcccacagctccgcgcccccgtcc

SEQ ID NO: 451315 - DNA, 618 bp, Homo Sapiens
gagagacagagagaaaatatgattggtttctccttgagtgaagtacatctgtttggcctaattagttgaggccaaggtgatgaggacatttgagcaaacatggccacttaggtgcaggtcttaggtatggctgatggaaggaagcaggttctctcagaagatgtatgggcagatgcaatgactgacaactctattttaatgtaatataaaaaatagcatttgacaccaaaatagttctaagaaaatgcaattattatgaaacaaacatgagtggatacaagtaatgcaaaatgacggaactctgacctctgtgctgtcacagtgatttaattgccttgcatggtattatctaagactgacataaatctttcaaattattcttccttaaatatagacattcatataaattctttctatgtttattgtgctatcaagtaattatatatttcatccaatttgatctgttaggattccacggttttgccttcaaagtcatttaggaactcaagactctgtggcttttcaaagtgtggtttgaggaatctgatttggaaactctgctgcactctgacatagctagatttttttcttcatcagggaccagatctttatgtcctg

SEQ ID NO: 451316 - DNA, 1048 bp, Homo Sapiens
  misc_feature (405)..(459): n is a, c, g, or t
ctttctctgagcttgttaccgtggagggctgggcccggtttctaatcgcccccttcaccgggctgcctgccgctggctgcggaaagtgtgggtttggctgcatgatggcctcgtaatggcatgtggtgacgccctctgcgtcttctcccagcgccagcctttcaacagagcagcacattatgcctggataagactcaaagagcagcttaatatcaggttctctggggctgtaatcatcggttcaggatggagcagacacagccgcagcaaggcctctgtgcagcccccgtgcttaaaacacatcaacgcatccgtgggcacttttgtgagttaaagctcaacttacacatctgcctgtatccataggaaatgactgaaaataaacaaacaaattccttgcattcnnnnnnnnnnnnnnnnnnnnnnnnnnnnnnnnnnnnnnnnnnnnnnnnnnnnnnngcaaccaccatagaaaataacaaacagataaatagagaagacacgacacaaagacgataagaggaccgaggaggaagacacctgtcaggccatgaagcacactccacatggaaaacacataaagacgacggtggacccagcgataggacaggtgaaatgatagcgggagagttacaacgatgactggagtgaagaatgagaacgagtgagtgcatcgaacgcgcgaacgggtggcgagaatgggcagacgcgcgagagcaaggacactgaacggggttgaggggatgtagaaaaacagccaagcagaggtgaggcattgagtggaggacaagctggaggggccgaggaaccctgatgtaagagaggcatgaatagacccgacagacatgagagagcgactcgcgaagtgaatgggagccaaggaggcaggaagcgcgcgcggaaacagccaacgggggcagtgcgtgagcagaagaggagaagcacgcgcgcgccgcgcactagaacagtcaataagcaaaagggagaggacaaggggagcggagcaggcggcgggggtgcgcaggcgagagcgcggggaggggaggaa

SEQ ID NO: 451317 - DNA, 1651 bp, Homo Sapiens
ttggagcgcgcttagagcccagggtggctatcgcagatccatctttacggggctgtcgcaagtatttaaattgtgtccaattaaagcaacgtagtggaccggacaaagaactgcaaattttcgttccctctttttccccaagggcccccctttaggttggcatccgggggggttgaagccaatccatcatgggggaagtattatggggaaaggcctccttagtccagtaaaccctgtgtaagtcactagctaccagcattcagaggggccatagcttagcccctttcatctcccacctgagggcctgtagatttcaggagaagccccacctcaggggcggttcactttgccaaggaagaggatgttgttagccacaatgaacatcagaaagggcctgttgaacactagcctctgagagttcaggcgggccgacctgaaagtgaatattgtccccgtggctgccgctgctctggttcccgactcgtccacctccaccacagctttgtgcaccatctcagacacctggatatttgagtggttgctgatgccggacagatcagcatgggaggtgaagacgttactgatccccagactggggaggactttctccagctgataggagccctcaatggagaatttgggaaggtaaagctcgagctgcctctttttgaacatcttaagccccttcctcagcgttttctcactcagtccattctcccacctgctgcatctttccctcactggggagaatgaacaaagccgtggcattgccttggtaggggacccccaccaccctgcaggagaggttccggtccaggaggtagtgatactgatcctcgcggctcatcatgggtacccgcaccacagtctccgaggtcacgtagaagtcttgctcttgggtgcctttgtggttgaagcttgtctcccacttagctttaaagaagatgtaattcaccatgatcacgaccgcattgctatcgaggttcttaagcaagtccacaatcttgcccttcgtttgctttgccacataatcattgatctgcttcatggcccctgcagagtccctaaagttggtggggaaagtgtctgccaggtacagcgtcttcatggcacttacgaaggtgtcctgcaggtctaccaccaggtcggtgaaaagggcattgccgaggctcagctggaagccatctctgggctggttgagttcctgaaggagctgctgaaagcctctgtgcagctccttctctgagcttttctggaggttgaggcccaggccctccaggatctgcatctttgtgctggacccagcccccagggagagcatggccaggctcatggagatgctcacaggggagaagaagatgttctggctgggggcagcggaagccaaggccctgtagaggtcgaaggtaaagtcccttctgctgctgggggccaccgtggcacctacatggaggtcctcgactctcttcttcatctcccgggggtggtggcggtgaagggaggccccctgagggctgagaagcaccaggcacaagaggaggaagagctgcatggtggctgttctttgtttgtgtcccgtagctgagtgtgcacacagtggaggtggcagtccctcgggctcagaaagggcagagggctggctggattgcag

SEQ ID NO: 451318 - DNA, 1085 bp, Homo Sapiens
  misc_feature (125)..(133): n is a, c, g, or t
gaaacatttttaagccccctccctccgggggtttttccattcagttccattttcccccttggggcattttttccctccatggggggaaatgaacaaagccgggggcattgctttggtaggggaannnnnnnnnaccttgcaggagaggtttccggtccagggaggtagtgatattgatcctcgcggctcatcatgggtacccgcaccacagtctccgaggtcacgttagaagtcttgctcttgggtgcctttgtggttgaaggcttgtctcccacttagctttaaaagaagatgtaattcaccatgatcacgaccgcattgctatcgaggttcttaagcaagtccacaatcttgcccttcgtttgctttgccacataatcattgatctgcttcatggcccctgcagagtccctaaagttggtggggaaagtgtctgccaggtacagcgtcttcatggcacttacgaaggtgtcctgcaggtctaccaccaggtcggtgaaaagggcattgccgaggctcagctggaagccatctctgggctggttgagttcctgaaggagctgctgaaagcctctgtgcagctcctcctctgagcttttctggaggttgaggcccaggccctccaggatctgcatctttgtgctggacccagcccccagggagagcatggccaggctcatggagatgctcacaggggagaagaagatattctggctgggggcagcggaagccaagaccctgtagaggtcgaaggtaaagtcccttctgctgctgggggccaccgtggcacctacatggaggtcctcgactctcttcttcatctcccgggggtggtggcggtgaagggaggccccctgagggctgagaagcaccaggcacaagaggaggaagagctgcatggtggctgttctttgttctatgaggaaacggaggctctgccagagttagtgtggagcataaggtcacagagctcgggggacccactcacctctgctgccttggatacctgaaatgtgtcccgtagctgagtgtgcacacagtggaggtggcagtccctcgatcccatacttccggccggtaccagc

SEQ ID NO: 451319 - DNA, 1118 bp, Homo Sapiens
agaaaagccccttttttcttaatttccccccacaagatgtgggggggagggcctttttcttcacaaggttgaatagggaggcccctctcagtgggaagaaatttgggggaaggtgtaaaacgctcggagcctcgccttcttttttggaaccttcttaaagccctcttcttcaggggtttttctccactccgagtcccatttttccaccctgggtgcattcttttccttcagtggggaggaatgaaccaaagccggtggcattgcccttggtagggggaccccccacccaccttgcaggagaggttccggtccaggagggtagtgatactgatcctcgcggctcatcatgggtacccgcaccacagtctccgaggtcacgtagaagtcttgctcttgggtgcctttgtggttgaagcttgtctcccacttagctttaaagaagatgtaattcaccatgatcacgaccgcattgctatcgaggttcttaagcaagtccacaatcttgcccttcgtttgctttgccacataatcattgatctgcttcatggcccctgcagagtccctaaagttggtggggaaagtgtctgccaggtacagcgtcttcatggcacttacgaaggtgtcctgcaggtctaccaccaggtcggtgaaaagggcattgccgaggctcagctggaagccatctctgggctggttgagttcctgaaggagctgctgaaagcctctgtgcagctcctcctctgagcttttctggaggttgaggcccaggccctccaggatctgcatctttgtgctggacccagcccccagggagagcatggccaggctcatggagatgctcacaggggagaagaagatattctggctgggggcagcggaagccaagaccctgtagaggtcgaaggtaaagtcccttctgctgctgggggccaccgtggcacctacatggaggtcctcgactctcttcttcatctcccgggggtggtggcggtgaagggaggccccctgagggctgagaagcaccaggcacaagaggaggaagagctgcatggtggctgttctttgttctctgctgccttggatacctgaaatggtcccatcccgggaattccggaccc

SEQ ID NO: 451320 - DNA, 1137 bp, Homo Sapiens
  misc_feature (268)..(278): n is a, c, g, or t
gggacggttttgggtttcccccacaaattgggggaggggcctttttcttcccaaaatggattgggggggcccccacaaagggagagattttgggggaaaggaaaaaagctcggaggtggcccctctttttgaacacatttataagcccccatttctccaaggggttttttccgctgcaagtccatttttgccccccgggggcattttttcccttcacttggggagaaatggaacaaaagcccgtgggcctttaccttggtaggggggnnnnnnnnnnnaccttgcaggaagaagtttccggttcccgggagggtaggggatactgatccctcgggggttcatccatgggtacccgcgcccccattcttcgcgaggtcccgtagaagtcttgctcttgggtgcctttgtggtgaaagcttgtctccccacttagctttaaagaagatgtaattccccatgatcacgcccgcattgctatcgaggttcttaagcaagtccacaatcttgcccttcgtttgctttgccacataatcattgatctgcttcatggcccctgcagagtccctaaagttggtagggaaagtgtctgccaggtacagcgtcttcatggcacttacgaaggtgtcctgcaggtctaccaccaggtcggtgaaaagggcattgccgaggctcagctggaagccatctctgggctggttgagttcctgaaggagctgctgaaagcctctgtgcagctccttctctgagcttttctggaggttgaggcccaggccctccaggatctgcatctttgtgctggacccagcccccagggagagcatggccaggctcatggagatgctcacaggggagaagaagatgctctggctgggggcagcggaagccaaggccctgtagaggtcaaaggtaaagtcccttctgctgctgggggccaccgtggcacctacatggaggtcctcgactctcttcttcatctcccgggggtggtggcggtgaagggaggccccctgagggctgagaagcaccaggcacaagaggaggaagagctgcatggtggctgttctttgtttgtgtcccgtagctgagtgtgcacacagtggaggtggcagtccctcgggatccgaggaattccggacc

SEQ ID NO: 451321 - DNA, 1024 bp, Homo Sapiens
  misc_feature (135)..(135): n is a, c, g, or t
  misc_feature (184)..(184): n is a, c, g, or t
aaggttcctggggaggaatgaactgggtttcagtgaattcaaagcttgggcacagtgcccgttccacaaagacgcccaataattgttagctattgtccagttggacggtaccaccccactgtgaagcccacttcnctgggaccacattcacttgggtgatggcccctcaccggggacaccattncacctgggtgccacccacctggacaccaactaccttggatgccactcacctggacaccattcacctgggtgatgccactcacctggacaccattcacctggctgtcactcacctgggcaccactcgcctgggtgccaccacctggaccccacttacctggatgtgactcacttgggcaccactcaactgggtgccactcacctgggtgttatgcacctggacaacgctagtcacgtggatgccactcgcctgggtgtcactcacctgaatgctactcacctgggtgccatttacctggatgatgtcactcacctggatgtcgtcactcacctggatgtcacctaggtgccacttacctggatgatatcactcacctggatgccactcacccaggtgtcacctggataatgccactcacccgaatgccactcacctgggtgccactcacctggaagctactcacctggatgatgccactcacacagacgccactaacctgaatgtcactcacctaggtgtcactcacctggatgctactcacctgggtgccactcaactgggatgtcactcacctgggtgccacccacctgaacaccactcacctgggtgtgtgagaacagtggaagttcctggaacatagttggcattcatccttcccaatgcttgctctcatacacagccagcccttacatggttatttcttcatgtcatctgccacctctgggcagccaggctcccccagactcaagccctgtgatgccctcttctggctcaccacgtggctggctccatctcattcattggtctcagcccagtggcctcctcatcagaggggctgtc

SEQ ID NO: 451322 - DNA, 882 bp, Homo Sapiens
aattccctgcatacacagcgaggaacttccgtcaagcccaggtgagaggtgccaggaggctgcctgggtcctcaagggggatatatgtccaaatggccttaccacaaggccccttcgccctcaaagttctgctcctcccgggggcttcttaggatctaaaaggatcagtcctagccatctcgtcagccatctcagcaagggctgacggggcggaacagcaaagcagaggcgggtcctgagagcgtggagcctgaagcccggcgccagagggagaccaagagggtgagatgcggctggaacccagccagagcggagactgaagcctgaactaggggccgggcctcaggcctaggaactagccacgagctgaaaaggaggcggatggcccggacagaagaggcggggctttcagaccagagggcggagccaagagctgaaaagggtggtgatttggtccagaagaggaagaacttaggctccggaggcagagccaaaggctgaaggggactactccctaggacagaggccgggaggtatcgggccgactaagccgagtggcgcggaggagcggagccttcagccccgcggctgggccgagcccgaaggtggcgtcggtgtcggggagccgccgcgtgcaccggccgtcctccctgggccgcatcgcggtggtggtggaccagggctcgggcttcaccaaggcgggcttcgcgggcgagaaccagccgcgcatagtgctgaagagctctagcctggtgcccagctgggaccggccggtgctgcccggagcgccgggctgcgagctggcgggcggcgtggcgcgggcgcacccaatcaagcacgggtgggaggcaggactggggaaggcctggcagggctggggaa

SEQ ID NO: 451323 - DNA, 928 bp, Homo Sapiens
  misc_feature (866)..(888): n is a, c, g, or t
atcggaactggttaaatgagggatgataccattctgaactcctatggtagtagtagccctctatggaggctgctgacttctggaaagcagatgtagtagaacccggcaaaagaagcaccactgatgatctttgatcgtgtgatctgggaccagaaactgttccttccacctcatgaagacgtagtctccattcttcagctcttcatatatcaaagtcatctgagttaaatgattttgcatactgataaaaagccagaaacttgccccagtgtttccgatcaacatcttcatctgcatcccacttgcgagttaagaaagggtgttttttgctgattatttctccttcgaagaaggttgtaagggttggatactcctcagtaaggcctttaatcttcaagtacccacaaaggtaagagtttcccgtgtccacgtgctgcagcaccacctctacgtcgtacgagttccccttgctcttctggtggccgcggaacttggagccgctgtagagcaggctggtggccacgccgggctgctgggtgttgatgggcggcggcgggatgagtgaggccgcggaggcagcggaggcaccggccggcgggggacactcggtgcggaccggcatcgcggggtcccccggagccagggctggggggagtgggagaggaaccgccgccgccgcgcgggagccgaggagggtggcggggagggagaggccggggcgcgcaccgcgcgggttgggggcgggaggggcgaccaccgtcgcgctgcctgcggagcgagcgcttcggccgccaccgggacccagggacctgcgagcagggcctcccagtcctgagctgggtccccctcccgacttgccctcgcgnnnnnnnnnnnnnnnnnnnnnnntcaccctcgtctttgtaacgccacccaggcctcgctacct

SEQ ID NO: 451324 - DNA, 840 bp, Homo Sapiens
  misc_feature (543)..(543): n is a, c, g, or t
tgggcattgccgtatcctggcagtcaggtccacgttgtcaacatgttgccgtttcgtttactgaagaggtgtcctccgcttcacaagtaacactggtcctgtccttggccctccagcccacctcgccaaccactcttgttggtttccttttcagacttggcacctttcccatctgccccgacatgccatgctccgtttcctggaaaacacttgagttgattcgagtaaatcgacttcggaatacggtgaaggctcccaccttctgttctatggctccttcgtgcggtctagtacctaccgccgtcctcttcacctccttcccttccacacttccttcctgggtagctctgcctgaagcattccacgtaagatcatctagtgtgccaaggtcatggacaggctactggtgaccaaagttggttccttttctgccgttgtctgttcctccgttgaagctctggctcccttggtcgcagcagcccctcagtggcctggttctcctgtccccctgcccttcctcaccattgcccattccgtcgttcngttcattcagcacaaggccttgccgtcgtgccctgagtcagcgtccgagacacactgaagagcccgtccagcgccgtaactagctttagctcagactaggtcccgcaggccttatgttcttgcctcttctcgctgagcctttcacttctcggcagatgtgaccgattggtagctccaccccaactcccttctgctgggtggaatgcaggagctagctgcctccaactcactgtgacctcagaaaaatgcctttatacatcgggcctcagtttcctaatctctaagtaggggcttgga

SEQ ID NO: 451325 - DNA, 766 bp, Homo Sapiens
tatgggtatgcacaggtgtatataacaaaatcagaagtctataatagtgtcattatattaagaggcagaactgctatatgctttcattatgtaaaatgtttacatcttgggactccatagctggtattattatggcacacccgagatatatcttgctccaattagcattaccatgctactcactataaaaaatcccaaaggcagactagagaagatagaaggatcaccaccttcaggagactgactggtaacccaacccattgacttcattacggctttcttccatgtggcataacgaatttcactttctgtggcctggatctgtggttcaaatcgttccatcctgagaactgacaaagcctggggttcaaggctccaaacgcttaccccttctgcagcccctgctgccatggcagctcctagtgcagttgtttcaggcataaagggttttattactggaatatgaagaatatctgcttgtagctgcataagaactttgttgttggtcattcctccatctacctgcaaatgactgagtggaattccacagtcgcggttcatggcttccaaaatctctcgggtttggaaacaaacagcttctaatgcagcaaaagcaatatgacatttattggtgaactgagtgaggccacagagtatccctcttgcactgggctcccaataaggtgcatatagccctgaaaaggctgggacaaagtagcagccataagaagttccgtacttcttttggcagtcttcaatgtcctcg

SEQ ID NO: 451326 - DNA, 1243 bp, Homo Sapiens
tttcgtcttgggccaaaaaaagtcatcgaaatttctgagccccttacatgggaaaaaatgaaagagcccccctgttaagaagaggctcaagtatggtaatttcccgactcaattgaaattaattgggggttcgaagcctcgcgaggtgtagttcaaatcaactaagtggcaaatcccctactgataaaaagcacatatcagtacataagggtggataagcgcctataagacaagcagaattgattcttatttgacgttaggtacgtaatgaagggcataggtacggtaaaattcaattcactgtctacataggttatcgtaagtagcgcaaattcagaccctaccttgtttgacttgggccttttgtatatagatgggccctactatagcctacgggtaattccttagggctagccttctcgacagatagctcagagtagagtatagtccctgcacaaaggtagcctatgcatgggacaatgcgggtacattcgagtcctgacatacgctctacagatgcttggagatctctgtacaaagtctgagagtgcaacgttgggatactagatgtgagtacccgccgtcccctaacatctcctagaaagaggaatattagagctacccgttgtatgtctcagcctctgtgagactggataagcagagaatctacgctgagaccatggaatccagtacgtcagggccctacagtagaagcgtgaaagcagtaatatcgatatattgttttatgacacatagatctgtggtaacttctatacagccccaaaagatatgctaataacaggcaataatggaaacacctttatttctttcagcgaacactgcctgacttcagctgggtcaaaccatgggggaatccagatttgaatatttcaaggtctctgcccttgcagaatcagacagaaacaagtgacaacatcgtagttaagtgtgaaaacagtatgttcagagaacggtacagatatgttagaaagttggctttagtcattaaaccttaagtagatgtgatttttttaaagttaatgagattcatgagtttattttcttgtcagaagcaccaacagacaaacctatacatttttgggtgtgtgtttttctgttttttaatcacagtgcttttattataggattatcttcagaagttaggtgcaggtggcatgtggaagataaacaggacagacactcaaccctgcctagtttgggggatgagtcacttttcaaactg

SEQ ID NO: 451327 - DNA, 1149 bp, Homo Sapiens
  misc_feature (684)..(692): n is a, c, g, or t
cggtccggaattcccgggatcttccatcgtgtccttctacgttcccctggtgatcatggtcttcgtctactccagggtctttcaggaggccaaaaggcagctccagaagattgacaaatctgagggccgcttccatgtccagaaccttagccaggtggagcaggatgggcggacggggcatggactccgcagatcttccaagttctgcttgaaggagcacaaagccctcaagacgttaggcatcatcatgggcactttcaccctctgctggctgcccttcttcatcgttaacattgtgcatgtgatccaggataacctcatccgtaaggaagtttacatcctcctaaattggataggctatgtcaattctggtttcaatccccttatctactgccggagcccagatttcaggattgccttccaggagcttctgtgcctgcgcagttcttctttgaaggcctatggcaatggctactccagcaacggcaacacaggggagctgagtggatatcacgtggaacagtagaaagttcaataaactgctgtgtgaagacctcccaggcacggaagactttgtgggccatcaaggtactgtgcctagcgataacattgattcacaagggaggaattgtagtacaaatgactcctactgcctataaagcagtttttcatacttttaaagannnnnnnnngcccaacagaacactaaacagactatttaacttgagggtaataaacttagaataaaattgtaaaattgtatagagatatgcagaaggaagggcatccttctgcctttctcttatttttttaacgctgtaaaaagagagaaaacttatttgagtgattatttgttatttgtacagttcagttcctctttgcattggaatttgtaagtttatgtctaaagagctttagtcctagagggacctgagtctgctatattttcatgacttttccatgtatctacctcactattcaagtattaggggtaatatattgctggctggtaatttgtatctgaaggggattttccttcctacagcccttggacttgaggactttgagtatctcggacctttccagctgtgaacatggactcttcccccactcctcttatttgctcacacggggtattctaggcaggga

SEQ ID NO: 451328 - DNA, 1357 bp, Homo Sapiens
aaaaatgtaagtgaaaactgtttaatcattttagagcagtcaaaatacaatataagattggtatcttgttatctgaaagcagtcattttaccatatgcattttgatcttttaccattcattttaatgttgactggttaatttaaagaactgagttttaatccaaggttgttttcatacattgtcataatagtcactttgaagggctcgatatctaactggtacccaccattcgcttctctcactcctcctctcttgttcctttctgccttgctaaactcacggtctttgagacgccagagtttggatttatcttgagcttctgatgactgctgatgttctttctgctcttctccagagcacttgttttgtattattatttgagaataacgattctacagtcaagtccattcccaagatccctctgattttcttgagatgcttttagttcctttgtattattgttccaaatgcttccgtatgagttcctgatgtccgagcttttacttccttattctatggctgcttttctaaatgtggttgaagagctcatctgaggatttcattactacctgcatggtttcactggtttgcctaaacttttccatgaatctgcattcgttaactctttcatatccttctgtaacaggagcttagatcatgcagattctaacatcgtaggagtcactatcaccagatggattgctcgacagcttagtgccagtctgagagctgttcacgaatcacctgagtggaggcaagaatttatgtacacggtgacaaatgttgtacacaggtctgggttaatgcttcctgacttcctagaattaccttgcactgctgatttgagtggatgaatatggtggcagttacaattctgacaaggtgatgcgccgcgaatggaaaccaggggatcagatcaatgtggcagaaggtctgtgtttcctggcaacaacagaatagatcccaagtctaggatgctgaaacgcccgtatgcatcccgtaacaggccaggttatgcatttccagttgttcactgtactctcaccatacacattaccaaaagggggaacatccattatggggtatataaccacacctagtaaaaccctattggcgacagcatttcctacaattacggagcataaaaggcagatgtatgaaagagccttacgctcatcgacaggcgttactttcaacagcagagagaccagaattctacggcggggtcgctacacaccagacgaggagggaacagctgtaccagaaaagcagcagtgttcgcgtaaacaacaattgcggtaaggagactacaggaataaccgagtagagtagtcacttaagtcgtgtcacatccgg

SEQ ID NO: 451329 - DNA, 939 bp, Homo Sapiens
tcctatttcattggtttctgtaacactgggttttcgaattcagttaaacctgtgattggttgcctgcactaagacttcctgaggctttatttgttgttcccaatcccaatgtggaggccctggtggtgctgcatccagaaccagagctagttccaaatcctccaaggtttgaagaacctaagccacttgattgcaagccattgccaatacctgagccgaatggcgttccaaaactaactcccagagatggctgtggccctgtagcaggctgttgctgctgtgtaagtgttgcagccatggcaacggctgctgcgtttggcatggtgctgaaacggagtgggtccagtagtaactctggcgtgtgttctgccacttcttggcttctgctcgccttgtttcaaatcacatcaacagcatctcccaagaacattttcctgtagccaaggtactgttctttcagaacctttacattttcatgaatagactgaagttgtgccgctaaagctacaaatgtttgataaattttctgcatagccattgacaaatcttgaggggttatatgtgaattatttgcttgagtggcaagatggttttctagttcttcaatctgctgcctgtactgctgaagctgtacctcaaattgctgaaccaagattctgaagtagtcagcaggagctgcatattcatgttgaagtccaggtggtgtcttctgggttcttaaagctatttcagcattcttcaactcctgagcagtttctattttcaatttgtccatgttgagagtgtttctctgtattccattggcagccaacgacaggagctgcttcagagctttcatatcttcttgtaccttaagccttgcttttgaagacattctactaatttcttcttgaacttgtttctgctcccttcacaaatttctggagattttcaacatcc

SEQ ID NO: 451330 - DNA, 815 bp, Homo Sapiens
ggacattatcttaagtgagttctgagcaagacacagaagacagatgccggcactggagaaagcagctgtttccacgcactgggtcaaaaggagcaggtctggtgcttttaaaatcttgcgcaatccacatcttattggagaaggactccgacttcgagacatcgtgtttaaaccaatttggctacgggggcaaaatgggacttaaactcctgcttcgacaacgacttacagatcgcaccgaattccaaaaagcccctctcctggtgacagcttctccctgtcataatgacacagtcattctccatgagagcaggccacacgtgatagaggactaagggagcagtgaaatccgagtcgtagctgcggcggtatttgcaatcattaaaaacttctccatctgctccatatgcaatatctaggggtggttctaaggcctgcattgcaaaggcaatgcaacatatctcctggatgaagtcactgagaaggcaaaagtcaacgacaggagggaatgaaatcttgggattgacattcatggctcggatcacatcattgacactgctttgagaatcatatagatcaagatgacaaatgacataatccaagacagcattctcaaagtcattcgaccccacataagatggtgtcaacgattttctcacatggatcttgaagtgtctgaatgccatttttgctacatggaatgcctccactgtggcgatgtagatgatccgctgaacggtctcagccttgtcgatgcagcgccgcagcaggcactccgctctcgacgaattcgagctcggccgatttggcctgat

SEQ ID NO: 451331 - DNA, 1272 bp, Homo Sapiens
aattttatgaggccatggagtagtctattttgttcacctttggaacctagaagaatttcaaataataggagttgagtaaatatttattgagtagtataaatagatatatttcgttcaaggtggcatgaaaaacaacccagtcaggaaactggagatgaaaatgaaaggctgctacattttttaatcctgaattatgtgattagcctaatcttctttatagagcttcaaaaattcattggtatgatttcaaatattgatcattactttaaattatttcttatatgtctgtagcaacatgtggatataagtcatagatctcataatctttaatgtgatactataatgtccaacgaatgttgcctttatccatgatcttgaatggggatcgcccaggaattctatgtgatactcttcaacatttccatccgggtcataagttacatatttccctttaaaaacggtcaggggcaaagtattcctgggccaacttggccaatttctgtaattttacccaaacccaggcttccaagagggagctgtgaatagacaatcttaaatccacactgatgaagctgagactcttcaggggagtcttcttcagaaattgagcagttattatatcttgaatcagtgttcatgaagcagtaccatggttcatcatgatcaaccttggctgaatcctcacttgataacaatctccatttcaaacaattttcattctcacattgatacccacactttgtttacatacatgttttccactgaggaatccattgcatagttacaatattcaatcttaacatccaatttttctttatccattaaggcatttaatctcgactcttcaccatgtgaggatacagtgagaagatagccatctgaaaaccaggaagcagtcccccatcagatataggacctgctgtcaccttgatcttggactttttagcctccagaactgtgagaaatacatgtttgttgttgaagccacccagtctacggtaatttgttatagcagccagactgacaatgtggagttagacttttcttttgttcctagcaaaattccatgaagaaaatagactccaaaactccagagaagggaagtgaggtctgtagtcactaaagaggcaggcgttctactgggatgaattgtttctttttactgtaaatattcttcacagctcagatatagacaaagtcctaactccactccgcctccgcctcctggcgtcccgcggccccgccccgtcccgccgcgatcccgggaattcc

SEQ ID NO: 451332 - DNA, 1021 bp, Homo Sapiens
gtagggtcaaagatctttaatgttgggatggaaaggaaggaaccctgtggttttgaggggggacaggtaccgccaaatgcagatgatgattctgagagcacttttgacgggccagatctggtactctgagtttatctgcgccacttgtgttctggcaagtccagtgatgctgtggtctccagctgattctatctgagctgctcctggggtggcagctctcagaagtgtggggagaggatgcaggcgatggggagggaccgggaccgcatgctccctccaggacatagcgcacaacggtggtctggggtaggatgaagtataagtgctctgcttcaggccagccttgggtgtgagctgtctctgcttgagctgctcatagagtccatagtttgtagggggagcaagaaggggaaagtcagacttctctggcagccacagcaacttctgtccattccaagtgcggagtggaggcagccccgggttgtaaccatgccggttgtaatggtcgtcataggtgctgatcaggtagcgatgtgggggctcctggtggtgggtgatcaggtgtttgtaaggtagcccctcaactttcctcttcccataccacctggagatctggtctggtctgtggtctgggaaggggatgtattcttttctgtaaatggattggggtgtcttgtcagtgtctctggtgaactttctcctctcttccatccaatttccagtgagcactttcgttgaatacttggtctcaatctgccagctcggagtagagagtggctgtggatttactgcagtcaaaacacatgttaaggatttgccccaggtttctttgacttgatgcagtttaaggcttcaggcggggagaggaaggtgttatgaagttgctgagtttggggtgcctattttgtcttcccagctggcctcctgaatggctagtagatgactccttgctaacctcagagaataaaacggccccaagagttcactgtcagcctttagggagagttgatctatcttggat

SEQ ID NO: 451333 - DNA, 1137 bp, Homo Sapiens
  misc_feature (56)..(58): n is a, c, g, or t
  misc_feature (61)..(151): n is a, c, g, or t
  misc_feature (156)..(156): n is a, c, g, or t
  misc_feature (170)..(183): n is a, c, g, or t
aaaagaaaaggtttttagaaaaacttttttgaggggcccaggcggccccacaaatnnnttnnnnnnnnnnnnnnnnnnnnnnnnnnnnnnnnnnnnnnnnnnnnnnnnnnnnnnnnnnnnnnnnnnnnnnnnnnnnnnnnnnnnnnnnnnntaatngttcaaaaacctannnnnnnnnnnnnnaatctaaagatccacgaatcccccacaaaagtacaaataaaaccataccaaggccatattgcaatttaggaaagcagcaggcaggactttcaattgacttgatatgatttatcatttttactatttgtaagaatggaaataagttcttagagttttggtcttggagaaagtctgacgttaaggacaaacgacagttattaaaggcagatgactttccagacttgtcttaaatgttccattcttcaccttagaacttatttaaatttgtttcttccaaatactgcagtaatattgatgctccagagagatgtcccacggagattctgctcttgtgcgtctgccctgcacggagctgaggcagtgtctatcagtttcagaagcgagtagtcgtgcagtacttaacctgaaaaactgcattaatcacggcccggaggtccacactaagaccctgaggcctgggaagcagcctgggtggggtcagagaagcggtggatgaggctccacagcagctcccagggtcccatccccgtagctgtttccttagtggatgcagcagggtcaggcccttccgctgtgacgttttctcctctttattacactggtgggaaagtctccgtgagaggcccgacctagatatggaccacgcagcgagcccgggggtccaagcggcgctcctggggtgcagaggatttgtgacagccacggcaacgcctcgctgatggaggccatgaaaggcgaacaggccctattgcttggctgacaggaaatcgacgacactcgtgagggggcttcttgaggcgatcaccaagaggcctgagaacgccacatccgcggcccttaacccagccctagggacgggccgcactgcgcatgtctgaaagggagtgacaagaggaggagcgaaggaggatggggctgaggaggagagcggggtgagaaaagggcggtcgcgcc

SEQ ID NO: 451334 - DNA, 781 bp, Homo Sapiens
ccattccaggactagcataacatactaggctgctgaggatggtctctcttggaggtagttcagaagtgggagagggagctgtggcactggtaggacagaaacttcaaagaccaggtggtggcgtctgatatagagccagctgattgccctttccaggtgagttccaggtggtaagggaaaagggaaaagagaccagttccctgggctgttagctaactccatgatgaccaatggaagagcttcagggtagggacactattgaaaaatcaggaccagcaatatgggtgaaacaggacacttctcctgtttatcttctgaatcagtggggaagcagatggcacccttcgcctttgaaccctttggatccttccgtgagaacagctgttctcttcctttgcaggccacaccgggcccttgaggcctcctgggccacccttgaaaggcctccagccgcagggacatgtcatggcttctgagaaatgtcgcgacgaggttctaggacaaggcagcctctgaaaagagggggcaatttcctggtagagacaggagttgtcctgggcccctgacatcccagccggggccattcctcatgcccttccttccccgaggcccaggctgccactaaagacaattatcccagaaagacacacaagtggatccctgggcttagcggagatggagcagcctggtctgaacaagatgcatgggctggccttttagacgccccttcttcaggagagtcctgcactcaggaactacatgggagaagtgaagtgggtgc

SEQ ID NO: 451335 - DNA, 784 bp, Homo Sapiens
tcagcatttgaaattattttattcagaaaagttcatgctgggcatgtatgccaagctccgagctaagctccaaggatccagaaatatatgagaaacagtgtcttgccctataggagctctggagaaagagaaatggagacaatgaagagaatctagccttggccttgaatagggaaacgaaaggcaatactggggtttggccttgagtagacatccagaatacaccattccaggactagcataacatactaggctgctgaggatggtctctcttggaggtagttcagaagtgggagagggagctgtggcactggtaggacagaaacttcaaagaccaggtggtggcgtctgatatagagccagctgattgccctttccaggtgagttccaggtggtaagggaaaagggaaaagagaccagttccctgggctgttagctaactccatgatgaccaatggaagagcttcagggtagggacactattgaaaaatcaggaccagcaatatgggtgaaacaggacacttctcctgtttatcttctgaatcagtggggaagcagatggcacccttcgcctttgaaccctttggatccttccgtgagaacagctgttctcttcctttgcaggccacaccgggcccttgaggcctcctgggccacccttgaaaggcctccagccgcagggacatgtcatggcttctgagaaatgtcacgacgaggttcttttagaagccccttcttcaggagagtcctgcactcaggaactacatgggagaagtgaagtggg

SEQ ID NO: 451336 - DNA, 1041 bp, Homo Sapiens
attggggctgggagaatcgggtcggaagaagatccccacatctgattctgactcagaatctgtgacccactcagaaaagtgcctcccactttaggggctgatcgctgtagggatagtcctgaagttttgttagaaatcccagctctgtcaaagatccctgcttggatttggctccctggactggcgttgtttgcttgtctgactgttcaggtgtctcttgggacgtagattcagtcggggcagatggctcccttttggctccaggtttagcctgggccgcaggtgttgattcagcttcttgttgagctggaggtggctctcctggcccaggccctggctgggctacatgtctttgtctcaatgctggctcctgttgagttatagattcttttcctagcccaggtccctgctgggaggcagcttcctgttgagtgagcagcaccctttggatgtaaggtgattgctgtggtgcgggcttctgtggggcaagaaattcctcttgtgaagcagatttttgttgggctctaggttccttctgggattcagcatcatgttgtgcaggggtctcctgctgggtgaggggtctttggtttgaagcaggcttctgttgggtattggatccctgcagagtcttcgattctggctgggctatgggtgtcttttctggcccaggctctagcggggttataggcctctggtgtggttcaggttgccagtctgacctagacactgacttagaacctggctccattgttatttccctcacgggagatattgatcttccaggttctatccttctgggctcccacccagccctctctcttcacagatctctcattgattcctcatgatggcacttcctcttgggtttcactccatcctagcatcactggtcttcctttttaaggcagctggcagttggccgatcacagctggcccccactaagtaatgaactctgtgcctctttctttggtgggaggattaggaataggaggaggctatgtgcctagcctctcttcaagatcccgggaatccggacc

SEQ ID NO: 451337 - DNA, 1152 bp, Homo Sapiens
  misc_feature (1079)..(1079): n is a, c, g, or t
tttttaataagctcataaaggtctatgctcagcaattcaaaggccatgcaaacatggttccggaatgtgaaactttccagcatgtggataacgttcatactaccagttttatcctgtttcttaagatgctccaaaatccggatctcctcagctgcttgacgatgaaagcgcttctcattgcgcaccatttttagggccacgtactgtcgaagtttgtgatcatagaccctggccacctgcccaaaactccccttgccaataattttcagcacctcatatcgataagctagatggtctcgaggtacatgaatataggccccatctgcatcatcataccctccattattgggaccaccaataactccatgtcttttcttggcatttggacctacaaagtaaatttctggataattaattatttccagtttctcataggcagtgaggtggtgtttatattgcttcagggcttgttctggagtcagaggcaccactttgggtgccttggatgaactgttggattttactgtattcaagcaatctgaacttttaccctgagaaacagtaggagagcatttttcagagtcactgatgccatctgactgaatagtattggattttctgttgccaaattcttgaaacagctgttctaccttcatctcacctccatccaaaaagtgctgagtatgatctcctgtaaactgctcagtggtcatatttagtcttctgggtggaggtggttcagaaggattgcagagtacatttgaacaggggggacatttggtttcatctatcatcatgaaggtgtcatagacaccatcccccaacttctctttccacttcattttctggtggatggtggaggcaaaattctaaatgattaaggatcacttctctgttctttaacactgtggctccaccactccgctgctggggcgggagcccggccccaggcggccccgcatccttccgcccaggcccacgagctgtgcctcccatctcctagctcgggaccccgcgcggggagaggcgccagttgggggtccggtcggccacgccacctacgccgggacggctgcctnccgcggcgcgacgctcccacgggtactctcgaccagacactgcagctcagcgccctcgtgccaagcttggcaa

SEQ ID NO: 451338 - DNA, 708 bp, Homo Sapiens
cctctgcctcctccagctgggagtgagtctgtaaagaagcacttggatgaacgtgaaactctcagccaagctgaggtggggaaccggaggctgcggaactgcagggagggatggagctgaactcaagacctgggcgggcagatgcaggtcactgacgaatgaaactacaaccgaacagtgcatcattccgtatggattatgtctacttatgcaaatggcttgcagaagtgtgtttgcttggctctttcccaaatggtctgtgaagctctctcgaccccagagggagacagcctgcagggcgcgtgggaggagcagggtcagaggatggcggcactgatttttcagcagcacgggaaatttattttaactcgtggtatatgttcttcttcactgatgcaatcacatttgcaaacatttactaattcactcagtggctcaaagacaacagataaaacgaagtaccctgaactcgtttgtaaagatcctaaatgatgtcctgctaaaactgggccccatataaaaattctcaacactgttctaatctaaaacacacatgctgaacacagactcgaatcagtctttgatgaatcttcaacacaggggaagtcggccccctaagaatccgtgggggatcagcttcccgctctgctcccttaccaggagcctcggcccggattgtgctcccggcacacgccctccgccctcgtg

SEQ ID NO: 451339 - DNA, 1057 bp, Homo Sapiens
gggaccggtccggaattttcgggatccggtccctggactgcggaacagagatcccctgattcatgccatccccagactgagccccgtagagtgcgttcttaccttcctgccccgacgaaggtcccagagacgctgcggacaacaccagcatgtcgagcgagcagagcgcgccgggggcctcacccagggccccgcgtccggggacccagaagtcttctggcgcggtgaccaagaaagggagagctgcgcggccaaagagaagccagcgaccgttctgcctcccgtgggggaggaggagcccaaaagccctgaggagtaccagtgctccggggtcctcgagaccgacttcgccgagctctgcacgcggtggggctacacggacttccccaaagttgtcaaccggccccgccccgagctcgcgcttcgtcccctccgcctctttgtccggaaaaggccaccttagacgatccgcggctgtcggggtcctgcagcctcaatagcctggagagcaaatacgtgttcttccggcccaccatccaggtggagctggagcaggaggacagcaagtcagtgaaggaaatctacatccgcggttggaaggttgaggaacggattctgggtgtcttctctaaatgtctgcccccgcttacccagctacaggccatcaacttgtggaaggtggggctgaccgataagaccctgaccaccttcatcgagctcctgcctctctgttcatccacgctcaggaaggtgtctctggaggggaacccactgccggagcagtcctatcacaagctcatggccttggacagcacgattgcgcacttgtctctgcggaacaataacatcgacgaccgcggggcgcaactcctggggccagggctgtccacgctgcacagctgcaaccggaccctcgtctcggctcaccctgggtttcaccacatccgtgaacaagggggcagggctacatcgcggaaggccctccgggtgaaccggtccctgctctgggtgtcccgggcccacaacgcattccggacaggggcgcccttaaacttgg

SEQ ID NO: 451340 - DNA, 790 bp, Homo Sapiens
agtatagcaacagactttgttattggtctgagatctcccccagggaggtcaccccacacagggacaggaggtgcttctgtagccccgagtcttagaggcaagcaggtgggagggggctaggggaagaatgccatggcctcatcctccctgagtttggccttgatgggatcccttggcaacatcagctcctggattatggcgtacgcaggacattgtggggcgaagcaatttttctcggactccaggaggatgctgcgcttctctctgctcccgatcttgatcccttttgccctgcttggcttctgttcagggatggttacctcgatcgcgagcgctcctgtgtccctttttccagcaggaggcgtcggcgctccaccacttcggtgtgtgtcagctcgaaggcgcgcaggacctcagccagcttcagggcgcccttgtcctggatgcggttgtgggccagggacagccagagcagggaacggttcagccggaggccgtccgcgatgtagcctgcgccctcgtcaccgatgtggttgaaacccaggttgagcgagacgagggtccggttgcagctgtgcagcgtggacagcgcctggcccaggagttgcgccccgcggtcgtcgatgttattgttccgcagagacaagtgcgcaatcctggggcagccggagggagaatgtgggtcgctggaaaaggtacagggcgtccgccggaatatgggagacttgagcgcttgagggggcggtctggtctgaggatgtaggggcagaaatcgagggcccttgccgag

SEQ ID NO: 451341 - DNA, 1118 bp, Homo Sapiens
  misc_feature (111)..(111): n is a, c, g, or t
  misc_feature (1096)..(1096): n is a, c, g, or t
  misc_feature (1104)..(1104): n is a, c, g, or t
ggaccttaggaagtgccggcttagagtggggaaagaatcacagtgtcttcgtgccgaaggaaaagaggtcgcctagaccatggagaccgggccaggcctctttcacctggngagctcttgggaatttgtggcaaagctgcagcacaggagggactgtgggcctttggggcttgccctccggtgatcagaacccttctagggggaagcatggtgatgagggttggttcactctgcatttcagagggaggacctcaggcccaagaggggacagggatccaaaaaccctccagctgcttggaaggttcaaaaaggggtgtggacgcatccacatcagcaggaagtagtaggaaaagtcaccagggaacacgtaaggatgaggccgggagaattttagcatgcaaatgggtaggatggcccgtttactgatcagctgctgcctcctccttctcctccatgtcacaggagctctgaggccgtgccttcgcctcaagctccctctctccagctggctccacgtgaggctcctctgccaggaggtactgggccagctgctccaggtgctccaggcttatcttctgcaggcgctcctcgtgctcctgccttagcagctgcagcacggccttggcatcctgtggttcaaagtgtttagctaggaccagtcccagctggtgccacaggggctgggtctgcggctggtgggcctcctttagcgccatcttctccaagggctgcatgatgacattgatagaggcattgggcccaatgcagtagtcagagaggtgcttgtcatcctccaggagctggccacggaaaagcaggtgctgctgctcctcaggcaccttcagccgcctggacaccagtctcttcagcgtggctacactctcttgccctgacaccttcagactgcatctctggcccaggagcagcttgactgtgaggaacatcgggctgagtggaatcaggagggatccatgctctgggagctgccctgaagattagggggtcctgcgggagatgttggcttctccctatcccccaagggctagtaatcccaggagaccagggacccagcttaggcagcagccattgcatccantactccgnggggaccagcctgc

SEQ ID NO: 451342 - DNA, 1451 bp, Homo Sapiens
agactaagactattgccccattgtcattcagttcgagttggagcatgaagcccctactcaattcccacaagtactatcattcttaagttcaggacagcttgggccagttaacctgcatccaggacctgtgttgcatcgggttgtggctgacaccctttagagtctgtgactgttgtacatgcaaaagaatcaaaatccactgtgaggtcttgtacatttctctcattggcattatcaaagctgtttttgccatgcagctgtttaaggtgtttcctcaaaactggtttatgtgcaaaaaccatatcacaatagttacatttatggggcttatctccactgtgaaggttaagatgatcctgtaaggaacacttctgagaaaaggttttcccacagattttacactggaaaggtttaattccggcatgcacacgcatgtgtcgatgaaggttgcctttctgagtgaaagtcttgccgcagagtagacacataaagagtttgtgcatttttaaatggttggcgtagttctccaggtgacgaaacaccctggtacactttgggcactggtgatgccactgtaggcctttgtctacacctcgaatattagggcccaagacatcttttgaggccatgatgatgttatcaactgcctgtataagaaagggcataattgtggagatggttttgttctaatttcacttactctgttttccacagttgaatttatcagggagtgctggggctctgatgaatgtaaagcagtgggttcagaagaaataaactggttctgatcttttttacttctaacctctgatacatccccaatagattctaccttaacaatctgaatatcactgtcctccatatccatactgtcttcagatggatgaatacaaggtgagtcctgctttggggagcctctggcatctccctgctgttcttttgactggggagaagcactctgtggttcacatccctctgttactatccattggttgttttggctttataaacttccacagggcctgtgtgcaccgttctacaatgtggctcatctgaagaaaacttgcagcagtcaagtaatttaccagttccatctcagggaattccagcacaccactataacaggataagagcaattgtctccccacttcggaactctgtaatatggagattttcacctctctggaatcattcagtaaaaattggtctcttaagaagggggaacctgcagcaaacacaattttatgtccctgtacctcaatatcatctatgagaactgtaacatcacaaaatttattctcttctcttaatttgttcattttttgtaacattgaatctccataattttcaaacttgaagtgaaggagatctgatctttcagacattttggcagacagacccgggggaagccgccgtcaggatccggcaccgccaggagctccggcccctcg

SEQ ID NO: 451343 - DNA, 1127 bp, Homo Sapiens
  misc_feature (1087)..(1087): n is a, c, g, or t
gggtccggaattcccgggatgtgggggatctcatttctccccagtgggctctaggctgtggatgtgagaaggggagcaagggaggcagatggcgacaaggaacagccccatgcccctgggcacggctcagggtgaccctggagaggcaggaacacggcccggccctgacgccagcctccgggacacaggtgcggccactcagctcaagatgaagcccaggaaggtgcacaagatcaaggcggtcatcatcgacctgggctcccagtactgcaagtgcggctacgcgggagagccgaggcccacctacttcatctcctccaccgtgggcaaacgctgccccgaggcggccgacgctggcgacacccgcaagtggactttagtgggccatgagctgctcaacacggaggcgcctctcaagctggtgaacccgctgaagcacggcatcgtggtggactgggactgcgtgcaggacatctgggagtacatcttccgcaccgccatgaagatcctccccgaggagcacgctgtgctggtctccgaccctccgctcagccccagcagcaaccgggagaagtacgcggagctcatgtttgagaccttcggcatcccagccatgcacgtgacgtcccagtcgttgctgtccatctattcctacggcaagacctcggggctggtggtggagagcgggcacggcgtctcgcacgtggtgcccatatccgagggcgacgtgctgccgggcctgaccagccgcgccgactacgctgggggtgacctcaccaactacctgatgcagctgctcaatgaggcgggccacgcattcacggacgaccacctgcacatcatagagcacatcaagaagaagtgctgctatgcggcccttcctgcccgaggaggagctgggcctggtcccggaggagctgcgcgtggactacgagctcccggacggcaaactcatcactattggccaggagcgcttccgttgctctgagatgctcttccagccctccctggcaggcagcacccagccggggcctccccggaacttccaaactggcctgcctggggccgcctggcaagaaacacgggnttttcaagggagggaaatgacgcgccccaactggctatct

SEQ ID NO: 451344 - DNA, 1503 bp, Homo Sapiens
  misc_feature (228)..(238): n is a, c, g, or t
  misc_feature (340)..(393): n is a, c, g, or t
  misc_feature (465)..(527): n is a, c, g, or t
cctcctcggctgataataatgttgtggtccatatgaaattctccccgtggttgcgcacgacttttttcatccgcgcgaccggcaataatgatgcccggcgttgggtgtgccaccgcgcatgaatcacccctcctctgaggtttgtatttgtcctcctcctgtggcgtgttataaaatcttcttgtcgtgggtagtggtggttttggtcctccccactatgttgttcgnnnnnnnnnnnaccgttgtgtggggtcctcgttctcctcccaagtgaggcttcctcccccgtgactccgctgttttttcccctcgccacgcggttgttttttatcgccgctgnnnnnnnnnnnnnnnnnnnnnnnnnnnnnnnnnnnnnnnnnnnnnnnnnnnnnntcacaaaaaaaggggggccacccaaatggggtgccccccccgggggatatttttttggcgcccccccccccnnnnnnnnnnnnnnnnnnnnnnnnnnnnnnnnnnnnnnnnnnnnnnnnnnnnnnnnnnnnnnngaatggtacgcatatctgcatagttttatttctgtctcaattccaccagaaaaagggattttcagaaaaaggcacagttgtgcttcctctaaagatgtagtctgcggtttgggaagtgctggttccctgaggttatctggagcgctggttgtaaagaagaaagttcttgtcttggcagagcaggcagagtttcaggcttcggcagctgcctcccgcagctaagaatgcccaggtgcccatgagcaccaggattataaatgctgacgccaggtttattccataataagaacttatgaaggtctgggctgacaccagcaggtgggtcaggagaacgataaggaggatgccccactttttcttctcacagccatcaaaaaatacaatgccccagaatacatgcagcaagataatgaccagcgtcatgaaagctgaataaaggaagaattgaggagaatctccatgaatgcccactgtgcctggccccaaggagtcagatagggtattcacaaaggaaaatactccactcatgattccaaagcccaagccagaaacataggccagcagtcgcatagagggtgctgtctcacctgggtttatactcttcaaaccttcactggctttttttaagagtttataatatgcaaatcggaacatttcttggatatagacagagacaaacgctccaaagatcagcagatatttctgtgttggtccatctttgttgtcaataatgactcttgccatgaaccaaacaagggacgaaatcagtagagacaccaaccagaagaaagctccggcgatgaggaagatgatacgcaacggctcggtggcgatggtgaagacataaagggcgagcgcaggcccgaaggcaatgaaggcgcagccgaagaacacggccgcagtcatggccaccgcggaaaccgacccgggggcccgttggggacgcgagatgctcccggcgcgggcggggttcggt

SEQ ID NO: 451345 - DNA, 974 bp, Homo Sapiens
tggtgcccccggggcgctctctccctccgcgcggggtggccggccgtctgggggctccccccccgctggtgtggggtgtccgcctcgcgggtcggtccgcccgggtcgtgtgtgtgtcgtggtcgccgtctgttttctccgccgccgcggcttgcgtcgttttgtctgacttgccgctctctgcggtccctcgtttgacgtcctctcgttggcgctctcttctgtgctccccctttgcgatcgctcttctgcgtctcggcccccccgctgcgtttgtcttgtgtttcgctgtgcgtgtcgtggtcgttcgttcatctgctgcttgttttctgcttgtgctttttgtcctctctctcctcttttttgccattcttgctgctctcttttaattaataaacttctaaaaaggctaatccacttgggcactacttaagttaccaatcaattagtaaggaaaagatatcgaagcacgtaaacttaaggtgacagcgaaaagttctgttgaccacacatggattctctcctcctcagaaccacagttacagttggagttacagtaaatacttcgaacacggtccttcggtatcccaggctcaggtgaggcgagtgcgcatcttgggatgcagctggcgctggcggcgcttgcgctggccattgaggagcttctgcgcgaccttgcgctcgtgcccgccaggtgcaggccacgttggtgcgcagcgcctgctcgcgccgagtccggctcttgctgcgccctgccccgcaggccgggaagtcgcgcaggtagtagtagtccaggcagtcgtaaagctcctcctcgtagcttatgggtggcggcggccgagccagagcctgcagacgtggaagcgcccgctctgcgggcgcttccatcctgcccaggcctgtggccaccggcggccacctgcccgcgtctgggcgctcctggaagacccagcagccccgcctcgagttccgat

SEQ ID NO: 451346 - DNA, 535 bp, Homo Sapiens
tttttttacaatgccattcttgctgctcttttaattaatcaaccctaaaaaggctaactcacttggacactacttaattaacaatcaattagtaaggaaaagatattgaagcagtaaacttaagtggcggcgaaaagttctgttgaccaaacatggattctctcctcctagaaccaagttacagttggagttacagaaaatactttgaagaggtccttcggcatcctacacaggctcaggtggcgggagtgtgcggcaagggctgtagccggagctagcggacttgtggccactgaggagcttctgcctgagcgtgccgtccaggcgacagccgcttggtgcgcagcgcctgctcgctaagcgtcaggcccttggtgcgccctacgccgcaggctgggaagtagcgcaggcagtagtagtacaggcagcggtaaagctcctccttgtagcttattggtgtcggcggcctggtctgggcctgcggaccctaacccaccgcctgctgacactgaccggcagtctgtggccatccccg

SEQ ID NO: 451347 - DNA, 1730 bp, Homo Sapiens
ttgtttgctgttcattgttttgtctgtgttctcctgtgtcacttgttgtcggttcttcgctttttagtgttgccttggtattgtttgtgtgttctcttgtaccacttcatttttctgtgacactgtcccttgtcggttgctgtcgtgttctctgtcccggttagtttctcttttgccgctataccattatcgtcgttttctagaacgtaatagatttttggtacgcttttggtttcctatgtgtattcaatttcttatttttttccctaagtcaactctgtaaggggtcaaaaataacatagtggtctaataattgcctttagaagtattgacctacaaactctgtcttctacagatgcaaggaattaggtcctttgccaaagcagaacttcgagtacagacagtctggttttgccctcgaataccatagtttaacggaaagttagttttatgtttcacctgctgtacaggtattcaagaaatatgaagaacagtgcgtcctgggcaacaatacgtatcttgccctatccggacctgaagctaatggaaaggcctcttggcaatcagaagcctctttctgatttattgttatagcccatcctcccaaacttttaactttgattaggtaagtacactctggagaagataaatctgatgataggaaagtcaaagcttgaattctgccttcattttagagtcatgccatgtatcatccagtttcttcttctccgaaatgctttggcaggtaacataaggtctcctcaggatactgtcaagtttcatttggtccctttttgtcagtggaatcaaactatctttaggtacacttgaatcttttaagatcagaagggagaagaccaagccatctaatagctggaactgtgagatgatgagcttcaaaagacatagacatagatccatacttatagatgcacattatttctatgccatgtggatcagcatctacaagagtgaaaacaggaacatgaaatgtatcccacagtttcttgactaaaagtcttgtgtttagatcaggaactccctttcccgtaatcatgatgcaaggagacaatttgttgcaaaagttgtcatctaggagccgctgaaatgttgcatctttttctacaattaatacaaactttgcatctgtaactaaattccgaattccttgaatattcgatggcacagcaacagccgttgcaccacaggtacaattcactttggtgccatcttcctcgatgtatcttaagttgccagcaattaaaccttttgatgtagataatatatgtagactcctccttgacacttttaacatgcaagaaatgtcattgataatattgtcgacgacagtctggttaccaaagagttgactgtcagtgtaatatatgtcccttttggttgcataagtgttgctctgtactaatttataaatcatggacaatattttaaggattagagaaaatttttgagctgattttggtgaatcacttttgatctttctggtggtgcaatgggataccatctgaagacccacagaatcttcaaacctggaggccaggcggcttcccccagttgggggctccctgccacctctcctcagggcagccagcagggactccctgtgtcggtccaaacgtcgaagaacgaggcctcgggccccataggtgcaaaggccatgagggcagacggctgccagaagctccagaagccctgtcctaggctgcgccttg

SEQ ID NO: 451348 - DNA, 1052 bp, Homo Sapiens
tgtggttgtcgttgggtttttttcagtgtgccaaatttgccatttctagaacggaggaggctggcaacgactggaatattcgcttgccagtataaatcaagggtattttgaaccaaatggcgttccacctcaagtcctccatggatggggagcctggaggatgcagtgatgggggttatggaatggaaaaggagcgtgggtaattggttttgtcgaggattgggccaggcagagggaactggggcttttccaggaccactggggaacacagaggctgagaaggggagtgtgggatgggttcgagctggggaggacctcggcctcgccaggctctaaggagagtcacagctcaccacctagggcgctgggaccacacgatgtcatgcctgggagactgaagggctaggacagattctgagaaaatgtggactggagatggggattccaggttctcccgggagtccaggcgagggagttccggcttcagggagtcccaagagctagactgggaaggggctggtgcccaggactatgagaaatccagactcccctggggtgtgaaaaagggccgaggtccggctgagggagagcgagtctgaaagagttcgggctcccttgcgggtccgagagtctaacgaaggctctgggcacccaggccgcacctgaagagcaccaacgactgctcggtccgcggcgcgggaaggagatgtgcggctgaacccctacgccgattacttagcggcggccctatcgagagggtggttcgagcccgaggtggcgccggtcccgtaaatcgtggaggatctcaggtcccctgtgaccaagggcgtagtcagctgtgtcatggcggcttccctgttcgagaaacagttggaaactggaggccggttgggagtcatggtcgttgggcgcacggaggccggttggaagccatggtcgttgggcgccaggaggccggttgagagccgtgctcgttggacgcgcgcagacctggagttagtccctgggcggaacctggagccccgcgcggcgatccaaggaattccggaccc

SEQ ID NO: 451349 - DNA, 1061 bp, Homo Sapiens
ttgaagcgtgccccgccatgtcgggcccggaataaagtgcgcgcccccaggggggattccctaatccccagattgggttacaatgccgtcctcaaatctcagaagttccgcgttcgaagaaggcgattcctgagggtccttttccctttacaagggtctcccattttcttttttcagggatggttaaagcgcccaatttggtttctcgtattttgggcccctttatgcacgggatcttcataaaatgttaggaaccgtggagttcttctggggggaaaagccccccccttccacgattcttccacctccaccgccgtgacgtctgcagctttgcaacatgggcacgttgaaattgcgggcgcttctcctgaagaccacgtttcctgcccggtcggccttccaccctttcaccagggcgaagtctgcccggatggcgcgctccaaaaggaagtggtcgccgttgaactccctcacctctcggggctggctcatgagcgccaggtggccgtccggggtgtagcggatgggggcgcccccttcctggaccagggttcccgtagcccgtgggggtgtagaaggcgggcaccccggcgccccccgcgcggatgcgctcggccagggtgccctggggcgtgagctccagctccagctctcctgccaggtactggctctcgcacagggtgttctcgcccacgtaggaacagacgatgcgacggacctgcctggcggccagcaggaggcccaggccgaagtcctccacgcccacgttgctgctgaccacctgcaggtctttcacgcgggtcctgagcagcgcggcgatcaggttctcggggatcccgcagagcccgaagcccccgatcatgacggtcgccccgtcagagatgtccttcaccatctccaccgggtccgcgtagaacttggcacggagccggggactggtggcaaagcagcgggcgcagccctgggacagcgcgagccctgagccgccggcggggaccccgcgcccgagcactgacgccaggagccgcagcgccgccatagtcgcccggatcggagccaga

SEQ ID NO: 451350 - DNA, 561 bp, Homo Sapiens
tcactgtggagatgcagcaatccccaccgtcatagttgcaaaaggctcggttgttgatggcatcacaataattgtctcccatgaagggctcacagcctttgacacagtgaatcagagcagggtgaggataccacttgagaccagcagtgcagacaactctctctacccgtgtggggttcagccagtgggggatgtcacgcacggtcacgttcattggcaggatgatggactcgctgttgtggtccaggcacgaggtggcacactccgaccctatggcatagccatcagggcactgcagtttgagtttgctgttgagctcgtttggaaccgagcactggccttgcatctcctggcagacatggaaggagccgttccaggtgccatctttccggcaatgaatgacattgctcccaagtccctgggaggcatcactgtcttcacacttgatcctacactcactgttgaactggaagccattagtacactggtagagcccatggaattttggtggaggtgggtcacaggtcacaggacacaagctccctcctgccagctcaatcg

SEQ ID NO: 451351 - DNA, 776 bp, Homo Sapiens
ttgggcttaagtgtctgtagtgcactgtttttgtctagccctctcattgtgcagccagatatttttgatgaatgtgtttgtctgagtagctcggtttctttgttgcgagataagttaggaggttcaggtgttcttaattgtttttgttgttgagctcccgaactcattggacaagaatttttgtccatcatttgccactaagtttgttcgtttacattgaggcttaaaatcatgttttattccaagttttcaagctggtatttttgttaccatctctgtagctccaaccacctggcttcttccagtatttgattgaatagagttaaagacagaatcttgacttctcagaggacgagaaactgaatgtggtatttgcccggtgtccactgttttcattacaggagccaactctggattcacagcttcccaggcccaatctgtaggtagaggaggaaaatcataattgtcagaaggggtactgatacctgaatcatctttaagtggattagaagttaatggctgtctgttcctctttttctgattgaacaacggaacaggcaaacagcctgctgtacttcgagctgaattttcactttaggcttcgcttcatttccttcaatatcaaaatctataattttctattcagcattccaaatttataatatgacattgtcccactagacagtctttcccttctaggccctcctgccaacacgacacacaactttcgccctcagtttccctcgcctccgtcaaccgtcgtccaggcggccccg

SEQ ID NO: 451352 - DNA, 1490 bp, Homo Sapiens
  misc_feature (647)..(647): n is a, c, g, or t
tcagaccagctatactccaaaggaagacagctttctggcaatgttaaccccattccttcaagcctttcaattccttccagaaattattctttaaggactagcttgtttccttaactgtcaactgataccatggacgtttccccttcagggtgttgtcttctggaatatcatcccaacatttgtttctgatattgattttgttgaaaattgcgcttaagtgtctgttagtgcactgtttttggtctagcccctctcattgtgcagccagatatttttgatgaatgtgtttgtctgagtagctcggtttctttgttgcgagataagttaggaggttcaggtgttcttaattgtttttgttgttgagctcccgaactcattggtacaagaatttttgtccatcatttgccactaagtttgttcgtttacattgaggcttaaaatcattgtttattccaagttttcaagctggtatttttgttaccatctctgtagctccaaccaccctggcttcttccagtatttgattgaatagagttaaagacagaatcttgacttctcagaggacgagaaactgaatgtggtatttgcccggtgtccactgttttcattacaggagccaactctggattcacagcttcccaggcccnatctgtaggtagaggaggaaaatcataattgtcagaaggggtactgatacctgaatcatctttaagtggattagaagttaatggctgtctgttcctctttttctgattgaacaacggaacaggcaaacagcctgctgtacttcgagctgaattttcatttaggcttcgcttcatttccttcaatatcaaaatctataattttctattcagcattccaaatttataatatgaccttgtcccactagacctccgtcaaccgtcgtccaggcggccccgtcagcaaccgccgcccttcccgcccgcgaagaaagcgcgggaatcaggctgttcgcaggcgccgtggaccgcgcaggcgcagtggccgccacctcggcgcgatggcatcttcgctgcctgcctggccgcccttggccgggcgcgatgacgttaacgctcttccttggcgttctcacactgtggacccagggatggctccagctccttagagttttgcccagagaggaaaggagactgtcctgtgactggagagacagaggcagatctcctgcccaaccggcctcagccccaccatcgtctaaaaagtgtgccccacttcccctcaccccctggcccttagggtccagacatccgtttgttagatgctggtggccacccagagtgtgcccagagattgactcgaaggccacccgaggtgtctggctcaatttctgggtcggatcagggtcagggaatctgagtccccgggaggctggggacagagctgaagcccaggttcagatggcggccatggaaggcggagagccgtcagcgaggcagcgccggggctgcgggagcttgcgggag

SEQ ID NO: 451353 - DNA, 1558 bp, Homo Sapiens
  misc_feature (1440)..(1440): n is a, c, g, or t
  misc_feature (1463)..(1463): n is a, c, g, or t
  misc_feature (1473)..(1473): n is a, c, g, or t
  misc_feature (1496)..(1496): n is a, c, g, or t
  misc_feature (1527)..(1527): n is a, c, g, or t
  misc_feature (1538)..(1538): n is a, c, g, or t
gggtggcgatcaaagacgagggctcttcattcctaatcccacaaaagcatgctgctccccccagccctgggctttcctgaattgccaagttaggtccctttccaaaggactagcagggcctgtggtggagccagcagaaccacaggagagtgccctgcctgtctcagtggaagtgtattattgttttaaggatagaaccagaggccttgaagggagccaagacagaactcccagcctgtgtaatctattggaaggcacattttcatttctgatgcagccaccttctggaggcttttatttatcctttctctctattgctatgttgaagtaatagggttttttttaacctctggatgtctcgtctgtggttgagtttatggtaatgggtacatgggtcaggccatgtattaacagatgccagtgcgctctgacaagtattccaaagtgttctgtagctagactggtgcaggctcgttgtaccactgcaaccgactgacgttactgtagttcctagaatgctgtgagggcaggggggttcagatcaacataaagcctaacttgctggagttgtagtctcaaggctttctctcttgcttaactaaaacctaaggaccactgtttttggtagcaattatatggttactatccactgcagtcctcagttgttggggtaaatcccacatggcagagtaaggcaccccacagaaattaacttggagagcctgagaaattcccagtggccttggcatagctgtctagaacaccatctctaggaaaatttaattctgtccctggccagctattgttcttccacttcgttttctgctgtcccaaggccagatgagtggaatcaccatctgactgttgtcagtaaaatgtatctggcgtgaacagcaggataacccatgttctccacataaggataaccttacgtgaaaccttcctgctgacaaccatgcagaggaatttttccacttaagtcagagccttcctccccatctggaattcacagctgttccctggcagcacacaggagggtattaaggacctttgtgaggctaggtacactgtccacacctctttggggaagttacgatgttttttttccatcataattcagtctcttcttattctacagtgtgcactttatgcctctcgccttttgataatagttgttcagtgaaggaagtcagctgccagaatattaagaagggtctccctttatgtcaggtacaactgttagggcggccttcccatttactttaggtttcaagaggattcaccggaagcacatgccccggtctaagtcccatttgaaacagttctgctttactgagaccctaggccggtctccttgctgaccctaagcgctgctgcctaggtgccatttcctttcctcctcagtccaaatacagggtgcacattttgtcaacttaatgncagtacaatctgtggtactcccnaaggactttngggatttgaatgaagacttccanggaagaagaaactgagaagccagtgatttgnaagaatttggncctgggtttcaaataaccct

SEQ ID NO: 451354 - DNA, 440 bp, Homo Sapiens
tactgtcctttatacatagaacaaagctccttattcagcaactctctactgctaaagcattctggtatccctgccacttagctcccttactcatgtcttacgaagccttaccccatgatgcaaggggaattttcaggctactaataaaataccagctggacaaccaggataacccttcttacattggcctttcttttcaagatttttaccagcagtgtcgggaggcattcctcgtgcaatagtgatctagacactccgggcccagttaactgaatttagggaccacaagcttataagaacaaagaagggaactgatggagtagagtatttattaattcctgttgataatggaacattgactgatttcttggaaaaggaagaagaggaggcttgaagctttcctttattcttgaatctcccatggaagggttgtaccccag

SEQ ID NO: 451355 - DNA, 804 bp, Homo Sapiens
  misc_feature (641)..(641): n is a, c, g, or t
tcgtctttgtctctcctttaacctggaatgatagatatctaccacagccatcttcagagcatgtaaaatgtccgagtcatcttcaacaaaatcaatgtctctcaagtcccattctgcataattgtcaaattcctcaatgaaatctgctcgagctggcatgtacccggccatgtcccgagaaagcaaggagtcaaaggtaggtcggggagggtcatctgtagagtgaaatggaatggctgtgtcagcagtttttgcttcctctgcttgtttcaggttcagcagggtagatgcaaacagagggttattgatgaaatgcttcatatagtgcttctcacactcctccttggtcttggtgcacatttgattggctacatcctgccaatttccaaagccacagtccatcacagcttctaaaagggccatttcttcttgagcagtccagctgggatcaaggacaggaaaatctgaagtcattatttcataagtatgatcgctttgatgtttcttgtactcaaagcctcgagtgaaacactgcaagcagaggaaaaaaggaggtggcccacattcagcacacttgatataaggctccatgaggtaggaggagcagcctcggcaaggtggcttatcagagggatcattgnctaaagggacccaaacggtccattccctaattggcaacgagtgctgctttggtcttcctcagcagagcttcttcaagacttcagaaccggccaacacatacacccaagcttgatgactccctcgccgagaccccctaatccgcgccaaagagccgccgtcgcg

SEQ ID NO: 451356 - DNA, 460 bp, Homo Sapiens
gtaacgctcctgggcgggctcagtgccacatcacgaaatgtgacaggatagccttgaactcatcaattgctgggggcacctcaaactcaactccaaaattgatctaatgaactttgccaaaccacattcccttcttgcatttctgagagaatggattcccattcatctgactacagtgctaccctgaaagcagatccagagactaagattcacctgcaggtgattcatttgcaaggtaagctgtcatcagttggaggtaagcggaagacagtagagagtacagagccctggactgtgactcagaggatgagcaccagatccagtttgctgtgccacagtgtcctgaagattttcctcagataatctttcatctctttgttcctgagactatatattagaggattacagagtggtgttatcacagaatagaacaaggtcacttgatattcttggcttgatg

SEQ ID NO: 451357 - DNA, 1071 bp, Homo Sapiens
taggggtaatttcctttcccaattttttggattgccccaaagaaaatggaaaatttgggtttggcgcacagccggaaagataacccttaattaaaggatgttaattttccaagggggggttccaggggcgctttttgttccaatcccccttttttagggcggtgggtgcataacccaggcaaaagggaaatagcttccccatttacttttaatacatagcctattgggatagttatcttcttgagggcaacttgtttctgccaggcaaagtctcaactgaacttggactgtataatctctcctaccacctggcaagaaatccctggatatgcatatctctctaacttgttgaggtgtcaaagcaaaaataaaaaacttctcttgaaatcgctgaatactgctttgaactaaactcgtgggcttgatgagaacatcaaggacatcataaaagggcagattttttaactgcacatcaggatggacaggaggaattgggggagatggctgctgcatctcaaatgtgggcttagtatcttgaagcagcacagaaccaacaggagaggatggtgagtgaggtgtaactgaagtggaaggcaacgagtggattccagccacggccaagtcaggttctacaggtgatgagccaccatccaaactgaaaaccgatgatttgattgtggataaatcagaaagtccttcaagagttcgtggatatcggcgtctatacaattctcggattttaatctgaaccgcagggctgcagccgctcttcaataaatgcagcgccctcatcaggaggtcatgcttgcgtccacttttattccgtccagcaaagcctagtaatacttgtagttcagaaaccctaaaactagaaaccatattcctcaactcttcgaaatccgccattttataccacccgcgggcgccgccgccgctgccgccgcacccactcccgctgccgccaacgacgctgccgccaccacggccgccgccgcctccagcaccatcctgcactgggcgccgcttaagacgccgcggccgccgccgctacagccgggcccgtcacccgct

SEQ ID NO: 451358 - DNA, 968 bp, Homo Sapiens
gtcagtcataacttttaattgaatgatccacaattttggatttttcactcctccagttagaataaataatcaggagttcactatagtgctaaagagtagatattaaggaaaggtttaaacaagaatgaacaagaagaggtccttctttagtaagacccctagtcctaaagctctgtgggatttacaacttagagccacaaactaaccagctcatcagagaatgacctgtcagcactgtcaatatcttctctaatgaggtaacactatggtattggcacctggggaattgtttgcctgtagtgaactggcacactgtattttccagttctaggctctcacagcagcttatgccaggattctgtacaaacttgcagctgggggccctgtggaccctgcgcatcacttctgtggagctgcggatgaagttattgctccacttgcacgatccgtttgcttctgaaacttttctccagactgtcatgtcattgcaacactctttgtcattacccgaactgtttcccttggggtcattataatgtaaacttctgaatgtcagtaatgtggaagacatatcatccttggacatgctgaggctggtatttttaactaacaggatcgggttcattaatatctcaatggtctgtttttcttggccactttttgccatgtcatattgcatctcttcgtctgtaaattcttctttaattatcttcattgtgctttctgatgcttctgcaagaaccaggcccaggctgagcagcagcagaggaaaggtctccatctcagatgtagtgtaatctcttctgttcctgttcagtttctattcagatgctgagggctctgtttacctggtgacacccaaaattcttgaactaagtccaaatgagcatgaacagctgaagtctctcaactgaaaagatcaggacagagagtgctctccaaagcctgtgacccacccatgcctgctc

SEQ ID NO: 451359 - DNA, 1695 bp, Homo Sapiens
  misc_feature (1067)..(1067): n is a, c, g, or t
  misc_feature (1675)..(1675): n is a, c, g, or t
ttcacttctgtggagctgcggatgaagttattgctccacttgcacgatccgtgtgcttctgaaacttgttctccagactgtcatgtcattgcaacactctttgtcattacccgaactgtttcccttggggtcattataatgtaaacttctgaatgtcagtaatgtggaagacatatcatccttggacatgctgaggctggtatttttaactaacaggatcgggttcattaatatctcaatggtctgtttttcttggccactttttgccatgtcatattgcatctcttcgtctgtaaattcttctttaattatcttcattgtgctttctgatgcttctgcaagaaccaggcccaggctgagcagcagcagaggaaaggtctccatctcagatgtagtgtaatctcttctgttcctgttcagtttctattcagatgctgagggctctgtttacctggtgacacccaaaattaaggttgcaaactgtccttcacttacgattatcccccaacgccccctcctaaatctgatcaatcgcatggaacttgatggttacaaaagacagagctaacaactagcgtaagtgcaccttcttctttgacatgaccttgaactaagtccaaatgagcaatgaacagctgaagtctctcaactgaaaagatcaggacagagagtgctctccaaagcctgtgacccacccatgcctgctctaggtcactgtatgagtctctagctctcacatacaggattgaaatgccatagctcagaattagtgacaacataatctggcctttatttgccaattgccccttatttcttactacctcacaatacaaattctcccctccaacaatggctataatatagccattttctgtactacttaagaaatagaattatagactaatagacttggaaagaacttgaaagattatctaattcaagatcctcactttacagacaaggaaactaatgaatagagaagaagaggacttcatgaaatccccagaattagaaatctctctttctcgtccttctccttctagctcagaaaatggccgaaaggtttnggcaagcaaccttcttgggagaaatgcaaataccattgatttttcgaggcctctcatggatgaagacatgctcctttttacaagtgtggtcaggttccctgataactctttgtatgatcatgtggttgcagtaccttgcaggaacgggaacgtcattctgagggtagtccacatgcaagtgttctaaagttgacatcactgcttcatcattcacctcattttcccagaacagaagcaccaagaaaattatcaccattattatcatcagagtgcagatccttttttaatagcgagaacatttaaaacctactcttcgaataattttgaaatctacaaaatggcagcatggcccaggagtgtgactggcagtgaaggagctgggaagaccttggatgcaggaaggtcatttaaagcaaaagattaagaagcagcaatgcccctcttgtggcaagagttggcagcgtgcggttggtatgtcaatgcatccaaggtccaagggcctggattgtctgccaaatgcttgggagtagtttgatcaggttgacatgctccaacagcattgtggactgggcccacacctacgctgaggtgaccaatgtctccaactngtggatctggctccacttcc

SEQ ID NO: 451360 - DNA, 1197 bp, Homo Sapiens
  misc_feature (73)..(84): n is a, c, g, or t
ttttatggttaaaggggaaatccctattttggggcggcatccaaccggaattgttcccaagggccagggttgnnnnnnnnnnnnaaacaaaggggcctccagccacggagggcctaggggttaacctggttttccagggaacctttctgggggaagggggccagggaactttgggcaaattttccttaagagccccctgaattttcccttcaaccacgtggagcatttcaagcttcccatctgctcccctttggccaaggggcttggagggcgtttttcctttgactgggtcggtccctgctgagcctcctgcgttgcttcctcccatctggggttctgctcttggtggcgagttgcttgtgcaacatctccggttctctcccaccagttctagaaacctgttctggtttctgcttctctccagggtcccccagttctctctcaggattccttgagggtttctctggctcctcctgatgtttcttcaggcctggatctggctttttagccctgtcccctcgagccctccagcatgcctcttccagggactgcactcccaaggccctggccgcctcctgaaggggccttagctctccaggctgcagctctacactctccccatacacaaagttcaggagctgggcaaaggtagaagggctgatgccttctcccagagcccactggcccctgcggcccagctgctggctgacacctgctagcaccaggctgtgggcggggaactcctggctccctacggtgatcagagtatcacagagtgctggccggagcctggctgctagctgtaccagccgatcagagccataggggctgggcagtcttatggggggcagggacattgtgccttggcttgggtacctaactcagaggctctaagaggaagtccacagtgtgaggtccatggttgaaaggggagggaggaacatctcatctcatttcaagcctcatttggaggtgggggtgaagatgaaatgacgtgacgaatatgagtgtggtttgtaagtacacagtagcattcagtggtatggttgtttcttagagatgacggcagagcacacagcggcccagaccctgttcctccttccctttcagcctcacatacacccaggacggcttaaggccgagtgaccgttaaaattccgctctcgacgaattcgagctcggccgatttggcctgat

SEQ ID NO: 451361 - DNA, 844 bp, Homo Sapiens
gcgggaagggcacggtgtccagctgcccgtgcgcaggcagcggcgcgggctcggaccgcggcagcaggagcagggccggggtcaatccgtgtgaagcagcggtggtcgtcgcccgaccagcagtgcctgcagccgggcggtactcagccgggagtcctctccgcggggcttgcagggtcaaggccagcccggagccgcagccaggccccccagcagggcggtccaccgctaacaccaggtagcgggtgtctcgggaggggcagaggctctgggcacctggcagcccagccctcgtcacagtgacctcagggccaggcccagggtacagcaccagcagcgccagctctggggggccagctcctccaggcgggggctcctggaacctcagcgagggtgttggctcccaggtcacttcctccaggtgtaggaccaccaggcgctgccccccagggtcccgcagccaggcccccagccgccgtagagagggcaaggcagcctgcctgtcaccggtgttgcagaccccgaaggtggccaggtctcgggggccccagcgggccctctgcacggcccccaggaaggcctgctcataggcgcttagagcccccaccacccgcaggggggagctgctgccattgctgtccccgcccagtgccaccaggcacagaggctcttgtgggctgcctggaggccagtccaagtcttctcggaagatgaggccactggtgcccacagctggctcctctgctctgagggcctcagtccccagcagagcccccagggcagacagcactagggccaggctggtgagaggcaggtcccgcatcgtgggtgctgccaggggctg

SEQ ID NO: 451362 - DNA, 874 bp, Homo Sapiens
atagtacagagactccaggtttgtgtccataatgatgatgaaaggattggaacaactgggaattttggaggttcctggggctcaggtatggtccgttcagcaacattgggcttgaaggactgggcggggtagtggaggaggaaacacatgctgagtgccgtgagaccctcatctgagcacttgttcacgtcggccccacagtccaggagaaggttgacaatgtcgttgtggcagtgagtctggaaaagccgtgtcttcatgtacatggtgccgtagccttctcggtggctgaggtaaaatgtgcccgtgaaactggagccatctggccacatgtaggtacccaggccatggcagtggtcccggtaaaactgcccatggtatgactcgcctgtgggccaagagaatttgccatatccaagcttcatgttcaacccaaactccccctggtacatgcaaccatcctgccactcctgcacaccctggacgagctggatgtaggactccctcaggtcctgcgccctcagcgggccctcagcttcctcctcttccttctcaggggctgctgaaacatcccttgtggcgaagacagcgtagttcttcagggaccccggctcctcggcagcaggggtctcgccgcccttcccctctagcgggcgttggcggctgccagccccagagacttcgtcctctaagctaagggaggcatgggccccttccatgtctgtggtcttccaaccaagcaagactcgaagagctcgcgccggacagcagggagaccgacgggactgcagccaccgcgacgcccgcgctcccgtcccgactgcttgccagcctgcgcctacggagagcgtcgcgtttcctggagacagccccg

SEQ ID NO: 451363 - DNA, 2225 bp, Homo Sapiens
  misc_feature (1077)..(1077): n is a, c, g, or t
  misc_feature (1892)..(1900): n is a, c, g, or t
tttcggcacgagggcacgacctgacagtaaaggagaccatccacatgtttggagaccacacaaaccgggtgaagcgcatcgccacagcgcccatgtggcccaacacattctggagtgctgctgaggatgggcttatccgccagtatgaccttcgagagaacagcaaacactcggaggtgctgattgacctgacagagtactgtggccagctggtggaggccaagtgcctcactgtcaacccccaggacaacaactgcctggcagttggggccagcgggcccttcgtgaggctctatgacatccgcatgatccataaccacagaaagagcatgaagcagagcccttcagcgggtgtgcacaccttctgtgaccggcatgaaaccccttccggtacggtgcagcccagtattacgtagcaggtcacctgccagtgaagcttcctgactacaacaaccgtttgagagtgctggttgccacctatgtgaccttcgagccccaatggcacagagctactagtcaacatggggggggaacaggtctatttgtttgacttgacttacaagcagcggccgtacaccttcctcttgcctagaaaatgccactcctcgggggaagtccagaatggcaagatgtccaccaacggtgtgtccaacggtgtgtccaatggcctgcaccttcatagcaatggcttccggctgccggagagtaggggacatgtcagcccccaagtagagctaccaccatacctggagcgtgtgaaacagcaagccaatgaggcttttgcctgccagcagtggacccaagccattcagctttacagcaaggctgtgcagagggcccctcacaatgccatgctttatggaaaccgagcagcagcctacatgaagcgcaagtgggatggtgaccactatgatgccctgagggactgcctcaaggccatctccctaaacccatgccacctgaaggcacactttcgcctggcccgctgcctctttgagctcaagtatgtggctgaagccctggagtgcctggacgacttcaaagggaaatttccggagcaggcccacagcagcgctntggtgatgcattgggccgcgacatcacagctgccctcttctctaaaaatgatggtgaggagaagaagggacctggtggcggcgcccccagtccgcctccgcagcacgagccgcaaggactccatctcagaggatgaaatggtgctgcgggagccgaagctacgactatcagttccgctactgcggccactgcaacaccaccacggatatcaaagaggccaatttctttggcaggagaccaccaacctggtccgtgtgctccaaggggatgagtccattgtcaactgcctgcagccacaccccagctactgcttcctggccaccagtggcatcgatcctgttgtgcggctctggaacccccgaccagagagtgaagacctcacaggccgagtcgtggaagatatggagggtgcttcacaggccaaccagcggcgcatgaatgcagacccgttggaggtgatgctgctcaacatgggctaccggatcacgggcctgagcagtgggggtgccggggcctctgatgatgaggacagctctgagggccaggtgcagtgccggcccagctagaccctccagccctggtccccagcccctgctactggctggaccctctgccctgggcaggaggtcaggggattctgttttggtttgtcttccccaccacccttttttttcatttacccctgttatgatagttagtttggcgttaggggtggaggttgctacaacttgctggctttcggactctgggctgattgtcccctgactatccccagccctgaaaaaaagagcaggaggggacacccctccatatgnnnnnnnnnatctcctgctttcatgtccctggagggctctggcctgcctcaaaaccccttctgcctcaggtggggaggaacaagctgaactgtcttcagggactgtcctgccctttagctggcagcagcaggaggagtgggattcccaattggtaagggctcgccttggcctgttgccactcttgctccctagcctgcaaggctagctcccctgtggtcttcaggaaaggttttgaaaaaggatgggtcccaccctccctccagagccaccagtgttagagcggagcccaaaggaaggatgggagccctggagtgggcaagaccaggccacctg

SEQ ID NO: 451364 - DNA, 790 bp, Homo Sapiens
catatcttggtacattgttgaaaggatggtcttgaattaccagatattacttggcatgtgttaggagagttgtcttcaggttccttcatgtcttggcatattttggaagaattgtcttgaagtacagatatttcgttggtacattttaggagagaggtcttcaggttcagacacatgttggcatgtttcagaagaatggttttgtactgctatttcttggtactcagaaaaattctcctgatatatgttactttcttgacatatttcagaaaagtgttcctcaggcacaactttttgcggggaggctactgaaggaaatactttggttatgctcccaggtggctcagtttttttctctataggtgccagtgctttctccatttccttttctatctgtggctgaggctccaccttcaattctgtgttttgttgtctctttctgcctcttcgatttccttttcctgttctctgctgcttgcgttttttctgttctccaaatagccattgtgatgtttccttttcatgcacttcagcttttctttttctaagtagttctctgtttctcaaactccaggttccaatgacttctggagaatggttctcttcttgatgagggtcaggtgtctgatggtgcttcaaatgagattggtcctttcccaaatccatcttgctgcaataccttcctgctattttggtctgacttccacaagcagcctagatgcttccctgttttgccgtgaatctttctaacacccacagtacctatcttcataacttctggttgttcagt

SEQ ID NO: 451365 - DNA, 853 bp, Homo Sapiens
tgggggtgtgtatttggtatgagaggtattgggtaaagttgtgttttgttctggcttttgaatgaaggtttttaatctccagtggaggcctgggtttgggttggtatttaacaggacaagaagccctgactgtgcatcttaaggagcttggaggtgatgaatcggaactgctggtaggttctgcagctgcgcccgattgtagttgttctttagagcacacaacaaacatttctcgcagcaggtcccacagtgatgaaggggatcccgtgagccctgttttgttttttgtggtgccatcgtcttcttgtgaagagcacagggtgctccattgactccactggctccatccattttcttgggcctgagctgtggttctctgtgagtctttcccatcagcctgagttcctgctgctcctttggtgctcttctaaggggaagcttatagttcttctgtgtatttattaaaatgtccatcttctcatccatatctttctgcatttccttcataatttccacaaattcgtgaagtttatcaaaatccttgtccattagatcctttatctgttttatctcctccattttctccttgagctcttctctcacttccctgagttcattctttaggtcctgtgtcactcctgctttggtaaaccgcccttcttgtttaactgctttgtaatcaaatgttttggtcggctctggcttcaattccaggcaaactgccttgtagttcttgctcagatgtgttttcttcaattctgccctcttggccgacatgatggaggaggccagggtgttcttcaactccccacaacagccctgggaccaggccactgtcctaggcaacttacag

SEQ ID NO: 451366 - DNA, 840 bp, Homo Sapiens
tctctcctagagacataagtaggcttcaccgccaatttgcctaaggtgttcagcaggactattgaaggcctggcagctgccggaggagagcctgtctcccaagccgggccttctgctccttgctccagagggctttgagcttgcggtagtacaccttgcagctgaagccctccctgaagcccctcttgatgtggctcttgaggaagtccagggtggggtacatgcggcagcaggccacgcacttgtagccattctgctgtgctgggtgccatctggaagccattaggatgtcctgggatgtgatggagtccaggccaatgcctggatttcttggtggcttctcgagggcaagtgttctctggggaggaagaggacgaacagatgttctcagccatgtcctcagaaaggcagttgtcccacttgccctcatcctgctgcacctctgggaagtcataggcctccagctggctctctttgtctgcacacacgaagtagctgtagggggagaaccagggccggtagatagtgcagttccgcctcagcttctctccgtgctgggtgtcccccaagctgcagtctggtgagagcactgtgttctgtatcccttgcctgacaatgatgctttggtactggggtggcagggcctgagctgggctggatgcctcagtgggtactgctgtctttgcaatgtctggcaggctggtggcacgagagaacataatgtcgggaaaagcactcagggcggaggaagagattggaggtccagagatgctgaggagtgagaagttctccatattctgaccactgcgggggtacagagatcacacgcctgctctggag

SEQ ID NO: 451367 - DNA, 785 bp, Homo Sapiens
tctcgatgaaatagacattctcggggctacctgaagaggggcttcagtctccatcaaaagcccgctccagtcttttcttcacatcagtaagtgcatttgtctctccaatcatttcatgccaactcatgaatgatttcagatttccaaaaccctatgtcattgacacgttctcccagattttgggttgtgtctgcctgagtttttcttgtttgttgatatttgtcttgaatcaggcgagatgtatccactcttagtttctccgaattatgtcgggaagtgttggactcttgatagttggttaaattggacctgtaccagtcatccggtgtgtatcttgtgaagaaagtggttctgttggaaacaaagggaagcatggtattctcggacaccctctgtgatctggtgcagtacggggccacgcttggggaattggaggcgactttgtagtatgtgctgggtctccaaggaaggctcaggctatgggtcaaattggagtggggaaagcggtccctgtagcttgaggccatggtactgatggctggtagaaagttggttggtgttggtctagggtgggcgtaagttgtcgttaaagtacaacctacacgttccatgatgccaaaacactatttgtaaatctctcctgtgattcagcaattcaatttcttggtatgtacctgtcggcggatgcccggcgaggggcgggaaggggctgtgggaggaaggggtcgcagcctaccacctgcagccctcgactggggcccagacctgtctggcctggccccgcc

SEQ ID NO: 451368 - DNA, 973 bp, Homo Sapiens
gggctcaacaaggtggagccttttggtataagcttttcccgcagtttcgtagttgcagcaggtaaggcgtggcctcggagggagccccgtgctagcaggtcccttcctgaggcctggagttcttcttctactgtctgtggagcaggtccgggctgcttctggtagaaatgggccttcttgagagtctggctgaactgacaagagagtcctgagatcctaaaaccagcaatgactgggactcagctgggggcatcccaaggtcatgggcatcttgcgggggcaacatctgagccatggaggggagcactgcctgggcctcagtggaaggcacagtcgggcccaacaatgtttcgtcagaaggtactgtcgagaggccagggtaaggcactggagggttcccagtgtgggacattattgggattccagtggaagctgagactggcagcccactggggggcatccttagattcccaccgaagggcctggctacccttggaatattgggctctcctacgggcattagttggggcccactgaaaatcgtcatctcttgctgagggggagacattctctgacagtaaatcatccgggaaggagtgagagtcgcttgggggcagtagctcataccacgctcaggcagtggcatactgaactgtggccccccttcattcacattctgccccggcgcctcaacagacaccaaaggggaccccagcatctctgcgctgtgaggaaagtgctgaatggttggtaggccttggttccaagaggtgtgcactccagagcttccagaagatgaagacatgttcaagatgggcgctgagttctcgttatcctgggcagcctggtgcgccgcctgccaccggctcagctccccagcctcctgttccatctcagcctgcggtcggccgtacatgaagactgggtggggtctagactctctactgaagagacaggaaccagccaccactgc

SEQ ID NO: 451369 - DNA, 1784 bp, Homo Sapiens
  misc_feature (675)..(709): n is a, c, g, or t
caaggggggtaagcctcctggccacaacaggaagcgtgtgtggaaaaataatggcgtgctcgttgaaaacttgtgtagacctccaccgttttagggggccacgcaatattaagggtgccaatgaggcggagttttccaagcacctattaggcctttcttttaaatttttcaaatttcagggagaaaggggggagaggttttttaaaacaaagggaaaccttctaaaaaatctttaagggccgattttgttccagggccaggtttgggggcccggggggcccgaaaaaaaaccttgggcctcgcgttttttgaaattcacccccctttgcatccggggcctccagtgtataattttatccaaaatcctccgcattcgcccaattttgccttcagcaacgcataatgccgctagttaacctcataatacccttaaaagtttataatttactttagagctataattctcgataggtagcctgacaaaatatgtccccccccaaaaggggggatccttcacaaagatcccaaggtagcatttttagcagtcccggcgtcgtaaaactgcggccagttcctagatgataatacgagtcactatagggaccgctttgcacaagaaagctgggtccgcgtaatcttggtcccttttgaggtatttttttgattcgtcctccnnnnnnnnnnnnnnnnnnnnnnnnnnnnnnnnnnnaggcttttagaatccattaatccattcttttccaagcaaaggtggtaatgaaaatggaaaagaaaaccattccagaaagaagacaaggaagagagtggaaacaatattgctgtaaaatacactgccgtttcagacaccaggagcctccttccaagtcaattctttccctttgctggccctggtggcttgccaggttctggtggcttggcgggttctggtcccttgccctgctgggtcctttgtcctttcctggaggaggaaccagcatatgctttttggccttcttgcctctgaagtggtttctttgaagacacacatcgataaaagcaaaaactccagccgcaccaataaggatcacagcaagtaagtagtggagattcatggatcgccgacttctcacagcaaagaccacggctcccacaaggaacgcacaagcaatcaggtcgttgaagaggtcagaaatgggccacaggatgaagggtatgtatctatgaatggcaaagctgtacagtaagatgaagaagctgaagaaggatgtctccatggtgatgataagcctcaagatggggtgcacggtgagtgaggacaacagtatcattgcagctattaggcagcccaaactccgaatcttgatctcagcgtgccccaagagccagaactctttattgctgtcttttaattcccaccggtagcggcgacaccccctcctcgtgcccacttcgtgcttgggctgcaccgccttttgaggtttgtccgatggctccttatggtcctgcaccgccttttgaggtttgtccgatggctccttaccgtccttcttgtcttcctcgggtttggccccgggtggaggtggagctggtgctggctctggcttggccccctttgccgccttaggtgccatgactgactcggtgtccttggcttctcacagctggcctgtttcttctctctcctgctgtttctgggtaggccaggcctactagagtgcctggtgtccaccgagcggctcagagggcgtgctcagctaactgccaggaccaccgaatgccaactcccgcgcccatcccgggaatcc

SEQ ID NO: 451370 - DNA, 2089 bp, Homo Sapiens
cacattgcttctctttattttcaacagtttctttacaacagtctacacagggattaactcctacatgtacttcccaagccagaatctccctttagaaattcagattctatttctaactctataagatgtatctccccaaagatcacattaactcctcaagtcaacatctgcctatccccaacttcccctttttttcctcactgaacatttgtctgaatgttttttcctcactgaacatgttttcctcactcacactgaacatttgtctgaaactgtggctgctttgttgcttcaagatgcatgcacatcctggctttagtgtccaagtatgcagaatgaagcatttgatatgtgcacccagctagttagggcatgaaacaggggcacaggatggggtcccgggtcatagaaggttctgtcccccacagtgaggacaggggtttggcactaagccagaccatgctgggccgccccaactcacacagcaactccttgagcctggcatgcagataggcaagcctctccaggtggagggtaccatggatgtcctcataactctccagggggacaggatacagcacgtgggtcagattgctcagcccgatgaggtgctgcaggagactctgcaaggcagatatggagatggaattcccgtagaagcttaaggttgtaagctgggagcagtggctcagggaaggcaggagggcaaggagctgatcatccgtgatcccacactcatcaaagaccaggtcctggagggtggcagaggctctctccagcagagcttggaggggctcgggacttacatcggtcagcatgaccccacttagactcaggacacttagctgactgacgctgggactctgggacagatgcatcacatccccttccgaaagccggcagttagttattgagagggtttccaaggggttcatcacgtgcctgagcaactgatccaggcggcctctaaggaaaaataaagagtccacatagagagcctgcaggcactgcagactgaggaactgagaggtgaactgggcgaatatactgctcttcttttctccggggaaatgtaggaaagatgcatggatgtgggagaggaggagtctacgcagattaatcatctggcccagggtaaggagaaaatttcgccaaggtgggtagcttccaggtacaagtcacttccaaatcttcaatagagtccagctgcaccattttcaggatcatcttgatatcctgcatgggcattgccaaaatcttcagcttgcttacagcacaggcgtagtacatttgttctttcgcttcacttgtctcaatgaggtaggagaacaattcatcacaggcaccttccttgaggaacaggtctacgagcacctctactggaatgaagggctgctctgcctctgtgctcaaaccatctacttttcgcttctttgtcatgggctgagctgcttctggctctggaaatgagtacagactggccctgtttccagaccatacagtccagaagtcctgatgagagttcttccgtaaatccagcacttgaagtttccacctcctggggcgaacctcctgggcaaggagcacatcaagtccatcaagcacagctttgaaggtctccaggtgaagatgttgtcccttcatcagcactcccagagggaggcaggtgaagggccaggcctgcaccattgccttcagggtctggctgtgtctcccgtcaaaggctgccatgaagagtggcgggaagagctccctgggcagcaactccagggcggcaatggccagggcctcatccttcagcaggctctgccctgccagctccacaagtctccgtgggcttgtccacacactcatgctgatgtatcggctctgaatggaaccccgcaaacgccttcgttccattttgaagcgacttaggctggcctcaggacctccaacgcttggatttctaggtctcagtcacttgttgccacgcacgtctgagagtaataatcaaaatggtttttcctcagagagttcaccacaccgcgaagttgctggaaggaaagaacgagacaatggctcagctaagcgccctagccgctgcgtg

SEQ ID NO: 451371 - DNA, 1145 bp, Homo Sapiens
tttaagggaaaaataaagggttcccccatagagaaccctgcagggccttgcaggattgaggaactgagaggtgaactggggcgatatactggtccttccttttccgggggaaatgtagggaagattgcatggatttgggagaggaaggagtctacggcagattaatccatctggcccaggtaaaggagaaaatttcgccaagggtgggtagctcccaggtacaagtcacttccaaatcttcaatagagtccagctgcaccattttcaggatcatcttgatatcctgcatgggcattgcaaaaatcttcagcttcttacagcacaggcgtagtacatttttctttcgcttcactttctcaatgaggtaggagaacaattcatcacaggcaccttccttgaggaacaggtctacgagcacctctactggaatgaagggctgctctgcctctgtgctcaaaccatctacttttcgcttctttgtcatgggctgagctgcttctggctctggaaatgagtacagactggccctgtttccagaccatacagtccagaagtcctgatgagagttcttccgtaaatccagcacttgaagtttccacctcctggggcgaacctcctgggcaaggagcacatcaagtccatcaagcacagctttgaaggtctccaggtgaagatgttgtcccttcatcagcactcccagagggaggcaggtgaagggccaggcctgcaccattgccttcagggtctggctgtgtctcccgtcaaaggctgccatgaagagtggcgggaagagctccctgggcagcaactccagggcggcaatggccagggcctcatccttcagcaggctctgccctgccagctccacaagtctccgtgggcttgtccacacactcatgctgatgtatcggctctgaatggaaccccgcaaacgccttcgttccattttgaagcgacttaggctggcctcaggacctccaacgcttggatttctaggtctcagtcacttgttgccacgcacgtctgagagtaataatcaaaatggtttttcctcagagagttcaccacaccgcgaagttgtctctggagcgcgcgttcctccctgctcccgggagtcggtttcccatcccgggaattccggaccc

SEQ ID NO: 451372 - DNA, 1485 bp, Homo Sapiens
  misc_feature (835)..(867): n is a, c, g, or t
  misc_feature (1122)..(1136): n is a, c, g, or t
  misc_feature (1161)..(1161): n is a, c, g, or t
  misc_feature (1184)..(1193): n is a, c, g, or t
  misc_feature (1317)..(1325): n is a, c, g, or t
  misc_feature (1355)..(1355): n is a, c, g, or t
  misc_feature (1359)..(1359): n is a, c, g, or t
  misc_feature (1368)..(1424): n is a, c, g, or t
ccattacacgcttccggcggctcacgctggtaccggtccggaattcccgggatgggaaaccgactcccgggagcagggaggaacgcgcgctccagagacaacttcgcggtgtggtgaactctctgaggaaaaaccattttgattattactctcagacgtgcgtggcaacaagtgactgagacctagaaatccaagcgttggaggtcctgaggccagcctaagtcgcttcaaaatggaacgaaggcgtttgcggggttccattcagagccgatacatcagcatgagtgtgtggacaagcccacggagacttgtggagctggcagggcagagcctgctgaaggatgaggccctggccattgccgccctggagttgctgcccagggagctcttcccgccactcttcatggcagcctttgacgggagacacagccagaccctgaaggcaatggtgcaggcctggcccttcacctgcctccctctgggagtgctgatgaagggacaacatcttcacctggagacctttcaagctgtgcttgatggacttgatgtgctccttgcccaggaggttcgccccaggaggtggaaacttcaagtgctggatttccggcagaactctcatcatgacttttggactgtatggtcttggaaaccagggccagtctgtactcatttccagagccagaagcagctcagcccatgacaaagaagcgaaaagtaaatggtttgagcacagaggcagagcacgccttccttccagcagaggtgctcgtacacctggtttccctcaaggaaaggggccctgtgaatggaatttgcttccccctaacctaggatnnnnnnnnnnnnnnnnnnnnnnnnnnnnnnnnntgggaacttaacccccctgggggcctgggtaaggaaaaaccgtgaacaagatatttttttggcccaaggggcccacccgcgggccaggggaccataattccctgcgagaatgggaattccccctgtgaaaaaaaattgtggggtgggcccaaagctgtggggaaaatttctcctcatttttgggaaaaagaaatttcgggggaaaaaagggtggagctctcttggttgaaaccctgcggggagaaagagctttannnnnnnnnnnnnnntttggggccggcaacaaaaattttntctcttcccccctttacccaccnnnnnnnnnnccccgaaaaactgggtctcttcaatatccctgctggccgtaaaaaacatttccctatccccttttttccccccagaaaattacacatgtgggggaattcttattccccccaaacaaattttttnnnnnnnnnggggcaacaaagggcgagaatagactcagncttnatttatttnnnnnnnnnnnnnnnnnnnnnnnnnnnnnnnnnnnnnnnnnnnnnnnnnnnnnnnnnttgcaaatagtgatcccctttgcgagggggtcttttttcttaagtgggggggaacccccct

SEQ ID NO: 451373 - DNA, 842 bp, Homo Sapiens
ggtgtcactttttcaatgaggtaggagaacaattcatcacaggcacctccttgaggaaccaggtctacgagccccctttactggaatgaaaggggctgctctgcctctgtgctcaaaaccatcttactttttcggtttctttggtcatgggctgagctgcttctggctctggaaatgagtacagactggccctgtttccagaccatacagtccagaagtcctgatgagagttcttccgtaaatccagcacttgaagtttccacctcctggggcgaacctcctgggcaaggagcacatcaagtccatcaagcacagctttgaaggtctccaggtgaagatgttgtcccttcatcagcactcccagagggaggcaggtgaagggccaggcctgcaccattgccttcagggtctggctgtgtctcccgtcaaaggctgccatgaagagtggcgggaagagctccctgggcagcaactccagggcggcaatggccagggcctcatccttcagcaggctctgccctgccagctccacaagtctccgtgggcttgtccacacactcatgctgatgtatcggctctgaatggaaccccgcaaacgccttcgttccattttgaagcgacttaggctggcctcaggacctccaacgcttggatttctaggtctcagtcacttgttgccacgcacgtgtttttcctcagagagttcaccacaccgcgaagttgctgttgacaggtcacgcctgggaagcgggtggggtgtcccggagcggtgctgaggcgctgcaggcccggcttctggctgcgggggagctgtaccctgaagcctcgatcccgggaattcc

SEQ ID NO: 451374 - DNA, 981 bp, Homo Sapiens
agcgaggcctgggtggcgaattcggcacgagggtggtgaactctctgaggaaaaacacgtgcgtggcaacaagtgactgagacctagaaatccaagcgttggaggtcctgaggccagcctaagtcgcttcaaaatggaacgaaggcgtttgcggggttccattcagagccgatacatcagcatgagtgtgtggacaagcccacggagacttgtggagctggcagggcagagcctgctgaaggatgaggccctggccattgccgccctggagttgctgcccagggagctcttcccgccactcttcatggcagcctttgacgggagacacagccagaccctgaaggcaatggtgcaggcctggcccttcacctgcctccctctgggagtgctgatgaagggacaacatcttcacctggagaccttcaaagctgtgcttgatggacttgatgtgctccttgcccaggaggttcgccccaggaggtggaaacttcaagtgctggatttacggaagaactctcatcaggacttctggactgtatggtctggaaacagggccagtctgtactcatttccagagccagaagcagctcagcccatgacaaagaagcgaaaagtagatggtttgagcacagaggcagagcagcccttcattccagtagaggtgctcgtagacctgttcctcaaggaaggtgcctgtgatgaattgttctcctacctcattgagaaagtgaagcgaaagaaaaatgtactacgccctgtgctgtaagaagctgaagatttttgcaatgcccctgccaggatatcaagatgatccctgaaaatggtgccagctggactctattgaaagatttgggagtgacttgtacctggaaagctacccccccttgggggaaattttctccttaccctgggcccaaagaataaatctgcggtaaaactcctcctttcccaaattccatgcttctttcctacattttcccg

SEQ ID NO: 451375 - DNA, 1231 bp, Homo Sapiens
  misc_feature (1109)..(1147): n is a, c, g, or t
ccttgccagatgtgaggaacctgggaagggaaaacctggggggatataagggtttttccctttttccgggggaaaagttagggaagaatgccatgaatttgggaaaaggaggaattttacggcagatttaatcctttggcccccgggtaaggaggaaattttcgcccaagtggggtaggtttcaggttacaaagtcacttccaaattcttcaatagagtccaggtgccccattttcagggatcatcttgatatccggcatgggcattgcaaaaatctttcagcttctttacagcacaggcgtagtacatttttctttcgcttcactttctcaaaggaggtaggagaacatttcatcacagggccccttctttgaggaacaggtctacgagcacttctactgggatgaagggctgctctgcttctgtgctcaaaaccatctacttttcgcttctttgtcatgggctgagctgcttctggttctggaaatgagtacagactggccctgtttccagaccatacagtccagaagtcctgatgagagttcttccgtaaatccagcacttgaagtttccacctcctggggcgaacctcctgggcaaggagcacatcaagtccatcaagcacagctttgaaggtctccaggtgaagatgttgtcccttcatcagcactcccagagggaggcaggtgaagggccaggcctgcaccattgccttcagggtctggctgtgtctcccgtcaaaggctgccatgaagagtggcgggaagagctccctgggcagcaactccagggcggcaatggccagggcctcatccttcagcaggctctgccctgccagctccacaagtctccgtgggcttgtccacacactcatgctgatgtatcggctctgaatggaaccccacaaacgccttcgttccattttgaagcgacttaggctggcctcaggacctccaacgcttggatttctaggtctcagtcacttgttgccacgcacgtctgagagtaataatcaaaatggtttttcctcagagagttcaccacaccgcgaagttgctggaaggaaagaacgagacaatggctcagctaagcgccctagccgctgcgtnnnnnnnnnnnnnnnnnnnnnnnnnnnnnnnnnnnnnnnagcctggtctgaccaatccccgtttctcagtccttccagggcaaaatctcacctcgtgccgaattcgccacccaggcctcgctc

SEQ ID NO: 451376 - DNA, 1320 bp, Homo Sapiens
  misc_feature (32)..(32): n is a, c, g, or t
  misc_feature (42)..(42): n is a, c, g, or t
  misc_feature (585)..(585): n is a, c, g, or t
tctgtggaattccttggcctgtgcagctcggncctgcccccngaccgttgctagggaggggtggagggtgaagctcccgggactcattggcactagaggttctggccacgcctctccgcgagtccagtcccacgcgggatgaagagggcaccctccgccaagaggctgctgcgggacccggggtttcccctttccggcgccttccagcctcccaatcctcgggtctcgcctccctccgtctccttcctttcccctgtctgtctttccattggtccatgccgcccacgtgctccccggggcttcgcaggcatggactggggcccggggctcgctgcgctgagctgtaggctccctccccgtttccccgttcctcttccctgtcctacagggccgtaccaatggtatgcggggacgtgagcgcgtacaatcccgactgcccggagttccggcgactcctagtagtgccgcacgttacgtggctcctaacgctcggatgtccgccggaatgcccaagtcgcgttcgtgcgatggtaccacgccgcacacagtgggacctggtactggctgcaaggacccagaatgaanaaggtcgttctagattaggccgacgaagcagtactaccgtgtcgtatcaaagattcaatctgccgcgattagtctgcgcggcccgcaccaggatactttcgtgctggcattagacgggcgcacgaacgcggtaaataatgcgctggcttgaagccgccgcgattgttggggtgcgaccctcgcgtggcttgaagccaccgctactttgcgcgctggacccctgccgataccgtccgcttgagtcgcgtcgtgaccgaggcgttcgatacgcactttccctgtgatatgggaccctacattgccattcgagaggccatgttgccagggaaggcagagccccctcattgtgaacgccgggatgggattgagaacacagctgattcataagatgtcacaccgtcccaaaaaggccatctcgaagttcggaacaccgacacttccccccgcttatgagaagacccccggtgatcactaaagccacaaggggtccaatacgccctgatcgttaaaaccccccccggttatgtaaggcacaaagcatagccacagaaacaggcccataactttcccacatagctccctatgtaattccccttgaggggtcacattccccgttcatacacaaccaagcacgcaatgagaatgggaaagcaatgactatgcattttatccgaagtctaatcccagggatagagaaattgccatagaggcgccttagtcatcaatacccctaga

SEQ ID NO: 451377 - DNA, 771 bp, Homo Sapiens
catagttgaaatggctgcgtgttccccacatgcagcatagagactgtgagtgttcgcaccgattgcaaatacacgagtgcaaatgacagatttgtgttcttgcccagaaagtaggtgcgtgttggcggcttcagagatggcctgactgtgtggagtttcgggaccagtggctgctagacagtagccagcacaggcggtgtgtgttagtatttgctcaggctgggctcagagaacccttcatgtcaacacgcgagcctggcttgtgctgttccctcctcagggctgaccttccctcctcaggctcctggaagccgtggccttccggtcacaaagctgctctcctgagctggggcattcattgttggttactgccgtcgtcttttaagtactgggaaggtgggacggagtcgtggagagaggatgggggaacaacccaagcccttgggaggcagcgtcacgttgctgaactctgctcctaagcaaatgcgcgtgtggaatacggtttgccttgtgtccagccgtgcgttctctgattttaaatattctcagccaggcctgtttaaggccagataaatagaacaccaaaagggaaatgtaaaaaacaactcgttgggtagctggttccgtgtaacatcagaggttggggatcgcacactgctcaataggggagtggtgagcatgacacggcttcatacatacgcatcacaggctccagcacctgccttgcacatgggaagaactccgagatgttgacagcctcctcaacgccat

SEQ ID NO: 451378 - DNA, 1036 bp, Homo Sapiens
gagctgggagtggagtccagagttctgggctaaggggtcttaggaaaatgtctgtgggcaggccccaggacatccttcctgagttgcagttcagctgccatcacagtacttcagccccctccagcatctaggggctggctctgcttcttatcttgatttctctccctctgcagggggatgcgggtgtcactggccgtaagattattgtggacaacctatggcggctggggggctcatggtggtggggccttctctgggaaggactacaccaaggtggaccgctcagccgcatatgctgcccgctgggtggccaagtctctggtgaaagcagggctctgccggagagtgcttgtccaggtttcctatgccattggtgtggccgagccgctgtccatttccatcttcaacctacggaacctctcagaagacagaagcgagagctgctggatgtggtgcataagaacttcgacctccggccgggcgtcattgtcagggatttggacttgaaagaagcccatctaccagaagacagcatgctatggccatttcggaagaagcgagttcccatgggaggttcccaggaagcttgtattttagagccaggggagctgggcctggtctcaccctggaggcacctggtggccatgctcctcttccccagacgcctggctgctgatcgccttccccacccaccaaccctcagggcaaagccaggtccctctcatttagcctgtcctgtcatcatcatggccagctggaggcaggggcttcctggtgctggaggttggatcttgatgtaaggatggggcatggtgttctcctgctgctcccctcagactgggggcaagtgttaactttaagtggaaaaggcaccccccgtcaagagtggaattccctcactcaggttctcccccgaacaagttgagagcccggaaccaagttcgcctctaccgcccctagtcactgtccaaggagagcgcacacgaaatctcacacgcggtcacggtctccgtggggggagtgggcgagggacccc

SEQ ID NO: 451379 - DNA, 1068 bp, Homo Sapiens
  misc_feature (45)..(45): n is a, c, g, or t
  misc_feature (76)..(76): n is a, c, g, or t
  misc_feature (79)..(81): n is a, c, g, or t
  misc_feature (88)..(88): n is a, c, g, or t
  misc_feature (106)..(223): n is a, c, g, or t
  misc_feature (939)..(951): n is a, c, g, or t
agcgaaagtcgccccgtcaccaccccccccggatcaccacagacnacctgagtatggtcgagtggacgcgcgtcgnggnnngggggantggggagagtgtggcgcnnnnnnnnnnnnnnnnnnnnnnnnnnnnnnnnnnnnnnnnnnnnnnnnnnnnnnnnnnnnnnnnnnnnnnnnnnnnnnnnnnnnnnnnnnnnnnnnnnnnnnnnnnnnnnnnnnnnnnaggaaaccaggaaaaaagtgggttttcccgggtaaaaaggcctggaggagaaaatgggagctcctgggagatggagtgacaggggggacaggggcagaaagccaaggggctggggctctttctgttctgcagcggtgtcggggaagagctgttatgagaggagaaaggctgggcagggggccccctcgccagctctttctggctgttttcccagcttgtccttgttctgtgggtacttgactgtgaatttcttgtcatcggtggagctggcctgcagccctggtggctcgtgcttcatgctcaaggcgtcctcttggaggccctgcaggtctgtgcccaggggtgccggctgtggggtgcacaggttcaggtccaggtcctgtaggcaggccagcagtgcagacctgcccggtgccaggggcaagggacacagccagctggcacaggatgggccacgagcatccaccatgcctggaagtggtctgcaggctgagaagacctggtcacctcggaagagctggaagtccaggctgggggacagggagccccctgtacctcccagggccatgggcctatgacaacaacctaattgtgcagctgattcttccttcatatccccattacctgctttggcttccatctgccagctctgccctctcctggcatcacactctgctcccaactctcagaacaccttgcacaacctctctgttagnnnnnnnnnnnnnctacttcccctctatccgcacttcccaacccactctggtgatcatgggctttccttggcttgggtctctggtctgggtcaaggcatctgctcaggttcctcagttagaagaccatgg

SEQ ID NO: 451380 - DNA, 1186 bp, Homo Sapiens
  misc_feature (262)..(262): n is a, c, g, or t
  misc_feature (1030)..(1043): n is a, c, g, or t
ttgggtgtgggccacaactttccacaccctccggtatttgcgggcgcctgggaacggacaagatcttttccgaagaagctttgggaaaggcccttgagatagccacatcaccggagtgtggcactcccactgattgggctgaagcaacttggcagagcttgaggccctggtaggagcaggtttcccacgagcgtggggtgccccagctcatggccatcatcagcaggtaggcatagccatggtgggtagaggggttctgggncagcatgaggaggtgggacatggtcagaaggtagggccccatagggtgaacaggtggggtggaggccaggaggaagtgggtatccagggtagaagggcgtggaggagaaatgggagctccttggagatggagttgacagggggacaggggcagaaagccaaggggctggggctctttctgttctgcaccggtggtggggaagagctgttatgagaggagaaggctgggcagggggccccctcgccagctctttctggctgttttcccagcttgtccttgttctgtgggtacttgactgtgaatttcttgtcatcggtggagctggcctgcagccctggtggctcgtgcttcatgctcaaggcgtcctcttggaggccctgcaggtctgtgcccaggggtgccggctgtggggtgcacaggttcaggtccaggtcctgtaggcaggccagcagtgcagacctgcccggtgccaggggcaagggacacagccagctggcacaggatgggccacgagcatccaccatgcctggaagtggtctgcaggctgagaagacctggtcacctcggaagagctggaagtccaggctgggggacagggagccccctgtacctcccagggccatgggcctatgacaacaacctaattgtgcagctgattcttccttcatatccccattacctttggcttccatctgccagctgtgccccctcctggcatcacactctgctcccagctctcagaacactttgcacaacctctctgttagnnnnnnnnnnnnnnggaaatggccttggagatttccaggtctccaatcctgaaagctccctggcttggctaggaaatgccccaggaggtgggctgaggacagactccctcaggttcccacgtggagaagcctctgcctgccaagcccttccttgctg

SEQ ID NO: 451381 - DNA, 1341 bp, Homo Sapiens
tccgcccccccctccggcccagacggaaatgagtcagagagggaagccccggcggtgagagtcggcccaaaaagcggcggccgttggaggtggctgcggcagctgatgtggcctcatggatgagctggtacacgacttagcctcagccttggagcagacatctgagcagaataagcttggtgaactgtgggaggagatggcgctgagcccccgacagcagaggcggcagcttcggaaacgccgaggtcggaagcgtcgttctgacttcactcacctggcagagcatacctgctgctacagcgaggcctctgagtcaagtctggatgaggccactaaggactgtcgagaagtggctccggtgaccaattttagtgactctgatgacacaatggtagccaaacgacacccagctctcaatgccattgtcaagagtaagcaacattcttggcatgaatctgactcctttactgaaaatgcaccttgtcgaccactcaggcgcaggcggaaggtgaagcgagtgacatcagaggtggctgctagccttcagcagaagctgaaggtgtcagattggagctatgagagaggctgcaggttcaagtctgctaagaagcagcgtctgtcccgctggaaggagaatactccctggacctcatcaggccacggattgtgtgaatcagcagaaaataggactttcctaagcaaaacaggaaggaaagaaaggatggagtgtgaaacagatgaacaaaaacagggctctgatgagaacatgtcagaatgtgaaacccagcagtgtggtgtagcagcagtgacactgggctcttttaccaatgatgaagggcgacaaggtgatgacgaacagagtgattggttctatgaaggagaatgtgtcccaggattcactgtccctaatcttctgcccaagtgggctcctgatcattgttctgaagtagaaagaatggattctggattggataaattttcagattccacattccttttaccttctcggccagctcaaagagggtaccatactcgcttgaatcgtctacctggagctgcagctcgatgcctcagaaaggggcgaagaagctggttgggaaggagaccagcataaacactttggggactgagaggataagccatatcattagtgaccctcggcagaaaagatttctggttaccatcagctgggaaaagagacgaaatcaggtttgaactttgcagtaagaaaagcagaatgaatctgatttgcatatggtttaggtcaacatcagaatcttgcattgagaagtactatgttgagcctaaacgtttgaccagaagtccatcccctggttccct

SEQ ID NO: 451382 - DNA, 1219 bp, Homo Sapiens
agtctcagacgcagcgatggctcgttaggctccaaatgcggttccgccggtttcgtcctcgctcttcggccttccgctttgtcctccgcctctgggttgtagtctccgtcggccgcgggcatcgaccgcttcccggagccagcgcgcagccgtggtccaccctctcttcgggcccgcctcctggtgacatcatttccgggccgagtgtttccgggtcgctgctggcccccgggtactggtctcagtacccctgcagccggccggagaggctagagcccgacggggcccggctccggcggcagccgcgcctctcgcttgcttccctcggccgggccgtcctcggcggcagtgtcaggagcactccgctggtccaggcggcaacatgtccatgcttttagtgatgtccctgcctctaatccagaagccatggaggagataaggtagcccccctcgatcggatggggaagcccagttcaatggatactaaattcaaggatgacttatttcggaagtacgtgcagttccatgagagcaaagtggataccaccaccagcaggcagcggcctggcagcgatgagtgcctgcgggtggcagcctcaaccctgctcagcctgcacaaggtggatcccttttatcgattccggctgatccagttctacgaggtggtggagagctccttgcgctcgctcagctcctctagcctgcgggctctgcacggcgccttcagcatgctggagacggtgggcatcaacctcttcctctacccgtggaagaaggaattcagaagcatcaagacctacacgggcccttttgtttattatgtcaagtcgacattactggaagaggacatccgagccatcctgagctgcatgggctacacacctgagctgggcactgcatacaagctcagagagctcgtggagaccctccagtttgaagatggtctccctttgaggctccttctgggcccaaagtcgagtgtgaagcagatgcttagaaaattccattcaccaagtgaacggacaagggctaacttccgaagctggactttgtgagcgaagcgcaagaaccagtgccagagaatattgcccgggtgctccggacggcccgggggggcggccaaaggccggagcacctgagggctccatgtccgaagtgggaccccaaagtcggcaagacacgggcggccagggaccactaaacccccttaccaacctca

SEQ ID NO: 451383 - DNA, 1137 bp, Homo Sapiens
  misc_feature (143)..(151): n is a, c, g, or t
ttctcccttggtattaaagcagtttcattttttgccatagttacttcttctgataatatgctagaatcacagttcttctctgttttatctggtattgtagggattgtttacattttatatgtttgttcacttgagaaccaaannnnnnnnncttcatgatgatggaagctctgtaatataaaaatgtcattgtgctcatatatttgaataataccgatcacggttttcaaagtctctgtgagcatatcttgcataagtcttgttatgtgggatccttccaaaaggttcatggtcattgaaacaagattcaaaaacttcatcaacagcctttttagctacttctttgctgatattcctaacagccaggatagaaagagtggctctgtctcgcacacaagtctggtggtgttgttttaatccaaaatgtaacctgaatatttcattgacaagtgagcagtctccactaaggttagcagctcgaacctctgagcacgccaaatgtctgatgttggtgaaccagtcgacatgggcacgacaatgatcaaatgcatgaataagctcgtgtgtgaccactctgttcatatgggcctgattatggatattattctggcacaaaactatctgagatgttgaagcatcaaaacctccactgacatttccattacagtcttcgcaagaaaagtgtctatctttgttaacagcacaacctgagtgtttcatagcatcaagcagaagtttgacatatggatttgtctccagcgtcttcaggagcctaagctggcacttctggttgctggtgaagaagctggagaagaacccttgctggggattcccctgggccagacgctcggggaagacctggcaagagacgtgttgctgctgcagctgctcccctgccgcggggccccgccggcgctcgtccggagctcccgccatgcctcccgcagacctcgccgctgcttcctcctggctcaggcggccagagcgagactgggaaaggtaacctccctcccgccaacgcgaccgcccaggccctccctccgcagggaagaagggcagcctggctgggctgaagacgttaggcgggagggggctttgaacctgacggggagcgcgggaggcggggcgagaggcccc

SEQ ID NO: 451384 - DNA, 1080 bp, Homo Sapiens
tggctcatgcactgtggatactttttagccgggtggaaaccaaggcgcgggcttcctcggcaaaccggcggtgtccctcctcggtcaactttccagaggcaagatggagcccgttgtgctggccccgccctgcatgctgacaggcactttctcaaaagctgtctcgaaaacagagatttgtgacggacagtattctttccagcccttccggggccgtccgggaaaaagggggaagtgctttcgagtgaaactgtagatctgttgcacgttgaggccacaggggggaactgtttcttaatgccagggcaattagttggaagtaattggagagggggccgggaccagagcctccccgcctggctggctggcttgccgaagcctccgactctggaggggggccctgtttgtgaggggatgggagagccatagaggagctgtcttcctggtcctcagcctcctcctcttctgtgagctcccaggtgctgggggaaaaggcaaaccgcttccgagggggagaccgcttgctggaggactgggacagtgattccacgcctgcggcctctgagcagctggcatcttcctccttctggggtggctgagaggaggggagtgtgcttgtcaggtcctccctcttcctacgtcctgagacctccagctttccagggggatacacaatgttgggatttacccacatccagaggttgggctcataatctggaccatccttatcagggttgggttttttctctaggggtaattttggtggcttaacaattcggagtttatacctggcaagtttctgctccgctaaggggaggtgagatgtggtgaaggccagaaagagctcgttccccatgtcccagtccagcagtcccgggacctggccatggaggcgggcccagaagtcgaggtgttggagcttcacgtccaccttcggggctggcagaggcgcggcggcgcggagtggggacgcggagtgggagcgcggcggctgaggagcgaccctcacaggcgccttctcaaatgcgccggctcggattgagttagcttgcggcagctcaggtgtggagcggtccatta

SEQ ID NO: 451385 - DNA, 886 bp, Homo Sapiens
  misc_feature (808)..(845): n is a, c, g, or t
gattctcggtgttcacaccggttgtttaggtcttcctcgaactctagcaactgccccatgaagttaagtttggggagataattggttcgtttgcctttgacaaatttataagcatcagtcatggtcatccgagtgtgcttcatcaagtaagcgatgacgatggtggcggagcgggacaccccagcctggcagtggatgagaagccccttcccacactggtgagcttcctcaatgaactcaaagcctcttcaaagtactgccgcaggttctgcttgttgctgtcagtggctggcagccgcttgtagttgaacaggcctttctcatagtggtagaggggaagatgagtggtgacgttgatgacgtagccgatgttcagccgctgcatggtgtccaggtcctgagcatcctgctcattgccaaggaacaggaagggcaagatgggggtgagctcagcgttctcgatgtcaggggtggtggggatgggctgaggtagcaagctcgaggccgcggatgcgccgccccccacctcccggcactcttggagctggagggagttgtcacagaggttttcatggttctgcttaaaactactaagtccaccttgtaaccttgagcaagttattgatgtctctgcatctcagtttacatatctgtgacttgtaatataataatttctatctcacagagctctcaatatggataaaatgctacatgagagttaggtgttttattataagtgggagagacattgctgtaagttgcatactccgctctcgacgaattcgagctcggccgatttggcctgatnnnnnnnnnnnnnnnnnnnnnnnnnnnnnnnnnnnnnnggccgccaccgcggtggagctccattcgcctatatgtagtc

SEQ ID NO: 451386 - DNA, 1092 bp, Homo Sapiens
agcggggtcgtaagagaatgccaagcccggggagaaggcgttccgggcctcaactttggcgtcgtgagattcttgtgaggcgtctgcctggaagccggcagcaattttgcttctttaaagagaaaaagaaggctagggactcagattcctggattctgagatccagaccagctcctcccagacctctccagaagaagccatgggaacccctcgtatccagcatttgctgatcctcctggtcctaggagcctccctcctgacctcgggcctagagctgtattgtcaaaagggtctgtccatgactgtggaagcagatccagccaatatgtttaactggaccacagaggaagtggagacttgtgacaaaggggcactttgccaggaaaccatactaataattaaagcagggactgagacagccattttggccacgaagggctgcatcccggaaggggaggaggccataacaattgtccagcactcttcacctcccggcctgatcgtgacctcctacagtaactactgtgaggattccttctgtaatgacaaagacagcctgtctcagttttgggagttcagtgagaccacagcttccactgtgtcaacaaccctccattgtccaacctgtgtggctttggggacctgtttcagtgctccttctcttccctgtcccaatggtacaactcgatgctatcaaggaaaacttgagatcactggaggtggcattgagtcgtctgtggaggtcaaaggctgtacagccatgattggctgcaggctgatgtctggaatcttagcagtaggacccatggttgtgagggaagcgtgcccacatcagctgctcactcacactcgaaagactgaaattgggggccacctgtcttcccattcctgttggggggttacggctactgctggccatgctggtgccatcctttattcccttttctaaaaagggacttcctgggccgtgggtctgaggacatctttttttgactggggaagcctccttactgggtgagggttccaacaggcttgaggagtaaaatggggaaatttggggggggaaattcccggagaattcttttggaacgg

SEQ ID NO: 451387 - DNA, 1037 bp, Homo Sapiens
atttccccccttttttactcccttacaggcttgttggaacccctcaacccgtaaaggaagggcttcccagtcaaaaaaaagaagttccttcaggaccccagggccccgaaagtgccttccttgggaaaaagtgaataaatgatggcagcagcaaatggcagcagtagctgtaacccccaaacaggaatgggaagacaggtggccccattttcagtctttcgaggttgagtgagcagctgatgtgggcacgcttccctcacaaacatgggtcctactgctaagattccagacatcagcctgcagccaatcatggctgtacagcctttgacctccacagacgactcaatgccacctccagtgatctcaagttttccttgatagcatcgagttgtaccattgggacagggaagagaaggagcactgaaacaggtccccaaagccacacaggttggacaatggagggttgttgacacagtggaagctgtggtctcactgaactcccaaaactgagacaggctgtctttgtcattacagaaggaatcctcacagtagttactgtaggaggtcacgatcaggccgggaggtgaagagtgctggacaattgttatggcctcctccccttccgggatgcagcccttcgtggccaaaatggctgtctcagtccctgctttaattattagtatggtttcctggcaaagtgcccctttgtcacaagtctccacttcctctgtggtccagttaaacatattggctggatctgcttccacagtcatggacagacccttttgacaatacagctctaggcccgaggtcaggagggaggctcctaggaccaggaggatcagcaaatgctggatacgaggggttcccatggcttcttctggagaggtctgggaggagctggtctggatctcagaatccaggaatctgagtccctagccttctttttctctttaaagaagcaaaattgctgccggcttccaggcagacgcctcacaagaatctcacgacgccaaagttgagatcccgggaattcc

SEQ ID NO: 451388 - DNA, 1068 bp, Homo Sapiens
  misc_feature (98)..(98): n is a, c, g, or t
tgaaatcaaatttgtcattaacatccatccaatttccccctggtatgtcgcaattaaatgatgcagcccttatccatgcagtcttgcacaatgctcantaggtaaatccagtaaattttgtctgcacataggcaagtagccttgcccttttccttgagtaactcatgttcacagccagctgtattcttcaaggaatcacagttacttaaggagattcttgatactggcaactattggtgcatagtcctttgtcacagtcatcagggcaaccggcacaaggtgttccttgttggtacggggtattctttctattcatattattaccagcaggacaatattggcaaacatagtagtattttagactatcttgattgggacagtaggcaattccacagcctacctggtaagtcgagtaccaaacaagctgagtataatgtccaacaactgcattgggactctttggtcctacaccatagacaaaatctaggatctcgtcataccagctttggattgcagaagaccaggaagtagggtcacttgacatatagagattctcaccacatcttgtactggttttgcggtcctctggatcactatgttgtaaagtgcacttgtttgcccacctttgggcattcgttgttacctctctgctccattccatctttagcatgttactggcaggtggagagactgctttccttagttcattgtgtttatttacaatctccctttgcacttgcaactgggtggttaacaaagcagtaaaagcgggatcctttccttctgcaggtaaagatggaagcagcacagtaaccagaaacaacaccggtagtaaagccattgctggaaatgttggttttctgagcaggatgaaatatctactttattaatggtgaagtactgtgctctttcttgcaggtgttttaagatcaggatgacatggttttcctagagtgtctttaggagggccatggtgtataattttataaccctttacctggctccagagcacagaccttcctgcagttgggccggcgcgttgcggcgttgaggagctgctgcgcgccc

SEQ ID NO: 451389 - DNA, 736 bp, Homo Sapiens
cgcggtgagaggggcgcgcagcagctcctcaacgccgcaatcgcgccggcccaactgcaggaagggttataggattatacaccatggccctcctaaagacactctaggaaaaccatgtcatcctgatcttaaaacacctgcaagaaagagcacagtacttcaccattaataaagtagatatttcatcctgctcagaaaaccaacatttccagcaatggctttactaccggtgttgtttctggttactgtgctgcttccatctttacctgcagaaggaaaggatcccgcttttactgcttttgttaaccacccagttgcaagtgcaaagggagattgtaaataaacacaatgaactaaggaaagcagtctctccacctgccagtaacatgctaaagatggaatggagcagagaggtaacaacgaatgcccaaaggtgggcaaacaagtgcactttacaacatagtgatccagaggaccgcaaaagcagtacaagatgtggtgagaatctctatatgtcaagtgaccctacttcctggtcttctgcaatccaaaagctggtatgacggagatcctagattttgtctatggtgtaggaccaaagaagtcccaatgcagttgttggacattatactcagcttgtctggtactcgacttaccaggtaggctgtggaattgcctactgtcccaatcaagatagtctaaaatactactatgtctgccaatattgtcctgctgg

SEQ ID NO: 451390 - DNA, 1906 bp, Homo Sapiens
  misc_feature (87)..(106): n is a, c, g, or t
  misc_feature (480)..(522): n is a, c, g, or t
  misc_feature (524)..(528): n is a, c, g, or t
  misc_feature (530)..(548): n is a, c, g, or t
tagaaaaaagagcccttgggggccctggggaattttaaaaaattcccccaaccccatttgggagatcccccagggctcccggggggnnnnnnnnnnnnnnnnnnnncccatttccccggtaagccaaaaatttttcaagggcggccaaggctttttgcgggttagtttttaaccccctttttcccccttaaaaaaatttaattattttccccttaggagccttaaaattcttcgggtagggtaggtttttcccaaattagtttccccaccccccggaaggtaagggttccctttccgtaaagattcccccaagttaggcagttttccccaggtccgggggcgtttgaaaaaaggccggccacgggcctaaggttaataattaggggctccttattgggggccccctttgttcaagaaaaactggggtaacgggtaaaccttggggcccctcggagggatactttagagcgggccgccccnnnnnnnnnnnnnnnnnnnnnnnnnnnnnnnnnnnnnnnnnnngnnnnntnnnnnnnnnnnnnnnnnnngtaaagctttgaatttattgtttaatgcaagtaaagactcaggtagtaggaatggcaatgatgttacagtcttcttcgtttagcatgtttcaggaaatacgtaatgcaccattttgatccaaagtcctagtgacctaaatcctatggttatacagttttcaaaatcctcaacctgattcagttcgttataaagcactaaatttatgtcagagttcacagttgtcatcatctactatgctacttttgtaaatcattgcctgaaagtgatttctgtgatgatctgggggagaagatgcattgctctttgaaatcaaatttgtcactaacatacatacaatttcccctggtatgtcgcaattaaatgatgcagcccttatccatgcagtcttgcacaatgctcactaggtaaatcagtaaattttgttctcacataggcaagtagccttgcacttttccttgagtaactcatgttcacagccagctgtattcttcaaggaatcacagttacttaggagatcttgatactggcaactattggtgcatagtcctttgtcacagtcatcagggcaaccggcacaaggtgttccttgttggtacggggtattctttctattcatattattaccagcaggacaatattggcaaacatagtagtattttagactatcttgattgggacagtaggcaattccacagcctacctggtaagtcgagtaccaaacaagctgagtataatgtccaacaactgcattgggactctttggtcctacaccatagacaaaatctaggatctcgtcataccagctttggattgcagaagaccaggaagtagggtcacttgacatatagagattctcaccacatcttgtactggttttgcggtcctctggatcactatgttgtaaagtgcacttgtttgcccacctttgggcattcgttgttacctctctgctccattccatctttagcatgttactggcaggtggagagactgctttccttagttcattgtgtttatttacaatctccctttgcacttgcaactgggtggttaacaaagcagtaaaagcgggatcctttccttctgcaggtaaagatggaagcagcacagtaaccagaaacaacaccggtagtaaagccattgctggaaataatggtgaagtactgtgctctttcttgcaggtgttttaagatcaggatgacatggttttcctagagtgtctttaggagggccatggtgtataattttataaccatttacctggctccagagcacagaccttcctgcagttgggccggcgcgttgcggcgttgaggagctgctgcgcgcccatccctacatcccggaccgtaccagc

SEQ ID NO: 451391 - DNA, 1073 bp, Homo Sapiens
tccatttcttctttagaaaatcaaaattttggcccttaaccatacaattccaattttcccctgggtaagttggcaattaaatggatgcaaggcccttatcccatgcagttcttgcaccagtgctcccctaggtaaaatcagtaattttggtcttcacatagggcaagtagccttgcactttcccttgagtactcatggttcccagccagctgtatcttcaaggaattcccagttcttagggagatcttgatactggcaactattggtgcatagtcctttgtcacagtcatcagggcaaccggcacaaggtgttccttgttggtacggggtattctttctattcatattattaccagcaggacaatattggcaaacatagtagtattttagactatcttgattgggacagtaggcaattccacagcctacctggtaagtcgagtaccaaacaagctgagtataatgtccaacaactgcattgggactctttggtcctacaccatagacaaaatctaggatctcgtcataccagctttggattgcagaagaccaggaagtagggtcacttgacatatagagattctcaccacatcttgtactggttttgcggtcctctggatcactatgttgtaaagtgcacttgtttgcccacctttgggcattcgttgttacctctctgctccattccatctttagcatgttactggcaggtggagagactgctttccttagttcattgtgtttatttacaatctccctttgcacttgcaactgggtggttaacaaagcagtaaaagcgggatcctttccttctgcaggtaaagatggaagcagcacagtaaccagaaacaacaccggtagtaaagccattgctggaaataatggtgaagtactgtgctctttcttgcaggtgttttaagatcaggatgacatggttttcctagagtgtctttaggagggccatggtgtataattttataacccttcctgcagttgggccggcgcgttgcggcgttgaggagctgcggacgcgcccctctcaccgcgattgttcacttgccaggcgccccgct

SEQ ID NO: 451392 - DNA, 917 bp, Homo Sapiens
ggcccttttcttgccaaggtggccaccgggaagggggccgccgcgggcgcctcactgggtgttgagcttcttagtgtactcctcgagagcgctcaggaagctgaccttgaagctctccagcacgggcagcaggccttggcggaggtcctcgagcgcgggcttgggccttctcgctgagcgtgctcagatgctcggtggccttggcgtggtactcggccagtctggcgccgccgttctccttgagagcctcaaggcgcgcggccaagcgctggcgcagctcgtcgctgtagggggccagatgcgtgcgcagcgcgtccacatgggcgcgcgcgcggtcgcgcatctcctcgcccagtgggctcagcttctcttgcagctcgtgcagcttctggcgcgcgccctcttggagctctgcgcgcagcggctccaccttctggcggtagagctccatctcctcctgccacttcttctggaagtcgtccaggtagggctgcaccttggccttcacctcctccagatccttgctcatctcctgcctcaggccctctgtctccttttccaggttatcccagaactcctgggtcacagggccgagctgttcgcgcagcttgctgaaggtggaggtcacgctgtcccagttgtcaaggagctttaggtttagctgttttcccaaggcggagccttcaaactgggacacatagtctctgccgctgtctttgagcacatccacgtacacagtggccaggtccttcactcgatcccaggggctctgggggggttcatcttgctgccagaaatgccgagcctggctccccgtcaggaagagcacggccaaggtcagcaccgcagctttcatcctgaagggccgtgggggacctccttctcgcagtctctaagcagccagctcttgcagggcc

SEQ ID NO: 451393 - DNA, 405 bp, Homo Sapiens
  misc_feature (30)..(30): n is a, c, g, or t
gaggaaaacctcgcctattctggaaaacanatgccctgaaaaagaacttttgtaatctgccccaaggggtttttccctgaccactgcaacaaagaaagaccatggcatttttgtaagagaaagagtttaacagacacaagggtggccacgccatgtgggagactgagttgagaggtgacagcgtgctggcagtcctcacagccctcgctcgctctcagtgcctcctctgcctgggctcccactttggcggcacttgaggagcccttcagcccaccgctgcactgtgggagcccctttctgtgctggccaaggccacagccggctccctcagcttgcagggatgtgtggagggagaggcgcgagcgggaaccggggctgcgtgcagcgcttgggggccagctggag

SEQ ID NO: 451394 - DNA, 703 bp, Homo Sapiens
gatccttatagataactttttgtttccagatatggctaatcacatcctcatattgacaaagggctccaccaagcaaagatgtttgaaaaaacaaacaggaattcttctctatctgttggctgaatatttcatatttttctgatttttccactagcaaaactcttcgtaactcatcagaaatgagaaatggatcacaaaaagaatctaaacatttaacaatatgtccactgtctcgtacaatatcttcatcatataaccgatgaaaaaatgacattgaaagctgtgtgcaaggaacatttatagcttcaatttttttcacttcagttcctaatatgatccattgtccagaagaatctgaaagtaacttcaaattgggaataacatttgggtctttgaaaaaagccataacgaaatcatccttccgataggactgaaaggtctggtcaaagccgaacgcctgcgccttgattctgcccagcatggaccactggcggagccggctggtgatctccttagagctcagagactggaaggttttctgaggcaagaacctgaagtagtagccacccaagtccccgagctccccagtagccatcgtgttcggctggtgatgctggccgttccatcgctctcgacgattcgagctcgccgattgctgatcatacttgtatatgtatgtaacgagtatgcgcgcacctgccgg

SEQ ID NO: 451395 - DNA, 926 bp, Homo Sapiens
ttttcgtcaagacactcatcgtcatggatttcctggttgcagatgtgggattccatcctgacacccagcagttctgcaagactggtggtgtatgcagcattctgccgaggaagcagatggactggaccaggttgccaaatgcatcgctgtgtctgtcttcaggagggctatgttgttgctcatggagttgttatcaaagtcctcatggatgatgatggtattgactggatactctgtgtgagcaatcttgctaggatccatgttacttatacccactataacgacaatgtccttcctgttctgaatggcggatgcgatgctgaggacccagaactcgctcaggatgcagccgaaagccaggtgtgtgtactgggagtcctgcagcgacaccacccacgggaactccatgctgctgaccaagccctccttggggtcaggaccgtagaaaacggaagctttctggacgccacaactggtggaagaatagagaaggccgagcagcaccaggagcacccctcgcatcttgccatccccagagagacccgccgcggacaccatgggcagctgtcttatccctagtgcttggttctgtgtggtaaagaggcaggaccagttggcccgcactgtggtttgtgagatggccagagaagagagggcagcttactcttgtcagttttcttctcaatccagcccaagcccctgagcaccccagagagttgggtctctgaaaagggctgctttttgactcgtggaattcaacccttgccttaactctgtagccataaaatgcatgttccactcatgacactggatgcctcttgtcctcagaatggtcctcagagttcgtccatgaactgttcctgtctcaaggagaaatgaactcaggctggcctgacatcccataactccgggccgtaccaggcctt

SEQ ID NO: 451396 - DNA, 730 bp, Homo Sapiens
cagggcataatcagccatctcgacttggtcttctctcaactttgttaagtacataattgaccaagtttgacacttcctctgtgtggtccgggtcctccacagggtctgccatgggtgttccagttgtgattattgtccataccatccttcatatctcttagcaatgccttcaggacatctatttgttcgatcaaaaatagaatttgacgaaaattgttttccagattctggctttccttctgttaaaagttccagttgctctttaggcatacgaagtctggcctgatatttataaagccttgaaccatattctgcaattatggcatataattgtctggatttctgaggaacatctgtttctttaagccactgatgatttaggagtcctacaagaagaaaagtcagtgtaagcattgtacttagaataatcttccatgatcgagttaccccattcgcatcaggattttcgtcctctgataacaaagcattgccactggcgctaccgctggcgtcttcagagcaacgtctaaaaaacatggcagcccttcttgcctttgtttttccactcatgatcccctaccaaagaacaaacagctggtaggatgaagagcaacatttgtcctcattcctattttatgaaaaacatgaagctatacatacagtttctaaatttgttttgtataatgtcttcttcctccacgggtgtttcttcttgaagacggaattttga

SEQ ID NO: 451397 - DNA, 961 bp, Homo Sapiens
  misc_feature (877)..(913): n is a, c, g, or t
gggtatgaccctgggaacctggaaaagcccagcacttttccagggtagacatccggctgaagaataatatctggaggcatttcatgatttaggaaaccctatcccatgccagtacaattttgctttattatttttataactttctgaggtcccagcttcaatgatggaggctccggccgacttcagggcataatcagccatctcgacttggtcttctctcaactttttaagtacataattgaccaagtttgacacttcctctgtgtggtccgggtcctccacagggtctccatgggtgttccagttgtgattattgtccataccatccttcatatctcttagcaatgccttcaggacatctatttgttcgaccaaaaatagaatttgacgaaaattgttttccagattctggctttccttctttaaaagttccagttgctctttaggcatacgaagtctggcctgatatttataaagccttgaaccatattctgcaattatggcatataattgtctggatttctgaggaacatctgtttctttaagccactgatgatttaggagtcctacaagaagaaaagtcagtgtaagcattgtacttagaataatcttccatgatcgagttaccccattcgcatcaggattttcgtcctctgataacaaagcattgccactggcgctaccgctggcgtcttcagagcaacgtctaaaaaacatggcagcccttcttgcctttgtttttccactcatgatcccagtttctaaatttgttttgtataatgtcttcttcctccacgggtgtttcttcttgaagacggaattttgaaaagcttctccgctctcgacgaattcgacgctcggccgatttggcctgatnnnnnnnnnnnnnnnnnnnnnnnnnnnnnnnnnnnnncgccgcccaccgcggtagaatccagccctatagtgagtcgatacagtc

SEQ ID NO: 451398 - DNA, 822 bp, Homo Sapiens
atgtgcagacgcggcgcaaggattccgtcctagcgtaaggagcttgcaccagttgggtaacagcggagtgaagcggtcgacgatggtgtcggcgaacagtctatgaatgacagtttcttgggaactatagcgtgccagattacaggttcacacctggtggtagtgagcagatggagatgcctttaggaggcttgcagatcccttggaccgcagtagatacgactgttttgagacatatgggagagggaagaggtttgttacatcagctttccctggggttccacgagcactaaatgaatctgaagacacaccttcaacattctttaagaaggaaccatggaagccaaccttgtattgtttaaagagagaatgaaacttgaagcaacagacaggaagaacccttatctgatctgctccgcaactattggaaacattgaaggagacagtttacactacagtggatgggagtggtggcttaggcctataatgctagtgctttggaaggcagagtggggagaattgcttgagggagagttcaaggttgcagggagctgtgatccagcctcagcaacagagtgagatcctgtctgcttcagaagagagcccagcagctgcccacctcccgctggccccgtgggtatgcagctcggtggaccatgcagacctatgtggattgtgccttccgagctcagacagtgatgctgcttcagctggacggctcttgaatgcctccatagaggagacgtggtcgctgcctcctctggtggggaaaaacattctacctcccttcggtggttaacacctccttagcctcgggctgga

SEQ ID NO: 451399 - DNA, 1062 bp, Homo Sapiens
  misc_feature (68)..(68): n is a, c, g, or t
ccagttgggagagcttcttccaccaggtttttcgtgatggatataagcaaacctctccattcttgaanctggcggtgggcttcttggccccggaggatgaccccgggaatcaagccagggccccttttccgtgggtagaccagcaggctgcatggccgctcttgcttgcggtccatcaggacactctcaatcagggttgtatgggatgaggtgttctccatgcccaccagcttgttgctggcaaacaccagcgtcttattggagacagcattgagattgatgtaattgaagaacttcttgaaatacttctcccgatcctccttccggaagtacacccaattgatgagtgcgctgagcgcctggtcttcattgagcacgtgaaggttttcatcacggagcaggcggccaaagataacaggtggacagcgcatgaagtgcatggagccctcaggactggcccagtagtggaagttgtcccgaatgccagagtaagctacgtctgatacctctttgagctcaaacagctcagccaagaagaggtagcgcaagcagttggcacggcagatggacttaataaggaagtcgttacagtgaactcgaaggcgtggtgtgttgaaatactgagccccacgaagcagctcctccacattttgctcggagatcaccaccttgccgctatagaagtagtccagaagctggtccactgtgaccgggctcaggtaactggtgtcaatggtgatgaaaagctcatcagcggtcttcatgtcattgctggagatgaggctcctcaccagtggggagacagcagccagcacattgcgatgtgcaaagaagacgtggttgtccacactcagggccatgtcccagtactctttgcgtttcctctgtctgttcaggttctgcagcacgaagctattgtagtttttctccgtgaattccaatttcatggtgcctcttgtcggctgaaacagatcagcagcaggtactggagagcagactttctcaggcctgtgggatcagattgatggttgtttgcagagcggatcccgggaattccggacc

SEQ ID NO: 451400 - DNA, 233 bp, Homo Sapiens
ggaggaagttataaagagggtacgagggggccagtctggagagccatgcagtccaagcgggattgtgagctgtggtgtgagagggtgaatccagagaacaaggcggcgctggaggcgtgggtcagggagacaggcatccgcctggtgcaggtgaacgggcagaggaagtatggcgggccacccccaggctgggtgggcagcccgccgccagctgggtcagaggtgttcatcgg

SEQ ID NO: 451401 - DNA, 886 bp, Homo Sapiens
atgggttgcaccgtccagccacttccacgtttcgcagtttaatcggccctttgctcggtattaacggcttaatgtggcacaatatcaccttcaatgtgtgtgaacaacactcacttcagatgttctattgggtacttggcttctgtactttttgtgtattaaatcaatgctctcaaaagctgaatgctacgtccgagaatatgtttaatacactacatattccatttaagagaataacttccttcattttgataatcaatttgaggataaatgaccaaagacttgcgaactataggggggaaaataacgtcaggcatgtcctggctctctacaaatctcttctcagtgttgtattttatgtctccgaatgaaattgcagtagtgcgcctccacttcgcaagccccttaaaatatctgccattccagatcccttagattcatgaattgttttcctgataacaggttggagatctcctctcacatcagcgcccctggtgaatgacatgacattcaggtttctagcaagtacttcctgtgcttcgttaagtgaaataccatgcatttttagaagatttgatttcttgctctccttattaaaattctcaatacatgcatataattctggaagtgaacattgaggaagggtggcttctctattgtcctcagctggactggtgtctccagtgaggaacatcgtgctgggattttattctctaattcactgcctgcaaggtgtagtgtaatttgaaagtggtcttgggttagcttgtaaacatatactgcaaactctagggcaaccacacttgttttacagttgtctctccacgtggtcgtatctgtcttgagtctctgcactcccagggcagaggctgggtctcattcatcc

SEQ ID NO: 451402 - DNA, 969 bp, Homo Sapiens
cctggaattttcaagaaattggaaagtgggtttcatgaaccagggttccgaagaaaagaagggattgtgtaacccaagaagcccagtatatcttgtgtgcaaaccccgcgttcaaactgacctactggagggaaagacttgcctacagccaacagcaacaggtccctgtaagggcttgccggggcccagtattgtcttccacgggtcaattagtgtcccctctaatggtcaacacaccatcaggcagttttaaagaatgcaggccttttcggttcacataggagaggtcttcagcatttggtgccttgatggccacatggatacagtcaaccacccccatcacccctggcatccctgccaacccatagaattcatccttcagagcctgaatggaggcttcatcagctggaaagcgaatgaactgtgaggccctttccacaagtgcttcagtgacattggcaacacaacgactcatagacgcctgactgattccaatggcatctcccatccgagtctggaaggaacctgaggtataaaaacccaatgctgcaaggacctgtgtctctgggctaatagccctggatcgctgagtaggcctagaaagattcgcccccaagagctccaccaagtaataaatgaactgccgtggaaacccatacatggacatcaagtattcatcagtcacatcatccagcttaaaacggtccaatgtccggtgaccacggccatttagcaagaggtcacagtcaagcactgttattggtatagccatggtaaatgtgaatgttggctctcctctttgctttttctgaactgttcccaatgaagatgttggtgcaagaacgtatttttaagaaagtatcagaatccaacagctaaccacagttaaatggctctgccatttataatcttctctctctccgcggctgccaggttaccagccacacttcccacccacccagccgggtt

SEQ ID NO: 451403 - DNA, 770 bp, Homo Sapiens
taaaatccacaagttttagtttagttaaaagggcagaggaaatgcaaatgccagatttagagcctttgtagaaatttcactgtatttttataaacttgaagttatctgtaacactgtttattgatcaaacgaaggactcgctgctatctaaaatttcataaacaccattaaaaattcaaaattgatattatactgaaccttaaattttcaatagttcaaagagacagtttttacatgtatagcacacaatagatgaaacttaatagcagacatccctagaataccaatgacaagtccaccaagatgcatacaaaattacagataagcatttctttcactgtttttgttgtgcagggaaaaacatttatagaagaaatagaaactcagctggtgaatttcagatatcatcatcatcttcttcatcctgagaagatcccgcctgattagatgcactggctgaggcagcagcaagctgggcttgttgggcagcttgctgcatttgaagccattcctgttgggccaattctgcttgttgctgtctagcttttgcaaataattcttgttgctgtctcaataactcttcttcaggaatgccaaggttttccaaacgagaactggcctttcttctttttaatgctactgttttacactcttgcaagacttcttttacttcactgatgtaagagccaaatcccaaactttctagtgcttgtatgacatgctctggtgagatggtcttcttttccgatttgttacaaatctcattggct

SEQ ID NO: 451404 - DNA, 1083 bp, Homo Sapiens
atggtgttttgcttgattgtagaggtgcaggaagacgcggggcttgagggtgaatggggtccgggccctggctggggggccagcacggactgctccttgcccttggggcccccctgtgtgcacagcaggagctgccggaacaagaacctcagcagggccctgcgggcgatgaccaggccatggcagtcgtggagctgctggcccgagaactccagccagccagcacagcagctgctgccggtgcccagagccaccagcttgtagatctccttcacgtggcccctggcacgcgggatctccctctccaggatgactccagccacagtccccttacaggcccagtatggcgagcgctcgtccaacaggaggtcaaagccggcgctcaccaacgctgcgcagcgctgctcatgggtcaggatgttctctacgctcaggggggccagtggaggccggctggaggtctggggggactctgggttctccagctgactccggatgtagcagagggcagagagcgctgcctgctgtttggcctccgtcttgctattcgcagtgcccgcagggcagaccaccccatccagttccgcgctcaccgagaaggggaagcagggacctggtggctggtcctcccggaagagcaggaagatgcccaggctggccgcgtactccgtgagcaaggacacggcctggctggcaggtgggtctttgagcggcaggctgagccctgctgggggcacagggaccctcggggccttccccatctgttcccccaagttttcccacgcccgggctgcccccagttccccgactccggcccctgccccaggcccactgtccctcaacaccgagacctggggccacccgccctccgcgcgatacgtcgcgggcgcgggcgcgggctcccaggcactttgggcctgggcgggtagcggtcgccaggggcggggctgggggctgatctgcaacgatgcagccaggcggggcttcctacgactgccgtcgtcgtcagcgccctgagaagccgaagccatggccgccaacgaagatctgaggcgctaggccctatctcgcgctgctctcgcc

SEQ ID NO: 451405 - DNA, 953 bp, Homo Sapiens
  misc_feature (257)..(257): n is a, c, g, or t
gatgtttgtaagtaaactgcaggttggtgggtaaattggattgtgaattcccagtttagacgcattgtaccagccataggatgaagtggggttaaattcctggagcatcttctgcttgtctatcgggacttccaggctctgagcttcggttggtgacggggggaaagtaagtggcctgttgtggaagaaactgacttggcattgtgtatgttgcacaggggggcaatgccctggaattgtttcaactgcagtctgcnggaacagcagaggtgtgtgtgttaaggcctgccatggcagctgacatagaaacattaagagtgtccattgctgctgtctgatttgtagaactgggcatatctagatccggtgtattcagtagctggtacaggtggccctgctgggtagggacagaaagatgaagatctggtgtaggaagttcttgtttgatgaaaatattgttcacctctggagctgcggtctggtgtgagctgaatatactggtgaactcagggagggcctgggtcggggccggaggaggggcagtcgtttcactctggtggctgaaaatggcaacaggttctgtcttgatgtgtgttacgcacggtctctgggatttgtagaggccagttctcaggtgagtgatgtcagggaggaagacgttcatgttgatactgtaaggtaacccttcagtgtcagtgaagaactggtctacgactgaggcactgtctcgtctatactttttatgctctggaattataggaactggaggaagctgaggtgtcagatacttctccatttcacatcttgtcttttggagagactgggattgctttttccaccttgttagtataataagtagacaaagtgacataaatataaatgcctggaaccaagttataggccaagcgtattgtagcttaaactgcacagtattttaaattctgactcgaaac

SEQ ID NO: 451406 - DNA, 1016 bp, Homo Sapiens
ctgttaaagccttttcttttcgcgcagccaaattgttttgaactgtaaactctcattccacgtgtccccgcaggcgaccatcagcctggttcttcccatcaagccttgcgtacacttctcctgccgaaagggactccaggcaacagctgcaggttcagtcaggaggacctctcgctttagcctgtgattaggactcgctgggaggcttgatgtgggaacctcttggctttctttccagctctgcctgttaccgttctgcaacagcaaggttttgttgctgggccacatcctctgtctcctaagcacgtcccctgctgtaaagctctggaagcgactctccaagatgaagggcctgctggcatgaggcaggttgaccggcccgtcttccccacctggctcggggggctctgaaagcagggccttctcactgggtggctcgcagttggctgggtcgctttctgccatcagcagtaagccctcgggcctgcagccttcctccagctcctggagctgctggtgacactggtggagcctgtgctcgatctgggcgatggtggcagaggcgcgctggttcaccttctcaaaggcctgctggatgtgcggcacctggtgccggtctgctttggataccagcttgaggtagctcacagtgttgccatcccgactggccttctccactctcagctgctctgagaggtagaggatgcggtgcctgacactatcctgtaagttgtgggctaggcctccatctgcgaggctggaagggccactggggccgtcttcgctggatgacagggaccggcatgaaggcacattggaggggagggttgcgctggggctcctggtgtgttccgcctttaaaaccatgacttttagactgcaggctgccttctcaatagcatcaatgcaatccagaagatagttgactgatatcttcgatacactgagagaataactcagaggtggggagaaggttctctgagaccgacatgggggctagtgctggcaccaccgga

SEQ ID NO: 451407 - DNA, 981 bp, Homo Sapiens
ggtccagaatttaaagtaaaggggggttattcaaaggcatttgaagcttgccccaacccggaaacaccggctccagaggaatggagtccgccctcggaaaccggggaggggaaagggtgcctcggggcaggccagagccggaggcttttagcaaggcccgcggcgtcccttcctacgaggtggggcagtcctcgcgtttgatggacgacgggcagtgcctgcttcagggaagggtgcggcagtcacggtttcccgtcttctggtctaagcagtgcagaaaacagggaagttcatctacaagcgtcatgaactaagaaggcaggaggtttctgtccccggcaccggcgaatcccggacccgagaaaggagctacgggcgcacggaagcgggcggcccccggctctcgcggggcttaaagcgcgcagtgtgttcgggttcacacctctaaatgtatttttgccatttcttaagtagccttaaaaatgtccgtcactatttagtccttttatcaaccgagggagcccggaaggccagcagcgagggcgtcggcgagaagccatggaggagaaacggcgcttctctcgggagtttaggtggcagcttcagcagcacacgtttcagcccattctggggccgtttctagtgtggttaacgtacaaaaataaacaaatcccctaaaagtcccacgcggacatcggcgggagcccagggccggacgccgcggtgtggagcgagggcgccggcgcggactatgagggcccaccgcgcctcgtccagggctcacttaagagcagcgtgagcagcgcttgggaccgccgtccgggacgcccgcagccctttaggatggaggccaccgtgacctccgccaccgaagcaccgcgctcccctagtcccctcagccggtcgccgttccccgccgcgcaggcgcaggagccgcggcgagcccctcggtcacgcctcgcccctcggtcacgcctcgcc

SEQ ID NO: 451408 - DNA, 1307 bp, Homo Sapiens
  misc_feature (72)..(82): n is a, c, g, or t
  misc_feature (150)..(150): n is a, c, g, or t
ttgcgcccccttttggggccccctgttgccaaaaaagggggacgcaaagtgggcccccggggaactttttgnnnnnnnnnnnttttgttgattggcttggtttggtgggttttcacaggtctccaattgttttattttttaaagatcaantgaagatactttcgaaatttaaatacacagcctgctatcttctgttctccaaacagtggaacattagaaggctttaatttaaaatattagatccttttgaatattccaaagtgtttctgcactcttcttgaaaagggcctcctcctcagaattcaagttaattttcacaacatctgagacaccattccgccccaagacacaagggatactgagaaagagttcttcttttattccatataatcccttaaccatggtggaaactgggtgcactctcctaagatttttcaaaatggatcctaccagatccatcacagacagtccaatagcccaagaggtataccccttcagcttgataatttcataggcactttgaataacttgtttatggatatttttccagtgttccttatctgaatccgttcctaatttagggtccagagtcttcagagcaacaccagcaacattcaccccactccataagggcacactagaatcaccatgttctccaataatccaaccatggcagcttgtggggtggacacccaacttttctccaattaggtaacggaaacgggcagagtctagattacaaccacttccaattacacgagttacaggtaagccacttatcttccagactatatatgtcaaaatatccactggatttgaaacaacaagaattttacaatcaggactataatggactatggcaggaatgattgatttcattatagccacattacgttggaccagggcaaggcgagtttctccctcctgctgccttgcacctgctgtgacaataactattctggagtttgcagatacactgtaatcttttccagaagtaatctttgaagtactaaagaaaagactgccatgctgaagatccatcatttctcccttcagtttgtccaatgcaacatcaacaagggcaagttcatcagccaatccttcagtaagatactaatagcacaagccatgcctacggcaccagttccaacaatagtaattttacactgggagttttcatcatcctcaattagcttctcaattagctgctccttgacagttgacatttggagaacctttgaaggaaggcacagaagtgacaccagaaaaatacaccaacgacagttgaggcgctaagcccgtcgacg

SEQ ID NO: 451409 - DNA, 1051 bp, Homo Sapiens
ggagaaaagaggagtgttttcccttgatatcccatgtaaatcccccttaaacccatggtgggaaacttgggtgcccattttcctaaggattttttcaaaaatgggtccttaccagattcattccacagggcagttccattagcccaaggagggtattcccctttaagcctggataattttcatagggcactttgaataacctgttttatggaatatttttcccagtgtttccttatctgaatccgtttcctaatttaggggtccagagtcttcagagcaacaccagcaacattccaccccactccataagggcacactagaatcaccatgttctccgataatccaaccatggcagcttgtggggtggacacccaacttgttctccaattaggtaacggaaacgggcagagtctagattacaaccacttccaattacacgagttacaggtaagccacttatcttccagactatatatgtcaaaatatccactggatttgaaacaacaagaattttacaatcaggactataatggactatggcaggaatgattgatttcattatagccacattacgttggaccagggcaaggcgagtttctccctcctgctgccttgcacctgctgtgacaataactattctggagtttgcagatacactgtaatcttttccagaagtaatctttgaagtactaaagaaaagactgccatgctgaagatccatcatttctcccttcagtttgtccaatgcaacatcaacaagggcaagttcatcagccaaatccttcagtaagatactaatagcacaagccatgcctacggcaccagttccaacaatagtaattttacactgggagttttcatcatcctcaattagcttctcaattagctgctccttgacagttgacatttggagaacaaatgctttgcttggcgcaatcagtacagatgacccacagggacaaagcaccacctttgaaggaaggcacagaagtgacaccagaaaaatacaccaacgacagttgaggcgctaagcccgtcgacgatcccggga

SEQ ID NO: 451410 - DNA, 822 bp, Homo Sapiens
tgaaaaatttaaatagggcactgtgaataacttgtttatggaataattttgccaggtgtttccttatctggaatccggttcctaatttagggtccagagtcttcagagcaacacccagcaacattcaccccactccataagggcacactagaatcaccatgttctccaataatccaaccatggcagcttgtgtggtggacacccaacttttctccaattaggtaacggaaacgggcagagtctagattacaaccacttccaattacacgagttacaggtaagccacttatcttccagactatatatgtcaaaatatccactggatttgaaacaacaagaattttacaatcaggactataatggactatggcaggaatgattgatttcattatagccacattacgttggaccagggcaaggcgagtttctccctcctgctgccttgcacctgctgtgacaataactattctggagtttgcagatacactgtaatcttttccagaagtaatctttgaagtactaaagaaaagactgccatgctgaagatccatcatttctcccttcagtttgtccaatgcaacatcaacaagggcaagttcatcagccaaatccttcagtaagatactaatagcacaagccatgcctacggcaccagttccaacaatagtaattttacactgggagttttcatcatcctcaattagcttctcaattagctgctccttgacagttgacatttggagaacctttgaaggaaggcacagaagtgacaccagaaaaatacaccaacgacagttgaggcgctaagcccgtcgacccgct

SEQ ID NO: 451411 - DNA, 667 bp, Homo Sapiens
ggggtcgcgcgaggttttggtttgtgaggatcggcgagtggcgcccaccatctctgcttgctgaaaagctgcagaggccgccaggagcccacgcacctgagacttttacctttacccagaaaggaataaaagaggtcagatgatgacagctgtgtccttaacaaccaggccccaggaatcagtggcttttgaggacgtggctgtgtacttcactacgaaggaatgggccatcatggtgcctgccgagagggccttgtacagggatgtgatgctggagaactatgaggctgtggcctttgtagtgccacccacttccaaaccagctttggtctctcatctggagcaagggaaagagtcctgtttcacccagccacagggagtcctaagcaggaatgactggagagcaggctggataggatacttggaactaagaagatatacttacttagctaaagcagtgttacgtagaatagtatcaaaaatttttcgaaatcgtcaatgctgggaagacaggagaaaagcttaattcttgacatttaaataccagttttcccaagtaaggagttgatgttagagccaccttaaacgatgtcaaatacacattttctttttctgtagactggtagatttaatgtttttcattcattaaaataactcattttgatgt

SEQ ID NO: 451412 - DNA, 782 bp, Homo Sapiens
ttcttctgggatccacatcacaaccatatttctaacatctttcagggcagggaagttgcgtctcattcaaattcaacactggaaatttggggaagtctgttagtacagttgatcaaacttttgtcaggtaaacccttcggaggcctgccatgaaatttggagtaaaactttgaactctgagacaataaagaatgggccttagtaaaggtacattctggtaaatgatgagctgcaaagccggaatctaagatgtctaccacggtgagcactgggagtttatcttcagcatccaggggagttttgcaggatgagccgaggattcgaggatggcccctctcaatgcggcggatagttgcccagcattgtgggtgctgacaaacagccaagccacaggtggtttcgtcccactggctctcatctggcaagtccatagctagaaatggtttaggccaaaggccaaccctgcagcattctagtgctcattattacaaaagcgtgaggggcgaaaagattaaaaatgaacatcaacttcggtagagatggaaaaagactgcccactccattccaggaaagaaaaaagaaagtgggagaatctgatcacgacgggctgaggtcctgtgagagcaaagcagattccaaaccgcttagggttgctaaatcaagtggtaaaacgtggccccttgcggcgcggtgagattaacggacccggcgggcccagagcctgcctcgggtcctaaagggatccgccccgccgagtcagccacgccttcgtctcccacgcg

SEQ ID NO: 451413 - DNA, 1323 bp, Homo Sapiens
cctggaaataacaggtattaatatggtgataaacgatgtgataatctctcctcaaattcacacccgcgtgcttcgtcactaagacgcatgccccttcaagggcatcattcaccgactccccttaacatttttaactcctcacttttaatagggttccccttggaattagataatttgagtcctgtgttgcccccatttatgaaggttttaatggtcaggatggagtatcccccgtttgggggggaagaaagctttgggggttttgttaaacagggccctggattgggaaagcagagtagaattcctgaaggagcaatgggatgagagggggattcaagcacgcctgtggacgcgccctccatgtaagggtagaagaaggcaatgatgatgttgataaacacggccaggttgaaggagatgctgccccacagggtcatgcggcgggagaaccagtagatcagcggcatgctgcggagcttgcgctgccactccatctcgttgtgcaggaaggaggactggtcgaagaagtcgctcactttgctgccctgctcgtcctgctcagtagtggtgaagagccggtgcttggtttcctccgtcaggaactggcagatgccgggcactgggaacacgatctgctccatgctgcggtcctgccgcacaatctcgatctgggacgtgtggttctcatagtaggccagggggtcttcctcctcctcctgtgctggcgctgaggacttgagcatctgtgacagctgcttgttgttgaggctgagcatggaagagataccctcggcctcctcctcttgaatgcgcttcaccggcttcagcaggtgctgcagctgtttattgtgcctggagagctgcagcgccaggatatagatgttatggcccacttcacgtgggctcacctccgagttctcacgctcttcctcctgcaggtaggccttcttgatgacgtccaccagctcctggggccgcaggctgatgaggattcgctcagcattttcactgtcatgccggctctccatcagagccaggagcagcttggaggcattgtccttgagctgcagcaccaagatccatgcggtacttgcacagggggctgatgtcattgaggatcagtgcggtgatgatgtctatgccattggactcgtgagtcacaatgcaagtctggttctcatggcaggggccctggcagtactcagtgagggtctccaaggtctggatgacgaggcccacgttgtcctcattgatgtagagccccagcagccccaggccgcccgtggtgctgccgcacatgatgtccaggaactgcagcgtctc

SEQ ID NO: 451414 - DNA, 1077 bp, Homo Sapiens
gcttgttgctgaagttttccaagtcgcactccaaatgcctggtggaggattggcacagctggagtcccaacagtaacattcagttctggggataaagaatgccgggatatttctactgtctgtgggtgtaaataacgtgttgtcacggagatctggttcttgtctggaaggttggtgccaaagattcataaccatgggatggctcagtaatttttctgaaagaggttcttaactgatgtgaaaatcccatagaccaaagtttccataggagaacataaattccacctccagcctgcagacaaatatgtttccatgcaacacttggacctgcttcaatgaagcaccctttctgaattacctcataaagatgtatctggacactccctaacaagaaagcacggtttttgctctattgtcatattgtatgagttccaataaaatattattccgcttatcatcataacgtctgggaacctgtacagaaaaatacttcacttcatcgaacttaattacagtgttcttctcatcgtttttggatagcaagctacacatttttgtacatttcacagctttgtttatagagatgcgaatgaataaattagcataatgttgtaaactgatcttaggcataaaatgtctgcagttctttatatgaatgcccaggcagccaaccacatccccaaatggcaccaaatttggtgtctcctgtgttatttccagttcttcactatcagactctttaagagtttttctcagcatgttcagcagccggtgcccggtgccctcctggttcttgttcttaggcagggccgtcgtgcctggttcagggcgtaagggaccgaagaagcctccgaccctttaatgtgcatgatatccgggctgctgtagggattcctctgcaatagcggggtggcggacaggacttggacctgcccgctgcggttatcaagtgtgctgaaaggcctatttgtctcttggggtggctccatctctccatcttctgcggcctgtctgcgcccaaccgacggcccgctactccgctctcgacgaattcgagctcggccgatttggcctgat

SEQ ID NO: 451415 - DNA, 876 bp, Homo Sapiens
gagggcccctgtgtgctccgctcctccagctgcagcagcagcagctccagagagtgaccctgccggtccaggcagccacgctctcccggagcctgctggcagtctcctcttcttccgtctccagagcctggaggagcctctgctcttcttccaccaggtagaggttcatcttctcaaactccagcacaatgcgttctctccgctccttcaccttgccctgccactcggctaagctctgctcctccctggcctgcagattccctgtcctggtgatctgctcccgaaggtactccatgtcctcctccagcttcaacttgtacccctgcactgcctcctcggcgggcagcaccctgtgcagccggtgctcccgggactccctgcacaccacacagatggggctctggtccttctggcagaaaagcttgaggggctcgtggtgctcctggcacaggtcttgcttctgcagaccaggatgctgctgcgccatctcggccaccttggtcagcagccggttgggcagcaggttcctctgcggggacatctctctgcactcggggcaggggaaggagcccttccgcttccgcctccccttcttgcccctcgccttttcccagctcagctggatgcaggctcggcagaagttgtggccacaggtggtcatcacagggtctgtgaagtaatccagacagatggagcacgtagcttcctcctgcagttttctggcgagttccacagcctccatggctccgcggggaaggggggcccgcacagcgcctagtgcacctggaccgagcgctcgctgccgggaaaggctgggtctgcccccacgaagcccaggaggctgcggcccggcccggggcgtggggacctggggcg

SEQ ID NO: 451416 - DNA, 1104 bp, Homo Sapiens
gggaaggccgttttggccccacagcccaaggggtaaggcccaaattgggttccttggtggcagaacccccttgccctttcggggaggagcccgaggtaggcccttttggggcttttcattcgggaggaggtaggggtaccgcggaggtgggcatcaggcaaccacatcttttggaaaacctcctaagcacttcaatctgtccgggaactttgcaccacagtcctgggtctggtggggggggcaacctttgggcactgcacactcaggtgtttctcctgctcaggggttccttcatgtcctgcagcatctggaggggcccctgtgtggctccgctcctccagctgcaagcagcagcagctccagagagtgaccctgccggtccaggcaggccacgctctcccggagcctgctggcagtctcctcttcttccgtctccagagcctggaggagcctctgctcttcttccaccaggtagaggttcatcttctcaaactccagcacaatgcgttctctccgctccttcaccttgccctgccactcggctaagctctgctcctccctggcctgcagattccctgtcctggtgatctgctcccgaaggtactccatgtcctcctccagcttcaacttgtacccctgcactgcctcctcggcgggcagcaccctgtgcagccggtgctcccgggactccctgcacaccacacagatggggctctggtccttctggcagaaaagcttgaggggctcgtggtgctcctggcacaggtcttgcttctgcagaccaggatgctgctgcgccatctcggccaccttggtcagcagccggttgggcagcaggttcctctgcggggacatctctctgcactcggggcaggggaaggagcccttccgcttccgcctccccttcttgcccctcgccttttcccagctcagctggatgcaggctcggcagaagttgtggccacaggtggtcatcacagggtcgcggggaaggggggcccgcacagcgcctagtgcacctggccgagcgctcgctgccgggaaaggctgggtactgcccccacgaagcccaggaggctgcggcccggcccggggcgtgatcca

SEQ ID NO: 451417 - DNA, 1036 bp, Homo Sapiens
  misc_feature (91)..(91): n is a, c, g, or t
  misc_feature (107)..(107): n is a, c, g, or t
ccccccgtaagtgcttttgaataccaggcatcccagggttttgggcctgctaggccacgcttgagtgctccgagggcagtttagggaaggncatcccagcccatggngatggtcccagggtacccaccacccgccagtggcaatggggatctgtgctggttgcccaacattgaagtcctgccgcatttcctgccgcctgttgcgcatgattgccttgtattcaccaatgcgcagctttttgccatccaccagggcaggtgcgctttggcctgggcttgtacttatagtcagggtacttctccaggtgctgcttgctgagacgggcttgctcctcataatatggctgtttctctaggtttgtcatagctttccagcgagatcccaatatcttgctgatgttggagttgtgcatgtcaggaaaggcttgaaggatctttctccgttcatctttagcccacaccatgaaggcattcattggacgctttatgtggggttcattgctaccacgccctcgggattccctataaattcttgactctgagactccagcacttccatcagaatctccactcagattgaaatccatcattgcatggctaaattttccttcttcattctgtttaactgccagttgctgagtcagactctccagtgttgttttttccttttctgttcggcagttattgagacccagactattcacaacagccaccttcccatcaagcacctgttgttcccgtcggagttgctccttcatttgccgagcttcttggattgccttggtgacagcatcatggtcatttaagtaacctattgtgctaactctggctgaaggactagctaacgctgctgggacagaggctttgagggggcctgccccactgtttattctcagagctggcatatggggagaggtgggtgatgtgggtgatttgccatcagaggtcttgggtttagctgataggttcagtggctgtgccacttcatcatgcatgcacagctcctatggcacaaatcatcccgggaattccggacc

SEQ ID NO: 451418 - DNA, 737 bp, Homo Sapiens
accttctcaccatcaatgtagctcatctcactttttgagcgaggcacagaaaggggagattttgtgtcttcagaaaatgagtatctgggagagtacagatctgaatcatcatctctgttcagtttgtggatctgtttaaacatagtcttgtaccagtcttttgatctctcagtgttccggagtgggatgcccacttcatccatggaaacatcgcttaagtcctgagtgctcttcaccacccgcctactgtcatcctttgctctttttttcaatagccttgccaggtgaggtgggtttttcctgggttggtgctgagtcctgctctcccactcttctttctgagacaggatctgaaaggctactgagtcgtttttgctgttctcgattgtgttgcaagagcacaatagtaggattgacaatcgttgtggagggataggcggatgaaggcttgctaactgatggaaaggcttgggaatcagttccaataagggaagaagaaacttcatttagtagaggactggaatccttctctatgtcaagctccataacaggaacttttacactcgatcctactgaacccgaagccctgtgagtagattcacgtattcccatattacaactcgcaatgaagttatcagattctctcaattcccagggctcctaaggaaaaaggagacccaagcactttgactcagctttttctctaagcagttgggctttcccggctgtgatgggaa

SEQ ID NO: 451419 - DNA, 896 bp, Homo Sapiens
ccccgccccctgcgctcacctgtcccgcgcgctcgccttccggggacccggggcccatggacacatacacccagccctgctgtcccgcgcgccagctcaccagccctacccaagggacatcattcacgcctgggcgcctccgccgggctccgggagcccaaggtcgcggctgggccagcgctgagcgtcagaggacgagagcaggggcctccccggtcgccccagcaggcccaggcacataggtgcccagagatccctggcttctgatcgcccggaagactaagagctttagttttggtccagaaagcattttcaaggagctggtcaagcatggctttagcagataagagacttgagaacttacagatctacaaagttcttcaatgtgtgcggaacaaagacaagaagcagatagagaagctgaccaagcttggataccctgaactaatcaattatacagaacccattaatggacttagtgctttgcacttagcctcagtttccaatgatattgatatggtcagctttctccttgaccttggtgctcaccctgatgtgcaagaccgaatgggctgtactcccacaatgagggctgcagaactgggccatgaattgtcaatggaaatattagcaaaggcaaaggctgatatgactatagttgatcatgaaggaaccaaggtgtttgttttactgcattttaccgactaagcggcattatcgctgtgctctgatcgcccttgaacatggtgcagatgtcaacaattctacctattgaaggaaagcccaataattccttagagcttgtgaaagatgcccatggatgttacagaatgtggttgcctgaacattatttggaacaaaggggccaaatccctaatgccaatccaattcattca

SEQ ID NO: 451420 - DNA, 758 bp, Homo Sapiens
tcggacgaggccggggcccatggacacatacacccagccctgctgtcccgcgcgccagctcaccagccctacccaagggacatcattcacgcctgggcgcctccgccgggctccgggagcccaaggtcgcggctgggccagcgctgagcgtcagaggacgagagcaggggcctccccggtcgccccagcaggcccaggcacataggtgcccagagatccctggcttctgatcgcccggaagactaagagtcccatgaagtgggcaccattgctattgccagttcacagatgcagaaactgaggtaaaaactagctttagttttggtccagaaagcattttcaaggagctggtcaagcatggctttagcagataagagacttgagaacttacagatctacaaagttcttcaatgtgtgcggaacaaagacaagaagcagatagagaagctgaccaagcttggataccctgaactaatcaattatacagaacccattaatgggcttagtgctttgcacttagcctcagtttccaatgatattgatatggtcagctttctccttgaccttggtgctcaccctgatgtgcaaagaccgaatgggctgtactcccacaatgagggctgcagaactgggccatgaattttccatggaaatattagcaaaggccaaggctgatatgactatagttgataatgaaggaaaaaagtaaaaaatcccgaacatcctcttcagcagatttccaattcattttgttagcc

SEQ ID NO: 451421 - DNA, 734 bp, Homo Sapiens
ttttctcttgccccagttgtgggttacaggtcaagtagagagtcagccccaggcaagggcacaggaactcagactgtaggtcagcattccagagttccacgtgcagacgctgtgctgcaggctgggaaccacaggagaaatggctgaatgttctgtgggtgtggctgtaggcagagggctgatcagtgaggtggggtggtgacagtcttctataggatgtcgtatgcatcatttatcaacttaactaccacctactggtatggttttctgactatatttcatcttcttcgcctcacgtggagtttcttttagaatggaaagttttcttcctttcctctttgaatcctagcaccaaggccacactcggcactgaatacctcaggataagatgaacgcggaattcagggcctggtctcaaccgccctctcccttttcctctcacttagacgacctggccagctgggccactctccactctcgccccctcccgccctcgtggcctctgtctagaccgtactccctcctactgggtgatgtctcttcccctgggacccagggaccatcccgttgttgacctccggggtcaggggtgcggatgggggccggcccttcccgcggtcgccgccagggggcggcaggagcggctccagatgacagcgggagccgcaagaggggagggaggaaggaccgagggagcgcgatcccgctctcggatcgcaaactctgagccagag

SEQ ID NO: 451422 - DNA, 972 bp, Homo Sapiens
gccccaagttggtgggttaccaggtccaagtaggagaagttaggcccccaggacaaagggcccaaggaaattccaggactgtaggtcagcattcccagaagttccacgtgcagaacgctgtgctgcaggctgggaaccccaggagaaaatggctgaatgttctgtgggtgtggctgtaggcagagggctgatcagtgagtgggggtggtgacagtcttctataggatgtcgtatgcatcatttatcaaacttaacacctactggtatggttttctgactatattttcatcttcttcgcctcacgtggagtttcttttagaatggaaagttttcttcctttcctctttgaatcctagcaccaaggccacactcggcactgaataccttgcgtgggagtgtgtgtgtgaccagggctccttcctgcccttagagtcaccgcccccttctcgcacaggtttacagcaccacttgcctcgcccactccccgctttgcctccgccccatcctgatgctgccggaatggctgttccaaatggaaggatgcccgcgtccgtcccctgccccagtccttcaacaggtccccacagacctcaggataagatgaacgcggaattcagggcctggtctcaaccgccctctcccttttcctctcacttagacgacctggccagctgggccactctccactctcgccccctcccgccctcgtggcctctgtctagaccgtactccctcctactgggtgatgtctcttcccctgggacccagggaccatcccgttgttgacctccggggtcaggggtgcggatgggggccggcccttcccgcggtcgccgccagggggcggcaggagcggctccagatgacagcgggagccgcaagaggggagggaggaaggaccgagggagcgcggatcccgctctcggatcgcaaactctgagccagagatcccgtaactccgggcaggaccag

SEQ ID NO: 451423 - DNA, 866 bp, Homo Sapiens
gtgggtacccgacccccaatcctgttctggcttggtaggctgtcacttgttgacctcacccacaggccccattccggggaatttggtgaaacctgtcccttacgggaattgggtggctcctggctccacacgtcagcgtcagggcactgcttggaccctgacctgagacctggtgacagggagccatgaggggccaggcctcaggtcccataggtcagttgcaagggcctagtacagcttagtggacaggtgttaggaaggtttggtggggacacttgaggtgccctggggttggggtgaaacccctctgcagcctagtcagcccaagggcattgtgaaagtgagagctgccagaggtctgggctccagcccctgggtgacattaaacttttctgaatttcggtttttccctgtaaattggggaaaattacttgccccagcttcaacactgcctcccctccacccttttgctgctgccttatcaggccccagctgtaggcaggtcagcccacacccggcggcagagcccagagaggctcgctcatctcagccgccagaagtgtcatcccagggaaggtgagcgaggctgtccactaggactaaataggggtggaggtaacaggtagcagggactctggcaggaacggcctttcagacgttttaaggaccgtctgagcggggcctctaagtatgggtaggagacaggcggcctagggattccggttagcatgtcgcgttctgccgcagcagggctgggagcatccccagggcaggcggaggtcggaggtggtgaggcctttcggcgaagctgaggcctggaacaacccggtgggaagccatggagggggtcccctagcggaggctgg

SEQ ID NO: 451424 - DNA, 783 bp, Homo Sapiens
cctcttctttcttgatattattaataatttatgaagcactcaagtaacatatctttaactttctccacttcctccaatcataatccaagcaatataaagcttgatggatacgccaaagccgacatacgtctgcacctgtcttagtctccagactcctccttagtaacatgacaaaggctgtctttcctgtgtcttcccttggcaaggcaggcctttctcccaccaggtaacacacaaatcctgaatagaactctgtagttttcgttcagactcaggtaatgcatataaaataccatttaatataataacacattccagtagggcttcgtagttctcactttcatttattacagacacagaagcaagaatcacagatgtaattgcataaattatttctatgctttttctcatttttgagccatgttcggtttccatattgtcttcagcctgggcttccactacctgccacccatccactgggctttctaacgacacatctgtcaataaattcttcagcctttgccataattcttctttctgtttccttgataattcatctagtaattcatttaggctgaaaggatcagaggcctctttatcaagttgaacaaattgcaaaaactctccaaccagctccttagacacggcttgtacaaacgtctcacgtttttccatgacagatggcactgttcaaatggcatttattttgtaacctgggctcggggacccgccgtttcaccgcgctcggaccagattcaaacgcacccgccggcgccccagacg

SEQ ID NO: 451425 - DNA, 867 bp, Homo Sapiens
gggcgacgcgaggcctcttttgaaagatgcggcctgaccctgtgaacctcgcgcagagcggcctgaagcgagaggttgaggctgggaggtgagaaaatggctagcaacaatcattggtttcagagttcgcaggtccccagctttgcccagatgctgaaaaagaacctgccagttcaaccagcgacaaagacgataactacacccacaggatggtcctcagaaagttacggcctgtccaagatggcatccaaggttacgcaagtaacgggtaattttccagagccgttgctttccaagaatctttcatctatttcaaatcctgtccttcctccaaaaaaaatacctaaggaatttataatgaaatacaaacgtggagagataaatcctgtgtcagccttgcaccagtttgcacaaatgcagcgagttcagcttgaccttaaggaaactgtgacaacaggtaatgttatgggaccatattttgccttttgtgctgtggtggatggtattcagtacaagactggactgggacaaaataaaaaggagtctagatccaatgcagcaaaattagctcttgatgagcttctacaactggatgaacctgaaccacgaattttagaaacatcaggtcctcctccttttccctgcagaacctgttgttttatctgaactagcatatgtttcaaaagtacattatgaagggagacatattcaatatgcaaagatttcacagatcgttcacgaaagatttcaatcacctaatttctaatcgttcagaatacctgacatattgcagttcaattgggctgcctttataattgaaagagctgggcaacatgaggttgtagctatagggcccgggtgaattca

SEQ ID NO: 451426 - DNA, 768 bp, Homo Sapiens
tgtattcacctgtgcctatagctacaacctcatgttgtccagctctttcaattataaaagcagccaatgaactggctatatttcaggtattctgaacgattagaaattagttgattaaatctttctttaacgatctgtgaaatctttgcatattgaatatgtctcccataaatgtacttttgaaacatatgctagttcagataaaacaacaggttctgcagggaaaggaggaggacctgatgtttctaaaattcgtggttcaggttcatccagttgtagaagctcatcaagagctaattttgctgcattggatctagactcctttttattttgtcccagtccagtcttgtactgaataccatccaccacagcacaaaaggcaaaatatggtcccataacattacctgttgtcacagtttccttaaggtcaagctgaactcgctgcatttgtgcaaactggtgcaaggctgacacaggatttatctctccacgtttgtatttcattataaattccttaggtattttttttggaggaaggacaggatttgaaatagatgaaagattcttggaaagcaacggctctggaaaattacctcagaaaggcaagccacacttgaaggggggggtttgaacagtcaaggtggtaacagatggttaaacgagcggcacaggtaaagagctctacaggcctcctccaaatgttgagtcagatgccagctccaggtacacggccacgggtaaatgtctatacaaccacgaaaccccgct

SEQ ID NO: 451427 - DNA, 1158 bp, Homo Sapiens
ccagttaggactgcatttttaattagcacctggtttcagcggacctttggtcaatcttatcagctctgaagccggagctccctgaaacttggatccgggccccaggggggaccgttgtggagcgtcaaagggatcctaaggtcttgctggtgcggcccaaaggcaccggacgttggggccaagatgacctccgcgctgccatgaaccaggccattggacgcgggctccgcgccgagcctgcagtcctcgaggagtctctcgggttcctccgtctttgatcacaccttctcggatggctgccgggcttttgcctgccccgccttgcatcgagtctctcatgacctcctccgcctccagcttgcccttctcgtcccctcggaagtagccgagggccggcccggggccttccaacttgaccaccctggaggctctaggaccggtttcgacggcccctcgaggccccactgactgatccaggctgggccccagcttctgcttcttggccttgacatgcagcgccaggggctgcaccgggtgcaactcgggcctggagttggcgccgtctgacgctgtcggcggctgcaggagccgcaggtcgggcctgaactgcaacagccgcgcctgcgcggacgaggcagcggcttcctcgttctgggcctgaggctgtggtagcagcaacacctgctctggcttcacctgcagcagccgccgcaccgcgggctgtaagccggacgccactgcctccccgcacgacgaggccaaggtcgcactggctgccgcgctcagtgtgggagacgacggagggggctccatggctgctgcccaaaaggaggtgccctcgaccggcagcgggggcggagcgggacgcaacgggcgcggctgaggcggcggctcgggtctggctctctccatgggggagccttgcaaggcctttgctacccagaaccctacgcggttcaaaacgcagctgtctgtctgggcctcacccaatcacaacgaccgatacccgtggacggccaatcacaggcgggttttccggctcttcctggtccctactctcgcctcgtgctgagtcctcgaatcacctgccatggtaggagccgccgcacttgttgcacattttcgttctgactctcttgtggagttctcttacagccg

SEQ ID NO: 451428 - DNA, 1177 bp, Homo Sapiens
agcggacttaaacgcactgggcagctcgcaggcgccattcgctcttcagacgccggagacgtaggagtgggtcttcagactccaaaggggttggactaatggcggatgctgaggcgagggctgagttcccggaggaggccagacctgacaggggcaccttgcaggtgttgcaagatatggccagccgcttgcgaatccattccatcagggccacatgctccacgagctccggccaccctacatcatgtagcagttcttctgagatcatgtctgtgctgttcttctacatcatgaggtacaagcagtcagatccagagaatccggacaacgaccgatttgtcctcgcaaagagactgtcgtttgtggatgtggcaacaggatggctcggacaaggactgggagttgcatgtggaatggcatatactggcaagtacttcgacagggccagctaccgggtgttctgcctcatgagtgatggcgagtcctcagaaggctctgtctgggaggcaatggcctttgcttcctactacagtctggacaatcttgtggcaatctttgatgtgaaccgcctgggacacagtggtgcattgcccgccgaggcactgcataaacatctatcagaggcgctgcgaagcctttgggtggaacacttatgtggtggacgggcgggacgtggaggcactgtgccaggtattctggcaggccttctcaggtgaagcacaagcccactgctgtggtggccaagaccttcaagggccggggcaccccaagtattgaggatgcagacaagttggacatgcaaagccaatgccgaacagaaagagcagatgcacattatcaaattaattgcagagaccaaatacaagaccaggcaggaatcttgagcccaagaaccccgcattgaggactcacctgagagtcaaaccattcagaggactgttaagggctaccccttctcgcaccttggatttcaccgacgtttggtgcacaagaataggatactccggaacaacatgcggtcatggattctagggctcagctgagatacgcgaacacaacagaagtcgtgagactgacatggtgacacgggaactctatactatgaaatatccagaggagtaccctgcgcccacgcagggattgggacacaatgttacgttctgagttctccggatga

SEQ ID NO: 451429 - DNA, 837 bp, Homo Sapiens
ccgtcttccacgatgcgcttggtgggacctgtgggccattgatcatctcggtggatgacatcaccgacttgaacccccgagctgccagaactggagcccccgaaggaggtggatgagaaggtggtgtggctgcccccgctgcagcccagcatgttgaaggatgagaaggcctccatgaaggccggaaattctccaaagcctgccgagaaggcccccctcaggccatggccccggccaccacggtcactattgaatgggctgtcccagaactcaaaggagaaagggtccaggccaccaaaaaactcccggaagatgtcctcagggttacggaaggtgtagccggtgtcgaaggggctgtggtagggcgtgctggccccgccaccagcccgccagctgtcacagccagcacggtcatacagggagcgtttcttggagtcagacagaacctcataggcctcagacaccagcttgaacttcttctccgcctcctccttattgtcagggttcttgtcggggtgccaacgaagggccagcttgcggtaggctttcttgatgtcctccggggaagcgctggcctgcacgcccagcacttcatagtagttagccatggccaggggtgtgggtgagaggagagggaacgtggaggccaggtgggcgcaggggcccagctggtcagatggacgggggagaagtggccggtggtctggggcccttcagcaggggcctggctggactccgcaagctctaggcaagattctgcccaggagttcaccttttcgtagtaccaattctcagggactggaggggcccccactgagaggagtggggggaggggag

SEQ ID NO: 451430 - DNA, 311 bp, Homo Sapiens
ctgcttaaatctccgatggagctgctcgatctgatccgatgagactggcccccgcggtgctccaggtccacaccctggtccacagccagaggcagaactggtccatgccgagttcaggacccaggccaagtccccagcccggctgaactcgggcagagtaagcgctttctccgccatttccctgcgggcagctcggccaggcctcccagggctccccgcctccgggccgcatgcggggcgcgcagcctttgctggtcccgggagactcagcgaactcaggggaggacgctgggctccgggcaaagtgctct

SEQ ID NO: 451431 - DNA, 1320 bp, Homo Sapiens
  misc_feature (14)..(14): n is a, c, g, or t
  misc_feature (1250)..(1250): n is a, c, g, or t
tggtaaaagaagcnccacaccgcgtgcaacagatggttatgagacaagtctcacggcgtagaaggtgccacctcctttaatgaatagataatggggagtgtgtaacgacaatgcctccctccgaggaggaagtatacgtggccgcgggcgacccataataagagggctttgaacttcgagggggggaagcagtttacgctatttctttgaggagcaccaggcaaaggcaacggtccgtatatttcagcttggcgggggggatcagtttccgtgcaaaggggcgcgtctcgttggctcgcccaaatccttttattaaacagtttccccctttcaggaagccagtgaggtccccccggagaaattaaagctgagaggggaatctccagcaagcccagaggggcccaggtgtctcattttttccagggcctgggggtcagccccaggttgataaaccagcagcaaagtgggcagaatttcctgggcaactgtatcactgcagctcccagagagctcccacttcaggggtgaagctctgagtcttggtgatttttaggggtttatggaaacagcccttctggtggatgacgtttggagacacatcgcgtccgtcacaggacacacttccgatggatttacagcaactcctggggtaggtgtggcccgttgtcatttcgaaggaagagccagaaaaatctgtgtagttattcaccccacagcactttagcttctccatgaccaagttccactgtgtagaatagtcgtctggctcgttgtaacctctgtaattcttcctcagggtcacgaaggtgtgttccaaggccacatctccaacaattggaaagaaaagaaggaccactgtggcagctgtaacttccatgatgaggacaataaccattgacaggatgcaaaacaagagcgtgcctctgctctctttagtcgctccataccacccggcacagccaagcagtaccgtgatgcatcccatcaccaggcacaggttgccaacgtgaaggaggtatgcggaggacagcccgaggacattcgtcagagaggcccctccacatttaccaccaatgcccaggccaactaggatgatgccagacacagccacgaagccattgagtaaagataacagtttcttcaaggaagaatacggagtgtggatttcagccatgctgaacagactggggcaccctgaacatttaagttaacatcttcctgaacctctgggctactgtttcccaagatgnatagggatctgaggaaggggcgccaatgctgacttgctctgcccctctggtcctgcatcgaggaattcgg

SEQ ID NO: 451432 - DNA, 1753 bp, Homo Sapiens
  misc_feature (190)..(209): n is a, c, g, or t
  misc_feature (315)..(375): n is a, c, g, or t
  misc_feature (411)..(411): n is a, c, g, or t
  misc_feature (582)..(582): n is a, c, g, or t
  misc_feature (791)..(791): n is a, c, g, or t
aggaataaaggatgggagggtgggagactaaaacaataggctgatgttgtcgattatttgggggggtaataggcggcaccccacgggattgaattcgcttccgtctgaatggggttgaggggaaaaaataattgtgtttagagggccaacacacgccacgcaaaaccggtgggttcccctaataatggcnnnnnnnnnnnnnnnnnnnnatttatatttttggagatgatgttgttgctacacaagaagaggggaagcccaggtggtgcctttttttaagggagctgcaaaattgattttttacactgggtgtgnnnnnnnnnnnnnnnnnnnnnnnnnnnnnnnnnnnnnnnnnnnnnnnnnnnnnnnnnnnnnattagaaaactcgggagggattagccctacccgggnctttctcatatgttcgcagtatctcctattcaatactttttgggataacatggggggtaagtggcggtccaattgggtgggtgcaaaattaatgaagtgagtccggtgcccaccccaagtagattgattgccggtgttgggtaattcgtgggtgggaggaaggaaatgggngctcgcttcacccctcccattggagaagcagaaataaggtctggtggcgaatcattcctcaccctctttgttgaaggggaggtgggaagaggaccttataggtgttagggaaaagaaattgttttgtttaacggggcggtgaagtagtggactttatactacaaaaggtctcggacgataatcgtagtatcgcacaaatatccgctctnggtgagaggtatgctccccccctctcgtgagacaagaagcggttaataataggttgtgggagaggaaaaattcgcattgcgttcccccaaggttagaaggcgaaaaagcgcgttgttaaaagatgcgagcgaaagagccaaaaattgtcaggcttaagttttggacctccgtttgagttaccggtggaaagagagttgtaagtgggtaaaccgttaaggggctgtaaaaatgtcccgtaagggtaactttggtcccaatttaagtccacgcccaccaggaatatgagggtttcgtttcacgagggattcccaaaggtagccatttttccccaggtcgggaggttggtaaaaacgacgggcaagttcatagagttataatacgactcgctgtagggcccactttgtacaagaaaagctgggtgggggtaagtttggacccctcgagggatactttagagcggccgccctgtggtaattttttattgcggttttaatggttgcatcaggggaaggatttattgatccacgccattttgttggattttctatcctccccagggggcagaggtgggttgattgtgtggcgtgtcggcaaaggccaggtccgccctggtatggcttgcttcagtgtccacagccactctgtcagatccgcatcgtttctatgattcccaagctgtgtactgagtaaaacgctcagcaccgatttagaggccaggctgggtcttaagtattcatccacgttcctcgtgatgctccatgcagatgtgctgggacgtacttcagagtgtccctgagccatgactgcttgactccacagatggcttcaggaagacagcacagaagagggaccttattgcaggcttgaaccagaaggaagccaggcatggtggccagtttgaatcccgggaatccgaccgttgcaccaaacagagaaaaaaataagggagaaggggggggag

SEQ ID NO: 451433 - DNA, 772 bp, Homo Sapiens
ccccacaccaccaatcccagggggcaatgatcttccatacacccatgccaccctgacgcatgctctgaccagctgccatctccaggaagagaagaggaaccccgaccaggaacagcatgaagatgtagatggcagcgaaactgcagcctccactgttaagccacaggtaggcaaagcgccagagacaagatggcttcatagagaagcccacctgagccagaatatactcagttttgctggaccagaacggacgggcaaggaggacctcactctctttcttctctgtcatctgcaccttctcatgcgtgggtttctggttcagggctgaggcagttaacgccatccaatacagaaatttgcttgggctgactggtcctggcctgagcctctgcaacccgggctgctgaaacttgggcctctgaggtccaagatgttgcagaccgggtcaatgaacccttgtcttcccacgtttgacttcctgggacactgtcagaaatcactgtgccagtccatgaggtgtttgccagcaaggatgtcgaaggctgggcctctgtcttcatctcacacagactctctggggcagctcccgcttctgcaagggagggttcatcttcctgaggagaccctagccccaaggcttctgccaggttcttcagtccagccagtcggacaaaaatgagggtgaagaagccccagctgagaagcctagcaatctcctcaggccccttcaggcgtcgacagatcggtttagggcgacacccctcgatctgcc

SEQ ID NO: 451434 - DNA, 1261 bp, Homo Sapiens
gggagatacccccgttttgcaaaggtgttaatataagagaggtgtttattgtggggttcttttttaagagggatattgttttttgggaaccccaaatttaagggaggtttggggaggttccccctttccaaggtggaaggggtactttgtttccatccaacttgtaagaaatttcttcccttttggaacccttttaacctggggtgtaagctggggaccttagggggtagggaattttgaggccttttcaaagggccgttttcccgcttttggggcctgaaggggaatccttatgtatgccggcagtattcaaaagtatcccggggatggggggggatgacaatggccaaaaaggggtgatcatcaagagcagtgccccccggtggttatgttcgaagcccttcttttgagttgcttgagtcccagggccatgtaggtgattcggcttcatccacagatgaaccatcatggtcacaaagatgattagcagcacacctgtacacagatggggccacagccaaccaaagatgggagagatggggtggcccaacaggatcgtcaggtctgcaaggaacctcctggccccataggcccaggatacagccatggtttcaaatacgacaacgacgatgatggggaagactatccagtagtcactcagcagtctgatgaagtagctgcctgaaggtcgagtgaagaagaggccgcacacgaacatgagcaaaaagactcccactatgagcagctttgtatgtttcctgaagaaagagaaggtgtcctggagtggagtaatgatgccctgcataatccctattgcgctgctcagccccatggccagcaacatcaggaagaagataaaagaccagaagacagacggaggaaggaaggacatggcttcaacaaaggacaggaatgcaaactttgggccctcgctagccttaagaaactgagtctctatgttgcactcagtcacctcgcggagaaccatgcttttgatgtgctggggaaggccactgagccaggcattgtagatggaggttgggttgtaaagcaggttgacagggggcttggcatcaggaggcagtttccctaggtttatcagctttaaaagtatttcagcattccctagccccaaggcttctgccaggttcttcagtccagccagtcggacaaaaatgagggtgaagaagccccagctgagaagcctagcaatctcctcaggccccttcaggcgtcgacagatcggtttgggcgacacccc

SEQ ID NO: 451435 - DNA, 1005 bp, Homo Sapiens
cgctggtactggtcggaattttgggatacagacacactccgtcccacccaccaccagcgctctggagcctgccccgggccaggaacagcttggcctgatcctgctgacgcctcagggcaggacagggcaggaggctccaggcggccacccatgctgggcacacagtggactctcgcacggtgtcttctgccgtcacaccctgacccaggctggccgggagccttcggggcgacagctccgaggatggacgtaggggccagctgctgccccagagtcctgccccctgcagccctgtgtggagccctgggactcctgtgggtgggcctcaccctgctggggacggtccagccacagcgccagggcccccagaggggcctgaacttgcctttccacaagatctgtctccagcctggcctcagaaaggagcggggacccaccctgcaaacgctgggccaggagccctgtcccggagaagcagccagctcagaacccccttggaggccgggaggaagtggggttggaaaatgacgagatggaggctacgccgagaccaagcgccaggagaagggacccaggccaagctgctcggtgaggccctgagcacggcgggaaggggccatgcaggaccccctgagggctgggctggggagggaggggtctccccagggctcaccccccttcttggcacagggcaggggaaggagctggatttaggacctgagggagaaatttatcagatttgaccagatcctgggcatcagccttgagcacattcccttcctgccccagactggccccggcaggcctggggggtgtggggtaggcaagcagagaccacactgatgcggggaggttggcccagagccctgcaggccaaagcctggggccggggcagcagtgtccggccgaggagagggtgtctggtgcctgaatgacacaacttgagaggcaccagccccaatcctgtccgtgcagcccagcggggaggactgcccaggagaccat

SEQ ID NO: 451436 - DNA, 1065 bp, Homo Sapiens
  misc_feature (95)..(95): n is a, c, g, or t
  misc_feature (666)..(686): n is a, c, g, or t
ccacccaggaaaggtcccatgcggtcgcaatagtttgttaaagtctttcaattttctggttccttttcaagaagcagctgaaactcaaaggtgtngaatcttggcggcccaatgtaccattcatctgtttttaaccttaagagttgccgttctgaacgtgttcttaactgagatgataatcccattgatgatccgggccaccccgccacagccggagcagaatcagcaggcccagagcgctcaaacttggtgctcctggaacaggaaggacaatgtcgaggatgaatgagaccaccaccaacgacggcatccaggatctcaaacttgtggtgaaagacttccaggcggaagacaaataatttaaagatgatctccatcattaataagcccaagatggtgatgctcatgtagtggaataccatggcagcatagttattcttgtcgggctggatgatcttcaggtccaggatgagctcagcaagcaccaggagggcatccagaaccaccaagcagatgatgatgacctgaaacctgtgggagctgaacagtttcctcaacatgcccctgaagtcaaggggggtcctgggtgcggggccaggggcaggggcaacgtcaggggctgcagctctgccttcctcgcctgagactggtgtggttggtggctgnnnnnnnnnnnnnnnnnnnnngttcattctcccatttcttgtagttgatgttccaggcatggtagtcgtctcccacgaccgtgaagtgccttaagaacttgctcatcctctcagcgggagccaccttggccctgcgggtgactgccttttcgtcccaggtggccatgtccctgttgcctctggatctggttgtgagttctggctctgccatcctttggcatgtgtgacccaaggcaaggggcttggcctctctgcgtcttggtttcttcacagacttggccagacttgacctttgctgggatttgctgggctttgctgggctttgctgggtcttggctgcagcccagggcacatttcgtgttctcggcacactcgcctcgtgccgaattcgccacccagg

SEQ ID NO: 451437 - DNA, 754 bp, Homo Sapiens
  misc_feature (204)..(204): n is a, c, g, or t
  misc_feature (420)..(420): n is a, c, g, or t
  misc_feature (508)..(508): n is a, c, g, or t
acagtcactgagatggtcgtgttctctccaaccagatagccacaaggaagcagctccggtgtttcggaagtgttgctgcgcttgatttctccaatgctgtagccaagaacgctgtctgaattcagccctagctgactcactgggtcgacatgaatgatgtattctttgaacagccgtctaaccacccccatcgagcacatcccnacttcgtcttgcccactaactccaatgcagcccaataagaaaagaaggtgtggtctggaatcctcccttccacttcatttcctcctgaaagctgacaactatcttaacatgcctgcctccttccttccgagccgagcattcaccagtgtcatccagcaacatgtccaggctggttgactcagtgaggttcaagctgtgctgggagaggcccatggnactgcctcggggaggcagagatggacacttgggaaggagccccggctgcagccactgccttgagactctgacttcagccgatcattcntcagctttcagcttctctatttcactctgcatcctgttcatggcctcccggagctggtccagctggtgggcagaactgagagcttctaagcggatatctgtcagcttcatctccttgtctcttaactcatttcggagctgcatgacggtctcagcttcactatccatgcattctgaaattagagagttggagtgagaattcctcagcagtggggtggaacctgtggacccattgtgtggtaacttg

SEQ ID NO: 451438 - DNA, 841 bp, Homo Sapiens
  misc_feature (763)..(763): n is a, c, g, or t
cgccctcgacgagcgagctcgaaggctgcgactggcgccgcctcaccgcctcccaccggcactgaccgaccgttcgaccggcaaacatggttgaagcggatcgcccggggaagctgttcattgggggcctcaacctcgaaaccgacgagaaagccctcgaagccgagtttggcaagtatggccgcatcgtcgaggtgctcctgatgaaagaccgagaaaccaacaagtcgaggggcttcgcgttcgtcacctttgaaagccccgcagacgccaaggccgccgccagagacatgaacggcaagtccctggatggtaaggccatcaaggtggcccaggccaccaaaccggcgttcgagagcagccggcggggcccgccgcctccccgcagccgcggtcgcccgaggttcctgcgcggaacccgcgggggtggcggcggcccgcggcgttccccatcccggggcgggcccgatgatgacggcggctacgcggcggatttcgacctgcggccctccagggccccgatgcccatgaagcgtgggccgccgccgcgcagggtcggcccaccccccaagagggccgcgccgtcgggcccggctcgcagcagcggcggtggaatgcgcgggagggccctggccgtgcgggggcgagacggctactcaggcccaccgcgcccgggagccgctgcccccgcgccgcgaccctacctgggcccgcgggatgagggctactcgtccagagacggtactcgagccgagactaccgnaaacccggggttttgccccctcgccggagagtacacccaccgcgattacggcactccagtgtccgggacgactgtccg

SEQ ID NO: 451439 - DNA, 986 bp, Homo Sapiens
ggggaaagcccctgttgcccaggttggccttcaccttcgaaaggccaggatgtctccggaaagtggggtccaggtcccacattgacccctgtctgagttccttcatgcaaggcttcccgcccgaggggccctgtcagagctgcagtgcttgagcctgagccaccgccatttctccctcctcctcgtcacacccttcttcttgggccatgcctcctccgcccttgggtgcctgtctgacagggagggctgtggcggtggctcattctggaaccagtatgtgctgctcgtgggtgctgcaaagccctgcatgccagccccgccccaggcctctgctcaccagaccctttctttcacccactttgttcttctggctgagctttgaggaaaggaactgcctttcaaacgcagcctgacttaggtcggccgtctttttctcttttcttttctgtttcttgtctgcatagatgagcttttcaggactgtatttgtaagttttactcctggctcttgcagaggctttatgccactcttttggaatcacacagtgtgaagtgaaagtgaagtagggcgagctggcatgcagcctggccttctctatttcttcaagttcttttatggaatgtcgttttcctgtctcacactgaagaccagttctcctctcttcatccacctcttgctgtctttgaaacagaggatcaacaaatggtgggactgtaaccttcacaatggaattttctttaaataatattgcacatactgcttcatcaatgtcttctctagctaatacctccattaaagaaacggactcgggctccggccattctcttaacttttctggcctgaaatgttcatcataactcgcagttttggtggcagccatggacaggagaatccctcaggccagctccgggggaagtcgcaggccccgcggctccgtcccggtagggctcccccgaggccgcgtccatcccgggaattccggaccc

SEQ ID NO: 451440 - DNA, 1029 bp, Homo Sapiens
tctcaacgttcggatcagcagcttttttccattctctctctccacttcttcagtgagcagccatgagttggactgtgcctgttgtgcgggccagccagagagtgagctcggtgggagcgaatttcctatgcctggggatggccctgtgtctgcgtcaagcaacgcgcatcccgctcaacggcacctggctcttcacacccgtgagcaagatggcgactgtgaagagtgagcttattgagcgtttcacttccgagaagcccgttcatcacagtaaggtctccatcataggaactggatcggtgggcatggcctgcgctatcagcatcttattaaaaggcttgagtgatgaacttgcccttgtggatcttgatgaagacaaactgaagggtgagacgatggatcttcaacatggcagctctttcacgaaaatgccaaatattgtttgtagcaaagattactttgtcacagcaaactccaacctagtgattatcacagcaggtgcacgccaagaaaagggagaaacgcgccttaatttagtccagcgaaatgtggccatcttcaagttaatgatttccagtattgtccagtacagcccccactgcaaactgattattgtttccaatccagtggatatcttaacttatgtagcttggaagttgagtgcatttcccaaaaaccgtattattggaagcggctgtaatctggatactgctcgtttcgtttcttgattggacaaaagcttggtatccattctgaaagcttgccatggatgggatcctcggagagcattggagactcaaagtgttcctgtgttggagtggagtgaaccatagcgggttgtccctcttgaagggatctgaaactctgatattaggaaccgattaaacgatcctggagccactgggcacacatgtcccaaaggagtgactggcactgcctatgagattactaactgtcacgttctcctcctgggccattggcgcatttgtggcgcttacacaagtcattgcaccacctcgggcataattc

SEQ ID NO: 451441 - DNA, 1069 bp, Homo Sapiens
  misc_feature (44)..(44): n is a, c, g, or t
agattattcgggggaacagttaaaagaactggaaactaaggganagtagcctaactggccttcccaaaagcccacacaacaacaacaaaaagtaaagtttccaaaactgttgtccctcctcctcaagtgcaaaacgaagcaaattggcggacctgtcacgtttcatcaatcgatacgaacacagcattcagtctgtggaacaatgtgatgcggcaaaaatctgatctaatgcaaattcaagcccattaaataaaaccacagaaaggagagccagcccggctcagtgtcctcgcgcacggacgctgactcgtagcacaaaagcagctgaaaggcacgaggctcagatctcactgatcgtcctctctgaagggcagtactccgaggggcctggcgaggacatgtagaaagactgcgttttccttttcaatcgggcccttttgttggccaacaccagactgcgccggcttgaactgatgatttccgaaatgaacttcttgcagtccacacacacctccatggtgctccagtcctccatcaactctttgggaaactggagttcttcatctgatttgtccatagacttagattttgaggagaacctggcaatgctccgaagtggccgatgatgggcagtggagggtttttctgacctcatactactttcccctctttgcagagcagaaggtcccaatgaaaagataggaagagtggagtatggtttggagggcagccgcatctttttgcaacactgtgagcacaccggcctcttacagaactgacaggtataagaccaagtgaagaaggaaaacctcctggttcggcaacaaaagcagagctttccttttttcaaggcggtgtagatgtctttatactgttggtatttttccagctctgccttcaccaggacctggcgaatatgcatcacttcttccacagtaagagcgaggcattccactgggtagcagaattcctcaagagagcgggaactctgcctggaaggcggcaggaactgcctcacgttagtaggcgtttccttttcaatggaatgtcgtctctggggtggctgccg

SEQ ID NO: 451442 - DNA, 822 bp, Homo Sapiens
gttctcaaccccactgatggcagtagctatggactgttcggtcacaggagtagcattttccgtgccacttcacaggctcttgagaaacccgtatgatattgaactcggttatgtgagccacctgctcctggagaaccattgttagagcctctcggcacagatcaagctccccctccagaatgccgccaaaatccagcactatggtgacgcactgttccaagatgacaccaaaaatctgccggctcttgctggtgagccagtccattcgctgcttgtagctctccacagcttgtgttaaatgttccacaaactgataaatcagttctgatttagctgtcagattgtatactctgccatcttctgctctgtagagctgtggaaacagaccatcagcataccgagaagccacaggtctccccagagacgccacataatcttcacaatgtgggaatccgatctgtgacaaaatctgtttcaaggtcaatttgttgctcttaagcccatgcagttgaagccatttctcagatgaaatgagactctgctcagccaagtctgttttggtgttaatccatccctcttgcctctgcagctgctgctcagagatggtagaagatgggcctgatttctccatctctgaatcaagatctaagtcacagcaaactctaggcaatatgtcgggtggaagacgtggcggctcccgctcagcagccaccctcccatcctcccgggcccgcctgacccgagagggcgggcgaggtaagcatcccgctggtggataaggcagcgattccggcgggcgaaggctgcgcgccgggggcgaag

SEQ ID NO: 451443 - DNA, 1126 bp, Homo Sapiens
gaattcccgggatgggttgcctgatagaccctatacaaaagatgtacgtagggaaaaggagcgacagctggctaaaggggccccccacaaccctccccgacaccctaggaaagcagcctctctccgctgtcccagggtgccatggagatggagagcgcggcggcctccacacgtttccaccagcctcacatggagaggaagatgagtgcgatggcctgtgagatcttcaacgagcttagactagagggcaagctctgcgacgtggtcatcaaggtcaatggctttgagttcagtgcccataagaacatcctctgtagctgcagttcctactttagagctttgtttacaagtggctggaacaacactgaaaagaaggtatacaacatccctggcatttctcctgacatgatgaagctaatcattgagtatgcatacacccggaccgtgcctatcacaccggacaatgtggagaaactgcttgctgctgcagaccagtttaacatcatgggtatcgtcaggggttgctgcgagttcctcaagtcagagctgtgcttggataattgtatcggcatctgtaagttcacggactactactactgtcctgagctgaggcagaaggcctacatgttcatactgcacaactttgaggagatggtgaaagtctcggcagaatttttagagctctcggtcactgaacttaaggatatcattgagaaagatgagctcaatgtcaaacaggaagatgctgtattttgggccatttttaaagtggatttctcatgaccccccaaatagaaagcagccacattttcaattttgccttcccaaagggtcgccctgggccctaaatgcatgcctgaggtactttcatggaaccaatggttaagaatgaaatggactaaggtccaaagaaccagtgagggaattgccaaacccagtccttccttttaatgcccctctaaagcgccttgttttggaccccccaaccatgaaaatgggaccccccccaaaattccgggatttttcaccaaacccccccttttcacagagaacccaccgctttggccccctatggcccaacccccctcttttggaaaaattggagggggcctctgggaaactgggc

SEQ ID NO: 451444 - DNA, 1249 bp, Homo Sapiens
  misc_feature (998)..(998): n is a, c, g, or t
atttcatactcttgtgaatttggatctttttactttgagcatatattttagaatatgtgtatgttaaaggatctccacaatgtctgcagtgtgaaggcaggttcattgtggaatagtttaacagtcaggaaggctaaactggtcagtattaatgtgtagccctaccaaaaatagccagtagtatctgaaaatgaaaaataaatgaagtatctctaggaaacagtctggcttaactatttttgaaaatataactgtttcccctctctgctgctttagatgttgctttacatagaaccagaaaatggaatttctcagctaaagcatgtgtgcctgtttcatctaatcaagcagagctaaaatgttcataccgaataaatttatattaataaattactaaactaagagtatcaggttatttatatatttgcaagcaaaggacagtaagaagttgactggcaaaagagcagtgctgaaggaggagatccaggtttaaatctggcttattaactcaagccaattttaaggattttctgtatagattactcatgtcagaccaagaatttaaattattttgagagaggcatttaattctaataaaccagctgttataaaaattataaaatgatctctgtttttcctgtcagagatttaaaaaactgaaaaggtatacctcaacccaaaaataaaggtttgttttggtttgttatggcttccttttttaaaaaattaccctgtagtgccagtttattatgcaaagcagcttatattcctttgtttctgataaaatgaagactttaaatcagtcagtagtactttacctttcaaggcattagtaaattacttgcaaatagttttaaaaggaaaatacgacctttgttataggcagtcttctctttaagacaatacttttccacttgttttccttttcccatatatatatgtgtattcatatagctgtatacatattcagttgatcattttataaacatatgaaggcntaaagatatacagaagaaaaattattaaaccactccattttagattcaatttaactaattcctgcatatatgacatttcctacctaagcgaacactaaaccaaaatggctaagaaagggccttttcccttccttttcccccccttggtggtttaaaggtatttaagccccggaatttatttaccttgaaactggggcagaaaagcctatttaatccccccttaacagaatttgaagaaaaagttttgattt

SEQ ID NO: 451445 - DNA, 859 bp, Homo Sapiens
gggttgcagcccatgccccagaccagatgcgtccctgttgatataacaggcctccttctccatcacacagtgcccacagccctcccaggccgcacttgcatgtgaaaagctgtctgtgatgaggtttggggagaacaagccggtcttacatgggacaagaagtggtgtgtagaggtcgtccagttgttagcatccatctctggaaatgcaacaggaagccacactcctccaggcagggaacttgctgcgtccacccagatgcggcccatagtggggtcagcccgggcatagcagcggtggatggggctgtagaggatcacgtggacatggagggctgttcggggggtccacatgtggtaagctgagaggacgtgggaagtgcaaaacacgtccttgccattggactccaaataacgaccagagattaggcactggagggtccacttgctgttccggtggaaacgcagtagaaagcacccatggtggctggtccttgggcggccataacacacggtgccatcacactcacacagcaggtagaggccctgcacgctctttagtcgcaccacggcctgtgtctcatgctcattgctcaccaagatctcccaggtctgtctcctgcccaaactcttcgcagttgcagtgactgtattcttgcatgcctcaaaggtgaggtaggttcctgcccagctgatgagcccaacccttaggtcctcagccttgggatgtctgtgtatccactctgtctcatccatggggctgacaccacaggtgatgtctccgtctggcccagccctcccccccgtggtgaggttccacaggccatagggcctggaatagggcctgtagtacccaccag

SEQ ID NO: 451446 - DNA, 860 bp, Homo Sapiens
tacccttcatgggttcagccatgcccaagagcagatgcggtgccctgtggatataacagccctccttcgtccatcacacagtggccacaagccctccaggccgcacttgcatgtgaaaagctgtctgtgatgaggttgggagaacagccggtctacatgggacaagaagtggtgtgtagagttctccaggtggtagcatccatctcggaaaatgcaacaggaagccacactcctccaggcagggaactgcctgcgtccacccagatgcggcccatagtgggttcagcccggggcatagcagcggtggatggggctgtagaggatcacgtggacatggagggcttgtcggggggtccacatgtggtaagctgagaggacgtgggaagtgcacaacacgtccttgccattggactccaaataacgaccagagattaggcactggagggtccacttgctgttccggtggaaacgcagtagaaagcacccatggtggctggtccttgggcggccataacacacggtgccatcacactcacacagcaggtagaggccctgcacgctctttagtcgcaccacggcctgtgttctcatgctcattgctcaccaagatctcccaggtctgtctcctgcccaaactcttcgcagttgcagtgactgtattcttgcatgcctcaaaggtgaggtaggttcctgcccagctgatgagcccaacccttaggtcctcagccttgggatgtctgtgtatccactctgtctcatccatggggctgacaccacaggtgatgtctccgtctgcccagccctcccaccgtggtgagtttccacagccataggcctggaataggcctgtagtaccacag

SEQ ID NO: 451447 - DNA, 771 bp, Homo Sapiens
agggtattttcaacttaagtttttttctcctgtacattcttcaaaatatccagactgctgatgttttaaaaacccataacatggcactattctgcctggtttatcaaattatttttttaatacaacacactcatttttcgctagcaaaactgcttataatggcactaaatacactaacatactgtgttttagtacaaagcaataatactcagagtactctcaggaaatccgcaagctgagtaaatttgaaaagaagatcttgtaaccacccttccaatcgacttatgtagggttctatggccctaattaaaaaacaagaaaactttagcactcaagtccaaaggggactgcccaactcagtctcaggcttcaatttcgcatctggggaaaaaagaaacacaaaagggagatgctgcctccttggctctgggggtggtgacgggagcggggcccactggggagcgatttcacttaaacggtcggacatagccgtctcgggcccctagcagtctccgcactcactgcctccttctcgaacatgctaggcctcctttctttcctaggcgtcaccggagcctgctgaggggtctggttcggggtctggatggggctcgacttcacgcctcggcctcgcttctccatctcgctctgttctccaagacgcccaccgcctccccttcaccgccggcggtcaaacgccctagccagtcccgcgagggcggaagtctcccacctgcgcctcgtacggtaggaagtgcccgccagggctcc

SEQ ID NO: 451448 - DNA, 1069 bp, Homo Sapiens
  misc_feature (28)..(28): n is a, c, g, or t
  misc_feature (87)..(87): n is a, c, g, or t
  misc_feature (92)..(92): n is a, c, g, or t
  misc_feature (343)..(351): n is a, c, g, or t
cctagggggccccggaacggctttctgntggtgatggggtcgtcctccatggttccgggtctggcctgccagggcgggaacttcctnctggntttcggagcaggaagatgcctttgcccctggttggaggctgtggccttgcagatccatatctggggtttcatcaaaacaaggtgaaaaaggcctcctctctcgtttttgaggttccaggcggtaggttctctgggaaaaactctttccatttttcaggcccctctgtgccctgaggtatcctgggcttgtccacggggaggtcctccagggccgggcgctgctgcgtccttttcccagcctggccctggannnnnnnnnggcacacttgctggccttgctcatggcccgtgcccgtccccgaagggtgctgagcagcccgatcttggtggtgaggagcttgttgttgggaagctggtacagcagctgctctccttcccggaagctgccgtagctgtctcggctcttgacctcacaccacttcagcgtgtagtcgtcccggcggctgtcatggatgcgctgccagcccttgcttttgcagtaggagctgatgattgtggccccgttgctgcctccaatgtagaagaagggccccggccgggtgctgtggggcgatggcttcccaccccccagcaggagcccctccaggagggcagctgagggcccggcggcgttagtgtcatccgagtctgcaggccggtggctgttcaggagcccagggggtccgggtgtggcagaggctctttctgccccctccaggtccggcccacagtgtccatctgcgtcgtggtctggctggcttggctgacaccggagtccctcctcctggctgctccccattggcctctcgtgggccgggcatctggggaggggccgtgacaactctccagggccaggcttcctgccggcaggttccaggtgggggtggggagcttggagcagggggcagggaggtcgcccctccgaccctcctcaccaacagggcagtggcctggtgcagggcaggggccgggctgtgaggccggtgcgatcccgggaa

SEQ ID NO: 451449 - DNA, 1056 bp, Homo Sapiens
cgaaggcccccggaaacggccttctggggtgatgggggtcgtccctccatgctcccggggtcttggcatgcagggcgggcaacttcctcctgggtttccggagcaggaagaatgcctttgcccctggttgaggcctgtgggccttgcagatccatatctggggtttcatcaaccaaggtgaaaaaaggcctctctctcgtgtttgaggtccaggcggtaggtctctgggaaaaactcttccattctacaggaccctctgtggcctgaggtatcctgggctgtccacgggagtcctccagggcgggcgctgctgcgtccttttccagcctggcctggaccccccccggcaccttgctggccttgctcatggcccgtgcccgtccccgaagggtgctgagcagcccgatcttggtggtgaggagcattgttgttgggaagctggtacagcagctgctctccttcccggaagctgccgtagctgtctcggctcttgacctcacaccacttcagcgtgtagtcgtcccggcggctgtcatggatgcgctgccagcccttgcttttgcagtaggagctgatgattgtggccccgttgctgcctccaatgtagaagaagggccccggccgggtgctgtggggcgatggcttcccaccccccagcaggagcccctccaggagggcagctgagggcccggcggcgttagtgtcatccgagtctgcaggccggtggctgttcaggagcccagggggtccgggtgtggcagaggctctttctgccccctccaggtccggcccacagtgtccatctgcgtcgtggtctggctggcttggctgacaccggagtccctcctcctggctgctccccattggcctctcgtgggccgggcatctggggaggggccgtgacaactctccagggccaggcttcctgccggcaggttccaggtgggggtggggagcttggagcagggggcagggaggtcgcccctccgaccctcctcaccaacagggcagtggcctggtgcagggcagggatcccgggaattccggaccggtcca

SEQ ID NO: 451450 - DNA, 1087 bp, Homo Sapiens
gggtccggaattcccgggatgcccggcccctgccctgcaccaggccactgccctgttggcccggcccacgagaggccaatggggagcagccaggaggagggactccggtgtcagccaagccagccagaccacgacgcagatggacactgtgggccggacctggagggggcagaaagagcctctgccacacccggaccccctgggctcctgaacagccaccggcctgcagactcggatgacactaacgccgccgggccctcagctgccctcctggaggggctcctgctggggggtgggaagccatcgccccacagcacccggccggggcccttcttctacattggaggcagcaacggggccacaatcatcagctcctactgcaaaagcaagggctggcagcgcatccatgacagccgccgggacgactacacgctgaagtggtgtgaggtcaagagccgagacagctacggcagcttccgggaaggagagcagctgctgtaccagcttcccaacaacaagctcctcaccaccaagatcgggctgctcagcacccttcggggacgggcacgggccatgagcaaggccagcaaggtgccggggggggtccaggccaggctggaaaaggacgcagcagcgcccggcctggaggacctcccgtggacaagcccaggatacctcaggccacagagggtcctgagaatggaagagtttttcccagagacctaccgcctggacctcaaacacgagagagaggcctttttcaccttgtttgatgaaacccagatatggatctgcaagcccacagccctccaccagggcaaaggcatctttctgctccgggaaccaaggaggaagttgccgcccctgcaggccaagaccccggagcatggagggacgaccccattcccccacaagacgcccgtttcggggggcttccggcgccgggtggtggcaaaaggtacttccaggaacccgcctttcttggggaacgggaaaaaaaggtttgaacggggggcctcctaaccgggctcaattggccttggaccccccacccccaacctgggaacttttcctttgggccccccgg

SEQ ID NO: 451451 - DNA, 1249 bp, Homo Sapiens
  misc_feature (31)..(31): n is a, c, g, or t
  misc_feature (197)..(197): n is a, c, g, or t
  misc_feature (367)..(402): n is a, c, g, or t
  misc_feature (456)..(541): n is a, c, g, or t
ctgcaaatagtgtgggagaaggtgagaagtnggggcggggtttgtggggagctgttctttcaggcggtgggtgttcgcgggataagattatagcggtgggtgggggtctagtagacgccagcgaggcgaacagagtgagcgtagcgggcggaaaaactgtcatctgagaggtgcaagggcatacagttttagcgctntttgatgtgtagggtgtttgtcgatcattcgtggggccacgcataataggtgatccgaggtatgtaaatcaggtggtgtgtggttagagaggtgtgcgagcatggggcggtggggtatgttcatttaggtgggatagaatgattatgcggggcgcggtggtgttacggannnnnnnnnnnnnnnnnnnnnnnnnnnnnnnnnnnnctgtgaggtggctatatgtggggtaattgggtatgtatcggaatgaatagcctnnnnnnnnnnnnnnnnnnnnnnnnnnnnnnnnnnnnnnnnnnnnnnnnnnnnnnnnnnnnnnnnnnnnnnnnnnnnnnnnnnnnnnagaggatggcggaaaagacgactctatgggtgtggagggcgggggagggattggggggtagtagaatacggggtgttacagtggggacggcgtcggaggggggaagagggagtcatcggaacggggaattgagagaaagtgggggtgttattaggggggagaacgcagggtacagtggtgtgcgtcgtgacattctgtttcttggttgacagtcctgaagggggggagtaggcccgcagtcctgctggatgttaaagtgctcgggcacggacgggctgcagtaggagactgttttgggctcaggggctttgcagattttcacagcataggtgctgccggggtcctcagaagcaggtggcacagtaataaatggcatcccccgagtcacagcagggcttgttacaagtcagcttgaagagcgaccagttattctcattgaagtggagctcctttttctggccgcccatgaagaggtcctcacatttggctacaaggcgggccagggactgggtgtagagtccccccagcttggcataggtgccctccttgctgctgatgttgctcaggagaccgtgcagctgaagctgggtgctcccggtggaggcttgactggacacgctcagctgggaggatgaggcggagggggcccctttgcactggaggccagggctcccgcagccgcctctgttcctcgtccggaattcgcca

SEQ ID NO: 451452 - DNA, 1145 bp, Homo Sapiens
aggagagcacaccccccggatttttctgaatatggcaaaacttttttggggggttggtattaaaacaaggctttggtaaaataaagcacggggtttttgtcacagggtccctggcgggctttgtggcttcccaggtaagccgggcggcagtacccttatttggtacctccaccaggtggttggctcttcaggatgttagctcggtgggacggtgacatcggtagaaggtttctgcagtttggggggaattttccgcccgacagttctgtctccttctacatttttgacttccaaactgtccacccctcttggtcatctgtatgctcttttttgaactgcggggtgaactgacaccttgatggcaattttgctgaggttgctcgtgcagcgatgaggcgtccgagtcagcggcaggggagtcgctccgcttcagagagttggggattgtgtagacctcatccctgtctgcggcctcctggccctctggagtatgcctcacaaaattctgcccctgctcctccagcccaaccacctccataatctcctccatgatagtcctgcagttcataatgagaggcggcagaggcacgctcctggcaagctcttcgatgtagcgggcgaactccatggttttgaactgggtgactttggcaagctctagagttttggcggaggtgatgatggggatgcgcttggcgatctcaaatgccttctgcagcttctctgcaccttcggtcctaaagaactcattgatggccttctcagtcttctttagatggctgctcatcatgcacaggcgggtgatattgaggaccatgacgatggtgaaggccaccaggcacacgaccatgtagtagacacccatgtctccagaagtgaagatgacgcgcaaggtcaccgtgttgttcacggtgccgtagatgttagaagccacacacgtgtatttacctcggtctgagaaggataccttggtgatgttcaggaggccgctgtcgtgcatttgccattttcctttgctttagggtccatgtaaaagggagatccaggtcttgggtctttcttccctttgattcagtcaccgtgggttccctagcgatagctcagccctgcagaaagacctgctaaatcccgggaattccggaccc

SEQ ID NO: 451453 - DNA, 1150 bp, Homo Sapiens
  misc_feature (313)..(313): n is a, c, g, or t
tagggggcccacccctttgccccaaccccctttccaggggccatccattattcttgggtgggtgaaataccagttttttcccatgaattttctgcagctccttggcgtcgggtagatcagaaaccagactccgatcccagggtttagcggtatgaagcgtcccctctgggctggtaatcctgtctccaccgcggatggagtgggggcttcttgatgtgagtgatgggctccatgagcccacgctgagtttttgtcttggtcatgaccagacctgtcatctcatctcccaagtatcccagtcgactccagaacncactgttctcccagctctatcacgccgggttggaagtgtgcagtcaatgagctcccgctcctcctggatccgtctgtaggtctccccggtgtgcatgagcagctcactcactggcttctttaggtgttcgctgagggcttcctgctgcttcttccgcagggctgtgttacgctgccagtttttcagaaagttgtgctgaggaggtggggcccagggaggtctcttctcttcttttggggctttttgctttgactctccttcagcagagatgagggtcatcagacagggtgaggtaggtatccgctcagccagctgggtgttccctcgagcaagtgcaattctcttaaaatcctggagactccccaagatgtggtggggcaggatctggtcactgccatcgaagctgtcaccgggaccggagtagtccagaggctttgtggcttcatcaggattcgcaggacgtgctacaaggtggcagaccttcctcctaggatccatgggtttgagtttacggatgataaatttctgggtgatgacacgtttatcttccttttcagtaaggcgaggaatgtgttgctccttcaagtcttccttcttaatggccaaggcaagaatgtcatctccttgtaggacattgctaacaggttcaggctcttcctgaattgtgggtgtgggttgttcaggtccctttgcccgcttcttttctgttgacattctcatgaggcctcataataatcatggtcggagttattctgaggcgggaatccttctttagagacttcatgatgccgcccggcaccatgatacatcccataaatccgggccgtaccagcactt

SEQ ID NO: 451454 - DNA, 1808 bp, Homo Sapiens
ggatgtgtgttgttgtaatcatatataggaagaggtgggataagttgggagagtaggatgtttagtatgtggtagtggtgttctatcaaggtgtaattctttgtgaatgattttgagtgtcaaaatagttgatactgtttgttttgataatgtacgccgttattgtgtgagtcgtttcgatcatgaatttgtagaaatagttttgtttgctacgtttgaaatatgttgaatattcttagacttgtgtctccaacgagtgccagcaatgtgtaggggtgtgctgtttcgccaatatgccgtttgagtgctattatatggagtacccatgtgggtggacttatggacagccattgcccaccatttagtgtgtttagtctaagtgcaccggtgagccatttaaagggttgcccagaaattgttccagggcaaaggtgaccaatgatctggatgtctgtcttgctggtactgttcaatatacgcctttgagtcaaaatgaacacggtaaagattcaatgccaagttggagcaatttcagtgatacttctgcaattagggcacttgagtgtaattcgtaaaggtctccatatataaaagttaccagatgcactgaagaaatgtttgtccaatacatatttttacacaaatgtatgagagcatggcaagtacaacgaggatcgttcaaaaaatactataacaatatgggacaaggttaactcgttccgtcaaaagttgtgcaatttcgtttgttgatcgtcgtgatttgggggcatgaatacactcgtgtcgtccaaactccgtccagaatctgtttagtcgtatgtcctcgccaccacagtagggcctcctccctcacaggaacgcagctccacagtggagggacagggaaagtggctccaccaaaactccaagtatgggacaagagggaatgagtgcaggtccacaagccacatccactcacatcattcagcgccacaccaaggactccccagcccaaacacactaggcacaccagactgtgctacaggaaaagaaaaaggactcagaaccaccttctccgcatccgtaaaggtccttagactcaccgcggggaggaagcggaccaggcaactccacagcacggaaacacagcgccacgagctccaggcggatgctgagagccgccccgagtccccgccctcctctgccccgaagggcttcaggtgcccagaccgggcggggcctcgcggagcctcgcagcgcaggcgcagtctgcaggcaacattcaactgcaaggcatcggccaatgggaactattgctgggctcgttcgaaagtaaacggtggacggcgcggcccgaggcaggtggcgggagtcagtttaaggctggcgcccagctttccgcgcctgcgtgctaggcgcaggccgcctctcggaagcttggcctcgcaggagcggctctctatcctgtggggagcttcggccagtgggcctcgtgagctggggtcccgcctggggaatccgcatggcaccggtggtctgggggagaggctgggcctggcgcgggacgaggcgaagcgccggtggccgacggcttctgaggaattatcttttacttggcgccacacggggcggggcctcctgctatgctgtggagcgcagtgtcttccatcgttgcctcacagacccgctgctccgggaagtcgccacacatttctcagggaacacccacatctgtcgcctgcgccctccgccgctcagctgtttgcttttgtttacgcattccggagacctgacccaccgggagcactgggcttgagcacaggagacgg

SEQ ID NO: 451455 - DNA, 1843 bp, Homo Sapiens
agcgggctgtacagcaaggcgtctcttatttgcgctcgaggttatggaacagcacatttctagaggaatattccaaactgaactacttggacattctcatgcgagccttcattgatgtgactgctgctgccgaaaatatcaggctgccaaatgcaggcactcaggttcgagtgactgtgtttccctcaaagactgtagctcagtattcgggagtaccttggtggatcatcctagtggctattctcgctgggatcttgatgcttgctttattagtgtttatactatggaagtgtggattctttaaacgctctaggtacgatgacagtgttccccgataccatgctgtaaggatccggaaagaagagcgagagatcaaagatgaaaagtatattgataaccttgaaaaaaaaccgtggatcacaaagtggaacgaaaatgaaagctactcatagcgggggcctaaaaagaaaaatgcttcacagtacccaaactgctttttccaactcagaaattcaatttggatttaaaagcctgctcaatccctgaggactgatttcagagtgactacacacagtacgaacctacagttttaactgtggatattgttacgtagcctaaggctcctgttttgcacagccaaatttaaaactgttggaatggatttttctttaactgccgtaatttaactttctgggttgcctttgtttttggcgtggctgacttacatcatgtgttggggaagggcctgcccagttgcactcaggtgacatcctccagatagtgtagctgaggaggcacctacactcacctgcactaacagagtggccgtcctaacctcgggcctgctgcgcagacgtccatcacgttagctgtcccacatcacaagactatgccattggggtagttgtgtttcaacggaaagtgctgtcttaaactaaatgtgcaatagaaggtgatgttgccatcctaccgtcttttcctgtttcctagctgtgtgaatacctgctcacgtcaaatgcatacaagtttcattctccctttcactaaaacacacaggtgcaacagacttgaatgctagttatacttatttgtatatggtatttattttttcttttctttacaaaccattttgttattgactaacaggccaaagagtctccagtttacccttcaggttggtttaatcaatcagaattagagcatgggaggtcatcactttgacctaaattatttactgcaaaaagaaaatctttataaatgtaccagagagagttgttttaataacttatctataaactataacctctccttcatgacagccttccaccccacaacccaaaaggtttaagaaatagaattataactgtaaagatgtttattttcaggcattgggatatttttttactttagaaagcctgcataatgtttctggatttcatactgtaacattcaggaattcttggagaaaatgggtttactcactgaactctagtgcggtttactcactgctgcaaatactgtatattcaggacttgaaagaaatggtgaatgcctatggtgggatccaaactgatccagtataagactactgaatctgcttaccaagaaagttaaatcaggggagtccgaatgttctaatttttttgttttggtttcctcccccctatctggtaattcccccaaaaattactgttggggggcttaaattttaacaaagaaaacttttaacttgggggtttttacatttggtaaaaacatatggcaacggggggctgggaaaattaatttaacccccaaaataccatttcccaacagggaactacttggaaattagcctatttgg

SEQ ID NO: 451456 - DNA, 1011 bp, Homo Sapiens
tctctcatgatggctcgggaagaaaggcctctgattggggtcatagttcatgcaccgggtcatgaggtcagccagctccttacatgatggtgtcactggcctgcaccggctttcatagaatctctctttctcaatcagcgtcttgtctttcaaggggatctcgccattgtagcagatttcccagagcgtggttccaaagctccacttgtcagcagccacactcaggttcttggagtcctcaacacactcaggagcaatccatgggattcgttcaatgcattcttgccttagacagccaccgtaatgggggatgccggggtcactgagcttgatgaatgggccacactcactgtcgatgccctcacgggccaggaggaggtttttagtacacacatttccatggaccaggtctttatcctccaagtagctcagggcactggccagctgtttggcaactttgaatttccatggtgtggtaaggacatcgcttttccggtgcatgaagagatccagaggacccccttccacaaactcttccaccatgatattctccacgtcgcggacacagacgccatagaggtacacgatgtgtttgtgggagacctgtctcatcatgctggctgcctcgaagaaggccagggaaatatccctgtggctggggtctaagactttgaggatcacttttatcttcttctcttcagaagttccttcgtcatccttgtaatccatcagggtcccagaatagatgtgtgttctcgtgcctctcccaaggtgctcgccctgcaccagatccttcttgaggatccgatcgaaactcagctggctcatggggtagacgggctgccactcctgggctttcttagtagccaccagcaggttggagatttctcggggcttgggctggcagcagcgttttagcatgaagctgatgttatccgtgcgcaggatctgcttcttgaggtggctcatgaggtctcccaagctggggaagctgcggtccgaaccgtgccc

SEQ ID NO: 451457 - DNA, 876 bp, Homo Sapiens
cggtccggaattctccggatggggaacaagacagcaccgggtttcacactggcaaggcaggaggctgtgtgctgccagaacgaccagcagggggcgcaaaggccacgccaggcacctgctggcctcagagaaaacagaaagggaaccaggaagcccactcctgctgtcctttctctgcaaggaaatgtgccagggcactgcagcccagacagtcggcagtagaggacccatgaagtatctttgtgcaaagaaagcagcaaagagaattaagagaattgcatcatataaagagtgaattaaaccatctaaaggagcaaaaattcatcatcacatggacaagaaattaagacgtaacatccatctcactatttgcaaagtggcttattcctacagacaatgcagatatgtaaaaagcagctggaaacctaggagcagaagcccagcataaagatctctgaaagcctggatgcgtggattcctctcttacttcccaaaacggtggggtggaaatgtgaatatcagcatgatgcacagatctctgcagatgtccagcgaactgaatttctagacgctataatctatgttctttcccaacccccacttcagtttacatatcgcaggccatagatcctgtttgttgaaaagcgatcagctagaaaacaagagtggttataacctgtgctgcccagtgatcaggaaaagagagcggatgaaacttcccatgactttctgttagtctgattaatatccatgccaaatgtaagattagttaaaaggccttattgcttcgcaccaaaatgttccttcactagctatatactacactgaaatgtacagttatgggtatgttaacagttaaattgtcagtgggcatct

SEQ ID NO: 451458 - DNA, 1109 bp, Homo Sapiens
  misc_feature (77)..(86): n is a, c, g, or t
  misc_feature (281)..(281): n is a, c, g, or t
  misc_feature (283)..(283): n is a, c, g, or t
  misc_feature (289)..(289): n is a, c, g, or t
  misc_feature (294)..(296): n is a, c, g, or t
  misc_feature (303)..(306): n is a, c, g, or t
  misc_feature (311)..(312): n is a, c, g, or t
accctttttccccttaaaaattttaatattcccttaggagcttaaaatttctgtagggagttttgtccaattattgnnnnnnnnnnagaagtaaaggttccttcaaaaagattcccaaggtggcgattttcccattccggaggttgtaaaagggcggcccagggcttaggttataatagggttcactataggggcccctttgttcaagaaaagctgggtacgggtaaattgggccccctcgagggatcctttagagcggccgcccctttttttgtttgtgntnggggtnttgtnnntttttgnnnnttttnntttttctttttattgctctttatttctgtgctgtctaaatgtcaggatcactaggaaagatgattctagcctcttcatcctcccatttccagatggaggcctccctagggtagggagctatgatgggaaataggagcctctcattgggtggaaatggtagtcactgtgaaaactgcttctctaaacacaggtctagcctgactctcagtaatcccccaccctacaaagtgaaaggcatggccccagggacttcttctttgtttgacttcttctgctctcatttgcttggcctggactcattttgtgggctatggggctgctgctgggtttgacagcccttgtcctgagtttgcggtgagttgggctcagactccatgttaaggggtgagacttcaggcttggtctccaaaccacagcacctggcctgaatgcagcatgggggttttggctggcagcagtgattgtgttttggtgggcagcattgactgccttttggctggcagcactggttctgttttggtgggcagcattgattgccttttgactggcagcactggttctgctgtggtgggcagcattgattgccttttgctgggcagcatttactgtgttttgtctggtcacacatcttctgaacacttggaggtactggtctggccacacatacaattcacaatttccatgcttgacttctcatgactgattccagtaggtattattgatcttcctcagcagcctagtgagtccatgactatcagaagccaaagccatcccataactcggggcgtaccagcctg

SEQ ID NO: 451459 - DNA, 1017 bp, Homo Sapiens
  misc_feature (776)..(776): n is a, c, g, or t
gtgagccacagggggcttcccagggccaacagagttccaggaaagggattggggatgcccgacaaagaagagtttttaaactggtgtcctcctccgaaaggcgcctgacagcgaggatgtgcacaggctgggagcgctgcaccctctgctttgggaacacctgtggctggatggaccgaggagggcctgaagcccgaggctggctgcgggcatgctggccattctgcaggaggggcaccggtgtctgactgcatgctgcaggccgagtacaggctctccaggggatgcattcatatcgttcaccagggcttccaggtccacatcatcctcctggtgattcgcaagtcggtcagactgtgcggggagtcctggtcctgccgggtcttgttgactgcgaggtgtctgctccaccttgtcctgtcaggagttggctctgtagcactgtctgctggggcggccaccctggcttcactgagaggacccaggtgaggacctggctgccggtcactgggctgcatggtcactgagctaccagtcacatgggcctgcaagctgctgcttccctgctcagcattgtggtcagcgcacaaagctggagagcgggcggcagcactggccgcacggggtcgctgccgtgtgcgccgccgggcccgggtagggcattcggggcccgggcccccgcagtgcccggcgcagtggacagcgctccgcatggacagcgctcggagccgggccagggcatggtcactccacggcgtccagccaccaggcacagngggcactgcggcagcagaaaaccagacccggggcctcggggcacaccgcgcgcacaggcgaacgcgctagcacgaaaagcgggccaacgccgcctctggggacgccatccgggcgagggtgggatgccgcgccaccgccacgagcgtgcccgggggctcccagcgccatgcaccacgcaggtgcccgggggcccaatacgcggagccggcatgccgcccggcatgcaatactcagcctccg

SEQ ID NO: 451460 - DNA, 1127 bp, Homo Sapiens
ttttttaaagtggcaaaaaatgtgtattctatgcctctgtgaccccagccccctccatcttcagcggactaggttgaagtgctggtctgctcctctggtcctcttcagccagcatgggactggtgaggaaaaggttgtgctggactcctcaccgcctggctacctgaccttggtgttgagcttcaggtatgccacatagtgtgtcaggagcaagcctttggaaggcaaccgctgtagaaggccccaggccgggatcaggctcagaaagcccgccaagatttcatgggcaagccagccacaggtttcacctccaattgtgacataattcaatgactctttgacaaactcatcagcagtcttggttatcacatttgtatttagatactttgtcattgcagtcgagacagcatatggggtcagcacctggatgatgacttcttttgctttatattcctcttgcagggccttggaaaatgcgcacacaaacgccttggaagctgagtacatggagtagagaggccaaggaaacagggctatcccagaagaaatgttcaggatgagacctttctgccttgattccatatgtttcagaattagctgtgtcatcttgactacggaggtgatgttacaatggatgaggctctggatttcatccggtgcgttcaggaaatggcttgggagaaggtttggaagcattccgacattgttgactaaaattccaatttctaagcctgcaagtttttctttaatatgctcgtagatgtcatcttttgtaaaatctgcttgtataatcttcacactcctccctgtagtccgctcgatctctgtggcaatggcctctagtttttccagcgtccggctaataaggacaacattgagtccacgttttgctagctcgaacgagtacgctttcccaattccatcgcctgctccagtgatcactgcccactgtcccattgaccgcaagaaagactttggcaaaactttccagtagttcagtaaaacacatctggagaatctcacgcacttcgccaggcaggccaggcacaccagcagccctgtgaggatgaagaactgttccaggacgtcccccatggctgcacatcaacagactgtttcagccctgc

SEQ ID NO: 451461 - DNA, 863 bp, Homo Sapiens
  misc_feature (132)..(181): n is a, c, g, or t
gaggatccccgacgctctctctgtggggcatctggaggtctccagagcagcgtggtcccaggaggcatacatcagagagccacgagccagggcctgaaacagtctgttgcagtgcacccatggggcacgtcnnnnnnnnnnnnnnnnnnnnnnnnnnnnnnnnnnnnnnnnnnnnnnnnnntggcgaagtgcaggtgagattctccagatgtgttttactgaactactggaatagttttgccaaagtctttcttgcggtcaatgggacagtgggcagtgatcattggagcaggcgatggaaattgggaacagccgtactcgcttcgacgctagcaaaacgtggactcaatgttgtcccttattagccggacgctggaaaaactagaggccattgccacagagatcgtcaacaatgtcggaatgcttccaaaccttctcccaagccatttcctgaacgcaccggatgaaatccagagcctcatccattgtaacatcacctccgtagtcaagatgacacagctaattctgaaacatatggaatcaaggcagaaaggtctcatcctgaacatttcttctgggatagccctgtttccttggcctctctactccatgtactcagcttccaaggcgttgtgtgcgcattttccaaggccctgcaagaggaatataaagcaaaagaagtcatcatccaggtgctgaccccatatgctgtctcgactgcaatgacaaagtatctaaatacaaatgtgataaccaagactgtgatgagttgtcaaagagtcattgaattatgtcacaattggaggtgaaacctgtggctgccttgcccatgaaatcttggcgggctttctgagcctgatccc

SEQ ID NO: 451462 - DNA, 743 bp, Homo Sapiens
  misc_feature (721)..(721): n is a, c, g, or t
  misc_feature (724)..(724): n is a, c, g, or t
tggatgatgacttctttttgctttatattcctcttgcagggccttggaaaatgcgcacacaaacgccttggaagctgagtacatggagtagagaggccaaggaaacagggctatcccagaagaaatgttcaggatgaggcctttctgccttgattccatatgtttcagaattagctgtgtcatcttgactacggaggtgatgttaaaatggatgaggctttcttgaagagacgtagatttgtgccagaaacagagtgtgggagacagagcccacacaggagatgtgtggtccagagaggagttcaggagtttggtgaggatgtgcagcagcgcccaagcagtctggcattatcacccggtgcagcagactcggggcttacacaggacgatgggataccctttataaagtagagtgcagcaccccagaagcataggacaatggacaggtaagttttgatgtgcagagaaggaggaagatgtccatatcctagagatatcgtgaaaagtggtactcttgactgtggatcgagtgctggatttcatccggtgcgttcaggaaatggcttgggagaaggtttggaagcattccgacattgttgactaaaattccaatttctaagcctgcaagtttttctttaatatgctcgtagatgtcatcttttgtaaaatctgcttgtataatcttcacactcctccctgtaggccgctcgatctctgtgcncanggcctcacgtttttcccgc

SEQ ID NO: 451463 - DNA, 869 bp, Homo Sapiens
ctggacttgtcatgtgcgagacccgcactgggacacttttgaagtatggctgtgaagaagctgatttgcaagttaaagtcaagcgagtcgtgactccactgctgtcgaagggcaatctcttactcctggagcttgattagactgttcctgggaggagagatttgtggcgcaaggctctgggccactgagggcacacaaggccaatgctgcctgatgccactgctgcccacgcctgccggagctctgggctgactgggcactccgatcttggtagctccaggggaagggtctgaggccctggcatagtagtaaggggttgagtgggcatctcttggtaaggcctgagcaaatatcgtagcatagctagaaaccttgcttggctgcctgcgtgggtcctcactgaggctcagcaagaggtagagtattgaccatttatgttttcaaaactccctgtgaatgaagttttctgtggagttctgaaaataatgcagcatctgcttctcttcgttgtcgaataagctctttcttgattttttcagctactaaaaattcatctctttcaacagttggggcgaagttgctgccaatcacccgcacagcatactggaactgctgggctacatcagcttcgctcctgcccaggatcctgcagcacaggttctgcagcagaacgttcggcgacttctggtccggggtcgccatcctcgcccggagccgtgcacggtggtccgggcagagccgccactgccgccgcacgcgcagggaccgcggcccgcgcccttcctgcgccccgcaagctccctgctcctgacaggctaaggcgcgggcgccgccggccaccagggcgccattttaacggaaaccccgct

SEQ ID NO: 451464 - DNA, 808 bp, Homo Sapiens
gataactccaagggtgtgtggctttatcatctgagtgctgtggtgccattagttgagaacagcaaacactgaaggacagagaggatatatagatataaaattacattttggacatgctgctcttgaggtacccaaggaaaatttccagaagggagatatctatatatatgtttgcagctccgaggagagatacggaattcaggtctcagtgttacgtgtgtctctgtattagaatgctttttctgacacccatactcaccccctactggaatcagtggcattctaccgtcctttataacactgatctcacttgtcattatttgctcagcatttatcttcctcactagaaggtaaagaatgtgcctgtcttcttaagttccttaagacggagcacaaagtaggcatatgcagtaaatatttactggatggttgaatgagtaaccgatttgagggccaccagtaggactgaagtcacagtaaatgacaagaaacagagaaccaatgatggcatcatcaaggggtaaaagctgcatttaagaagatggcagaagaaacagaaaacggtaagggaaagggtcactcaatggagtgaaagacagaaaactaagtaagtactaatttgtcacctccacagggtcaaatgctgcagggaagtccaggaagaacttcaaagggtccgtccattaagactgaacaagagttgatgtcaagctgggcaggaagactcggaggaatagtgtggatggcacaccaggcaagaaagcggcaataatacagaacagggagagctgaacagcttggtatccct

SEQ ID NO: 451465 - DNA, 1414 bp, Homo Sapiens
  misc_feature (1333)..(1370): n is a, c, g, or t
tcgttctccttttacgacactctcgactgcttccctgttcttcattagacgacctctctctttcgtgctgcttcttcagcagctgtgtaggaattgctggggaggatgccatacaactccaggggcaatagtgctagtggttctgtgcgaatctggtaatgtttgtacgtctccagaggcagcttaagtctaaaaaggtaagtggggcacagcttggatgatcttcctagatagagtatagtcctcagtgtcttcctgttgatattggtaaattcatattaaaaaatttcaagtagactcatcttcaaactgacgttcagaattcaaattcactgacatcctgctttacaatttttgagtaccttgaccaacaacttgtttgttgggcactaagattctgctgtccatccagtggtctgtgcatactgtagaatggtagtaccccggctgagtggctgctgcattggtcatggttaatgtttgcaggccctgtaccccatcggtaccattgttagccagctgtattgctcctccctgggtaatggcaatatactgtccactgctagtttggtaaattggagttggcaccgttacagtggtgatggcaggtgctgaagtctcctcttcagacttctcttcttcaatccttggcactcctggtgcatcagaagataagtcattcaaaattttcctgtaggaaggcctccttgaaagaatttcccttcgcttttgggaatcagttacactatccactgactcctgtgaatcttcactttctgcaatagttgaaatctgtgttccggagaaaagtctttttaagtccttacaggaagactgaactgtttggacttgtggagactgaataactgatggctgggccgcctgaatgactccatggacttgaactgtctgcccattgggcagctgtactagagttacggtgggagcagatgatgttgcatgagctgctggcatagatacctgggctaatgtggcaatctgtggctgggcttgaactgtcatttgttggttttcagcttctgttacagctgcatctccactctgctggttctcggctccagattccatggtcatttagttaccggtggtacaagctcctccgtcactgctttcgttcacggcccggatctcgctggagttttattctctcccccacgtaacacaccgcgtcaaactacacctccgccgcgtcactcaccaacactccgcttctcccagccgcccgggccacaggcagcagcagccgccgccgactgaggagccgcagccagccgctctcgacgaattcgagctcggccgatttggcctgatnnnnnnnnnnnnnnnnnnnnnnnnnnnnnnnnnnnnnncgcccgccaccgcggtgaactccaggtccccatatgatcttctt

SEQ ID NO: 451466 - DNA, 716 bp, Homo Sapiens
ccgggaccatgtcagccctggggatgcaatgatgaatggggtacagtccctgccttcagaatgcagccaccccatgaactaggcattgccagatgctcccacttctgttttctaggctaggaaacctaggctcagagagattgaaggacttcactcagggtcatagctttctagtggcagagccaagaaaagaaccccagcagataattttctacagagaaccattacttcaccattggagtccacagctgatggatgagggcacaactcaaccacaagtctcaggggttgcttctatcctttggaatccaataaagactgaaagaataaataagttccagaagggcttagaggagctcacatgaatgatggagccagaatgagttattacagggcaagtcaaagaggctcacatccctaacctttagaaattgacttcaccgaaggcagctactgtgttcttcccataaagcatctcttgctactactgtcagagacagaacaaagggacagaccaaactctattctgtgctcgtttagtgggtctcatatttcaaaggttttggtctctgcctccctcaagaaataggatccagtgcctcagaacttataatcaggaaactgaatcccttgcagggtaaaagcaatggtaggggagaaagagatttgctcctgaggtgagtcaataagcacagaaattccctacttgggccctt

SEQ ID NO: 451467 - DNA, 792 bp, Homo Sapiens
  misc_feature (73)..(73): n is a, c, g, or t
ctctttctctttgcttacttgagtattctctgtttatcaaaaaaaatttctgtttatctgggtgagttaccanaatgaggcattcttctttgcttaagaagtggggcccatgacacagggggagactctactttgttagatcgctgctcaaattctggaccacaaacttgggcattggtgctcgttttctattcctagtggatacccccagtggattcactcattagaggttgtctgaatgcgtattatttcccaggagcatgtcaattaccccactctcttaccaacaatgcttttatatatggccggaagtgtccatttttatcttcaataaattttaatatttactaagcttgtatcttcactcgttaggaaagagcaggcttttgttgattaattgcgcattccttcttcttatatattgcctcagtgcatgttgcccattttcctaccattttctttattttttaagttggactgcagttgctctttgtgaactgtcagatgcgttgagagaatgggcttctccggagtgtattttatcttttgaatttgtttctggtgttttgctgaaccaaaggttttcatttgaacgcgttcaaatccttcagacttctccttcacagcctccgggtatctcatcttccttggaaaggtctttatatcactctgggattatgatattcttatactttcagtattaacatggctgaaccgcaaccgatgacaggaaatcggatgcttctgacccagtgagcagaagaacctggattaagttcctcttgattgatg

SEQ ID NO: 451468 - DNA, 839 bp, Homo Sapiens
ggggggagtctcaacgacgcgcacacgagaagtaaggagcggaaggtgggaaagggccggaaaacacacgttcctccgaaaccggtttgcaagtccttgtagagttggtgtctcacctttaactctccttatgctgggtgaaaacaaagagtgatagattcgtgtggcctttcaaatgattgtgaagtggtggaaatggatccaaaataataagtgacttctctaccaaagcatagaagattcttcatatctccttccagtggctcaatttagattttgggaaggagcagaacaagtgaaacacagaaaactgaagagaagaaatcctcattttggacctatatttctccttgactatttcttaatatccatcctacccatcgttctaatgttttaactttgctctgaatttataaatagtaaaggccaaagacatagaatatacatttagtagctttataccaagaaatttgccttgaaagctgctgttcgtggagggaaaagtgtagcacattcctgtctatttttatttttgatttattgttaacaaagacaagatttatgtccctagatttcgaaggttaaggcaaatataaatacatatctgcacactatttataaagcagttgcatgagtaagagtaatgagatctgtatttgaaggactttgtcatgtggatgtttggagttgactgctcagatctttataagggctttaatattttagatgctatgaccttgatgacataatgagtccacacttgagccccatctggctttactagctatgaccatgtatgacacagtattgaactcggagcaaatattcaatgtattagc

SEQ ID NO: 451469 - DNA, 695 bp, Homo Sapiens
taacccgggatcagccattttgggaagagctttgttatggttgtggactagccgcctctgccgggtcgacaagctggggacgcgtcctcagacgcagcgtctagtccctggccatagctccgccgctgcccgttggtgtctcacctttaactctccttatgctgggtgaaaacaaagagtgatagattcgtgtggcctttcaaatgattgtgaagtggtggaaatggatccaaaataataagtgacttctctaccaaagcatagaagattcttcatatctccttccagtggctcaatttagattttgggaaggagcagaacaagtgaaacacagaaaactgaagagaagaaatcctcattttggacctatatttctccttgactatttcttaatatccatcctacccatcgttctaatgttttaactttgctctgaatttataaatagtaaaggccaaagacatagaatatacatttagtagctttataccaaagaattttgccttgaaagctgctgttcgtggagggaaacagtgtagcaaattcctgtctattaaatattttttatcatactttgtaacaaagacaagatttatgtccctagatttcgacaggttaacggcaaatataacatacatatctgcacactatatataagcagttgctatgagtacagagtactgagaatgtgtatg

SEQ ID NO: 451470 - DNA, 791 bp, Homo Sapiens
cggggcgatgaggatgtctagagtcccattatagtcaaaagacagcccgaactccggttgaggggtgatctgagtacttggacatgcccttccctgtgattcactacaagcatcgcaacctgtgacaaagaaaaaaagtggaagattccgcctaaagacccaatgatttctgcctgtctgtcatagtgatacttccaaaaactgaatcccccagtatttgaataatatatataagtctgggatatctgatctccacggaaatatgcaaaaaccaaattactgacatgcacacaaaacaaacttccagtataacaacaattatcaccagagacatgtgtaacagggtgttttatacctaaagacatgctccaagaattattttcataatcataaatatagactttttgatccactactaacagcaataacgaaccagcaaaatgtgctgatgtcacttctggtacgccgacctgcattgatgtagggatggtaaatggaaggagactagtctcaaagttatccattgtgaaaaaaacttgtttccctagatatagtgctatatttttctcgcaaggatgtttaatcaagcgtgttgttgtaggatgaaaatacaggcggtccccttgaacgtcctgtatcagattaaacacttttcctgtcctcactgtgcgagaacgacagagctgagctgtgaccagcggtcggagccacatggtcacagccgccaccagcatcaacatcagcatcgacttgggcttccgccgccaccactgcccctcaaccgccacggg

SEQ ID NO: 451471 - DNA, 1184 bp, Homo Sapiens
  misc_feature (108)..(138): n is a, c, g, or t
  misc_feature (237)..(267): n is a, c, g, or t
  misc_feature (1112)..(1112): n is a, c, g, or t
ggagacggggagggaatagcggcgacaatgggcataagcaggactttgcgccaccccccagccggacacgcgtaagcgggatgccgcgcgcgtaaaaggcgatcggcnnnnnnnnnnnnnnnnnnnnnnnnnnnnnnnaaagagcgcactggaaaagagcgcgaaaggagcgggggccacgcggacagcggcgcaagcgtggcaaaaggtacaaagaagacaaataagttggagtcnnnnnnnnnnnnnnnnnnnnnnnnnnnnnnncggcgaaaaaacgcggaataggcgggagagagaacgcgtatgggttaaaaaaaacggcggaggaaaggaagcaaggccggggaaaggaacaaacgggaaagacgggggaatggaaggacgaagggcaaaaggagaggaagaccccggcgacgggaggacaggtgcccgctgggagcagtgctccaagggaagccgcgttgggcgcccagaacgatagtgtcgcgaatgtccggccgtgccgcagccctagccctcctgtctccaggcctccttacaggtgttgagcctagaggtgaacgcagggaagggtggagggcccctcaggccgtgggggtttcagcacagaggcagaggcccccattcccagggtgagggacaggcccggtggttgggcctcagggaggggacacacacctcggccctggtgcttgcagccgatgctgtagtgggggtgtggggaggactctcgtacggacgggctcggcacctggtacctggtggggctggggacttccaggtcagctgtgatcagggggcgttgctccagcactggccacaggaagcaagctctgggcctgggctcctttcagcgggcccctcccacagccccccaaagaccagcttgggggtggggtggccaggaccctcactcacatagttccctcagggtctgggtgtaggtgggcagggactcctggggggtgcccgtctgtaacctgaggcgaactgggatctccttcatctttgggggctgtgtctcatcccaggccatccccggctccgggcccaacaacagcacagatgccttgggctgggtgggctctggttgtgtctgcctcaggtgnaccatgggtccagtgtttgcctccattgatgtaaaaattgccaggaatttcactgccttctggtcagaattc

SEQ ID NO: 451472 - DNA, 1497 bp, Homo Sapiens
  misc_feature (66)..(76): n is a, c, g, or t
  misc_feature (377)..(430): n is a, c, g, or t
tgcgaatgtgtcggctttgcggttaacgtgggaggcaaagaggggaaaatggggtaagccatagannnnnnnnnnntaaaagggggtggcatggtacgtattttgtacaagttaccttttatttatagcgaaaatgggtttgttcatgtacagagtaacaaagatttttctttaaataaatgtatttcagcgaaaatgaactgcttaaagaaaaaatattaaggaaataatcacaaagatggtacacacggatcattaaaagatacggatgtatagatacatatgtcacaaatgattaagacttaaaaaatgtaaccctcccaagaagtgggagcctcccaaagtggagaaggcaaatacaatttccatttgggggnnnnnnnnnnnnnnnnnnnnnnnnnnnnnnnnnnnnnnnnnnnnnnnnnnnnnnaaaggtgtggagccccttgtggtctgaaacattcaggaccctatggcaggaggtgagactgtccaataattcagcttttttcaaggcatagacccaagactcagacaacctcaagaaaggggagtttattttggatataaaggcaacaggaatcctgaccaaatggtcagcagccctctcagcagtaggtatttttgtattgggaacccaaggtcctctgcttagtggctcaacgcttgtctacctttccaaggctcaacgcttgtggagccttgtccacaagcacctgctcccaagggcctccctccctgagttcaaacgcccaagacagagttgatctgattggctagttcaggcccagccttacctgattggacagagcttggtgccaaaccccctcataggctgctggtcagagcctgtgggggcgtgtggtcaggtgcccaatcaagctgtgagcaaggcctgtaagtgcaggtgcctgagggctcccaggtcagagttagctggggactggggtcactgtcctgctggggtggaatgttgtttgagccattgcaacgtgatctgcctaggaaagatacgtggaggggtcggggtagggggttgagccccttgcaggagggggcatgccagacctaatgggcacgggactctgcctctctgtgtgaatgtcaggcgcagggagcccagacgaggtggtgccaggtaattaattcgttcatccagggtatacgacggggtgttgggcactgtgtcttggggcagtgaaaaataatgaggccctgccctgtggagctgcccttctggaggccagtgtgccagtccctgagctgcagaggagaccccctccagtggagggggcagtgggaaggtcccaggcctggcagcaatcagggcccaccactaggcggggctgctgcctgggcctcggactccagggtttactccccatcagcttctcttgtgggtctgtgaagccactgtgggaagatgcagcaggcatccactttgtggggggatctgtgcccttacttgggccccagcattaaagatacagcagcccc

SEQ ID NO: 451473 - DNA, 783 bp, Homo Sapiens
cacaaacaccataggacacggcagaagcagccggctatctggtggtgcccctccaggttaccgggagagcatctgcaccaggtggtcacgctgagctgttgtgtcagagacacctgaaccgccaacggcatacccgcagtacggctgtttgaggcggagctggaagtagagcttctgcaggttggtatcagagaaaccgcagatctcaccatagcggcccacgtacttgctggggatacggccaaatggcagaggtccgagtggtcaccagaatgctggcctgaggcagcatgtatttgcgcagcaggttgacgatgatagcagctggttcctgcggttcctccgggtcactacaaagtcccgtgcctgccagccggaagtcgaggttgagatgctctaagccatggagcacaaagaggaggtgggacccagcagcagccatcaggggcagaacctccttcaggggcgtgtagcgctgggccacaagttggcacagggaggctggggcagggcccagggatgacaggtcctcacaggagaaggggatgagcagctcgaaggccggcagccgcccataacaccagtccagaaccatcttgcgcaccagcgtgctcttgcctgtgcccactgtcccatacagcaccactgtctgcacccggcgcccacaggcatccgggttaaagagctgagacaaggccagtggggggagcccggcctggggtggctgatgctccaggcaagctccgcgggtgggcgaagtagctcatcaggggtactctcgcg

SEQ ID NO: 451474 - DNA, 943 bp, Homo Sapiens
  misc_feature (303)..(362): n is a, c, g, or t
  misc_feature (786)..(883): n is a, c, g, or t
ttcagggcaatgatgatgacatcttagcgaggagatatctgtcatctctcctcagcagggaatactccttggaacaatcccaacgaggctgttcagttctcccacccacccagccatacatgttatactccttgctcagaatacggatgaggtcaccccgttggaaggacagttcatctggctggtcaccatggcaatcccataggccctggtagtaactggcatagtctactccttttcgtcgagtgccactctcatcctcttctagatcatgctcttcatctggcaagacttcataaatannnnnnnnnnnnnnnnnnnnnnnnnnnnnnnnnnnnnnnnnnnnnnnnnnnnnnnnnnnntatggaatggttaaggagctcagatcctttaacaagaaacttatttgatccacccagtctctggcttctgctggactagtagctgtaaactcatagctgcgcctatcctgggaggtcagttcaaagcaggattctttcttggaatctcttcgcaggtggggggccatccgtacaccgtagcccttaatgaggaaggtccctttgggctgcttgctcttctcattagcatagtagtagaagagacctctgctgacaacacaccatcgcttctgccactccgatccaaaagaaactatgatctttgcttttcttctccaagtatccttgcttgattacgttatcaagttcttgagctccttttacgatgtcttccattccccaagtttagataagaacatttaattaggccagcgcggtggctcannnnnnnnnnnnnnnnnnnnnnnnnnnnnnnnnnnnnnnnnnnnnnnnnnnnnnnnnnnnnnnnnnnnnnnnnnnnnnnnnnnnnnnnnnnnnnnnnnctcatcctgataatctgacaaaaagggtgcatcggatgtgagggacaggccaagagtccc

SEQ ID NO: 451475 - DNA, 809 bp, Homo Sapiens
ttccaagcatataaggatgaccaaaataatataacaggtaaacagaagtgccattttgcttcccacggctctggcctcctaaggggcaggaaagcaggtgaccttattcctggtattaaaatggcatggctggagttcaggtgggctgatgggaagctgtgcatcctatagcaccctggaatggctgaaattaagtattttatatggcaaaattgactcatggagcagaaatagcctgctcatatggacatggaagcaagatgtccttcaggcccctaaacctcttctgagcctcttcgcctgcagatagctgggcaggcgtgtctgaccatcccatgtggccagggtccatcttcagcagttgtggattgaggcctttgtccttgtctgtgctgatttgagaggtactggagaaaggctgtggtgtcttggtcttcgtctccagtgttagccactgcaatggcagggggaggaggtggtgggctgagagcatggacagtgcaaaggcagtcatggctgattgccggcaggtggtgactccccatccgcggaggctcccccgctgaccccaagtccccaccgctctgtccttctccaaggcccggtgcaggagcaccctttgtccctgggtggcctgaccctgctgaccacgggtcacctccctgaccacgaataccctgccaactgcctcctgagtgaccgagacagctcagtctagagtctcgactacccggggtgacccaatagtcccgactccccgagacagagacccggagacgtgggctttgtcagtttaacagattctgcca

SEQ ID NO: 451476 - DNA, 1289 bp, Homo Sapiens
aggagcttgctgatgacctcctttcttgcctaaaaggaaaccatccagcttggtgtaaataaaccagtagcatgctccccattaccatgataaaccgactaaaagaagaatagaagtatacaatgctaaggagaatcgcagctcgtgagaacgtgtacatccagtctagccagtctcgattgaagtcttcttcatttagtactggacctccctgtgcattcatttgaacattctcattcatgggtcgattttcttgggccactaggtttggagctggtgggggttcttctccaggaacatgtgccaaatttagaggctgtgaagtagtaggctgggttgggttgacatttgatgtggcctgagctgaaactgcagcttgatactgcatataatactgatgagcatacatctgttgccaccatagcatctgcagtgggctaaacgcgggatacactgggaatccaggtggagcagctgtgcccaggaaattggttgtctacatttgccttgcattacatatggaaactggtgactctgtgcttggtcagtttttgcttgtggaagggtacgctgcctcaatccttctgaggaagaacccactagctaaagacaaggtttcttgaccagatgatggagttgttgatcctgaatgatctgaactagaattgctgctggatgccaatgcttcatgactttctctattggtgctggattttggagaactgggaggagtccgagaagtacatactagatgaaccatatgatactcatcttgttttctgagaatgtctttcagctgcagatgatcgggaagcagtctgcccgaatacaccaatctctgatccttcgtcaatggtttgctagggtaaacgttagatagatgcgtttttagtttccccacggtccagttcaagaagcagctaatagtctggtcactgtatttctgattcggtgctttaatgatgagggtcacaggaatctccatcccactttggtccatggtgcccccaaagtcagacagagtccagaggagcggcagttaagcccaaaagagccgagatggtcaccgccggcgcgactgggatgaggacagaagtgagttcttagtattccgtgtccaagtcagttacaagtgcactggaggatacgaagcccattgccggtaccaaggatggactgaggtggtggcgactgcgacggtggggtctgggtgcccggccgtggaggcagctctccccgaccaggtccgggctccgccgggctccggacatcccagggaattccggacc

SEQ ID NO: 451477 - DNA, 721 bp, Homo Sapiens
cgggaagtgctggaattcattggtaatgacacagggatggtcgctgtgtccagatggaaatcgccccagtctttaagcagatccgaaatgcttcatgcggtttgatgtctatagaattgtgatgttgcggatggctcctcacatctccagtgaataagttgcttttcagagacatacttttttcttcacagttctgtgttgatgttgatttgcacatctctcactgaacagatgagggtacatcttctcctgtgtcatgcattttctggctcttagaaattcatgcaacacacttcttactcggaatagggttctttgaaaaacttccttaattttcctttcagttgtgtatatatttgaggtgtggtgtgtgtctgaagtctaaagactataatgataccttggggaagtttcttgttgtccttatgtttctgaatctccatctgccggcctctgcaggtacccacgtccctaggacccgccactgggccaggcccaagcagcatcaagccccgggtccccgccattgcgcccgcgtcgcgcgcctcagtcgccacggcaaccagggaggtgctgacccctgacctcgaggccccgccccttcacgttcccgagaccacatggagaaggccacccggaagtgccgccgcagcccccgcccggtgttaggagccgccgccggccaggccgaaccaagcgcccgcagcctgcagcccccgct

SEQ ID NO: 451478 - DNA, 1186 bp, Homo Sapiens
atttctacatcctttctttgatcttttgcttctagccggacatttcctcttcaggttggaattatactttgctcccccaaatcttatttctatttcattagattccagctgtttctcaatggattgaagcttctctgtctgcagacggattagcttcttcaactcatctgctgttgttttgcagttattcagcaccttttgcttaaactcagtttctttaccttttccaaaaatgtccattaatcctttggcacctcctgtaaatgtcagtgatttccttttcggttccctccttttgattgatttgtcaatctgaggcctcagtttagctaaggggggcagactctgcctgtataaagttctttcaggaattcgagccacactgtctgaagtgggtcgctcactgagagacggcccagttcgtcgtagaatgagctgcacatcactagcatactgcccccatttgtttaaggatatgataggattttcatgaggtgctaagtgtctttcagtatctctccatttctctataagggtgtaccttccagttcgacctattgcttgagctaaggctatgacaacctcctggcaagttgtgacttcagtgactccacaaacaatcctctgaactccatccacccatactttaagttccatggtgcaccggccagtcactcaaggtccctgagagtggtcatcagggtgttaggtcatgtctctagctgcaggaacacggagtggagaagactaagtctgtgtagtcagattctattctgtttctataaatctgatgttaggtatctcacagacgttttatattcctttttagactttagcatactgccacatattttcctatctgaattatcattgtttcactttgaacttttagtcatatattgagtcattaattcaacatagtattggaaattcaggccagggcaatcaggcaagagaaagaaataaagtgtagtcaaatgggaggagaggaagtcaagttgtctttctttgcagatgacatgatccaatatctggaaaaccccatcgtctcagcccaaaatactccactctaggagctgtaaccctgatctttatatcaactccaaccagttctatgcccagccccagaaccagactagagagtaaaatggaagtcctacactgtaggtgcgatcccgggaattcc

SEQ ID NO: 451479 - DNA, 1035 bp, Homo Sapiens
  misc_feature (248)..(248): n is a, c, g, or t
gctttcttaagacctcataatttcatctcctcacaaaactaacttggttcttcaagtcaagaagatgcaggtttttttcctgttcttccatttaagtttcaatgtccaaatcatcacttgtataatgctcctgttcatctttctacatctttgtccctcaggattttttgaaatggtgtttttatttgttttggtgatagtatagttgagtcaatattttccattcgttctctctcagtggtcacttntactttgaagatgtgaaaaggtgttgagacttctcccacatttaaatacataggttccccttcaaatataactccttcacaatcaccatccttaaaaccgggaggctggtaatctgggggtgtaacttcatcatagtaaaaaagtttcatggtcaaacaaacatcattaggtaaaggccccagattttgcattagggatataaatctttgcgaatgagggagaatgctttgctttcttggtgtcagtagacaacatgctagattcgttgctttggtttttacttatgaagtccatgagtggtccattattggtgtatttgaatttgaattggtaacattctgaaattgtctgaggatcttctgggtttgtgtatacatattttttctgtaaagcatcataacatcctagcatccatttcactaactgtgtagatcctgggcaatttttatcttctctcagtattttgacacaaagatcatctagatatcttgttccataagcgcattctgggaatattcccctcaaatacgtgatacaggatactgaaactgctagaagcctcttcactaacaccaaagactggtgttcagttgatatcttattgggaaataccagtgcactcatgggagtcctctgcaactgggcagtggccatcttcttctgataaagtattttctttaattcaacattacgtctgaggggcgggcgccggagaccagaagagctgcacgaggctgcacgcgctgtgcccgacgcgcatgcgctatcccgggaattccggaccgg

SEQ ID NO: 451480 - DNA, 1183 bp, Homo Sapiens
ctagacctgcgcaggccgatgcggaccgtgcccggcccactgttcaccgactttggtaagtcgtggccttggtcccgcggtcgactcccggagctggcagcccaggccagcccggatggggagctggcataggggttcggggtggagagaagtttttccacgggtaacggaccttccgctttgagaaacccttcttcgaacagggatttggattgggtaacttttcgcaaaaaggaaacgagaaacagaaaggaatgggcggttcagagggcttttaacatttagctgtagtttgtgccattccggcatgcaagaacaaaatggcgtccagtcgacttagcagtgcttcctcctccgggggaggcttcgaggagccgagtcctactgcgcttgcgcacctcttcccgccatttccttgggctggaggctcctcctccagaataacagaattttcctgccggcacgttagcgcaaggacgcctgcgcactcttccctcccggttcgcggtcgggaggctcctcccctcagctccgccctggcccagtgcgcctgcgcacctcttccctccgtttccccacgtgcagtgcgccctctgaacatcaacccggaccgtgcacttgggccctgagtaccctggttggctccagcatgcacccctactgcccgttcccgctgggctacctggacgccccttcctggcgtccccctgcagcagggcttccggcatgtgtcccgcaggccagtaccaaggcggaggcttggtgtcagaaccaggaggagacttccaggccaagctactacctgccgccgccgccgccgccacttgccgccccttccaccgtttccaccgcagccccagttcctcccgccaggctacctcgtctgcgctccacttcctccccccgccacgtcaccagcagctccatcatcgtttctcactgaccgtcctgttatgatactgacgaaggagaacactgatgaccaggatgcagaggtactgtcgggtgagcccagccaggcatcgtctcaggagcagtccgactaggccccaggcccgccctcctggccagcagagtggggcactggggggcaacagcaacagtttcttgtcgttcattcagtgatatgtagggaggaaggaggttgatagcatagatggcaactgattcccagtttaagata

SEQ ID NO: 451481 - DNA, 1629 bp, Homo Sapiens
  misc_feature (279)..(287): n is a, c, g, or t
tggagggctgctcaagagaaagaggtatctatggggtgcgaagtagaagtgtgtggtgcgttggtgaaatgcggataggcgcggagattaagagttaggagtgtcaatgacgtaccgcgcacaggggacacatcatctccgtgcggtggttttttgattgctatagcgtgtaatatttaaatgtggggcgtgtgagataacttgagcctcaggctggggaagaaggaccttccaactcatttttttgcggccaacttttcggtttgattccaagagccnnnnnnnnncgtgggcccatgaaattgaagatagtcttttttgcagccagtggggggggtctcagcagctcagagccaggcttaaggaccaccaggatttgttctcgattcatcccgctgagccactcctgggccgtcagggagggctgggcccctgctgttggagggtatatgtcctcttggtaggattctgaccgccggggcacaatcatggagatgggctcgatgaggcttttggttgtgatcagcttgtagaagcggaagatctcgcaggaggacacgtcgagtcctctctttggcatgacaccgatccccttctgtgggttataggagcggtactcagtcagttagctcaggtgaggcttgtcggcgctcacctcgtagtatcggatgttgccatctcccttccccaccacgtagagcatgctggtgtccgcgtcatagaagggaaacagcacgcccgaggagccgtccaggtcctcctccatcagaggcacagagaggttatcctggtcccacaaggccacctgccggttgttccatcgggatgtgcctgtggacatcagcttcttcaggttccccagaaacagcactttgctggcccggtgccctttgtagctggcctcctggaggacggtccctgctcgggggtcaataacccgaatcttgcggtctttgcaggtggtggccaacaggctgccgttggtgttgaaggacatggagaggatcacatcttggtgacagctaatcgtactcatggggcttgtgatgacagactcctttgtatccaggttccagatcatcaccttgtagtcatagccagcactgaagaggatgttggcggccgtggggtgccactccaccaggcctactctgcgcgcgtggcccaacgagttccttcctgtaggccgtgaggttcctggtcagcagctgcttggggatgctccagatcttaattgtggcatcttcagaacaggaggcgatctcaaaatcatcaaaagggttccacttgacatccaaaacgttgcctctgtgcccgcagacttttgggtagtgggggtccaacttccctgtctggtgcagggggatgacgaggaaggcccctccaccagcacactcagtcacaactgcaatgaagtgggggttcacggcacagaagtggttgtcgtgaacgctgcgggtgataggcacggagtcgtagcagttctccttgctggctggtttgccaaagacatgacggaacttggagctccggtactgggggtgccactgacatcttgatgactgccgcgcaggtggcggtggcaggcgcggcgtccagctccggctccgcgctcctcgccgcccgccg

SEQ ID NO: 451482 - DNA, 739 bp, Homo Sapiens
  misc_feature (60)..(60): n is a, c, g, or t
ccttctcctcagacagctatctgataatctccagaggaatattctgaggcaattaccagncctggctaggctgaaggcatcatcgatcaagccccgctcggttactgacagaaagaacctcatgattccggattaattgatccattaataatctccagttccttaggtcatagttgactctaaaatagccagtttgattgatgttccccagcagccagcttcctttgtccaaataagttattctgtggtgctctgatttgttagacacccaaataattgcttctgaagacacatggcttctatttcctaccacaatagttaatggaatctgccacaggtaactgttattctgaagtttaagtgctttagttttagcactgatatcatagataaaatgctgttgggtaattattattctattttctgctgttgtgtttcccaagatggtgataacaggataacccatctggagtgtccactgatccattacttcttgtatatttacatatttcccatttctttttaaagcctccgataatgtattccagagatcatttctggctgcattaccatacttatgaatggttaaataatcttgcaaacccctctggaaaactgaatggcccataaaattagccagcattcttattaaagcagcaccctttttatatgcgatccagtcaaacaccctgtcaatatctgttgcctgcagcacttcctgtgatactggatgggaact

SEQ ID NO: 451483 - DNA, 905 bp, Homo Sapiens
  misc_feature (20)..(20): n is a, c, g, or t
  misc_feature (32)..(32): n is a, c, g, or t
cagcaaaatgtgaatttaantttgttaaaatnaacccccagagtttctcctctcgtcatcattggtttatattcgagcaacagagaaataaatatagattgatgctaaaagttgttttccctcctgcccatgctctcccagatgaagggcttttattttgtgtatacttggtatccgaagaaaatagttcaactcatactagtttcagaagtgtattttcagtgtttaaccccaggtaaatgttttatatagaggatctgtgcaaaaatgtttgtaatttttttatatttcctgagttatttttatatgagcatattttatgttggaataaaatatatcttgtggcctttgtattttttatttatatgtacctcaaagatttttacaattctgtctttgaattcaagaaatacttgtcatctgaattctaaatttttctttttggatattcgagtaaaacctaggtaaaagtattttaagtttatataatttaacagttcaaaatatatctgactgtatttctttgccctacctcactataatccaaagtgcactatttgatctagtatggatttgaatgtacaatttatcgatggcttagtttattagttcgatttgcctagtatccctgcagcaattttttaaaatgtctgagaaatttttcagagcttaaactatttctttataatggcaaattacttttaactacttcctaaagtattataaacctgccagtggattttaagtgatagctaagcttccaagcttaattcacgttattacaaataaattatataactatcttaaatgtttatcttataattaaatgtaatttgaaatgctctaatgtattttgcagataaaacaactataaacaatattaggcaactggatgtttactagtg

SEQ ID NO: 451484 - DNA, 1197 bp, Homo Sapiens
  misc_feature (466)..(475): n is a, c, g, or t
gactaaagggggtttctttgtttccaccccggaatgggccgggggcccttttttggaataaatcccctttggggggggctcctccccctttgcggaaaagggccctttttccccgggggcggcggtttttgggtggcccagttttttcccagaaagcggattggaggtttccagtggtttcccggaattcccttttggaaaatggggcctttccccctcgggggaacttcttgggaaagcatctttttcctcaatattttctctcaagggactgggagcaaagggtgaagcgaggggtaccatttttcttccgggtccctcaaaggcggtagactttttgaatactttccctttcgttcttgaaaatcattgtcagtggaaaaacctaaacccattgttctcgctgggatgtgggatcatccgacagtatcaaaggggaagattggtttcagcttagatcttaacnnnnnnnnnnctgaggcatgcggggcagccagaggttctcagtgggtttgtgctgatgatgactttccatgaccttgagcagtaactccttggaaaaatattttgatgcactctccttgtcttgctgggtgattgagcagggaggtgggttgttggtcataatcagtaacgtcttatcctggtcatactgtgttacttttaacatgaagctggtgtttttcctgttttgagccaggaatttctgcagggcagtggccttcaaaggcttatagtactgggccaaatttggatggactgtgtaatgccgaaggttctctagaacaaattttgattgcccgactgcatcagaaatctctttgctattgacaaccattcctttctcacgtttagctgagctattttctgaagtctttgatttgccattttgaaacttggtttgtctcttttggctcattgctgttgactgctagttggccaacccaaggcaggtattcacccaaggccaaattcaggtctctaaatagtccacgttctgcaggggttcaattcaatccaaatattctttccttagcacacagtgtgtactcatgccccattcttgagcctttaagaacatcacgaaatcatagtttggtgaagaaggcaaactctttggcatgggaactttccattttgaaaatatcgtaattattcttttctggattctggatcccgggaattccggaccggtcc

SEQ ID NO: 451485 - DNA, 791 bp, Homo Sapiens
agcgggaggaccaggaacccaggagagcatggccacgctgcgccggcttcgggaggcgccgcggcacttactggtttgcgagaaatccaacttcggcaaccacaagtcgcgccaccggcatcttgtgcagacgcactactataactacagggtttcatttctcattcctgaatgtgggatactatcggaagaactgaaaaacctggtcatgaacactggaccctattactttgtgaagaatttacctcttcatgaattaattacacctgaattcatcagtacctttataaagaaaggttcttgctatgcactaacatacaatacacatattgatgaagataatactgttgccctgctaccaaatgggaaattaattttgtcactggataaagacacttatgaagaaactggacttcagggtcatccatctcagttttctggcagaaaaattatgaaatttattgtttccattgatttgatggaattatccttaaacttggattctaagaagtatgaaagaatatcttggtctttcaaagaaaagaagccattgaaatttgattttcttttggcttggcataaaacaggttcagaagaatcgacaatgatgtcatatttttccaagtaccaaattcaggagcatcagccaaaagtagcactgagcacgttgagagatctccagtgcccagtgctgcagagcagcgagctggaggggaacgccagaaggtgtcctgccggggctctggagctcttcgactgggctcggcgccgtcttcagtaatgtcgaccta

SEQ ID NO: 451486 - DNA, 510 bp, Homo Sapiens
cgtgtttgttccacgattcatttactgaattggggcaggtgatttaacaatggattaggagataaggctgggagagaagagttattgcttcccctcccaggagccagttgtgtcacagatgcctgtaaaatgttccaaacagccatctgttgttgggcgagctgggtctgaagctggaggtttgcatacatacattccaggagtcctaggcattccttgggcttgtgatcaaccgagggcagctttgttgtctggatgttcagaaaagtggctggtggggaacttgcttgaagattaatatagctgggggagggttttgctctacagagaggcacagcattagcttcctctttggctggaacttttctgttaggatgactagtgtgccgctccatctgaacaccaacaggtgtggtgcctgcggtgttaaccgaaagccgcaaccccagcacccaaccctagagttgacacacatgcgtagtggtgtgctggccaactgccagagccttg

SEQ ID NO: 451487 - DNA, 850 bp, Homo Sapiens
  misc_feature (43)..(51): n is a, c, g, or t
gcgcgcgcaaatgggccccccccacgggggtttctttgtccgnnnnnnnnngcgtctgtttttctgtttcctgtttacggtcccgtcatgtccgcgttagtgatgtttttggttccacaattcatttactgaattggggcaggtgatttaacaatggattaggagataaggctgggagagaagagttattgcttcccctcccaggagccagttgtgtcacagatgcctgtaaatgttccaaaaacagccatctgttgttgggcgagctgggtctgaagctggaggtttgcatacatacattccaggagtcctaggcattccttgggccgagggcagctttgttgtctggatgttcagaaaagtggctggtggggaacttgcttgaagattaatatagctgggggagggttttgctctacagagaggcacagcattagcttcctctttggctggaacttttctgttaggatgactagtgtgccgctccatctgaacaccaacaggtgtggtgcctgggaaagaatcatagcatcagatgatcaacaatccatgttagtattttcactatgataatttcctaagttgtctccagcagatctcagcctgttccaatagccattagtccagaggcgataaaccacaactcccagtgtgcccggaaaaaggctgcgcagtccggcccggtaagactacaactcccacttcaccctgcgccaagccggcaggtctttcccccatgtgctggctggagtcccgcctctctagtccacctgttgctaaggctagaccaaaagagtgggaactgtgaagcctttcttagccttcacggtccgataggagccgagtcgca

SEQ ID NO: 451488 - DNA, 732 bp, Homo Sapiens
  misc_feature (57)..(119): n is a, c, g, or t
tggtgaggatgaggttaatatggtgataggtgtgtttatgtgtggtagtgttgttannnnnnnnnnnnnnnnnnnnnnnnnnnnnnnnnnnnnnnnnnnnnnnnnnnnnnnnnnnnnnngtgttccacaattcatttactgaattggggcaggtgatttaacaatggattaggagataaggctgggagagaagagttattgcttcccctcccaggagccagttgtgtcacagatgcctgtaaatgttccaaaacagccatctgttgttgggcgagctgggtctgaagctggaggtttgcatacatacattccaggagtcctaggcattccttgggcttgtgatcaaccgagggcagctttgttgtctggatgttcagaaaagtggctggtggggaacttgcttgaagattaatatagctgggggagggttttgctctacagagaggcacagcattagcttcctctttggctggaacttttctgttaggatgactagtgtgccgctccatctgaacaccaacaggtgtggtgcctgggaaagaatcatagcatcagatgatcaacaatccatgttagtattttcactatgataatttcctaagttgtctccagcagatctcagcctgttccaatctgcggtgttaaccgaaagccgcaaccccagcacccaaccctagagttgacacacatgcgtagtggtgtgctggccaactgccagagccttggcgcctg

SEQ ID NO: 451489 - DNA, 1201 bp, Homo Sapiens
aggcaccaaattttgttgacttggttgggcgggggagaaaataccctgcgacccgggggtttacggtgtaagggaggggagcctgcttccaaaaggggaaggaattgggggcgaccgttctgggccccgagtaaaaagggacggccgggtagttaaaaaagccattcgtgtaatggggagcttcttggcatggcggttgtccagggttcttcatttggccaagggtttaccggtgggggccaggcacattaggttccggggaggcccccgaaggcttgtcttccccggggggtcccccggggggatttcccccttcgccagaagcaggaatcagcagccaagggccatggagtactgcgggcatttgtatagattgttgtaataaggaaacagagcccggctggtagaagctgctgtagtaggtggagtctgaaaccaggtcaggtgtgttctccacatgccctctgctggtgacagcaggaatatcctggatgaccatacgtccctctgaagctgcagtggtggggacactggccggcggtggctgagaggtgccactgcactcagtcatgaggcacgggttactgccattgttctctcttttgacaagcagctcggccgcactgggcagtgggatggggtggctgatacccaattcctcctcctgggcctgctgccttctcagggccacctgcgcggccatcacgcgctgcctctcggcgatcaggttgcacttcttgcactggcagtcgcgccacatgcagaagcgcttgtggcccttgagcggcgaggcgtagccgtggttcctgcagcgtgcgcacttgggcagccgcggggacttcttgctcccggcacccaggtccgacgccccggagccggagccgcctcctctgctgctgcccccggcgctcgagccgctggccgcccccactagcgccccagacgctttgccaaagcccccggctctgccctgcggcggtaccccgggggcgtgaggggcttccgacggtgtagagggcttgctgaatgcctcgtcgttgggcatggtgcccctaggagaagtgcgagcactctggccccctctctcgcctggagactgctgcgagggatgaacccgacggacagcgacgctccggaggaggaggcgcaggagacgtgtgcgctgcagccggaatcccgtaatccgggcgaccagcacctt

SEQ ID NO: 451490 - DNA, 1210 bp, Homo Sapiens
  misc_feature (251)..(251): n is a, c, g, or t
  misc_feature (301)..(301): n is a, c, g, or t
ttatttttggcaattttccaggttcctccgggggaaaaattaagtcacagtgtccagcccttagccatgaaatgaaagtcccccgtcctgtggttaaccgtttcacaggttcctttggatcccccatggaggccaggggtccctttgtttttcgaaaagaccaagcctttggattctaaaagtcttaggtcttcccccaggattggtttttattgggttttaatccaaacaaaatatggttcacatcttcnggtaacccccattttcgtaaacacactctttccaagtcccaaacccttcnccaagagcacccccagagaaaaataaatgatcgaggtgctgcaatctcatcaatttctactttcataatatcatcccaagtccagcatttttcattagcagtgatgccagtttctctgtaatattcttctaaagggggttccagaagaatcacatcaaatttgggtgttagttctctgatgtcaaaggcttctatatcggcttgtaagtacatgggaggagtgttagatttagctattaactcatcctttagcctgatgagctccctcagtttaggatattcttcaaatctgtcagctaaacctacatccctgatgaaattctgaggtctatgtccagtgtctacaaaatgttggcagtaatcattatggggatttaagctctgtgttcccttaagaaaagtactagaatctttgtaaatctcttcttcatatggcaaattttcttcatcctgttgcatttctagttcatccttatattcttccattttgtcttcatctgtctctccttcatccagatacttacgttttgcatttggagcagaggtatcataggaagccctgcaagtttctcttgtttcagcaatttctctctgctcatctttgctatttaacacggcaccaatgctgtcggcactttcagctcccaactgctgcgcgaggagctgtcgccgtaacttctgccgctcccggatctcctgcaagcggctatccatgttccaactccggcttttcactatcccgagtacttgtcaatctccagtgaactcttatccaacctttcttccgagtctgtggaacaaaattcaccgggagcttacgaacagagtatcctcatagctttcctcagtagagacttccggcgccagccccgctctcgacgaattcgagctcggccgatttggcctgat

SEQ ID NO: 451491 - DNA, 1264 bp, Homo Sapiens
  misc_feature (151)..(151): n is a, c, g, or t
  misc_feature (226)..(226): n is a, c, g, or t
  misc_feature (1107)..(1192): n is a, c, g, or t
gacttttgggggggaatgctcccaccccttttccttgggggctgtggaatgggtttcctttccttggggaccttggggggaatggtcacccctttccttagggcttggattggtcttcctttctaggggactttgggggatgtccaccctncccttggggctggatggccttccttctaggggacttgggggaggtcaccctccctggggctggatggcttcttcntggggacttggagatgtcaccctccttgggctggctgggcttcactgaggctttgggaatattgcccagcttgggctggatgggctttgctgaggacttggggatgtcaccctccttgggctggatggtttcttctggggacttggggatatcactctccttgggctggctgggcttcactgaggtcttggcaatattgcccagcttgggctggatgggttttgctgaggacttggggatgtcaccctctttgggctggatggcttcttctgaggacttggggaggtcctccttcttggattggatggtttcttctggggccttggggatgtcaccctccttgggctggctgggcttcactgaggccttgggaatattgcccagcttgggctggatgggttttgctgaggacttggggatgttactctctttgggctggatggctttttctgaggacttggggaggtcctccttcttggattggatggtttcttctggggccttggggatgtcaccctccttgggctggatggtttcttctgaggacttggggctgtcatcctgcttgggatggctggtgtttgctgaggacttgggtaggtcatcgccctcctgtgaggcatcagactcctctgtgcgcatgtggaacgtgtggctgaccatggggagaaaggccttctctttggcctgggctatttccaagaactctagggccaggagaggcacgttgctggacaggactagtaatgagctttatttgggtggcacgttacagttggttttccctctctgtattcacaacagtgatatttgagagcttcaaggtggctcccctgtgctgaggctgggactacgcattcactggcatcatttcctagaannnnnnnnnnnnnnnnnnnnnnnnnnnnnnnnnnnnnnnnnnnnnnnnnnnnnnnnnnnnnnnnnnnnnnnnnnnnnnnnnnnnnnggtgggggcaggctccaaagctcatgctctgcactgtgaggctgtgctggacatcccgggaattccggaccg

SEQ ID NO: 451492 - DNA, 577 bp, Homo Sapiens
ctttgcagaagctgtaaagctttattgggagaattttaatgaacaaatttccaacataggagcagcctgcatcatttcaacgtgccttcttttaacactgtgattgcttttcaccttcttcaggcgttttcacctcctctggatttggcgggtccatctcctgcccatcaggaccatcttcacactcacacccagtctgtgggtgaccctgttcctggctatgagcttcaggcttcggcccttgacctgcagatgctccctcatcctctccctcctgagcagctgcaggatcctgacgttgagttgctggttccccttcttcaggtgttgctggttccacttcatcactgaactgctcgggccgcataggcccaatcatttcaggaggctctacgtagcgtcttggtctaggccgataggtcgatcttcctcgccaactcatatttcacacagatgaatctcagtagaggaaaaagagtccggacggcaggaaccacacagcactgcctcacagctcctggcgttcttcacgtgagcccgctctcgacgaattcgagctcggccgatttggcctgat

SEQ ID NO: 451493 - DNA, 825 bp, Homo Sapiens
tccggggcccggccggtgggcggggaaggggcagagtggggagaggcgactcaggtcctggcaccctctgggcgcgcctaggccccggcacagcttcggctgagcgccgcaaaagtcacgttattggcatgttctagaaactggctttccttgctcgttgtccactctgcgaggttgttttgcacatttgcttgtggccgcagaacgtccgctttcgctgttaggcagaagctcctgcgttggttgggtgcggttggctcctcggcgctctcctgcctggcggctccgtgacggctgccgagcagcctcggtccccaccctgcggctcgcaatggcctcgaccctcggagagcttgacccagacgttccctacctacatgagcggcgacgccctttcccggctcttcctcggctggggcgccccagggcttcggcgcgggcggccttccctcacttctgctcttctcccatccccggtagcaccgtccactcccagttagccggctcagcgctgctctcccgggcctctccaccgagagcttcctgcgcctgcccgccaggcccgctcctcctcccctctccgtctgagtttatcttactgcccggcccattgggccaaaaacaggggtgtcgttcgtaactcctttattttaatcctatctcaaatccctcggcggatctgacggctccactttcaaagagagaacgtctggagctggcccagcttccgtgctaggcaggacctcccacgggccccgtcccattgtttctccacagtcgctgccaactaggggcacctctccatcttcattccctaggacccta

SEQ ID NO: 451494 - DNA, 882 bp, Homo Sapiens
  misc_feature (41)..(41): n is a, c, g, or t
  misc_feature (52)..(52): n is a, c, g, or t
  misc_feature (68)..(68): n is a, c, g, or t
  misc_feature (90)..(90): n is a, c, g, or t
  misc_feature (142)..(142): n is a, c, g, or t
  misc_feature (159)..(159): n is a, c, g, or t
  misc_feature (170)..(170): n is a, c, g, or t
  misc_feature (174)..(174): n is a, c, g, or t
  misc_feature (190)..(190): n is a, c, g, or t
  misc_feature (265)..(265): n is a, c, g, or t
  misc_feature (272)..(272): n is a, c, g, or t
ggatgaaaaaggacttacgtacccttgatttattaaaattnattgttctttnatatacatttttcttnaaaattctgaaatgaacatttntttatgcagtatgacatgaatgatttaataacttatatgacaagcttaatanggctgacattcaatgancagaaaagtantttnccttttagtaatcagngaaactttcaatccatttttatcttatttttaagtgtctgttattaaagcttgtgatttttattaatgtgaatanggccaanggggtgattgtttttgacacacggcattgtgccatagtaaaatgggtagtatccttctcagttaacctttaatactctgtacacactattctgaaatactgtggtgaagtaaggcctggcgtcttcgagcaggacgctacataagggagggttagctgcattggaagggtcttccacatcccagatttcaagcatactgcaaccaggcttagttctcacaacacaccatgcctcttctaaaacataataattcacatgtaactccaacatttatctcttacttctttggcagattttcgactatatgtagaataaactatttttgtccgagccctcaagtctgcatcttcgtaatgtggatgattcacaatgggatgaagtgtagacagcttgatgcttgccattgtaggcatggcacctgcaaagacagcatctgatgtggtactgtatttgatccactgtaaaagttcttcctgaggcaattattaaattctcctattatgctccattgattacggaggtttgcataaccttgtattgacatcactgttaaaatgccaagataaccttctcaaacgaactctgcgaaaaagccagccaaagagctgtc

SEQ ID NO: 451495 - DNA, 1099 bp, Homo Sapiens
  misc_feature (955)..(955): n is a, c, g, or t
tctcaacatattatgatcatcaaagcctgtttgagctgccagggtcagcatctgtggccttctgagggctcttgtccatgagcagggcccaggcttcctctttgaagggtgaatcttggcaatgaccacacatgtggcttcaattcgttttcaaattctatttttccagccaattcttcaatagttcggatgcttgtatggtcaatcatatcaagcagatcctttgtgacctcttggctagaattgttgagtggcatgtttgagtcagccttcaaatctctctccatatctttccgtaaattgttcttttctccagttttccccctctcctgcagttctccaagactctctttcaggtgccaaaatggaggaatgcatcaatacattttccttgctggttagaggttttctctcggggcacagagcatgtggttttgcatttaccggggcatggtttgttgcaaaggcagggttctcattctcaggagcacatgggacagcagcaaaaggagcagcagaagagcaggctgccagaggatgtcttctgcagaggagcctgtgcacgggcagcgagaaggagagcggcgcggcgctcagttccagcctctgctggcctgtgcactcctgggaataactaactccttcaaaggcccggtcaatggctgcagtcagttcctttctgcatcttcttagtttttcagacatttctcctaaaagcgaccatgtctttatgtaatgcattggaaatgcacaggacaacacaataatgttacaaatgaggctgcaaactacccctgaatggccacgatttcctggagcttggccctggctatagcaggacccacaaccctcgggctttcctcctggagtaggcggttctcggctctcgcggaggaacccgccatctgccagaagccccaaagacgccccgccccaattcccacagcttcctggnccgccccgccgctgcctcccgccccaccggggctcccaggcgcctgcccctaccggcacccccccctttggcgagtcggcagccacgttccttgtccctcacccgcaccgcattgacccccgacccttccaagggttatcgcat

SEQ ID NO: 451496 - DNA, 1090 bp, Homo Sapiens
  misc_feature (183)..(183): n is a, c, g, or t
ttccatacaccaggttggtattgctgaaggccaaggattctcatccgggggggtatagagtccaggggtgcagatcccccagcccttcaggcattttggatggtggctgaacattcattccatatcccggaaagcagcgattaatccaaaccatttgggagagtactttcaatatagtatatntgaggtaatggttctgcacgtctgccaagaaatttttacttgttgattaaaaaatctctctatgagatttttagccttaaaaaagtcttttgtaaggttcacaagttatggtctgtacatcgcttgggtcctttttcagtgtctagagatgaaactgaaaatgcaaagaacaattcattttgcaaaccagctctttgcattttaacgcgatggcattcagacttaagtaaggaaatttcacatgaaaggtcaagaagcagtttgcttaaaatctgaagaagtttcttctcaaaagaaatattataaatgctattgcagggagctgcatgatatcgagctgtgaactgataataataatgaggctcacgataagcatatatagcatattttagttgaagacgtttaacaatttcttccacagtaggtttatattcgaggaaacatgtataaattccactcatactctcctcaaaattttggaatacaaggcttcctgtggatgttatttgtgcagtgcggttttctgaaacaacttttcctttaggcccataccattggaatgatgggtctatcagttcagcatttcgcagttgttgcgttacacataacacgtgtggactcttttgatggagcatgacatacgctttcactggaaaacttgttgatcccactattttcactgaatctttggtcaagcgaaaagctcttggtaatcgaaccaagtgtccaactgatgagggcacccgcaccaggaaggcggagataaagaggaggatggcggcccgagagagcagggagccggcggcccgggtccgccgcctgccccgccgcgctgggccaagggcgaaggcctccatccacacgccaccgtcgcctgcccaccgtccatcccgggaattccggaccc

SEQ ID NO: 451497 - DNA, 1296 bp, Homo Sapiens
  misc_feature (644)..(644): n is a, c, g, or t
aagaaaattcaagtttggttgacagcgggacccaaaagacatttgcagagcagtagttcagaatggaagcgctgtttcaatgtgaattattgcattgttgctgagatattacactatcatgagaccaaaattgctacaatttaattacaaatcattggcattttaaaaaccatttttctgttttgggctaatataacactttcctgtagaattcaactgaaatttcatatatcccacccccaaccagcaaccgaaagccttaggaaaaagctctatttgtatttctgtgtataaaaggtactgcatatatacctcttagcaaaatatgtgctccctttcctctccccaccccaggaaccatggatcatttttgtacaaaatcctggtgaagaatcatatcaaagatgagaagcagggagttcaaaggtaaacaaacatttggtgaagtgtgtaggaaattccatgagcctcctgtaccagccccacagaagtcctggcttttggtgaatgtggcccagaaaagccaccagtgtgtgtggcagccctttggacgtggtggtgcccctcgcctgcagagcacagcatcatgagggtgctggtggctgtggggggactgcactcagggaagggctgaagcaaacgcncaggcccccatctgcaggctgctcagagtcagtgggtataaaagatgctttaagcatttggaaagaagggaaaaatcttccctggagacaggaacttgtagccatttccagaaggaagcctcaaagggcgcgcgggggctgtggcgggagggccggcgggcagcggcagtgagcccagcgaggtggtctcggtgcgccagtgtccgttgggaggggctttcggtggagctccgtcatgctgctgcagggacagctccttcagttcaagcttatccactccctcctccttcttattgtgccgtggtgacaaattcaacagactgaggacatcccttttggaagtcatcgtgccaggagccccccggaagatcttcattggccctgtggaatgctggggtgtgctctgccagaacatcttcaggttatggacagcctgcaccttttcatcaatggctgccattttcagtttgtctatgtcgggagcgtctgctggacttgagcgagcagatccagctgaggagtaggagagagctggggagggtgcactgccagcaggagactggtggccggagcttggggacatgttccttggtgatttggaaatgtgagcgctgtaaggagagctggggtacttcagtttaaagagaggctg

SEQ ID NO: 451498 - DNA, 1020 bp, Homo Sapiens
tcccaaggctggtactgctccggtgtaacgggatgaacggctctgataggccactcctcttctccacccaggagatgagaaggagggcaggcctttttaatctgatcagaatgttaacccatctctccgccttgcggtagaacccctggatacattatttgccctctcgaaaggcaggctctgaatttgattcaggtatatttcttcatagctaaccagcacaatggaaaactcagggaaagcaaataaaaaggatacacatgacgggccaccaaaagaaattaaactgcctaccagtgaagcacttctagactatcaatgtcaaataaaggaagatgccgtggagcaattcatgtttcaaataaagacacttaggaaaaagaaccaaaaatatcatgaaagaaatagccgcttaaaagaagaacagatttggcacatacggcatctactaaaggaactgagtgaagagaaggcagagggattgccagttgtaacaagagaggatgttgaagaagcgatgaaggaaaaatggaagtttgaaagagaccaggaaaaaaacttgagagatatgcgcatgcaaataagtaatgctgagaaactatttcttgagaaactcagtgaaaaggaatattgggaggagtacaagaatgtaggcgagtgaccgacatgctaaactcattacctccttacaaaatgacatcaacacagttaaagagaatgcagagaaaatgtcagaacactataaaatcactctggaagatactagaaagaaaataatcaaggaaactttgttgcaactggaccaaaagaaggaatgggccacacagaatgctgtaaagctcatttgacaagggcagttatctagagatctggcgagaatgactgggtcaaaaaacagaggttgccattcacaggaaggaacgcggaagaattacaacacatgctattctgaactggaagcgaaacatttgggcttattgatcaactttccactgtaactttggatctcaagatacccag

SEQ ID NO: 451499 - DNA, 1411 bp, Homo Sapiens
  misc_feature (887)..(887): n is a, c, g, or t
  misc_feature (903)..(935): n is a, c, g, or t
tagtccccccaggccgctgggtaggccgctccgctgttggctggtcccccccgccgaaataagagtctgtggaagcactgccaagcagagctggagctgtcgttgcggtagctagagaaaggcttgcggccgggggtgggcgtgatgctgggggtgggcttgctccagaggctgcctgggccggacccgccggacccatgatgcagatcgaagcccacatcggtgccgttggcgtggaagtcgttctcgtctgtgagctcaatgatgccgccggtacgcagagcaatgtgcgcctcaatctcctctcgagcgcgatccacgttctctggcatgccggtcacctcgaacaccggctccttatcccggctgggcgtcacgatgtacgtgtgcgtctgctgctggatgcgcttgattgtggcgcctttgggccccaccacgagccccaccacgcggtagggtacccgcacttggatggtggtctgcccgggcaggttgggcggcccaggcaccgcgccgttgagtgcccgtgttcttattcgcgggaggcgcggatcattggagaagtggctcggcaagcagagatgatctccctccgagccatggccacatcctccttcctgcccgtcacaacaaagacaggctcctcccccgcgaactggggtcttgatgtaagtattggtcttcgcccgcagcgctttgattttacaaccttgccgccccacgatctcggcgacatgctcagaactgggtactggcacgcaactcggtcatgttcaacgctcttcttgcgcggctcgctgtcgtacagagaggcgccctcgtcactgtccagcccccagcagggagagctggtcgagcgcgagctgcagggctctttggtcaatccnagggtctctccccctnnnnnnnnnnnnnnnnnnnnnnnnnnnnnnnnnttgcgctccaggtctgcgaacagcgagctgggcatcgctcggccagtgcgcagccgcagcccccgccggccctcaggctcaggcggcgagaagctgcggccacaaaggcagccgggaagcagggtggtcaggggcggggaggccggtcgcctgctgagggctccgttgcttcttcctcggtgctgggaggagtgggtcagctccgtgcggtccgcacacgggcagtggctgcaggagcccccaccatgggtcccacaccccagacctagctcggcgggtggggtagggggcagagctctagcaggtggccgcgcgtgccccccgagtgcccggctggctggccgcaatgccgagcgaaaagcgagcaggcgagcgacagaagcgtattcttctaaggagcccctccccggctcctccacgtccctccctcccgcccgcccgcccgccctcacatcagcgcatttttcctcctctcc

SEQ ID NO: 451500 - DNA, 779 bp, Homo Sapiens
  misc_feature (371)..(446): n is a, c, g, or t
tttattggctctgggccgctgtattgaatcttttttcaggttctgtctcggtgggtcccccctcgtgtgtccacgcccttgcgtctttgaccctccctctggtagtttttgcgtctcttcgtgagccccatgaggtctccccgcgatttttcgcctctggttcctccggtgctatttatccttggatgcaccgctcctcctgctgcccttcgcttcttatagatgtaccctgatatactcccctccttctcgggctgtcccccgtgcgctcctcttctttgaggccccgaacagagctgggtctgcgcgcgcccctggctgcgccctccgcccgcgccgagagacttgtgtgtgcccccgcgcccgcctcnnnnnnnnnnnnnnnnnnnnnnnnnnnnnnnnnnnnnnnnnnnnnnnnnnnnnnnnnnnnnnnnnnnnnnnnnnnngggtggtggatcaaaatttacttaggaattcaacacctgtgaaaaggggaaaggaggctgcattgtacagaagatgccaagccatgatgcaggcatgatgaagccttggcctccctgtaggagctctagagcaagaatttttccagtcctgttccagggcaagatggtggagcctctgtgctctcacagcttctagtcactgaatgcacgtgcagcttggtatgtcttttgtgttgtagacatagatatgccactcaatctcccaccttcctctgagaaacctgttgggcttccacaggctttattggatacatcacaacctctgtatcctcc

SEQ ID NO: 451501 - DNA, 681 bp, Homo Sapiens
tgaggtggtgatgacagctgtgctaagacagatggatcctctggcagccatactctggtttcatcttcagatttgtagtaactcagagcattatttttcaaatactaccctacgatcctgccacccattgaatgtagtttgttccactttatgtgaggtatctccggcagctgctccacagggcggcccaagactccgtctctggatcctcctccgagcccgacgagttccagctctgattatccgacatggaggctcgacaaccgagcaggagaccggcccccgctccctcagctgcgccggaggaggcgcccagtcctcggggtgaagggtcgggggatggcgaagcgaagagtgcccgctccggtttgggggggagcaggaggagggacgaagtgcccgccagcgccagccgccgcgcctgacaccgagcggagcgaggaaggaggacgagcggtgaaggaagcctacccttccagccgtcagccgccgccgccgtcgccgtgacccctgcgttgcgcccggcgctgccacccgaacttagccccctcgatgccaatttcaaatagggaaggaaaagggaaaagaagggaagagaaaatccggccgctgagtcccgcgtccactcacacctccgctaccgccgccatcttcctgcctggcccactatttaccctcccc

SEQ ID NO: 451502 - DNA, 881 bp, Homo Sapiens
acacacgctctgtctgcctgccccgagtcccccgggaggccgcggggtttggggaagtgtttctaggagacggcgctcaccggctgcacctgcgccgttgacgccaccggggccggcagacagacccgcggcgctggctggtggagggagttcccgcttgctctctgtcgctgtcaccgccctgtttctgtagccgtatggtacgcctgtgagaccggctgccggctgacgtctccttgcgatggagcatatccggacgaccaaggtcgaacaagtaaaattacttgaccgattcagtaccagcaacaagtcattaacaggaacactgtatcttacggctacacatctattatttatcgactctcatcaaaaagaaacctggatattacaccaccatattgcctcagtagagaaacttgctttgactacttctggatgcccccttgtgatacagtgcaagaacttcagaactgtgcatttcattgttcccagagaaagagattgccatgatatttacaactctttgctacaactgtcaaaacaagcaaaatatgaagatctctatgcattttcttataatcccaaacaaaatgattcagaacgactacaaggctggcagctcattgatctcgctgaggaatatacagaggatgggagtgccaaactcacactggcagttgtctgatgccaaccgggactacgagatttgtgaaacttaccccagagaactttatgttccccggatagcaagcaaaccaataattgttggtagttcccagttccggagcaagggaggattcccagttctttcctactatcatcaagataaggaggctgcatttgtcgatgtagtcagccactctctggattcagtgccaggt

SEQ ID NO: 451503 - DNA, 998 bp, Homo Sapiens
ttttttttagatgtaagaaagaactttatttccatatggtgcttggggcagggtctgatgggggctacaggcaggtgctccccggtccccacccctacagctgccgagagggcctgaggatgtacagtaagtgggtctttcggggggacagcctggagtgggaggagctctcggtcccctcttctaggacgtccttgtgggtccccttgcggagtccatcccggatggcctgcaggcggtgtcgcttctcgctgagccagtggccgccctccagggcatcctggtgggacctccgccgtggcagcttaatgatccagaaggccacccggggatggagttctgtgtggaagctgtccgtggccttctggatgggtaccagggcctccttctcctccatcctgggtaccttcaaatcaccctcgaagctcccctccgctggttgaatggatgccaccacattctcggagatcagcacctctcctgtcttgttgtcggtcatcttgtcgatctggaggtggctggagagggtgttgttccccagctggtgctcctggttcttctttttgtggtagttcccagggaggccccggaagtccatgggggcagagaataagctgtctatgccccgaagcaggttacctttcaggaaaagtcggctgaagccttggagtaggctctggaggcctgtgagacccaaggagctctcttgggcgtcagcatcatggataggagctgcagtggaggggatcacccgggtagagaggagcagcagcaggaccagcagatgccgccttgcgggggcaggtggggaggtgttaaagccaaacagttatggtctcgagcccaggtctggtctagagcgttggttgcgctccgcgagccgtagccacgcccctattgtctgaccacgctccaaacttgccggcctcacccaggagcccgggcctctactccatgaccacgcccttggtgacagagccacgccccatccttcgttc

SEQ ID NO: 451504 - DNA, 1004 bp, Homo Sapiens
tgggtctttcggggggacagcctggagtgggaggagctctcggtcccctcttttaggacgtccttgtgggtccccttgcggagtccatcccggatggcctgcaggcggtgtcgcttctcgctgagccagtggctgccctccagggcatcctggtgggacctccgccgtggcagcttaatgatccagaaggccacccggggatggagttctgtgtggaagctgtccgtggccttctggatgggtaccagggcctccttctcctccatcctgggtaccttgtcgatctggaggtggctggagagggtgttgttccccagctggtgctcctggttctcctctttgtggtagttcccagggaggccccggaagtccatgggggcagagaataagctgtctatgccccgaagcaggttacctttcaggaaaagtcggctgaagccttggagtaggctctggaggcctgtgagacccaaggagctctcttgggcgtcagcatcatggataggagctgcagcggaggggatcaccagggtagagaggagcagcagcaggaccagcagatgccgccttgcgggggcaggtggggaggcttctcccataccccgccccttcttctgggctccgcctttatgctagaccacagcccgggtcaccggactcccggattccggccgcccacgtactgttaaagccaaacagttatggtctcgagcccaggtctggtctagagcgttggttgcgctccgcgagccgtagccacgcccctattgtctgaccacgctccaaacttgccggcctcacccaggagcccgggcctctactccatgaccacgcccttggtgacacagccacgccccatccttcgttcaccacaccccttaagccagagccgtgagttcattccctggccacgcccacacagtcagaccacgcccacgtcagttgacctcagtcctggagaccaagtcctggaagtcctggcggtgttctctgattgcggccct

SEQ ID NO: 451505 - DNA, 854 bp, Homo Sapiens
gtgtttttgggtgtcttttgtgttttgaatggacccaggtaaatagacagatttattgtacgatcaagctggcatttaatgtcagtggaagaaagctctcttgaagaaggcaaatgaaactcctaaaaagtagctgtctccagggagtcagaagagtatggggggcttttgttattttacttgtacgttccttccctgtttggattattttgacagcaagcctgtgagtcccagcagccggaggcagcaagcagggttggacgaaatagtttgtgctgtttctctcaggcagggccgagaggcaggtatgggcatcatggtgggccctggagcctgctctgcctgcaggtctgttcttgggaggtcttggattctgctctgcagtaacaaacacctgagtgccccgacctgattggtactccttgatagctcttccttttatgaacttcacgcagtaataggtgccagcatcagcaagagagatttcacggatgcgggtggaaaagtctgtgttgccaggcttggtggtgtctccagtctcttttactctgggaaagttaccttgtttgaaattgtagattaatttccggtttggccctgttcccttgaaccacaagacaggtccatttggtaaggtatcgggtacgctgcaactcaagatgattgactccccagttgatacagtctgtgacatctccgtttgttgcacatggaacacatgtgtgactcctgccagttcaagcagcagatacagcagtaaggaaggcagaggtgggtggagtggggaggcagggatgggcattgtggtgaaacctggagcttgctctgcctgaatgcctgtcctggagatgccc

SEQ ID NO: 451506 - DNA, 1058 bp, Homo Sapiens
aggggatcacaggggggaacccatgccttcgtgttacaaggtggagaaatggaaaagaagaaagccttggagctttccaccaaggtgttcctggccacgttacctggggcagtacattgacgaggagatttggatttataaattttacatgaaaaaaacaattagctccaccagtgtgaggaaaaatagggtgaggaaaaagagacagcaaaaaatctttttactgaataatcttgctgtcttttggggtaggagtacccctcaattattttgggctggtatgctctttttccacagggttcatgctcacgagttttgatacttctctctcaaaggaacagagcctctagttcttcttctattttcttcaacgtttcctgggtacttcaagaagctctacctttatgtagagggcttgatcttcacagagctgggtcacaaatgcatactccttcattaccttgagcagctccttctcttggcatgcataggaagcttccagctgttgtaacttaacctttgtctcttctagggctccatctggactgctttgttcacaattggttatcttttgtgatttccttgtaagcttttgttgaagttctgttatactgtggaccaacgtcttattcttcctttcaagtctggctgtttcttcctccagctcctgcaaggctctttccctttccatcgtggtgcggttctccttctcccactcttcatcttccaccaggccccgcgtctgaatgatctcactttccagcctctgaatcttatcttccctctcttggattttgagaagaagtttctgatttgcttcatctattctctgcgtatccctttcaaggtccatgttcaaactgataatgtttctttttgactgagccaatcttgagatttccattttctccgacctgctttacaccttggtctctggatatggctttgcataatcatgactacttaatccagctgatctttcttgtgtccttccattgtagattccctcccctttttgatgtgtcttgtcttcctgatccttccctagtcaattagct

SEQ ID NO: 451507 - DNA, 1594 bp, Homo Sapiens
  misc_feature (827)..(851): n is a, c, g, or t
  misc_feature (880)..(935): n is a, c, g, or t
  misc_feature (1359)..(1359): n is a, c, g, or t
  misc_feature (1425)..(1425): n is a, c, g, or t
ctctccccggtgggggcctgaatgttttcagagaggtcgcttgggtccatcagagtctctgccgtcactacctccacactgccagtctgggatcgtagcatgcggcccacccacgaggagcgggccagctgcaggaggcaggacttctgcaagttctgcagctcggcctccatctcttggagcgtgcgggtggtctgcagcagccgctcctccaggtgctccttctcccactgggctcgctccttctgttccttcaactcctggatcagcttctggacctggttctgcaggagtttctcctgactgtgggagctcctcttgggcggaagccccgccacctcttccaggatgtggcagagccgggcgtcctcgccattctggatggcccaccgcaaggcctggatctccagttctcgctgtctccacagcagccgcagtgtgcgagggtccagggactcaagagccaacctgcagcggcagcagaccctgctgcttactcaggccggcccctggccacctggcccaggaggctcaccagtcctccctctcctccttactgcgggtcggcagagcagaccaccggtgtggggtggggcgtggtgtctggcaggcacgtgggagtctcgggggctgcaggtgcgcctgctggaggtcccaggtgaccactgaccgactcttgctctgtgggggacaggagagcctcttcctcggtttctttaacctcctggccagacttgggggccattctcaatgctcttctggagctgggaggggtggggggcccgtctgtcgcgtgcacctcgtgtcggccccgacgctgcgagtannnnnnnnnnnnnnnnnnnnnnnnnaaaagcgtcctttttctcgagggccgatnnnnnnnnnnnnnnnnnnnnnnnnnnnnnnnnnnnnnnnnnnnnnnnnnnnnnnnnagcctcggtttccccctaaccaacactgtcccgacttcgcccgcgggtcgcccctcctcggactcctacctaattcattcacctaaacgccctcccaccggaatgtccacctctttgaccctttggggcaggatttatccgaccctttgccccctccaagacgttctttcgggcggtgtgcggcgaattagccgcttattgtttgccgctataatcgccccgatcgcctcccatgcgcgcggcttacaccctcgcccgcacgtttttcgtctccttccaccccccgcacaatctccagacttatgtttcgccgcgacccacccggcgtacgctctcttcggccaccgcctttatatggacacgcctcgccccctataacgcccacccgaaacacgcgaccctctgacgctctgtccgacgcaanatgctacccgttctcgtgaccagcggcgcgtcacgtgttacaccctgtccgcgcggcctacgcccncagcgattattattttacgaccacgcccccgcccctccccctcggcgcggactaccttaagtgcacctcgcgctgttcgtctcactctcccgcgccggtgagctatcaccgattccgaccgccgatcactattatgtagtgataccgctgcccactttatctccccccc

SEQ ID NO: 451508 - DNA, 1325 bp, Homo Sapiens
tttcttcttttggtctattcagtagaaagtgaactatctgaagtagaacgatcatcagtggaaaccggtcacatcatgtatcgctcaattgtttcataaagaggcttactttgtgtacccccacatatatttttacgagggttattttgatcagcttgtgtagtcagtggccaaagtatttagctggtagcagaaaaaaggaaaagtattgttccatctgtgatcacagcctgggagacaaaaggtcgagtaacatctgcttcactccagaatccttgatacatagcttgtgctccagtccaagcaaaaaggcttgcaatagcattagctctaaaaacaacttctatctgatcagcacagttttgtctcaaaagcctttcccttcttaatttgtcaggtaacagatgaaactgggtgtgaccgtaacagcaaggatctgcagtttttgagccaacaaatatgtggttttcatactgccgtttgaataatggaagtttgtctggtttacattttatagtggggatttttataggagcagagtattccaatggcacaaactctgcgagttgcttggatattcgaatctggttttttggtttatcatctatctggtatcgcaagtcatcaattcgacctcttcgatgagcacgaggaataatttctttcaccagggcacgcagtaaaaatgaactgggcatctataatcgagggcggcagcgggccagggccgggttgtgtgggctgaggaggcccacgagggttgacaccagctgatccaggaagggcaaagatatgacctcgctctcctcgtaacggtgcacgcgccgcctgcgccgcaggtagaagtgctcctgcagcaggcagtcgcaggcgaccgcacgcagcgccgcgaggtccagcgcaggttcaggttcgggttcgggctcgggctcgggctccgctgggggcggcggcagacccgacaggaacacggtcttggtgaagtactggtaccagcggtcggcattcagcgcgaaggtctgcgggtaaaccatgtacttcataaactgcatcttggtgaggattcgcagcttctcgtctaccgactccgcagcgtgcaccgtcgcctgccagcgctcgatccgccgcagccgtgcagctttgctgtcggctgtcatggaggccacaatcggcgggtaccgcgcgacgggggtcgccgcgacgtcttggcaggtcgtttctgtagccgtggcggcggcattagccgcggtgtgcaatgaaagcctcggaccgcgtagcaaaggcctccaacacctggccgccgccatctttgcccgcgattccgg

SEQ ID NO: 451509 - DNA, 826 bp, Homo Sapiens
tcaagaaaatatttttaatatataacagctcatacccagccaccttgctgaatgatgtactctgccgaatagtcctccaggtatgtcacgccaaactgcagcagtgcgctcaaaggttcttgaccacgtcttgtcaattccaaaagcatttgtccgtagcaaaaccagaggcaccaaaatcttattccagccgctggcatgaactgtggtctccagtgtacattcccgaaatgcctgatatgtcactggctggctcaggagcatttgcaatgctttatggagaggctctttcagttcctgggacactttttctccaagatgggccaagcagtcttccattgagctttctggattggcagggctgaacactggagaagtgtgacggtcaaagcctgtgctggtgaaggcttcagaaatttctttggtccagagattttagctcttcttcaatttcagttttaacttttaataaaaatttcttgatccagagattgtgaagctatatctagttgaaccccttggggtggagggaagatgttgctcttgcagcttctcttgagagaggagtcccaagtagctgagaacaacatactttgtttcatagtgaaatcccagaggcacagtagaagaggacgccattgaattggctggtgaggctccaaaaaggtctacttatggatgtgtaaaacctggcctggcccctgccccagaagagatgaaagaggcggcggcggcagttgcttccgacagggtcccccagcggcggtgagtgctccgacccgcggccctaatctaccgccgccgccatgttggagggtgaggtcac

SEQ ID NO: 451510 - DNA, 1210 bp, Homo Sapiens
  misc_feature (891)..(891): n is a, c, g, or t
ggcctgggtggcgaattcggcacgaggggtagattagggccgcgggtcggagcactcaccgccgctgggggaccctgtcggaagcaactgccgccgccgcctctttcatctcttctggggcaggggccagggccaggttttacacatccataagtagacctttttggagcctcaccagccaattcaatggcgtcctcttctactgtgcctctgggatttcactatgaaacaaagtatgttgttctcagctacttgggactcctctctcaagagaagctgcaagagcaacatctttcctcaccccaaggggttcaactagatatagcttcacaatctctggatcaagaaattttattaaaagttaaaactgaaattgaagaagagctaaaatctctggacaaagaaatttctgaagattttggtgcctctggttttgctacgacaaatgcttttggaattgacaagacgtggtcaagaacctttgagcgcactgctgcagtttggcgtgacatacctggaggactattcggcagagtacatcattcagcaaggtggctggggcactgtgtttagtcttgagtcagaggaggaggaataccctggaatcactgcagaagatagcaatgacatttacatcctgcccagcgacaactctggacaagtcagtcccccagagtctccaactgtgaccacttcctggcagtctgagagcttacctgtgtcactgtcagctagccagagttggcacacagaaagcctgccagtgtcactaggccctgagtcctggcagcagattgcaatggatcctgaagaagtgaaaagcttagacagcaacggagctggagagaagagtgagaaccactcctctaattctgacattgtgcacgtggnagaaagaagaggtgccccgagggcatggaaaaaggctgctggggctttctggggtctttgcccgcgcggaagctgccagaaggaatttcctgaaacccccagctcccctgccttccacatattactgcccacctcccctgcttgggggaaaagggaaaccttgacccaagaagtggttccccggtttgaaaaaaacccgcccctggctaaacttccctggtttgcaaaaacttggaagaaaaaataagggtcaaaaacacacaacaaacctgaacccttaccgaaaacggcaagcacccgttttccccctcatttagcg

SEQ ID NO: 451511 - DNA, 1254 bp, Homo Sapiens
tcattggcaaccgcacgcacgttagctcactcggacagccgtgaaacaccaggtgctgttacaaaatcaatatccagcatctcagtaggaacaagtgagcatcctgacaaggacacacagcagtggttcgacttcctctcccattcaggatgaaccttgcctcacctctcaccctgctcatgtgttctgacttcaggttctctttgagagaggtaataggcaattaaacagacttggaaaaaatgggaaggcttcctgtctcctgtctcttctattggccagctggaggtccaaggtgcccagctagagtcatgggccccacactatggattcaactcttgatatttctacccaagttataaccattggctctatttttgcattgttgggtaaaggattcaaaacctttcagcactggttccaagaggaggccaaggtaatcagagaaaaaagtcaggcttgtcttgtaagctgcattcaggttccagagtcactgagagaaaaggaggtgaggagagggcaagaggcactagctagagactggttaccagggcagcttattcctaggatacagctttttacaaacggctgacatttgaatgcaggaatacagtctgtgtcagtttttcatagatcggcctcttccgtggtgcattgtggatggtaagtccttgggctgtcgatcggtgcagcccagggcccgacttccagtctcacaggctcttggcagagccctacctaatctggatctgtcctgaatacatggtgaggaccaccatgatggtgaatccagtcaggaggcccaggttctggatgataaatggaatcaagatgctgcccttccctttcatcctcttgacagacctcattcatctcagggaacatatcagccagagaaatatacaagaacattcctccagctagcgcaaaaatccagttggcagagaagtggctgccggccaggatgccaaaggccagacccaggtagcagcagcaggcagaaaggaagttgaagaagagagcttgattggatgctcatcccagcgttgagcaggatgacaaagtctcctagctcatgtgggaactcctcacagaggatggccaccgaggtgctgatgccttggaaaactgacacagtgaaggaagcaccgatggccaggccagtcgatgaaattattggagggccgtcgctcagagtgatcatccaggccagagtgccgatatcagagtagctgacacctttcagccagtagc

SEQ ID NO: 451512 - DNA, 600 bp, Homo Sapiens
  misc_feature (312)..(554): n is a, c, g, or t
aggataaacatattgtgtaatggatacctttaaaaatgcaaatcaatgcacaaaggaaacgcccatgttgaacaaaatggtgacaattgtgccttctcttcaacaccaccccaccctccagaagtttccttcaagccgtaccttcaggtgaaggtcagcgcacactggccacccgggaccacattttccagaatcctttggcggtcccgcgatgctctcgtggtcagcagctctcattgggttgcggaggagaaacttgtccgtgtcactggggcatcttaacagtcggctcctaagcttggttgtgtgcgnnnnnnnnnnnnnnnnnnnnnnnnnnnnnnnnnnnnnnnnnnnnnnnnnnnnnnnnnnnnnnnnnnnnnnnnnnnnnnnnnnnnnnnnnnnnnnnnnnnnnnnnnnnnnnnnnnnnnnnnnnnnnnnnnnnnnnnnnnnnnnnnnnnnnnnnnnnnnnnnnnnnnnnnnnnnnnnnnnnnnnnnnnnnnnnnnnnnnnnnnnnnnnnnnnnnnnnnnnnnnnnnnnnnnnnnnnnnnnnnnnngtgccgaattcaccacccagcctcgtacctagccgtaagtgttttt

SEQ ID NO: 451513 - DNA, 1298 bp, Homo Sapiens
cccattacgttctggtaagccggagtcatagttcgttcatccatgctgtcttggtgtgtgcaatcttgttgaccatcagtgctttggccagaaagttgggcatgtcgtgctattcccctgctggcttcataaggtgctgcaatgtaggacagaagtccggtcggtcgaatgtgccagtcccgtgttgaaggttcctgtaccagctgctgtgcattgtgagcaggtaccacgtgtgcagtttggggttggtggcataagtgacgtaatggcccctcagcccagaattcctgaatgggcacgagattgcatatagatgtatacataggcttaatacgagtatcttctctggtggtcatgcagtggctgtcttcttcactgtggtttgccaagctgaccattggctgtagccattgccacatgcttcatgctcataaaggaatccatgtggccaaagctacctcatggtcctgaggagtgaccaactctggttggctgccccccagcacatgccctcgactcaaggcgtcaggccagctcacatatctgcccagccccatgtgtctttgctggcagtccaagttctctttactagcttgacagtttagtttttgctgccaatctggggcagccggagcctccctttgctcctcctcctaagtccgtgggctgctattagggctgctgtttttgctggagggacagctggttccactttttcttgatgaagaaggagaacctttcgggctgctgatgatgttagcgctgagtgaggatgggcttttgctcaggagcacgtcctcttccccagccgaactctgcgcatccactttcttcacctcccttgccagaatcctgggctcagagagctcatccccctggggtgtgagtggtttatgctggcagagagccgggtctcttggtaccataaaagcacttgggtcaaaactttcccgaggaaatttgacaattttctgtgattttatccactgatcatttacaaattgaaatcgcttaaggtgaataatcaggatgggtggaagcctccagagatccagcttctttgttgctaagcagtgggtcttacacttggaacacgtagtacatctcatcttcccctagctcttcctcaccggtgaaagcacggagacagctgtccaggttgatgggctcgacttgcgctcgccgactctgctccacactctcatgctcatctacaacctgacttacatcaagctgtcaatggcaatcaagagtaatgagagcatggcacaaggtactgcagagggctctgctgcagc

SEQ ID NO: 451514 - DNA, 1097 bp, Homo Sapiens
  misc_feature (141)..(149): n is a, c, g, or t
gagacgggggggcggcggagatactaaagggggagtgaaagggtatgaaagggcggagaggagagggagtagcagggagtcccagaaggggaagaagaggggggggagaggaaaagggcgggattcccagagggcagaaannnnnnnnnaagacccagggcctccccccgggggccctacccggaaggcccaacttggaggcggtggttccagggaagcccgcaggggcccagggttgcggtggataggaatcaggggccttttcggccggggttggcctgagggcccccttcggcctgtaacagttcctcctgtagccggcagatctcccatcccagcacgggcgtcttctggcgacacagcgggcagcgcacccggcccaggtcggcactggaggccgagcccagcagccctgtgcaggcagccccacacacaggccgtggctacagttcagcagggccaggcggcgctctctgggcccgtagggctctgtgcagatcgggcactcctgcctcttccccctgccctgctgcctgctctctcccctcctccttccaggttggaagggcccaggcaccctccatggctttggcccccagcaggggctcactggctgtagtctcagcaccttgggggtgcccaaggtcatcccctttgcttgctggtgcttggcacagagggtccaggcactcagggcccagagaggacccaggtggactgacaggcccagagctggagtcggccaggtggagggtgggggccccagggcacagttcaggggtggtggccctggggcaggagtcaggataggaggacagggaccccagggcggcgacaggggcggccctcagggaaggcagggtctgggctccaccagagctctggcactgacctcccggctggctctcctcactggaagtggacttgactggggccccagcaaggcctgcctgctctgggtggatcctgggcccacgcggtgctgtccaccagccagatctggctggagcccagcctcagccatgtttagtcctgtgccagcgacccgccgacgacagatcaagactccaagacagcgatcccgggaattccggacc

SEQ ID NO: 451515 - DNA, 1220 bp, Homo Sapiens
  misc_feature (815)..(815): n is a, c, g, or t
atcaggccaaatcggccgagctcgaattcgtcgagagcgggtcatccctgggccacaggcagccacggacctcgcctttcccacttggttagagtcggctctgccgggagaaagcgattccagaattccctaagttaaaggaatttcttactccttcttgagcgccatccaagggccaggccttagtctaggaactggcaacaccgtggcgaccacgtcagacaagatcgctgccctcattgagttcccaggttggcaggggaaacaaaaatgtaataaataactgcactttgcaagaagagctatgaagaaaaaacagggtgatgggagagagaatgcttggatgttgaagggaggcctttctgagatggcgacatcttgagctgaataaagaaggatgagaaaggatggggcttgcaaagttctggcttcaaagaattccaggcagagggaacaagagtgaagtctccaggggaagccagcttagtgtttggagactagaaagaaggggtgtgcggctggaagatggtggaggtagaggacggaaactcaaaagatgattgaagattaaaaaacaagatgattgaggctggacttctcaaaaccttgctgcagcctgagcttgagcgtttgtgagctttgcagccagatatgaacagaagacagattcatttcctgctgcctgcttctccaaccccaaatctcccagtttgatccgagagccctgaagatttgccttcacccggcgccccccagatgcttctttttaagccttgcttgtaaataggtgtcagtaagggtctcaccatgcaagnatgtgggccgtgtggggtgctccccaataccccacaccggggtgtcaccatccccccggttggttccagggcatccccttgaggatggcttgccaggtttaaccacccaccccggggggccaaagggggggtggcaacagaagcagagggctcccccggtttgccccccaatccggacagtttcagaagggagagatatttttcctcaatgcccccgggatccggcccggcggtgtcccccatccctgttgcgccttcctttttcgtccctcataaaagtaccccagtggggcgcccctccgcgctgctcgaagctcaggtgggggtaagcgaccgtacacgtggcgagcagacctaacatatcgggcgcgtcgacccgcagctggataagcgtccttatctcac

SEQ ID NO: 451516 - DNA, 819 bp, Homo Sapiens
gttcttgtttgtaaattttggtgacaagagaggtccctttgatggaaactggatcttctggacttggcttttgagatattctgaacatcttctcccagcgccatcacctatcaactcctggggctggtggaggtctgccagactgtgggcctaggggcttgttcacaaggattcagtgatgtagtaggcagctcctagagcccccagagccacagccacagttccgagggcttggaggacacgcgttacgatgactggagggttttcttgaagattttctgtagaaggtgagcaggttggggagtcctctccctggcgccatctgccagtcccgaggcagaaggacatcgaagatgcggctatggcatagccccagacgacgccagcaagcggagctgcaggggcaagtggcacaggagcaggaatgcgggccggcgcgagtcagaggccctgctttcctggattgaggggctgccttcacgttagcatctggagataaaaggcagcaagaggagcggcggatttcgggtgctggaagggcttggaatgctggctgccgggaggtggtttcaaggctggaatgctgtggtgtggattcagggctaggctgctgtggtgtggattcaggactaggctgctgagaggtggaattggagctagcatgctgggaggtggagtctcggtggcgtctggcctctgaccttttcttcttgaccttcttcatggtagatcctcccaacctaaacgtggacctacatggagctgcgtaattctcccggctccctcctggaggggccgtttgcccatcccgggaattcc

SEQ ID NO: 451517 - DNA, 1154 bp, Homo Sapiens
  misc_feature (106)..(106): n is a, c, g, or t
cgcagggttcccatttcccttccaggtgggttcagggccaatttaccaagtttgcccccagttggttaggggtccaaccgggggggtccctccaatttttcccctnggtgcccgagagttcggacttggtccccccgccccgaaatttggccccggaaatttcccccggcgaaagggaactgattcggaggggggaccctggcgcaggtaattccggccagaaccggcagcaggtcgagggatcacccgcaggggtctggtgttccctgggataaagtgctttagcagggttctccagggtgccggtcggaagaacatgcgtttccagctggccgccatgggtgggccacgtggcacacggggccagcgatgcatgcagcagcggagcccagtagttctcactgtctatcagggttggcggtcacagccagtggtaggtcaggggacaggtggttcaggaccttctgctggtgttccgggagcatctgctttaggatagggtttttctggaagttcctgataatgtgctgaatgcagagctctgtgaggaggggcacgatggccagtgaccactcaggatcctcagcaatgatccggcgcatccgacgggatattggccctgggatgtgggttcctggactttgcagggactggtgtgattgaaggctttgagagctgtaggcttgtgcttgaagtgtgtcctccagtggaggaattgtcctgggtggagactgaggagtggctggggtccaacaatgctgatgtcgttacggtatcctgcatgctggaggctggcaaggtaggtgtgcgtggcccgtggatggccttatgacaagaagcttctcagactggcaggtccttgaaacaggtagggatctggggtgtagaggcgctggcttctccttggtaacccagggaaaccggcagtgcagtgggaggtagggagatgaggaagcttccgcacccgcgggagggattacagccctcgggtgatgggaacggacggcctttcggagaagcctagggccccagggcttgggaccgctctcctccacgccctacggatgccccactttccccctcttcttcccagtccctcccctcgcctcactcggatccccagccccgatcccgggaattccggaccggtccac

SEQ ID NO: 451518 - DNA, 556 bp, Homo Sapiens
gtatataactgacatttaatgacatttccagaactcacattcttggattgggtgtcttctcagaagcgacagggtttcttcggtcgtcatccagtttgcttgcacaaaccctattcaagggttgcatttgtcgggctggatccagagcggagcctgactgggtgctttggccatgatggatgggggttactctcttctctgtagcagaactcctggaagactgaaccatgccactgaatcaggaaaataattatgttagatgtccccagtaacataagtctcctcttccattatttcctttattatgatttttatcattctctggcacagatatcaggtgaaggacgaaattaaaaggcagccagaatctgcccctcatctttgtaggcgccgtgacttgattttgtcagttccaataggttctgggctcttttgccatccggcttttctttggagcaaggaggagcatgaaaaagagatcagaaagagggaggtgaaagaccatccccagggccttgaagctggcggaggcctgaataactcctcccttctcccc

SEQ ID NO: 451519 - DNA, 666 bp, Homo Sapiens
ttttttttcagacctgttcttcactcttacgtgcacactcctcaagggcagaggcatatctacatcaatgaatgaatgaatgctcatctcataaaacatactgtgagcttagagactatgctttttgctgaaggagatgtctgaaggtgagtggataggcagtccttggatacacctgtatctcacctgtaggccagttccatgaacagggttaggcacacagcatccattgtccttgctgtttcccagaagacaacttctattcctcagtcttagactttgagtttccacacttagaccctccttgttgcattgtatgttccctgggtctcctcccaccttggaggggttgagtgctgtgatgatccacacacagtgtgcattgttgtcatactgaatggggaaattgggggaggtgatgatgcccgaggggcctcgaaggtgggcatcacacatgcgggattctttggcttcagtgacgctttttggcttttctcctacgtttctgaccgaatttcttcttagctttcttcttctccactaactttttaaaagcagttgtcctaaatctcggcagactggcctgtgctcgccccaggccgcaaacatgtcgctcactttcatacaggtgatccgcttggacccttgcagatatagcaactcgtg

SEQ ID NO: 451520 - DNA, 923 bp, Homo Sapiens
  misc_feature (736)..(835): n is a, c, g, or t
gttgttagtttttctttctttcttgttgcaaggaggaagtgctttaatgcccctcaggtactcgactaaggccagggaggagagaagaattctgatgtgttacatattcttttcctgcaaagtcaaaaatgaaacaacgtctttttcttctgtaacatatctatccgataacttcttgaaggcatgttttcttctgtaacacagctatccattaacttcaaaaggccatcttttttaaaatctccttcccacatatgacacacagcacaaaatgtgatgaatttgtgttgtcacgaaatatcaaaaatgtcaatgaggagaacttgacaagtcccggggatctgaatgcccggagtcctaaactgtacctagagtcttgcagcgtcatagccagaagggacttgcgattcttgtgcccactccactctacggtcccgttccctctttcgtttttcagaggaagaaactagtgttcagaaaggtaggggaaggatctgaaactggagctaggctttttgatcttcaaactttttaggtgatttgctggatgagtctgctcctcctcttttgcaggcaggaaagctgtatagaatgacacactttgggtttcaggggatgttctctcgttctcttttagttaaacttattataaataactcgtaagcagaaggtgtggtggccatggatgatggacggtaaaaagaacttcccccaaggctgggcgcggtggctcatnnnnnnnnnnnnnnnnnnnnnnnnnnnnnnnnnnnnnnnnnnnnnnnnnnnnnnnnnnnnnnnnnnnnnnnnnnnnnnnnnnnnnnnnnnnnnnnnnnnngtgtagcccggtcgctaccctcactgcaccctgggaaatgtagtttcttatcagtaacgacaacgtctaggaaacgtttggccgtcag

SEQ ID NO: 451521 - DNA, 804 bp, Homo Sapiens
tcatgcgtggaatatgaaggtaacttcggtggctcatggaaactttttaatctccatagaacaatcaagcagttttggcaaaaaaatctgtcagcttttcttggaggtgtggttccatttcttgaccaaggtaggaacaccatcgatttctcatatcttctacagctagtatatccttttctttccatttcatccaccagtaataatggcaaaaatgggacaataaactcattcatgataatcaaaccattgtttacttctcgatcctctccagattcgaagagttctgcggcttgctcatttaattttagcaaacattctcttctataatgtgatatcaattcttcatcatgtcctctgtataagcctttagacaagagttctttgttattctgataagcacagatgaggaacagcaaggaatctatataactttctctttgaaaattttctagcccaattatgagatacatagttgtttccctgaatttcctataatcctgatgccactcctcatattcctccaagtttacttcttcaggttttatcatttccagtttggcttgagcaactttcattatgttgtgacacctttcatcaaaactcaaatttctatctccaaattgttctagtaatgttttctcaataattttctttggtgcctggttctggataaagtagaccactacatgatgtaaacgataatcggtttctggtggggtgtcttcttgggccaacttaaccaaccttgcatattccaacttaattgccttcgataatgattgtcacaggctacaggttgag

SEQ ID NO: 451522 - DNA, 1011 bp, Homo Sapiens
agcgggttgccatggctcctgaattccgacggggacgcgctgaggagcaggggtgaagggtgaaaagcgtcattcgaggtccgggtccggcttgcggggtcagcgaactggagaggcgccatgggctggatcacagaagatcttattagacggaatgctgaacacaacgactgtgtcattttttccctggaggaactctcgttgcatcagcaagaaatagaaagactagaacacattgataaatggtgccgggatttaaaaattctctatcttcaaaataatcttattgggaaaattgaaaatgttagcaaactcaagaaacttgaatatttgaatttagctttaaacaacattgaaaaaatagaaaacttggaaggatgtgaagagctggcaaaacttgacctgactgtgaatttcattggagagctgagcagcattaaaaacttgcagcacaatatccatctgaaggagctctttctcatggggaacccatgtgcttcctttgaccactatagggagttcgtggtagcaactcttccacaattaaagtggttggatggtaaagaaatagagccttcagaaaggattaaggcattgcaggactattcagtaattgaaccacaaatcagagagcaggaaaaagatcactgtcttaaacgagccaaactcaaggaagaggctcagaggaaacaccaagaagaggatcaaagatgaagacaagagaagtaacgcaggcttcgatggacgttggtacacagacatcaaatgctactctttcctctttagagagcaaagaccacctacaggcaccagacacagaggaacacaacacaaagaaattagacaacagtgaagatgacttggaattctggaataagccctgtttgtttactcctgaatcaagattggaaactcttagacacatggaaaaacaacggaagaaacaggaaacaattaagggattatcatacctgtcttacctaccccatgtactgttaagacaatcagatg

SEQ ID NO: 451523 - DNA, 654 bp, Homo Sapiens
atcaggccaaatcggccgagctcgaattcgtcgagagcgggagtgtgagcaagccctggtggcagcgccaggtccagtgcagcccctccccacagcatgctgggggctaattctgatgtcatctttctgcagaaaaccattagaccatccctccagactgccaccctcaaagccgtctgcccaggccccatctgacactcttgacatctgcaggtcccagaccctatgatgtgtccactctggaggctcctcatcttcctcgggttgctggccttgcccttggcaccacacaagcagccttggcctggcctggcccaagcccacagagacaacaaatccaccctggcaagaattattgctcagggcctcataaagcacaacgcagaaagccgaattcagaacatccactttggggacagactgaatgcctcagcacaagtggccccaggctggtgggctggctaatcagcggcaggaaacaccagcagcagcaagagagcagcatcaacatcaccaacattcagctggactgtggtgggatccagatatcattccataaggagtggttctcggcaaatatctcacttgaatttgaccttgaattgagaccgtccttcgataacaacatcgtaaagatgtgtgcacatatgagca

SEQ ID NO: 451524 - DNA, 850 bp, Homo Sapiens
gcgcggggttgccctcctgttctggtttatcagtggatccccaaagaaagcaaggggaccaaggccgggactgctgggatgaaggcacaggccatggaaaggaatgacatcatcaacttcaaggctttggagaaagagctgcaggctgcactcactgctgatgagaagtacaaacgggagaatgctgccaagttacgggcagtggaacagagggtggcttcctatgaggagttcaggggtattgtccttgcatcacatctgaagccactggagcggaaggataagatgggaggaaagagaactgtgccctggaactgtcacactattcagggaaggaccttccaggatgtggccactgaaatctccccggagaaagcccccctccagcccgagacgtctgctgacttctatcgtgattggcgacgacacttgccaagtgggccagagcgctaccaggctctactgcagcttgggggtccaaggctcggctgcctcttccagacagatgtgggatttggacttcttggggagctgctggtggcactggctgatcacgtggggccggctgaccgggcagcggtgctggggatcctatgcagcctggcgagcactgggcgcttcaccctgaacctaagcctgctgagccgggcagagagagagagctgcaagggcttgtttcagaagctgcaagccatgggcaaccccagatccgtgaaggaggggctcagctgggaggagcaggttcttggaggagcagtctggtgggctccaggaggaggagaggctcctgcaggagctgctggagctgtaccaggttgactgatgcggcaagctaccctcagaggtccca

SEQ ID NO: 451525 - DNA, 982 bp, Homo Sapiens
ctcctcgtgggtttgtggtcccggatctgtgccactgtccaactcatggttcgtatctctccctctcgaggtcccagtccatgtccctgtacccgcgcactgatcccgagtgagtcgcacaggctcctcatgcgcttgtccctttcttcgcagtcctccaggtgtgtctgtcatactgtaatgagacgcaaaaggagcgaagtgcaagggtacattccataaggcgatgaatgagtgcgtacacagctggcatggagatggacgagatagacttccgccacgtggcctggtttcttcaggcaccatgatgacagacggccagaatgtcaaagaaatcaagaagatgctgtttcccagactgtggaatcattggtagcatggttatcaacaccaagacgcctgttgtgaggacaacgacgtcagtgtccatcttgagacattttagtaaagaaggcaaaagaggtgcttgagagagcttatgcttccaagatggctgcagtcttatgacatgacccagtaacgagaggatggataaacgagtggcggctttgcccacatattcgttaatcctgtccaagaggtgcttgtcatgtggctcttgcaaggtggtcaggatgtgcaatgccggctgagagctggtttccaggtaataatccaccaaggtgtttacaagcatagggccacggtcagaattgaggttctctttaaagacagctgtcacgtcgtcccgcacacccagcatgggggagtccagcatggcaagaagctccccgacatttgcttgttgggccattctctcgctcgaaggcgctgtgctggctccaggacgtgtgctacaggttctgaaggttcttcattggggccactaccaaactgttctagcgacaactggtacttcagtttccagtgctgtcaacctggtgtctttcatggtcactcacagtccctccagcctacagggcgccgccatcttggacgtaca

SEQ ID NO: 451526 - DNA, 941 bp, Homo Sapiens
cacatacagtttttcacattaactgttttccttcaattgtctcaccacactgctgtatttaaaccgtccaactgcagcaaacaaagctgctgccaaaatggcaacaactcgactgggctttatcaagacatcatctcgatacagtgaacccaatgcaacctgcagtgcttctacatcaatgttctggtcaggaatctccagttcaataatattcatgctggattctttccaagaaccactgagcatactagaaaagtagccagattgacatagatatattttgtgtaagctccattcttctcctagagcacaaatcttaatgtcactgttttcaccattcaaaaataatgtttgataaatatatttagatgtactctttaattttttccttcgaggggtgttgaggagccgctgctgctcgtccccctcctcctcatcctcgtccgtctccgagtcagggtgacagtagcagaaggacccgctgctccgcttgcgcttgtggctgcccgcacagtaacagaatccgtggcccgccgcatcgtctccagtgtccggcctccgggccgagccccccgccctggcaccctgcgcctgctgggcaagggctggtcttggctggcgcagcacccggctgctcaacgatcccatgggtcacggctccccgagacttcagggagcccagagaagggggtctcccgccatggctcggccgccgccgccagccttccccgagcgcaggtgcctacaccgccaccttctcacgcgcagccccaaccgttgcagcggacgccacagtctccatcctcctccccgcccgcagcgtccggtcgcagccgcgctctagcaccgcagcacctcgccccctcgctttcgcaacaaagcgcgggacggagggcgcatgcgtacggcgagcctccggaaggggcggggcaaggcccgct

SEQ ID NO: 451527 - DNA, 879 bp, Homo Sapiens
ctctttgttaaaccttgctttgggggcttcacataaattcagaaagtatgatagcagtgtaggtggttagcagcacctcataaggtccttcctagcaagggatgctaatgactagccaatgctctaggaagacattgagaccagccaacttcttgccttgataactactgaagagacattgggtggctggattttgaaagcagacttctggttataggtgatgcaacttgaaaaacaatcctgaaacatgaaacaagaataataatatttaaatgtaacttaatcattatacctctttatccatcaaagtgaattcattccattccctttcatctgtgctcatactttgcatcagatattgggtaaaccaaagtgtgtaggaagaaataaatgttttcatagtcattactctttacaatgggagtgctaaaattcaagcacatctttttcagaagctttgttaaatcaagtggagtatcccagatagttttcaccttccttctgattccatgttgcttgactctgaatttcagagcacctcctgttattccaaatgtgcctttcctctgggcctggaatgccccaagtgaattttgtcttggaaaatttgatgagccactagatatgagcctcttctctttcataggaagcccccgaataaacgccaccgggcaaggtgttacaatattttatgttgatagacttggctactatccttacatagattcaatcacaggagtaactgtgaatggaggaatcccccagcaagatctccttacaagacccatctggacaaacgctaccgacacgactttaccattgcttatgccagttagcacaaattcgccaaacgggctgccactcgacatgggcaccaaa

SEQ ID NO: 451528 - DNA, 1111 bp, Homo Sapiens
  misc_feature (127)..(127): n is a, c, g, or t
  misc_feature (130)..(130): n is a, c, g, or t
ccccctgggcacaaattttttctttgggtttggagaggaaaacgtgtccagcctgggaaaaaacaggcttgtgttaatgtcccggggtaaaaattctccatccccccttttttcctgttgttccctnttnttccaccaaaattctggttagagaaaaatgtttccttgaaggtgctctaattccaccttttagagtcttttattccttctccacttcagaggattaaggatagatttcaccttatttccactttcttgggaaagcatctccagagcttctagatgtgaaaggccttgaaattcatcaaagagtagcccataatgagttttcttgtctgtttccacggtaacctcattggaggtccgtatctcttctttctccttcgcctctcgtaaaacctgagatagtgtagcatttcggttcatcagacccttggttcttttaaatccaggatccccttctgctatcacatccattgtctttttttccaatgaattctaaggcatccaaacccccacttataacactctttcctgtgctctgaacagcagtagagatggtagagaatacaccaaatgccccagccactggggaggagttttcattctctttggcatttgtctctcctgctacatacttgacttcagttgaaatttcactgggactagggattccaagggaagtctctgccttctcgatgacatttgaaatgccttgtcctactgtagctactgtagccgaggctgaggagagtatggacttgccccagctcccccaataaccccatctggtctggggtacatctttggaaacattatcctgaatagggagaacttttgaagtctcaaggtcactggaaggtttggtctctggtcttttccgagtggaaactacaggttctgatttactctctggtttggcaccttggtcaacagactcagaattcttggctggctcacagtttccatcttcaaggatgggggctgcttcagttagcagtggagtctcaatatcatctttatctgacatgattagaacatcagctatccggccgccaccctcagcacagccacggcagccgactcggcgttcctacatcccgggaattcc

SEQ ID NO: 451529 - DNA, 810 bp, Homo Sapiens
ttcaaggagtagccccctaaaggggtttcctggtccggttcccacggtaacctctcattggaggtccggaatctcttcttttctccttcgcctcctggaaaaacctgagaatagtgtaggcatttcggtttcatcaggaccctggttctttttaaattccaggatcccccttctgcttatcacatcccattgtcttttttcccaatgaatttttaagggcatccaaaccccccacttataacactctttccctgtgctctgaacagcagtagagatggtagagaatacaccaaatgccccagccactggggaggagttttcattctctttggcatttgtctctcctgctacatacttgacttcagttgaaatttcactgggactagggattccaagggaagtctctgccttctcgatgacatttgaaatgccttgtcctactgtagctactgtagccgaggctgaggagagtatggacttgccccagctcccccaataaccccatctggtctggggtacatctttggaaacattatcctgaatagggagaacttttgaagtctcaaggtcactggaaggtttggtctctggtcttttccgagtggaaactacaggttctgatttactctctggtttggcaccttggtcaacagactcagaattcttggctggctcacagtttccatcttcaaggatgggggctgcttcagttagcagtggagtctcaatatcatctttatctgacatgattagaacatcagcaaaatgaagagcagtacagcttagtagctaagagcacgggctctggcc

SEQ ID NO: 451530 - DNA, 803 bp, Homo Sapiens
ggtcagctcctggtagatctccttgcagcttggatttcctctggcaacttcacccactgccgccttcagctccgtcagctcctggtagatctcctgcagcttggatttctctggccactcacccactgcagccttcagccgggtcagctcctggtagatctcctgcagcttggatttctctggcaactcacccactgcagccttcagccgggtcagctcctggtagatctcctgcagcttggatttctctggcaactcacccactgcagccttcagccgggtcagctcctggtagatctcctgcagcttggatttctctggcaactcacccactgcagccttcagctgggtcagctcctggtagatctcctgcagcttggatttctctgagagctcacccactgcagctttaagctgggtcaggttctggtagattgcgtcttgctcggattgttcctgacttagggagctggggaccttggacacttggacaaggatggccaccaggaccccagccaagagcatgaaggagaggagttgcagcaccagggcgccatggccaagacaccctgtagagctcttgtggccatgtatctgcctggaattgaaagtctcttggaaaaagtctgatgccactggttgttggatcttcttccaggaggcccagctgctgcacccttggttccttggagtcactcatgttttcccgctgtccccagatgttcaggactcctggggaccacagcttttattttccaccctctgatcctcactttctaaatctactgtctctcaggaagaca

SEQ ID NO: 451531 - DNA, 694 bp, Homo Sapiens
gttgattaagaccttgtcagcaaagaactggaggtgtcaggttttgtgttgtcaatgtcctgcatagatcaccatctggttcaatgctcaattaaccaggttgatccagtggtggaatcaactgtatgtcttgacctgggtgaaaaagttgaatctctggcttagggcttggctttcatttggaacgcccactggctgtgggagagcaacagcatccaagtgctctcacaactctgactttattgaactttttaaattttcgacctccaaggaccatgccagcctgacagcactttctaaggcgacatgccgggcagttttttctgcggattttatcaacgatgcagtcatttcttccagcacataagtagttgtgctgcccttccattgccctcttaaagaagaccttacagctcccacaggtaaggacaccataatgacagcctgatgcttcatccccacagattaaacaaatcttctgaggtaatgactcgaagctgtattgtgggctctggctggcttctgaatccggcctcaggtagttgagatagggcgggtagacctgcggcaggccctccttgagcacggcggcctggtagccgagctgcgggagcccgttgaggccgagtgcagggtagagcgcggggaaccgccccggcggcggcggcagaggcggaggtggagggcagcattt

SEQ ID NO: 451532 - DNA, 847 bp, Homo Sapiens
ttcccgggttagttatcacctgagagtcaatgggcaacgatcaaatttcaccttgagcagattcttttgtttgcttgtttagtcacaaatagcttggccctaagtggtggctcccattcttgtaagatgcgtttattcatcgtgtaatcaccagttccctgtagtgggggcgtggatggagtgtcagaggctcctgctggtctttagggtgtctggcctccaggaatcctagaggtagtatttggagagatttttaaaagctttgtttctgtgaccagcaaaacctggatttgacactgaggtcagcccgtttcagccagtgacgtaacctgtctttttgccccagtaaattgggaactacagcactcgatgttagagttgtcgtgaagattaaagaaggtgacgactggacaactcccagcccaatacctgaaactgtaccagcacccagtgagcactgctattcctgtgacttgctgcacatttgccttatctcagcagtatgcctgtgtcacttttttggcactcttttctcatgggtacattcagagaagaggaatgtttgttcactggtgaagagaacatcccgtgtactatcgtgtagaagttgtagtagacgctgtggtctttccaacaacaaacaaaggctgagagctccaaggaggctgtgaatcacacctccgactccccccgggtacaggaacggggttcagaatgctctttccaaagctgcctgggacagggcccaggaggttccggaggatcaggaggtccacctgggacaagagctgatcggctagtaggaaagctggaaaaagcaacagacaacctacttagtccttcctgg

SEQ ID NO: 451533 - DNA, 776 bp, Homo Sapiens
gtttatgatgtaaagaatagtcttactgtttaagtccttttggctaaatttctcatggataaattcacctgttgttgtgttctccagatgtccatgtttttgggccttgtagaattttaaagatgatctgatcgtcctcagtgtcagggtctgatgccttcaacacgcgggaagtgatgtaaatcccgtagcagccatttttcaggagccccacttgagaaggggaatgcaagagtgtgatacgaggagctgttttgtccaattggtctacctgaatggtgaataaaacaggttcttcccacactctcccattcacaataaagccttggtttgtcccgtctgtagccatgaaagtaaagcagtcagtctgggagtcccctcctgagtgccgataggccacattcttgctgtccacatcctgctgggtgaaattgtgttgaagtagccctgtcccccacaggtagagctggccatgctgggggagctgaaccaagaggaaggtgaggttctccgcaggtgtatcagggtcggtcagctgaaggaggtcaggggaaagcaggcccacggccccttgggccagtctcaaccccttgttcctggttaccacaggcagggctctgtccacagtctccagtgtgatctcaaacaccccgtgctcggtccgcagtccattgctgatgatgaatctggtaaagagaggcaaggcagccttcagcatggattcttgtgtcaccatccaaatgcaagcttgagtgagtgcagggactccatcagag

SEQ ID NO: 451534 - DNA, 740 bp, Homo Sapiens
gatgtcaccttcctctaccacccctgtgcccatcccaggctgagcgagtgggctggggaccaaggcagcccgcagcctccgcctcttggcaccactagaagagggctgcctgggcccttgagatgtcacctctgtgccaggggctcgccagctccgcagagcaaaggccagagccagggcctgcacacaccctcttcggcacagcctccctctaccgggagttggctcggagggagcaggccctgaaaggctttcacagtagatccatgccttcttcttcctctgcttcctcctccgcctcctcatcagccagtgggcagcccaggctggctctacccaggccatctccagcgccagcccccatgcagtcagcaccaggggccgatcctgcgtgaggctgaagtcaggggtgagggaagggttagccatacaagcataggccaggagggcaagctggagcttcagccagggatgggcacaggggtggtagaggaaggtgacatcctcagcctgccctgggctcactcgtgtgtaggtcactcttggtgacacctgcggaggcagaggccacaggctctcgggacaatgggctcccgcctcctccgccggtccagccatcacctcgctgggacccaggagcctcgcgagggctgccaggagaagcagttggggcgaaggcggaggaggcgccattccaagcggccccgggcccggcccgccgcccagccgctccgccagcg

SEQ ID NO: 451535 - DNA, 844 bp, Homo Sapiens
ggtgtcatcttctttacacttaggtcaattttcggttattttctcttcttcaagggcagttatgtctggaatagtagtgaagctttcttcaggagcaggagggatttcagcctcaggaataatggaatcagtgacctggacagcctcatcagcagggacattggatttgatggaggaattataattgctcatatcagcttcatcctttttacgtggaaaggcaggagcgtcagcaacaccagcactgctgtcctttagtgtgccagagacttcagaggttattgagatctctgcatctcctgtgtcaatggtagctaagaggatatcttcttttgctatgtcagtggaaaaatctattaaagaaacagtagtaactggtgatgaaatattcccaattttcactggcatgaaatgttcggtaatagagtctcttgttatggagtttgtagtgccagtcagagaggtaatttctttctgtaggtgagttgttgacttaataaagtcggtccccatatcatcttctgatttgagtttttcctttttagctgtcagtttgttgtctgtagttgttgaaaaatcgctttctagcatatattcatttactgaagtgacgtggtctccttctgaagtaatagttgtttctgatttgggaatagcattgtcagccccaaagaaaatggttgctgcagttggtgttttactgctttctgttggaggatgagaataaattttgggcaaaccatcttcagccatggggcgaagtggcactgtgcactctcacaggtcttgcttctggactcagtggtatctctaggcaggagagcagtgttcatcagactccgct

SEQ ID NO: 451536 - DNA, 831 bp, Homo Sapiens
ggaattctcgggatggaaatgaggatcctctgagagaccagggacagagggagacccaaagatctggtctgtagctaagtgaattttctaaaactcattgattcacacgccatcccttgaggtggctggtgtcccgcgatggccacaggcgccctcctgccgtgctcgcgcccgtgcccgatgtcccggctggacttcctcaaggcctcgcacttctcgctggggcctgacctgcggctgcacgagggcaccatgcgcaccacgtcgcaccgggactttgcctacccggctgccacccgggagccgccgagcctgcagccgccgcccgcgctgcttttcccaatggacccgcgctgggaccgggaagagcgcgtgtcggaggcgcaccgcgcgttcccgccgccatccacgccgccgtgggagctgctgcaagcgcaggcgcgggaacgcacgctcgccatgcaggccggcaacctgcacctgcacgaggacgcgcacgccgggatcggcctctccaacgcgcacgccgcctacggctggcccgagctgccggcgcgcacccgagagcggatccgcggcgcgcgcctcatcttcgaccgcgactccctgcctcctggcgaccgcgacaagttgcgcatcccgcccaccacgcaccaggcgctctttccaccccacgacgcgcgcccgcagcctcgcgcgcccagttgccacctcgggggccccaacaccctcaagtgggactacacgagacaagatgggaacttcctaccaaagacagttccaggccctgccagtgccacctgccttgaggtgtaagagggcctcctccga

SEQ ID NO: 451537 - DNA, 1086 bp, Homo Sapiens
aggattgccaaattcttgctctgcgtcaccagagtagtttactccggtggaccctaccagaacttaatagtgtcaggtcgtgtccgtaaataaaatagatcatgccttgaatgtggctacttcgcccgaactcccccaagtcttcccgcatcttcagttcctccccctccaacctggtgttcatcaggagaggggaaagagcatttcttgcctggcaggaactcaagacctagaagaaagagggcctaccctgccaaggaaatgaccttccccttcctcgcctctgctcctcttcccgtttcctgtcttgtccttcttttctcctggtgtttccttctcccgttaactatggggacagacgcagctattcacaagtccgtctgggcagcacactccgaggtaaggcacgaaggtcaaggagacaggttcccgtgccccgaatcctggagaagatgagttaaagctcttcgcttcgattgccttcgcccttcccgcgtctcgggagcaattcagtgtcgcctcacgtctggccttgcagaagtccggagttccggctctgaactggagctccccgccattcccgggccctccggtttctccctcaggccatctgaggaattgaggtaggatttcgcgggtgttaggagcaaactcccaccacaactcggtcccgggctccctctccgttgagccttgacctctgcccaaaaaacaaggaatcgtgggcgtgaaggcggccttgaacccgggcggcggggctcggcgggactcgtcagcgcccatgctgcggcacccgggccgctcaggtaagtaggaggcgtgtgcgggcgggccgagcgggccccaatccgtacgcgaggcaggaaccgcccgccgcgcccccgagagctctcggcgccgcgcagtcgccgctgggcaccccgagaccatggggaagctcgtggcgctggtcctgctgggggtcggcctgtccttagtcggggagatgtttctggcgtttaggtgagtggcatcttgacagggcgtcttcgactctctttctctcctcttccaagtgaggtcaggggctgcctggcgcccccttcc

SEQ ID NO: 451538 - DNA, 965 bp, Homo Sapiens
atctccttacaatttttacaggctgacaaatattacttagaaaatatcgcataatatgaccaaaattttttactaacagttcaagccataaggctatataaattaatattacttcaagtattggcccaattgagtcaacataatacattaaaagtcacgaatgtcttgtttcttattcactgtctatgacggtaatatctctaattcagactctgaaattagtccacactaaattaaaaacaggaattagaaaatcagttctaaattcacttctgcctcttaaactatgagatcttgaccaagtcatagaacataaaatccaagtttcctcatctgtaaaatggaaggacactatcgtatctgctctggttattccacaaggctgatataaagaagaaatcaaataacctatgtgaaaagtccctctgcccatttaagaatacaagtcatacagaagacatgattacagctttctggaaaaccaacttccttttctaatagacaattaagacatattgggcatctgtcagcctcactgtacaacagaccagtggaaatagtattatctccgttttcttcaccttccatgtcttcatacttcttatctcccatatttagggtacatacagttttcttcttcatttctctttggaaaagggtttcctcagaccgaggtcgaggcgctcggtccggccgcggccccacagtaggttcccaggtcccagtcactccgctgccaagttccccaacatggactccttcgtccgctttgtggtgttacagggtctctaggacactgactccgctggctcggtccggaggcggcggcgaagcagggagcgacccaggttgcgctgctccgcgcggcttaagccaccgctactccccgctctcgacgattcgagctcgccatttggcctgatccataacttcgataatgtataaaactacgagttatcgcccca

SEQ ID NO: 451539 - DNA, 670 bp, Homo Sapiens
tcccgcagctcctgcaggcagcactccagcaggtctatgtcctcgggctcggggctgcagttgctcttggcaggccttccaggtcccagcgcatgatcggtgttggaagccattgtcgaaggaggagccgttccacctctgcctcttgatgaactgggcttcatggatgcgggggcttcctggtgaccggctcgaagccggcctccgtctcccaggccacagccacaccccgcacagtctgcacgtgcgtgtagaaggcacacacactctgcggagcagcattgtcctcatcgcacatgcaggagcagcacgactggtactgggagtaggactggtactcggaggactctgaggatggggagctgctccagtcccgcatcccccggtccctggcagcgaagtagaggccctcctcccggggaatggcaggccccggccgtggggacgacccttctctctgtatagtccctggccagaacacttccacactctcctcagtggactcagggctggtcaagctgagggtggtcccatcggtgggtgactgttctcccctgtgatctgtgaagtagcatttcatgatttgaaatgagtgcccagggtgtcggtgctccagctgttcagtgagagttggctggggctgtactgaaggcctccagctggccccagc

SEQ ID NO: 451540 - DNA, 752 bp, Homo Sapiens
gttctagtacccatttcggcatagagaatcaccactggtaagttctctttgtttgtaggaaatttgtgatctcctttaaatagataaggtctagtccttgaagcagctttcttcagcagctttttaatctcattaattttacaggtgtgcttcttatgaataaccacaaatgcattacaaccatctggtggtggctcatcagctgcaatctgctgaaacatctgaatagctggggagtatgcccttatagagaaagcaaactttaaaaggttgatgtgtaaattgtctagaaactgtccagctttcttcaggattaagttgtaataagaataatctgattctgtttgcttataaattgctaattcttgcacagtttccaaaaactgccaaaatttttcattactttcttctgccataaattcacttgcctccagcagcagcggggtctcgggccacttcgcggccaagtgggcagtcaccgacttggacgcggcgaccgtcccggagccgagctgcgaaagccacagcgctgtggagcctagtagcagccgcaccacgttcgtggctttcgctggcgccatggcacggagagaaaagcgcgagtccctcggacccggtacccacagtctgtggccgccacgcttcggccggctcttcccgctgcgcggctgcccacttccggtgggaggagctccgagtccgttactgggtgccgggtccagaccggcgcatgcgtgtcccgctccggcgcg

SEQ ID NO: 451541 - DNA, 868 bp, Homo Sapiens
ggggtaaaaaaagggaagggcctgttagggcaacgcaaggatggcccccatgagagacgcggggaactattcccccctgccgtttttgtcccaggggaattgttaaagccggtttttttaaaaaagataaccccatggggggttataggcaatcccgcggtgcaaatacgcctgccaatgacccttttggggagcaacctgaaggttgttttgtttattatgcatcatgatcattgttttatttccccgccttttttcaattcctggcaaaattgaggaactaaaatctgggaaaactacagagtcgcttggaggttaagccagagggtccttgcccttggtacaccccctgaaaacaaaacctgacaaaactcaatgtgcattaattagtgcagaaacaaagacagattcagcaagtgcaaaggtgactacaattttcccttgtccttgggaagccagctccctggtcgccagtggcagggtggtacaggctgcttgcctgacctgccagctttgggcgccacaggccactgggcaaggccagctcctctagctggaatctcggttcttctggttccgcatcagggggctgtggtggcgcaggccctccatgctgtgccgccagtgccagcagctccggcagaagtatttgaagcagacctgatctcgacagaagaaaggaccaggctgagaactgcagatatgacacagagaatcttctaggtaggggtcatctgaaccttctttgtgaacttggtggttttgatctccacaaagcagcgctgactgctttcaggtaactccgttggttattgaaagtcacacgaccagaaccatgggatacttgtgcttatctgtgtcaatcccg

SEQ ID NO: 451542 - DNA, 723 bp, Homo Sapiens
  misc_feature (278)..(278): n is a, c, g, or t
ggatgagccttgaggcttggccctgtcttttcgccaccgccggcgaccgtggctccttgagcccctctttggcattctttcgagtccggggccatagcggcctcgtcgggctccgttccccccgcccagctccatcaattccccgcggtcctcccgcgggggcccattccagccgcgaggccctgcccggagggccagtcctcgctacacactactgtcgggcccccctattacccgatcccgagcttgctcttctctgggtccagctccctaaccanttctggtctccctccgctgccgtgctccgccccctaccgccagaatttaagatctggctccgccccctaccgcgcattaaagggctcgcggccaaccaaaaggcaaccccgggggtggcgaaaagcgtccttcgggcaggactaagtgcggagccccgcggggagcaccccagcagggaagtcccgatcttcccacgtgctgggaagcctcccatgtgctggctcagtctcgccatcccactcaccttcccagggagggatgccctagcacgcggcccggcccgccttttgaagggggaaagtggggcgcctctgagcctctgcctggggtgggggcgggccaggtcctctgccaactcaaagacgaggcggggcgccagcgctggaggcgtggctgtgcctgagagccgttggaggagggagccccgctttccctctcctgtct

SEQ ID NO: 451543 - DNA, 963 bp, Homo Sapiens
gcgtcgcggcagcgggaagtcacgcacgcgcaacccaggccacaggagtaaaatctctgctgccggtcttctgggaagggagaatggcggcgcccgggctgcggctgggagcgggaagactctttgaaatgcctgcggtgctagagcgactgagccgctataatagcacgtcccaagcttttgctgaggtgctgcggctgccgaagcagcagctgaggaagctgctgtacccgctgcaggaagtagagcggttcctcgccccctacgggaggcaagaccttcacctgcgtatctttgacccaagcccggaggacatagccagggcggacaacatcttcacggccactgaacggaaccgcatcgactacgtcagctccgccgtccgtatcgaccacgccccggaccttccgcggccagaggtgtgttttataggcagaagcaatgttggaaaatcatctctaatcaaggctttattttcactggcccctgaggttgaagtcagagtctccaaaaaaccaggacacacaaagaaaatgaattttttcaaagttggaaaacattttacagtggtggacatgccaggttatggctttagagcacctgaagattttgttgacatggtagagacctatctaaaagaacgaaggaacttgaagagaacatttttattagtggatagcgttgttggaattcaaaaaacagacaatattgccatagaaatgtgtgaagaatttgcattaccttatgtgattgtattaacaaaaattgacaaatcttccaagggacatcttttaaaacaagtgcttcagatccagaaatttgttaacatgaaaactcaaggatgttttcctcagttgtttcctgtaagtgctgtgaccttttctggaatccacctgttgagatgctttatagccagtgtaacaggaagtcttgactaatggttcccggtttagctgaagattc

SEQ ID NO: 451544 - DNA, 1427 bp, Homo Sapiens
  misc_feature (1206)..(1266): n is a, c, g, or t
atacccgggatcttcctgtcactaggactacagtttgtagtctctctcagggagagagactacaaactgtaattaaaaaaatcagaggtggaggtcagggggttaggtccagaagaaaacctctctggagcccaccctgcatctctacgtcttggaagagtctggagtccaggcaccctacagcaccccccacagcaatcatccgtgctcccacccccaccccggcctctgggaggctctgaggcaacagtgggggcctgtggggtggggtgggattgagagaccagctgcagagacatctttgtgacccaggagcaccactggtccctcatctgccaccgaggccaaggaagacccagagacctgcctcaccagtgctgccgttgtgctgaaagacaaccatgaatgctgattttctgctgccgtattatacggcccagagtggctccagcatgagcatgttcaacaccaccatggggaaactgcagcgacaactgtacaagggggagtacgatatattcaagtatgcaccgatatttgagagcgactttatccagatcaccaaaaggggagaagtgattgatgtgcacaaccgtgtccgtatggtgaccatgggcattgcacgtaccagccccatcctcccactcccagatgtcatgctactggcacgaccggcaccggctgccgaagagtatgctggacatggccaggccaccaagagaaaaaaacgcaaggcagcaaagaacttagagctcaccaggcttctgcccctgaggtttgtacggatctctgttcaagaccatgagaaacaacagctgcgcctgaagttcgccactggcagatcttgctatctgcaattgtgtcccgctcttgacacacgggatgacctctttgcctattgggaaaaactaatttacctcttgcggccacccatgggagagtaacagcagtacctgtggcattccagctgaagacatgatgtggatgcctgtgtttcaggaagacaggaggagcctgggagccgtgaaccttcaaggaaagggggatcaggaccaggtcagcatccaaagcctccacatggtctctgaggtgtgtggggccacctctgctgcttatgctggaggggagggactccaaaatgactttaacaaacccactaatgtgctcaatgcatccatccccaaaacatctacagaacttgctgannnnnnnnnnnnnnnnnnnnnnnnnnnnnnnnnnnnnnnnnnnnnnnnnnnnnnnnnnnnnacaggcaccgtagcaggtgccttgagtgtggcagcagccaattctgcccctggacaggtgagcgcagccatagctggggcggcaccatcggtgcaggaggaaacaaaggcaacatggcccttgcaggcactgccagcatggctccaaacagcacgaaggtg

SEQ ID NO: 451545 - DNA, 818 bp, Homo Sapiens
aatccccttttcttttttaaaatgcaggccgtattcttctctatacaaggaaggccagcagcctccctgtgaccctctccttttgaaggagccagagcatactggctgtttttgaaaatttttgaagtccaggtgttgctcgactcactattttactcagtatattcacctgactaccaccagatgttttcatactcttccacaaagatccaaaactgtactcgaagagtgcttcagaaaagactgcaggaaatcagaaaacatactcatggatgcagcttctccaggatcatcctcacgtaacataacagcactgatagttacatcttctgttatactgtggggctctgtgtttgtgaacagcccggaacgctgtgatgaaaatgcagctgcccagttactgtcatccagattagtaaccatggagagatttccaaagaaccctgaagactgcgtaagtcggggcgacttccctcctgttccaagaatgcaggaaatatctggctgccttagtaagcttcggcttgttggggtaaaaggctgtcgaaatgagctaggagttcgagggataacctggtttcttggtgtagtattaccaaaattttcatcttgagatgcctgaagtaaaactcttttctgagcactctgtttccgtgcagtccgtgtcacctctcgcctcccggattacaggggatgatatctctccaaagccactcctgtccatggctaaagccttttccacacacaaccaaagttggctgcagtttagctaccgcgttttagccttcccgctctccggaagcaagcccttcgacccc

SEQ ID NO: 451546 - DNA, 1435 bp, Homo Sapiens
  misc_feature (1169)..(1169): n is a, c, g, or t
  misc_feature (1282)..(1326): n is a, c, g, or t
  misc_feature (1363)..(1378): n is a, c, g, or t
agcggagtgttcggctggggcaggcacgctgtggctggctacttcccttcctcccatcccccttgggccaaacgggatcggtgcttctggtgagacgcctccccatgcacatcactcccaggtgccctagggggcacatttcccacaactcccagagggcaggtttctagaaagtgccaccagtggggaggcgccacaacttcactgccattttgtgaggtgccgccgtctctcctccagcaaggaaacaatgaccgataaaacagagaaggtggctgtagatcctgaaactgtgtttaaacgtcccagggaatgtgacagtccttcgtatcagaaaaggcagaggatggccctgttggcaaggaaacaaggagcaggagacagccttattgcaggctctgccatgtccaaagcaaagaagcttatgacaggacatgctattccacccagccaattggattctcagattgatgacttcactggtttcagcaaagataggatgatgcagaaacctggtagcaatgcacctgtgggaggaaacgttaccagcagtttctctggagatgacctagaatgcagagaaacagcctcctctcccaaaagccaacgagaaattaatgctgatataaaacgtaaattagtgaaggaactccgatgcgttggacaaaaatatgaaaaaatcttcgaaatgcttgaaggagtgcaaggacctactgcagtcaggaagcgattttttgaatccatcatcaaggaagcagcaagatgtatgagacgagactttgttaagcaccttaagaagaaactgaaacgtatgatttgagaatacttgtccctggaggattatcacaccccaaatgcataatctcgttaatgattgaggagagaaaaggatcagattgctgttttctacaatggagcaggatattgctgaaatccccctggcatatgttaacggaatcacataacccttccagagggctaacaaaatttctggttagcaaaaggatgtcccttttttcccccaaagcccagcacccgctccgccgcgctacgagcgccctcggaccagcccccagtgtgtcaacgcgaaaccgcatcgccgcgttgatcgaccccctgaaaaacggcgcctacggccacccagaaagcccggcctccgcgccgccctncgggcgcccgctgaagggcgtcgttatcgcccgtttgtccctaggtgtgtgggcgccccgccccatcaacgcctgtggagaccatcctgtaaagcactctacattggcgccannnnnnnnnnnnnnnnnnnnnnnnnnnnnnnnnnnnnnnnnnnnnttctcgttcccccttcacgcccgctttccggtcacgnnnnnnnnnnnnnnnntaatccacacttccgcgcgggctcggcgtcgggttgactcacccctctcggccggtt

SEQ ID NO: 451547 - DNA, 882 bp, Homo Sapiens
  misc_feature (69)..(101): n is a, c, g, or t
gaaaaaacaaatagaagaaaatgagggtacagtaacctgtgtctttatataactcgcaagcaaactaannnnnnnnnnnnnnnnnnnnnnnnnnnnnnnnnatggttgattaaggaaaatacttttctcctttgaagttttacagctttttgtaaatgcgtcctgataatgattaggaaaatcgaccttttcatccatgatgaccatcctcatagctcagatttcctttcaaagtagtggctttctggatggtaattccatcttaaggtgtcagaactattttcaaatgctgcctttgacagttcttggaattttctgatattaagcagttccatgcaaatattcgtgttttataaatagctctcatagtctgctccatcttgatagttaagtgatttctgaagcgtttgtgtgtgtgttgatcaggttgtgtgatatttttgcttgataaagaatcaaatttgaaacaattaaccagccagtagattgtctgtcagtgaccttctgtagtaataaagtttttgccactgtaaataaaaacagtatccgtagctatcaggatcattgcgcactcatatatgctaagccttctgttctctaatagaagcctttcttttccattgtttctggatatttgtattatccaaatgtgcttatttctttgccttaagcacactttttatgggagtacttggttatactaaggtttggattttgaaactgggtgccttgtcgccaaaaactgtcccaaaccatggagggagccgcttccccccttgtgggggggaaagcaattccccccccttcccaaaggttgtcaaccctgccttgcttgggcggaggaaacacaggggggtttaaatcactctttgaaccccaatg

SEQ ID NO: 451548 - DNA, 764 bp, Homo Sapiens
ggctacagccagggcccagcgggctccgagtcccgggagcggaggccggagtcgggttcctgtagaggctgctcctccttgtccccgctcggacgtggtccccgctgctcgaggtgcagctgcagcagggcccggcggtacatggcttccagcttctcaagtcgggccctcagggcctggggctgcccggctcgtcctctcggccgctgtctctagccctccggttcgtgctggcctcttcagggacccggcgtgcctcccgggcgtcccgtcgccgccttcgccggggagccgcaagcctgacggaagagtctgcggttctcgcgcttcagccgccggttctcgagccagcagccgggcgttctcctgacgcacccgcgcagttctagccggtcccactcgtcccgcgcacggatggcctccaatgtggctcccgccaggtcggcaaaccgctcctccagctgctgtcgggcgccgtccgcgcggcctcgtcagcctcacgccgcacgccgccgccgctggggctgcccaccaccacgagcccagccggacgcggcctggccctcggcacgtccgcagcaccgtccccgccgcagcaactcccgcgcctagtggcgccaccacgcatgcgccacatcggtcccatcccaaccgcaccgccagccccgtggtctgaggggccgcccgcccaggcgcgggcaagttcggggctggcagggcaggccggggtgacgacggaggaggagaggagtcgcgggcgcagc

SEQ ID NO: 451549 - DNA, 494 bp, Homo Sapiens
aatcatcttttttaattcaaggagaatattctccaagtgtctgaatagtttagacaatgtgacatatgatttaagtcacccttacacatacagcttctatacttgtctttgaagacaatgtaaaccaacattcctttaataagccccacagaaaactgcttttcccttgagacaaacttccttggcaaaaaggtgaagtcaataaatggctacccaaaataagagtcccacccccaaatctcaggtggagatattattacacccgtctcataaaactttcaagtccctatactatgcaaagagtctcataactgaccacaggattcttctaacatttgacaactttagtgtagaaattggtttctagagttccatctcttcttctgtggtagtagctgtctccaaactattataaagagacatccctgttggccgaggttccgaaaacagttcagttctctgagggaaggcagtgccagcagctacatgcttcc

SEQ ID NO: 451550 - DNA, 1013 bp, Homo Sapiens
cggactttatgcgccccccctgttgtggtgtgttggagtgtcaatccagccggaatgggttggaactgcagtttataacttggtgttagcttttttgggggaccaccaaccactcccggtctaatgaatgcccatgaaggctggatcccttaactaaagtctctgtggctacgtgcccagagcctgccaaggagaagtggccaataagaaggccacacacagagcccagtctctaggagaggcacctggacagccctgccgccttgctggtcatgggggcaggcagcactcagtgtgaccgggtggacagcaggaaggcgagttgtctggggaagcggcgactcagcaacttgagttcccaaaggttgcacattggaggtggtgatggtgctgggtagtggtgccgggcaggagccaagacggtgactgtaaaatctggagccccgagccctcggactgggatggacctcgttggcaccaacctcttcttgcaggggcagctgcaccgtgttcgagtcagtttgtgacctcccagggctgcaggggctcagggtcgggctctgtcagccacgacaacctgtacggaaacttcttggcaaaattgctcctgggcctggatcctccacttcttactctggtgagacttcttgcaggcactggagctccatcacgtgagatgggattaaagctgaggcacacctctcagccatggcaggcagctaccttgaattcataggtcagtgacgatgatcacggtgtgactacagagagctcctggaactgctcctatccagcaagatgctggtgtgagagccgctgtggccccacgaggctggcagggccctggctgcagccctctctggaaagacccagtcccaggcatatgcccagagcttccagccagaaaggacaagctgcaggagccctgtgggctggcttatgtgacgccaggcagactgaagcgtggccatggtcccagctgccacattaccacaggaacaagcagccccagg

SEQ ID NO: 451551 - DNA, 733 bp, Homo Sapiens
  misc_feature (705)..(705): n is a, c, g, or t
  misc_feature (718)..(718): n is a, c, g, or t
gttcatttcttgaaattcttcttctactacccactttgtttttgaacttttttccttctagaaactctcttagatggatattggagttattgagtaatggatatatccttcagaactctaaatgttgtgtttcatactgttcacttcattgttattattacactggctttctaggaggatttcacagctgaatgtttcacgctcacagatgtattcttcagcgctgtccatgcagttgttctgccttctctgtttggttatttttcataacagccacattcgtagtttctaggatagcaatactctctcttagtcactctgaagatactctgactgtgatactcttataagtattcctctttgctccagtgttcattcttgtttgttgagttttatgcctctcttcatgtagtgttggttttctcaaatgttagtgattctccaatatgtgaacttacctttgcgtctcaccccatttgtagcagtagaagactgtctgctttggcttgagtgtcgccagtacctggattctcctgggcatggtacgtgctctcgccattcacttgggtaccatgtcatctagtcttagctaagccgtaacaagtccatgaacgggtatcaccaatccaggtagaatcctactttactacagctatgcttattggctgggatttgacccctctcttgcatcgacaccatgcccantaaccccgggggncgtaaccagcctgca

SEQ ID NO: 451552 - DNA, 699 bp, Homo Sapiens
  misc_feature (46)..(57): n is a, c, g, or t
tcttttcaaaaaggtctgagcaatttctttccaatagattcctaannnnnnnnnnnnggcaggtggggggaaataatctttgtcttctttggagtaaaccttcaacaccggattttttcttttaattatggatgtaaaccccaatatccccataatttacattgggtctcgaccaattgcctaattataagaggatatatttaggctcttatttcatccacacaaaaacttgtgtaacaggtagttggaaacatctgaggcaccactttgattctgttttggatggtcatgttttttctcctccgtttccccagcatgtctgccaccatcctcatgcactgcttccaagtgcctgggagcctttatgagcgtccctaaacctaaaagaatccagaggcggggctcggatgaaccctcgagataagcaagtgagccgcttctcccctctaaaggatgtttacacgtgggtggcactcgctggaatccagcgctcgggcagccctgggaggacgcgctcagctgcgaggaggatggagagcaatacatcatcatcttgggagaatttagcgacggcgcctgtgaaccagatccaagaaacaatttctgataatggtgtgggtgattttctcaaaaacatccgtgttcttacgtgtacaatggcaaaaaagcttttccatgacatgaatgttacactataaa

SEQ ID NO: 451553 - DNA, 692 bp, Homo Sapiens
gaggtttccaccgcaatttattgttcattatttttacatcttcttcgtgaagacaatgcatgtatttaaaacatcctcaaacatttaaaagacattatcgggcattaccactttaaataactgacactgtactagcaaacttattagtataaacatcactgaaattctttcctcttacttttttttaaataacactgatgaactagtgggagcaattttccttctttgtgaagcctatgagtgtcagttgcacctccaataaaagtaccattgacaaatattcttggaacagttctttcaccagtcattttgtaaagagcatcttggaactggtttccatattcaagcaggtccagttccaccactttatagttaacattcatgtcatggaaaagcttttttgccattgtacagtaagaacaggatgtttttgagaaaatcaccacacaattatcagaaattgtttcttggatctggttcacaggcgccgtcgctaaattctccaaagatgatgatgtattgctctccatcccagaggccgcagctgccgcagctcccgcagctcccgccgccctgtcaagccagcctgccgagccgctcctgctccaaaccagccgcgtccccgccagcgccgcgcggcgccaaatcatggtcagagcccggatctgcagcgagctctactgccggacccc

SEQ ID NO: 451554 - DNA, 1174 bp, Homo Sapiens
gtagttcaatcctgcgatggtgagtgtgcaaatgtaggcataaaggaagcccattaggaaggatcagctttgtccgtcagttctgtcaaagctttccccctttaattgtttcaactgtgttagacatcaacttattgtacttaaatttatggattctttgaaataactgtcaatgtcatccatccagaacatttgtgttctgttatttttctcgtataaaatttcagcagaatgttagctttctggtatatctggattagttgtaataatggtttttgagattacagttgctgtcaatgcagttccgaaatttgtcaagatttattcttacatctgaggcaaatattactgtttctcgtggcatccagctctgtgcaagtagaatggattcattatcccgacatgtcatcgcaaaagacgactctgtttcatcatagagtctaacttcacacctctggccttttctccggtctgaagttgtaaagtattttggctctccaaccgatttcacagctgcaagcacgttaataatcctcccattaagactgtgtccatttgcaacaatgtcacccagtgaataataatcatgagactctttaacaggtaaatgtatcaaagaaagtaactttgtgtccacttcataactggaacaaacttttactgttgagtgattctcactgagcaacagtttacagttgctaggagttgcagggctgaatttttcttctctttctatttcctttctttggatcagaggattttcaattatcacacagtcaccaaccctaaagctgtcagaaagagacgtgatgtaatcttcattgccccaggaagctgcatttacaaaatgtgctggtgaatcccgaatggtgaagctgaaagtgtacctttctgatccagtattttttctgtctggaaagcctttgacatctgttttcccaataactataccgataactttcagattagccatatttggctgcagatctgaaagggtagtgaaaatcctcgctgcaaaggagtttgccatttttttaatccgaggctcgcccggccggctgctccccgggcctgcacagctgccgccgcggcctcgcggacctggcccgcccgacccccgggtcgcccgcgcttcgcggcttctccacaggacgctcgggccacagcctcgtgc

SEQ ID NO: 451555 - DNA, 1050 bp, Homo Sapiens
  misc_feature (45)..(45): n is a, c, g, or t
  misc_feature (91)..(91): n is a, c, g, or t
  misc_feature (105)..(105): n is a, c, g, or t
  misc_feature (132)..(132): n is a, c, g, or t
  misc_feature (134)..(134): n is a, c, g, or t
  misc_feature (256)..(256): n is a, c, g, or t
ggaagggaaagcccattcttggtaactttggggacaggaggcganccagcccatattttgggtgaccctgaaaaataccttgttccagcancagcgccatcattntttccaagtgggctcatttaattccangnccacaccattccccctttggcaaagtcggtctccccaagaaaccggactacaccagctttagtgccaccaaccaatactctgtctccgaattttgagctctctttcttcctttcctgattgnagccagccttctgaaaggttggagatagattcactggcagtttttgtaaggttgctgatcggaggcgtagctgaaggttccttgtgctgctggctgtgatgcttttctgagggatgtttgaagggttggagggggaggaagacaccatgctggccgtagaagtgcacagcggtgaagtagctcgggaggcgggcgttgtctgcaggccattagcttcatcttctgcttgcaccttccttgttaactttgaaggtcgggtaaatatgccctttaaaggttcacactggaaataccgaactcctgccaccgaaccatcgttcttgcctatgggttcatctaaaaacaattccagcccactggcctggtgcaaactgggtttctccaagaaactggataaatccaggcttatttccattcacccaaactcgctccccaactcgaaagtcatccacaaattcctcctgagtctcagatgatggagtgcttgatgctttttcactggatatggttttttctactggagctacaacagccgtaggtgtcttcagagctgtgcttccaggcttcaggatcttggtgggggccttaagcccacttggctttagcatactcattttctttgtatgtcagagctgtttctcctttgcctgttgccactatctttccccaaccattgatacaactgtgggttctatagtgaagtcagtctctggattaaatctcatggtgtctgtagaatcggggcaggcatcagctcatatcctgccagaagctgatcccgggaattccggacc

SEQ ID NO: 451556 - DNA, 872 bp, Homo Sapiens
ttctcatcttacggtgagccagacgtctttatgatccctctgtttcagccatcctgtacggggctttctggagcatcggcgctggccagtccccatgccaggtcaccgttccagtcgctctgcttgctggtgctggcgtccagaaaatgcttctcccagtcctgggctttgttgtctttagtctgttcccaatcccttcgattctgccggggacgtttccttcttgagtgatgttaagttccagtcgtactctatgctgccggattcaattgactgaccatcaattgttcacatcataagaaagatctggtcttaaaattagagtgtacaggtgtgtgaagccatcaaccttacacctgatcagtttcttgttttcgtgatacttattcttgaaatgtaaaataacatgaactttcttgatatcaaatccacaaatatcgggtccaaacataatatagtattgcgattttccattcaggttcttctggtcaatgtctgcaggaaagaccttaatgtagccccctccacagtccatcttctgctcatgttttactgtgtactgaataaccagagttttccctttattgctgaacggtttgaagcgtgcagagatggcatagaatcggccattctgagtggtttgcagacctttatctttctctttatgaccataaaacttgcccgacgaaagtctaaaatgcccaaatcgggagtcattggtggactgcaaccatcggtttctccatgctctccgtctagaaattcctcttggaaatagacggtagccagcgccactcgcagcatgcatatggcccagagctggaccaaagcccgggccatgggggtgtgcactgcgcttccgtcgccgccac

SEQ ID NO: 451557 - DNA, 823 bp, Homo Sapiens
cggctaggtcacagaagcagtgggtcagaagccagaggggacgtggggagtgccaccctggagcgcgtaccggcacacctgctgagatggaggcctcagatgggcaagggggtgaaggggacaagccactagagcaggtgacaaagtgtgtcatgcctggagacaagctccagctgccagccctgctagagactcgctcatgcgccatgccaagggcctggatcaggacaccttcaaaacttgtaaagaatacctaagaccgctgaagaagttcctgcgaaagttgcacctgcccagggaccttccccagaagaagaagctgaagtacatgaagcagagccttgtggtcctaggggaccacatcaacacctttctgcagcattactgccaagcctgggaaatcaaacactggagaaagatgctctggcggttcatctccctcttctcggagctggaagcaaagcagcttcgccgactttacaagtacaccaagagcagccagccggccaagttcctggtgacattctgcgcctcggatgcgccggagaggtccttgctggccgaccgggaagacagtctgcccaagctctgccatgcatgggggctgcacagcaacatcagcggcatgaaggagcggctgtccaacatgcagaccccaggtcaagggagccccctgcctgggcagccaagatcccaggaccatgtcacgaaagattctttaagggagctttctcaaaaaccaaaactcaagaggaagaggatacgggaagccccagaaactccagagactgaaccgtaagaagaccaactgggaccaagggcc

SEQ ID NO: 451558 - DNA, 1304 bp, Homo Sapiens
  misc_feature (38)..(38): n is a, c, g, or t
  misc_feature (123)..(123): n is a, c, g, or t
  misc_feature (125)..(125): n is a, c, g, or t
  misc_feature (150)..(150): n is a, c, g, or t
  misc_feature (242)..(242): n is a, c, g, or t
  misc_feature (384)..(384): n is a, c, g, or t
  misc_feature (1026)..(1026): n is a, c, g, or t
ggggcttttcaagcaactgggaaggtccatccaggatntggtaggtttaatggatgtacctgtgttcctgtttaactcctcccaaaaaaaggaatggccccatcagtttcaccagcccataancncatgcatgaggtactccttttgccntggtcccaaccacaacaaaaggcttttaatccatatcccaagaagaagcctgcacagaagggtagcgtgatcttcacagtcacccttgtttntacagagaagggccagcagagtgcaccactgctcctgtttacctcctcctccaataacaggggctcgttcataaccaaggaccattaacaaatcttgctgcttgccttggagtatcaagaagccgtccagctcgaagtggtntaacataggaacagactggtctatttatcccattttcatcctgtgcaaaaatcttaaccagtcgtgagttgtgtgagggtcgaatttgcaaatattctctccaccactgcttagcatatccaaggaataatcgctctttctctcgcagttttctgacggttccaaagcaagctgtgtgttcactacttcttgagataacgtttgattgagtggtggatacatttcaagttttatatttaaaattcccacagaaacttttgattctgtgcctacacccataagttccacagtcagactggtcactccattttctgagcccaaaaccgatcgccattccagaaaatatgatgctactaaagtcgtctcaccaaatatgtctgttttgattagcaccatatgaattggatcacttattgataacattgttgttgaatcagccattctagttccatcacccaagctttctctgtgtacttcaagtaaaaagccatcatgaaaatctggttcacaggcacatggaacaggtttagaacgaaaacgttggtttcgataatgtaaacataaagtaaacgttgaacaacttgtccaggtaaaggctcaggttcttgcagatgttccaagaaagcttttccacccaaaccntgaaggtaaagatacctccgtgttggatcaatattagttttttttaatgtcgattgtctatcaaacaataggttgttttggagaggaagggagttcttgctcaacactgtccttcacaaggttaaactttctgtaaaccttatgtaacagttggcttataattccactatgagctgattttaataaagtgtcatcacagagtagaagctgttattaggtccatttttataacaacgggttcataaacttcaaaaccaaaaaaggtgctgtattaaaat

SEQ ID NO: 451559 - DNA, 938 bp, Homo Sapiens
gcacctctggtccgttttcactccatattaagcacatctgaagtacctgagctgctcctggctgttggcttttgactttaaattgagtaaaggtaagccaatatgcatacattttttacatcagctttctcacatcagcctcagaaccaatcatcactgggctgggaatattctcacgtactccgatacttatttgttggacacagttaatatcaatgtgcaaagtaatgcattttcaatgcaggataaatatgctcttatgaatatgaatggaataaaggccctgtttctccatgttttaaataacagatacatagcatcttaaattatgacttaattagcagtttttagacactgaacataatacactgtattacaatgcaatgtggtaggcttccattttaggaaccaaaataaatttcacatgaaaaaatatttattttaattcacatcaaatacatttagaataaatctaaatttttagcatcataatacttacaaacaaacacagataaactttgggtgtataagtctccattctgtcctaaaagcatgtacaaaaagctctcctgcaactattgatcatcacctcgttgccttaaatttctagattttccattttcagttcttctctttttgaagactggggccactccatctgccataactcccaagagaagtgactgtttttttctttaaataccactttgggttctccgccaccatcagcttctgaagttgatacatactcattttcagtgcttggaagttccaaatctacctcctcatgagactcaacctcttgtttaatttcttgccattctccatatgggtttgatttcttaagagttttcgatttttcttcatttgaacctaatgaattctgtttctgaatacttttttctttctgtgtttctgggtcacttcctccatcacta

SEQ ID NO: 451560 - DNA, 665 bp, Homo Sapiens
gtgtgagccaccacacccggcctatattgttttgaaagcatactctatatatagttatgggcagaggcacaggcatcctcagcagctgattcaggagatgatggtaaagctagctaactatgaattaaacattcacatatccagtctacctggtccagtaataatacaagcaaatcttgtatttcaggaacaaatcaaggttctcttaattttttggcttatatacaatgaagtaaaaacttgataaacatggtttcaaattgaggaggagagtcttggatgtatgttttaatatgtataccttataattctgcctctagccaaatgctatgtttgcaaaatgtggcatctgttagtttttattgtctgtgtcttctttgtttactataccttgggtaattttgtgttaccaaaaaacacaacccaacaacgggcaggggtagggcggacacccacgaaacagcaatccgggtggcaagctcaaggtacagttcacagggccttacaacagcgagggatgattgcaactaccctaagaacccttatgctacggctatcatgggccagttccaaattgcgggagatggggcactcttttcccagggacctcagggaacggtcttccgcacttgatgtgccttattatatctcacaggtcctagaga

SEQ ID NO: 451561 - DNA, 1393 bp, Homo Sapiens
aaaaaacaggatttttagaatggttatattgcaaactctagccacaaaaatgtccatcgtccttttttatcctgattcggaatgtgctgaactgtgttgccttgtatcaactagacttagatttccagggcacaattcttcctttaaatctttgttgctattttcaaatttagaatccatgtcaatcttaaattctgcaaattgaacatgatccaattttgctttaacattcttgccatccatattattcagtgctgtagtcttttcaggaatattaacattcacaggttcttccttgattcttacagatgcaataggttcatgtttaatctgctgtaattcatatttagaatgaagtttatctgaaaaaacagaatccaaggaggctttgcttacagcacaaatcatgttgtcagtgtgaggtccaagaacagatgatgtggaatctgatgatgtgcctgtttcatgagtagctgtattctgagaagtgtcctcctctgagtgatataatttgagccgaatatgccatgctaaactgcatacagctgaaactgtcttgaactgatgaacaacattccttggaataaaataaatgtcattatcatatagctgaatcctggcatagcgaatgccttccctcctcagttgattcagttttgcatcatcaacccattggacacactgggacagtggaggttcatgtaaatctaactgcattctgttgaacttacttggtaagaaatcttcagcatgaatacatattacatgctttggttatacggggttgatcaggccactctccacagtgcacagccttcagcactccaacagcagctgtagtctgtcgttcaaaaccttgtcctatatgatctgcatgagctcttgtcctgtcttcaaagagcatctcacggggctcacttgttcgaggtaggtactgaagattttttatttcattggtagttcttttcctttttgaaaggtgactttggcatatcagccacagggatcatttgttctcctggacgaacccacatgatgggaccatcatcactatcttttcgactctgtaattttagactagatagcgtcccccatggcagtgtacattttaaaaatggtgactcttccaacatgtcaaggaactcagggaaataatctcctacttcttcatcaactgctcccaccaagcttatttgtctcattgggccagctctgtaagtaccatgagaatacgttctttttaccttcatagtgatccaccataaatatggagatacagatattttttcgcgatgcgctcccccgcaccctctagccccgtggtggtacactgccgtataggtgtgggcagaccagcgataaaccggaactcagcccgccggacacctccggc

SEQ ID NO: 451562 - DNA, 1265 bp, Homo Sapiens
  misc_feature (24)..(24): n is a, c, g, or t
tcgattattgattagcagttaaantgtacccgtgggcagtgcctacataggtaagccgaagtggcgccgtgcggagaacgtagtctcgtcgttccctccagacggtgatctgctttcgcgtgccgcggcacccgctagcgtggatcccgtggggtgccaggcgtagtgcgtgatgaccggggcgccaggcgggatagcaggatgccgatgcgattggcgcgacaagagagcgttaccggcaccgaggggcggtctcaacgacgtgaaccgattggggcgtataaaggacaatcggggtgcttgcggcccaccaccgcgagggatagcggtgctccggccactcgggtggaatatcgcgggggggcgcgcggtaagtcacggccccacaggcgccccctccaccgagggttgccgcaggtggctaattgtggagtaccaacagtgccctttcctttttcacaaggcgcacagcggtgcccgcggcaaatccacccctgagccctgggagtggctggcaaagggcccctccgggaagccaggccatcgctccgccgccttgggcatctgccagcacaaaaccaagtctccaaaagatgtccttgcgggaacctgtacttgaggaagaggtggttgcccatagagttgtgtatgatggcgccctgaacttcctggagggtgtggggagatggcagtgcctcatcctctttgatgtacccccagccagtcacccagcagtctgtccggttctcaaactcaaatgtggaggcctggagacagatgggctggatgtgtttagtgtaggtgacaggtgcagacagcttcaccaaggcaatgtcatagggtgaattccccaggtagcgagggctcagatagatattcgatacgaagtaacgggtgtagtaggcctgcaggctccagaaggatggcatggaagtcagctggccaaactggaccatccacccggagggatcactaaggtcactataggtttcaaagcagtgcgccgccgtgagtgcccagcggtggctgagcaggctcactccgcatacgtgggaatcccacaggcgcaggctcccctgccacggccaacgcccgagttcggcgtcctctccacccacgatgcgcgacgtgatgacccgtcggccgcatggtcctcggatggtcagaggaactgctgagccgcgggaggcagccccccaagcccgacctctccctttctccccttcaaccccgtccgggaaagcacgtttttgcaccacccaggc

SEQ ID NO: 451563 - DNA, 817 bp, Homo Sapiens
ctggcatcagccaagcttccggttctgcattcttcagagttggtgcatcagtctccacctcccgggttggcatgacggtcgtattaaggccacaggtacacaggatgctttcctggtctgtgagtggtgtgatggacactcacgaagcaggcatccttcccgccttgggcattgccagcactaaccatgtctccaaagatgtccttgcgggaaactgtacttgaggaagaggttggttgcacatagagttgtttatgatggcgacctgaacttccctcatcctctttgatgtacccccagccagtcacccagcagtctgtccggttctcaaactcaaatgtggaggcctggagacagatgggctggatgtgtttagtgtaggtgacaggtgcagacagcttcaccaaggcaatgtcatagggtgaattccccaggtagcgagggctcagatagatattcgatacgaagtaacgggtgtagtaggcctgcaggctccagaaggatggcatggaagtcagctggccaaactggaccatccacccggagggatcactaaggtcactataggtttcaaagcagtgcgccgccgtgagtgcccagcggtggctgagcaggctcactccgcatacgtgggaatcccacaggcgcaggctcccctgccacggccaacgcccgagttcggcgtcctctccacccacgatgcgcgacgtgatgacccgtcggccgcatggtcctgataacggcgccgcctcctgcgactccggcttcctgagtccagcccgagcccgcagcagcgccagcagcagcgcccacagcc

SEQ ID NO: 451564 - DNA, 869 bp, Homo Sapiens
  misc_feature (154)..(198): n is a, c, g, or t
ccagtgaggccttcttttacacctgctttaccagcagcacctccagtagctaatagcagtctcccatgtggccaagattctactataacccatggacacagttatccgggatcaacccaatcgctcattcagttgtattggtgatataatcccnnnnnnnnnnnnnnnnnnnnnnnnnnnnnnnnnnnnnnnnnnnnntgatgatgcagaatccaccaaggctccatcaactccccattcagatataactgccccaccgactccaggcatctcagaaactacctctactcctgcagtgagcacacccggtgagcttcctcaacaagccgaccaagagtcggtggaaccagtcggcccatccactcccaatatggcagcaggccagctatgtacagaattagagaacaaactgcccaatagtgatttctcacaagcaactccaaatcaacagacgtatgcaaattcagaagtagacaagctctccatggaaacccctgccaaaacagaagagataaaactggaaaaggctgagacagagtcctgcccaggccaagaggagcctaaattggaggaacagaatggtagtaaggtagaaggaaacgctgtagcctgtcctgtctcctcagcacagagtcctccccattctgctggggcccctgctgccaaaggagactcagggaatgaacttctgaaacacttgttgaaaaataaaaagtcatcttctcttttgaatcaaaaaacctgagggcagtatttgttcagaagatgactgtacaaaggatataaactagttgagaagcagaacccaggtgaaggactggtaagtgtaaatcataaaaacgacaattttttcttgtgttttaaattat

SEQ ID NO: 451565 - DNA, 1236 bp, Homo Sapiens
  misc_feature (51)..(51): n is a, c, g, or t
  misc_feature (109)..(121): n is a, c, g, or t
  misc_feature (187)..(203): n is a, c, g, or t
  misc_feature (315)..(372): n is a, c, g, or t
  misc_feature (397)..(399): n is a, c, g, or t
  misc_feature (519)..(554): n is a, c, g, or t
ggcgactaagtggggtgttggtgagtcaaagaaaaagcggaagaggggggnggtccctctcttttcctggaaaaaggaaaaaacttgttgttattgtgcgggggggttnnnnnnnnnnnnngcgcaggggggggtggtgttattgtgtccgcgaaaattatttttttccccgaggaggccccccccnnnnnnnnnnnnnnnnnttaccacccctcccgcgggagaaagatttcccgggggaaaaaaaaccgcgggaggggcttataaaaaaacccttctttttttggtggggagagactccccagagagtgtttnnnnnnnnnnnnnnnnnnnnnnnnnnnnnnnnnnnnnnnnnnnnnnnnnnnnnnnnnngtgggggccaaggggttgtttttannnaaaggaaaaagggcccagggcccaaaaaaaccccgggcggtttttgtgtgcttttcccctttcccgggaggggccccgggaccccgggggaaattaggggccccccccctcccttttttnnnnnnnnnnnnnnnnnnnnnnnnnnnnnnnnnnnnagaaatttgggttttttgggggggaattttccaaccaaaggggatgggttttttatttattgccaacccaccccccttcacttggccaaagccgctgttgccaagggtgcttcttccatccctggggtaggttttcggccaccgcccttggccaagcgaagccaggggatgtcacaagtccttcccgagagggaggcaagtggggcattgaggcggcacaggactgccgtttctcgccacccatggctcaggcgtctcccactctcctggagagtggtggaggcccaggatgcagagtgaggggagctgcagatttggaacgcgtcaggcccagcctggagtgcccagcacagccttgaagatggaggtgggggtggcggtcaagggaagcaacaggctgcagggctagggatgcacctaagctcaggtgtcagctgatctcagaaggtggagggaccttcgcttttcttctgctcattgcactcccccagtgcaggtggaaaggaaggaacctccattttctgaggtcttcctatgtgacaggagagtgcagagctgggagctttgatattacacctgttcccaccaactcccaagagctggtgttactgcctggtgtccatgtcagtccaagatgaagcagctgggattgtccagggaactggcacatcccgggaattcc

SEQ ID NO: 451566 - DNA, 1058 bp, Homo Sapiens
ttctcactagaaaccccagccaaataatcccggcaataagaggccccccacccctccttttttgccaaattcttcccctggaaggggtctccaaccaaattccttcccattaaaaaaagccatagccaaccttaggggatttccctttattccccccggagggccataatgccttaagccaaatggtgccttttttaaggaggggaataaggaaatccccccatctctgccataaatctgtgggcccagggatggaataccatattctctgcctgcctgtcgcccggtctcgctcgggctttcggaagggggctgcggatcctaccctcgtcactggagtggcccggaccgacgcctgcacgtgaggagcccggggtcccaggcccgcgactggagcaggggtgctgatgccggcagctgtccgcgggtcaggccccgcggccccggggctcaggaagtagaaggggttgtaatagcccagctgcgggggcggcggcgccgcggcctgggggacctgcagcgccgcccgaagggaagctctgcggggagggctgggggctgcagtaggctgggaaggcgggccaggccgctgtgccaggtgaggtagccgcagtaggactgccacagccactcgtgcacttgccgggagtactcgcgggcgctcagccgagctggtctctctcgtggcgccgcggcttcgggcgcctcgcagcccgcctgctcctgcagctctgcaccggagccggaggccgcctccccgcgcttcctgagctcgcgcggcggctccaatttgtcggctgcggcggcagccgcgaggcccggggtctgtgggccggcccggggcctggggttcggcctgggggtcgtcgcgggggcatgggacggcggtggtaggagggcctctcagggaagggacgggctcgtggtcccctccgccatcgtcctgcccgggagggtggcctcgggcttcctcgggcccctcggccatcgtcgcctcagcagcaccctccgggatacctgtcactgctccgtttccactcccccaatggcccctcccc

SEQ ID NO: 451567 - DNA, 785 bp, Homo Sapiens
gtagacatacaaatatgctatagttcatcgtgttggtatacatttgtattccttgggagaaatgaagccatcaccatcatggtcattcttcttaaaaatatcttctaaaactgcatcctggatatgacttgtcacgtggcttctcatctttttcaaattccctttgcaagtagaggtttatctcggctttagagagctgcctgtcattgtccatgtctatttgtttaaatgtctcaatgctccgtggtcctttggtcacagcataaagttcaatctcaaaaatcaatgtagcatccggtggaatcttgccttcatagccttcctttccgtatgcaaatgaagggggtataactacttttcgcttttctccagggcacatatctgtcatagcaatgtctaggccttttatgacttgcccaacaccaagaacaaaccatttggggtggccttcattttgtgtccggctgcagtagaatttcgagccgtctttagccaggtagccgtcataatgggcatttagtaggtctcccttcttgcttgtcttagagcagttttctggacgatgcaaaacttctattttcacttcttcggtgctctcctctttcttttgtctctgagcagtaaaaaggccccacagataaaagaaaacaatgaatctgaataagaaatgcatggtttttggcatcggctccagcagaacactgctctccctcccgcgtgtcactcgcgccccgtggatgtcccgcggccgagttccgacgcgtggcaggcgttgtcctgcgtcc

SEQ ID NO: 451568 - DNA, 1007 bp, Homo Sapiens
  misc_feature (91)..(120): n is a, c, g, or t
ggcgccatgagtttatccagcccccccgggagtatgggattgatggaggacaagtagggcctcgaggacaggtgcgtgacagaagcacagnnnnnnnnnnnnnnnnnnnnnnnnnnnnnncacgagttcatcagtaaagaggtaccctggcagcataaatattatgataagctaaaagctggaatcatctggaaaaataaataagactcctcatgtccttttcggtccataaccagaagggcagcaaaaggcctttgccactggaacctcttctttttctccaagtcccacgtagcaattacctgcactttcaagaagagaaacaacgactacacctaaagaaattccttcttgataggatgtttctagtggccaagatacaagcaaatgtagaaagaaaagatgttgctgactactatgaacaaatgtttcagtcagttttgaaacatcacctaggagaagcagtgacaggattgctgctcatctatcccacttccattctgcatatcctcgagtcctccagcgacactctctacaaagttcttttagattatattggccatgtcaaagatgaaacagtattttttattcaacaaatgaaaattatagtcatttctcataacattccaatgaggctttttatgcaatggcatgtttcagtgataaaagttccagttatgtatctcgacgatgtgacacagtcacagtccctaaacggaggtcatcaccagattttctcacacaaactcataacactgtcactctacctttgccagactatgacagtaggcactaaagggaccaggcgaataacttacaccaggttgcacctgacctactcctccccagaacaaatcataacagtacttgtgcagatccgcaggaattcactggacccggcaaccatttttaaccctgtctaattagaccatacacatcactctggattctgaggggcaatggcctgctccttcacaagtgctaggaatgagagggactatgggccc

SEQ ID NO: 451569 - DNA, 1117 bp, Homo Sapiens
cttgaaagatgtatcccgcttcccattacctggattatttccgcaatttcttcctccagtaacccgaatgcttaaatccacctgagaattaggatccctttttggatacaggtaattgccgggtttctctataattctggggtgcttttacagaatcacatccatacatcctattttaaagaatatgaagctgaatatcagtcacgtgctggtggagagccccatgagggcttgtggagagggactcatcatgcaggattttgagccatgctagctgaaccccttgagcactgactcccacatcagaatttgtttgagagacctgtggagaaaatacaacacctggaagactgatatagtggagaactttcctgatgacacaacaaagcttcaggcacgattttatgctcatttccaggagatacaagtatatcactggtggcattttctaagtgtttcctatctactggcccagaaggtagaattgcgggttgctgtagcacggtttcaattctctgtgatttttcagtagttgcttgaagagaccatggattcaattgtggaacactagtttgtattactgaaggctggccaagctgttgaaatacttgctgaattggatgctgaagaatacctgctcttccagaagtctctgtcaccataattggtacattgactttataaaggtgaccagatacagtctgtagtgtcacacctgctggtacatgaatgggataaccaggaaaagtaaagtttgcactggagtttgaagtgcccagttctgctgtggtaaaacttggaagagttctaccagcaggaataactaatgatgctgttgacgattgcaatgtttggtgcaagctgtgcggcaactgaagagtaaacagaggtgattggatgctatttctgaagaagtcttctgttgctttagactgcaaaaccttggtttcccagagctgcttcaagtcttttaaaacttgttcctctataccttcttcagcaaatagattccgaactccttcaattacatcttcaattacagatctgtagagtttaggcaccgggttgaggcaggccatgacagcacctccagcacctggccctttgcgcctgcgcg

SEQ ID NO: 451570 - DNA, 838 bp, Homo Sapiens
gtaagcacagagtgactaacgcaatcgtcgatcaaagtggacgcttccacaaggatggttacacccccctcagttacaggtagacacgcagagacttctcccaggtaacattcttgttatgactggtacgaccattcactctcgactgtaccccatgttacaggtcttcttggatagtggactaaacctatctctgtccttgccacctgtttctagacgtcaaatttatgtttgtcaagccgcataatcgtacttttctttcctggaacatcaatgtgaaatcttaatcatatcgcgagaaagtcgttaacgcagggaacccatctttcataaagatgaagacaatgacacttgctcttctcgcttctgcgttactctcaagacctcgaagactgtcatcattaccccatttgtttctaccactccaggatctcttgtgtcttcccctgcaaggtcgcagctcttctcgctagtggcatatgctcctacgggagtctagctaaggctggctggtttaggagatggaccccatcagccaccattcctttatcaagatcattcttaaggatgccatcacgtctctcttccttgtggttgtctttacttcattcattctcctcatttgcttttgctttgtcattcctgtaagcaggagtgacacaattatcttcactacctgtcaccagaattctttggctgggaggaagcatgtttgatgtgggaaaatagcatccctaagtgcctggattcaaaatgagactctgagggcactgggcgtgcctaggacttcggcaaagtcaaggtaatacgctgaactcctccacctgggagacagaat

SEQ ID NO: 451571 - DNA, 914 bp, Homo Sapiens
tggatgagctgctcccaaaagccgctgttgggtcggatgatgggccggcatgacttggtccacgtgtgggcgtccagcagggacatggcgtggtacttcatgaggtaggcgaggcacagggcagctgagcggctcacaccagcagcacagtgcagcaaagtacggccctgcttcatctccacgctgttgatatggtcagccaatagggtcaaagtagtcacagaggacgtgagttaggggagtcagccacaggtaccctgcatgtactggatatcctcatacaaggtgttcactacctccactgagacattgatgaccatggtgatctggttgctagacagcatgcgcttgttgttggcggccacaccattgctgatatacaggcttttggttatttgcgagaggccgctgactgagggctgccggaactgaactgggaaggcacacgagggtgctgtcatcaaggcggtgggtcagtggtcagcagtcagcgaagcacgaaggctgcgtctttctgctaggctgtgtccatggaaaactctctccttcaggcgggtgggcgggttcgctcaggaagtagccgcttggggaagccttaggcaaggttcttcgggagagagacccatcatgatcccgcagcctcaatccccgctggcctaacgctttggtttccatagcaatgggctcgtcgcagaaaggaatagcctgtgccgggtcttcagagaaatcctggcctcggctccacgcccctgagcagccccaccctggctcaacctgttacccgccctgccggcaagccggggtcactgcagtccccgtggcgaagcagggtcagctcagctcaccgcaccccactccatccagcctgcccatctctacggcaacgggccgggtcgcacacagggctgcagccg

SEQ ID NO: 451572 - DNA, 800 bp, Homo Sapiens
tggcccctttccagatctacagtagttagctgcaaatttgttgcctcacgtacacacagaacatccattccatcgacctttagcccagggataaaattgcccctcttgtagtaatcagggctggctgctgctctgctcagtagatgttcccattccatataggttattctcacagatgttaacacaacggtaatttcgcactaaagctgccatattgaaagcttcggctatctgcccctgattcgcagcgccatccccatataaagtcaaacagatctcatcggtttcctttatatttacaggccagagcaatgccagcgcccaggggggccctgtgcaccgacgatgccattgcccccatagaagttcttggtatacatatgcatcgatcctcctgtttcctttagcacaacctcctctgtcttcccgtcagctctgcgagaatggatcggacagaaagtccccgagtatagcacacaccatgagccctataggatgtaatgacgtgatccgaggggtttatgccggcctcaaggcccacgcaacaagcttcctgaccatcgcacaggtgacagaaaccgcgaatgaatttctgtttgtacagctgatctgccttcaattccatgcggcgaacagtcagcatcatcctgtagtatttaagcccctccgccctagtgagccactgtagtgacagggggaccctcttccaacagataaagatcacatttcttaatttcccatgtagcgtcatttgaggagttacgggatgccaccagcacttctgcgagctgatttctggg

SEQ ID NO: 451573 - DNA, 1121 bp, Homo Sapiens
  misc_feature (229)..(237): n is a, c, g, or t
gggggtgtccgggggggcgcctctcccccctttttaccggggggaaaattggttttcccaggattctttcaaggcttggggaattttctttcggggccgaagggaacccgattttttgcccggggtttccttgccccggcacggggatccggatgggggtagttttcaggaaaagctgctgaatttcagtgcccaggggtgcaaatttgtaggggttggcaccattttnnnnnnnnnaagtgtgttggctgcacggacactgaggcagtaacacgtgttaggctttagctccatcagcttgacagtagtgccccaaattcttgtgaagatccatggacgaattctttgcctcgggcaactcattctcctgggtgtcttggccacctccttgtaacaggagctggtagaaactgaccggctgcttgcccaaggcgtaggtccaggaaatcacagctgtggaattgttgactgtgtgctcaaagatgaagggggtgtccggcaggtccacaaccacagaagattctgagtgcgttgaggaggtttctgtctccagctcagggttgtcaaggtccagcaggccccttgtggccatctgggacttcgatgggcatgggcaggggccgagcgccaggtcctcattttctgcattcttggccattggggagaagctgagtttgttcagctccccctccagcatccctgcaaagaagctgctgttgggctgggtcacagctaatttgatggggttcagcaaggtggatgagaaggcagagatgctggtctcatcagagctgcagtctgaatcctctactggcagcggcttcagtaggttgatggtatcatcctccaagaagttgaccaaattgccctttgaggctagtgggagtcctttggtagtgacggtccggttcatagacttggggtttggaaagggttttggcagttggtcaagggcattcatcatgttgaagttttctttcttcagtacagcctcctccccatctcccacttgatggagtgcctctgatgccatctgatttgttcgggatgacacccgtcaccatgcaggacaacccagctgaccagaagcagagagaaactgtggggcagtgcccacctta

SEQ ID NO: 451574 - DNA, 901 bp, Homo Sapiens
  misc_feature (408)..(479): n is a, c, g, or t
cgcctgcccccccgttgcttctctctcttcccttctgcctgcgtgctcgcccgtctttggttccgccggttccgtgcgccctctctgggcttcggcttcaccctccgtctggctgtcgctctgctctcctccgctctcatgcccctttcagctcctactctggtgtcgtccccctccctcgctcgtttctcttgttcctctccttcccggttcgtgttctgcttcttcgtgttccctctcgtctgtgtttgtgggtcgtcctctgcgtcctgcctctttctcttgcgtttccgcgcgcttcctgttttggtccccctggttctcgcgcggttctgtgtgcgcgggccgccccgttctttcttggtgctttgctcctgctctctgtctggtgttctccgccgtctgtgnnnnnnnnnnnnnnnnnnnnnnnnnnnnnnnnnnnnnnnnnnnnnnnnnnnnnnnnnnnnnnnnnnnnnnnnagctgaggttggggagagataacgctgtaaacttttatttttcaggaaatctggaaacctacagtctccatgcctgctcagccaagaaggagctcactgtgggcaccagagacagggacccaatgtggagacctgtgagcctgtgtccggccctgaactctcaagcacagggcaggcttcctgagcattgaagagaatatgtgggagaacaaaacagaaactgaaagaatatgcaaggtgtctttcttggatgttattccatgatagatagtaggggcaggagtgagagaggctgactaggtctggacatggaggctggaagagtcagggtgtgattcggagaggcgcatgagaaggaaggtggattttaaggctggaaatctgagggtcagtggtccagtcactcagagacagaatcacag

SEQ ID NO: 451575 - DNA, 247 bp, Homo Sapiens
gtggagacagtcagagaagggggctcccggggccctccccacggaactggccctgggcccagaccagatggaggacccgaaaagaacaggcagctgtgagccgtgagctttgaggcggtgggatgtgtcagcagaatgtctcctgcccccgagagcgaccccgaggccactgagaagagcagcgcggcctggccggcccgaacgcctgcgtctcagtagctgggagccacgggcccacgcccgccca

SEQ ID NO: 451576 - DNA, 830 bp, Homo Sapiens
tgagctttgggtagtctgtagacatatgaagggtgctaagtgtccccaaggaacgcacagctcaccatgtttgccacagctggggccccggatccttgtgctctcagctgcatcctagccgcgcgtcactctttctgggcctctgcctggggccccaccacctggggtggcctctccttccaagacacacacacgtctgtggcccccctgaagagcacgagaggcggcccgattgacaccgagctgtccccatccctagcctccgggcctgtggaccacatgggcaggctgcacgccttcccccaggggcctggttccttgaggtcgtcagacccgaccacgtggggagctgcccagggtgggtctggctgctgggagggcccgggccacctcagggctgccacgtcatcctcagctgcaggtgcgcagagcctgggcttggcaacagccttccagtcggctgctctccctggggccccatgggagaaggggccctgcctctggctgttcttgtggcagggctgaggtgtgtcccccaggcaggtgggcggcgtgcccacgaccagggtcggcatggccgcggggctgaggggagagcaggtgcaaggtcaacctggcccgccctgcctggggtcgctgctgccttcacatggcggcttcgaggcctgcagccccacctatgaccctgcccgggatgggctggccactgcctggctccggatgcccgcctgcgccggtcacctggcccacgatggaaaccctcaggtgggtcattgaaactgggctggcacggtgggcagcccggacactgggctggccacagctggggg

SEQ ID NO: 451577 - DNA, 951 bp, Homo Sapiens
ggggcggtgaaagaagtttgctgacgaagatggcgactgaggcacagagtgaaggggaggtgccagcccgcgaatcctggccggagtgatgccatctgcagttttgtgatctgcaatgattcttcccttcgaggtcagcccattatctttaatcctgacttttttgtggagaaactccgacatgagaaacctgagattttcactgagttggtggtcagcaatatcacaaggctcatcgatttacctggaactgagttggctcagctgatgggggaagtggaccttaagttgcctggcggggctggcccagcatcaggattcttccggtctctcatgtctctcaagcgaaaggaacaaaggagtgatatttgggtccccactgacggaggaaggcattgcccagatataccaactgattgagtatctacacaaaaacttgcgagtagagggttgtttagagtaccgggtaatagtgtccgacagcagattttaagggatgctctcaataatggaactgacattgacttggaatcaggggaatttcactcaaatgatgttgccacttttgctgaagatgtttctaggagagttgccggagcctctgctgacacataaaacacttcaatgcactacctcaaaatcgctgatttgatgcagtttgatgatcaaggaaacaagaccaatataccagacaaggaccgggcaattgaggctctccagttgctcttcctcattctccctcctcctaatcgtaaatttgactgaagtaatagcctgatctcctattaccagacaagcaaaaaaaccaggaccagcagcagaatgtccagccataaccttgccctgatgttggaacccaaggtccggtggcccaacacatgttccgtggcaatgaccctcaggagaatatcacgaagttaaacggggggatggctgctggactaagcgtca

SEQ ID NO: 451578 - DNA, 1496 bp, Homo Sapiens
  misc_feature (155)..(155): n is a, c, g, or t
  misc_feature (256)..(297): n is a, c, g, or t
ggggttgtccccaacaaagggcctaagggcccacgggaaaggaggcagggaaccccggaaaggatggggggaaaaggccaaccatttgcccataagggaaaagccacgtgccagaaggggactatcaataaccaggaaggaaggtcccactttcnttattggttggtataaggagatgggaggttgaggcgcctggtgggaggaaggaaaaccccggtggtggaatcagagggggagcagtgctgacagtcggagnnnnnnnnnnnnnnnnnnnnnnnnnnnnnnnnnnnnnnnnnnctctgggaggggaaaaacggaggtggtttgctaaaattgttgtctacttcagtagcagatctttcagaaaggacctgtatgttgctgttctcatttgcccgtcgcctgccttctactcggctgatagttatagtctgaccgataacatcaattgccccaggtaatctccttagatcaggtgattcggccctcccatatcgatcctgccacttcccaacgcttgaattggcttttctggaggcagtacttgtctgagactgagaagaagtgctgtttctgctcggtggaagcccagtcttgaacaaagaaggaggagaagtaaactcagcttttgtagatggaagggcagtttctttctctgagtttccagttcttccctgctgtaccgtaattttatttgtagtagaggttactggtataacttcaagtcccattcgtatcctcttttgtttttcacagtaagctttccaggtatcttcattaaacccataattaaaataatcagaaagatcagcaccaggtttacgccatggtttatcttcaaaagaatccaaatctacctctaagagtggaactccattaatgcttccaggtgcatcaaggtctactcctttgacttttgtccctgtagttccataaactcttccccctgtcttgatgttaagatttacaggtgctgtaccataactcccatactgtggtgctcccgttttaatgtctcctatagtgacatgaacatcatcttcatcatcatcgctgtcactatcactatcatcttcggtctcagtcactttcggttttggtacaccattttcagcagtttcatcttcaattccagatggaggattagcactggcattttcttcttctggcctttcaacttcattttcatctaggtcctttgccaaatcactgtgcacatgcacgtcccatgggccgccatagagccactcttcctcctcatcccctccggtcccgccgctcagctccgacactaggcgctcgacctcgccggccgacatggccgccccgagcgcaacttaaacgcggcgatcaacagccccctccaaccccttccccagcctcgcagccccgaggcgcgagaagggcgcgaacccgccggcgaacgaacgaagaaagctcgagactccatcccaggaaggcgacggcagcgcggcaaagatgaagcctccagcgca

SEQ ID NO: 451579 - DNA, 432 bp, Homo Sapiens
acttaattgcctgctcggtggaagcccagtcttgaacaaagaaggaggcgaagtaaattcagcttttgtagatggaagggcagtttctttctctgagtttccagttcttccctgctgtaccttaaaaagattgaatctgccatcttggatctctgcacctggtgtaacttccatagtacagtcttcggccgtaattttatttgtagtagaggttactggtataacttcaagtcccattcgtatcctcttttgtttttcacagtaagctttccaggtatcttcattaaacccataattaaaataatcagaaagatcagcaccaggtttacgccatggtttatcttcaaaagaatccaaatctacatctaagagtggaactccattaatgcttcctggtgcatcaaggtctactcctttgacttttgtgcctct

SEQ ID NO: 451580 - DNA, 837 bp, Homo Sapiens
agggcccaaaagacacatccacttcacagtggtgctcaaaaagctgcccgtcactctcactccgctcaaatcgcagggagttgaggagcggacactcatagggggtgatgggcatctcctccttgaagacacagaccttgagcttggcaaagcgggcctttccgactggaccggcacgcagcccgggcgatctccacaatccgcttccaagtggtcctttgtaatagggcatgagtcccagatacgcttggcgcaccttctcggccctttcagtggctgcatgttctccagctgctccaggaggggcccgatggcatagtactgggcctctttgtacacagctcgaacacgctccctgggtgggaggtcccctgagcgcaggaaattcagcacatctccaaagtgtgtgccatctcaggtcgatgaagtaccggccctcggagtccgtggggatgtagtgccgcccactgaacatggctgccaacatggtgtcttcgtagcaccagcagtgtggacaggcgtgtagtgaagtgagcccctccgatgttaaggggaacaacctcaggaaactcctgtggcagcaggggcagcgcgtgccccgcctgcgtggccgtcggcgtggccggctccagaaagtcgtcttcggcgtcagagctggacatggcaccgtcctgacgacggctgtctggctcccgccccgtgactaccaccatccctctggctctgggcagtgggcgcggcttcgggcgggcggaggcggcggccccagggcacctccctaccgccgagcagcgcctggcatgacgcggccggctgcgggctggccggaggggggcg

SEQ ID NO: 451581 - DNA, 787 bp, Homo Sapiens
gggttttactgcctgtcgtggtgtctgccttggtctcggcgccgaggcggtcaaacacagacgtcctatggagaccttttgcagcctgctgctgctccaggatcttgcgggtgcggggtgtggtgcctttgggcatgttgatgacgtacttcccctccatctcagcagtgacccggcgccgcttggcaggaacagccaggctctcctcctcccggcgggccagggctgcagtggccttggcactctttgctgccatcttgttggacacagtgaccgagatcttggaggtgctggtgtccgggcgcctggggggtgtgctgggtggagagtcatggttcaggctgttggtgatcattcgggaggcagcactggtgccacggcgaatttcgcctgcaagggggctagggctgcagggtactgactcagtggcagctttgcacatgtcctgacggtgcaccactttggcatgcttgagaatggcgatgatgtcacccaccacggtcacgcccagctcattcattatctccttattgagatccagcagcatgctcttctgaatcctattatccacaaacatcacggcataattgacggcaggtcctggaggaatgccggcttccttaaagaactggatccactcggaagtggccatagtcaccggagaccatcgtctcactggccctgacactgctgcctggcgcctggcccaccgggcccgcgcccactcgcgccgcccgccctccctcccggcggcgccaactgtcagacactcctcccccggcccggg

SEQ ID NO: 451582 - DNA, 683 bp, Homo Sapiens
acgctgtctgcagcggttgcatgctgctgaaggagcaaatgctgctgcttccgaacgcctggctgttcgtagcttttcaaagcgagcctccatttgtttcaggacttttggggtgtatcgcaccactagcttgacgctgtactttagcagccttgagtagtttcacagctttctcatggtgttctccttccacactcactccgttcactgatagcagctggtctcctcttttgaggcctccgtgtctttcagccacccctccaggaattatgcgagagatataaatgggtgaattttgctctctttcctctcatcacattaaaaccaggccttcatcagtctttggcagttcaactactcgagggtgggagtggccttcactagctgcaaaagctgcaactgttgcctttgctgttgccctcgcacggaattcgggacagccattaacagttatcgtttcatgcatatattgatacacctctcgaatagctgtacaaaactcactctgaagcacttttgttgagggatgtgtagcattgtgcacatggtacttctccagattcctgtagatttttccagtaattcaattgctcttgcaacatctctgtaccagggtgagcggctggaccactgtcaatgtcgccatgtctgccgtgggagccgaagtgacgctcggcgttcag

SEQ ID NO: 451583 - DNA, 1037 bp, Homo Sapiens
  misc_feature (896)..(896): n is a, c, g, or t
tggaccggtccggaattttcgggatggccgggaagggtcagaccaccatccgggtactctaagtcctccctcccccttctccttcacccccaagtgtctcccacgactgccctccccgacctctagctgaccatggcatcagaggcagaaaaaacattccatcggtttgctgcgtttggagaatcatcaagcagtggcactgaaatgaacaacaagaacttctccaagctgtgcaaagactgtggcatcatggatggcaagacagtcacctccacggacgtggacatcgtgttcagcaaagtcaagtgaggagccaaaaatatggaggtgggggtgagaagaacctgcgaggtagttggccacggaagggttcacgtggtggaacatttgcagtgggcctaccaagcaccacagggtacctggcgctgtgctatcctttgtcttcaagacactcactgattgacaggacaaaagaggccaaatctgagtgaggcaagagttggaccttggaaggtaatgcattcatgctccaaagtttctggatttctgtctaactgaccagggccaagaacgcccgaaccatcacgtttcaacagttcaaagaggcagtgaaggaactgggccagaagcgcttcaaagggaagagtccagatgacgtcctggagaacatttatgggactcatggagggcaaagacccaggcaccactggcgctactaaagcaacaacagtgggtgcagtggaccgtttgacagacaccagtcatgtacaccaggtacccacaaggagcgctttgatgagagtggcaagggcaagggcattgcgggacgggaagagatgactgacaacacaggctatgtgagtggttacaagggttctggcacctacgataagaangaccaagtagagaggagcttcatctcagcctgctaacccccttgacctgcatgttttaacaccagggagcttggaaaaacaataaacatctgtgtgggcagcagccaaaatctctgtctgtgagggacaaatgagcctact

SEQ ID NO: 451584 - DNA, 785 bp, Homo Sapiens
ttggttcctattaagtgataaagtagtcataatcaggagacctttgaacaaaaattttgttttccaaggcgaaaaagtcgctggtagtattttcatcagcatgaccacttgtggaaatccttatgtgtgatctgacccagattctccaaggaagacagcataactgtcatataaagctgggaaaacatagtgttgataagaccaaagagtttggaaaactttctcaactgcaactgccaccgtggagcccatataagcatacatggcgtttatccataatgatttgtattttcagagttcttttcgatagcatggcacctgaatttatgtctgatttgacaagaatcctgtaggactgatctatatattgagccacaggataattttcttgaaaggaggaatgaccaatagcatcatttttaattcgataaactacatgcttatatgtaggtgaagattccaatggttcaataccataactgatattatctaactgcagtaatcctctgagtccagaacaggtgcgtagtgccacaactgattttggaatgtctgcagcatatccttggtaaaagcaatgaccctttgaaaatgaagaatctgcatacaatgttcctgatttgttgtataaatacaccaggaaatgtgggtgtaaaaatgactgtttttcaagcaggaagtgtatggtttcccctcaattttgatggaataagtggcgtgggcccgcggaggtcagccggcccaggcctgagaggatcagcaagagagacagcattgcgtagccg

SEQ ID NO: 451585 - DNA, 760 bp, Homo Sapiens
tctttatagccacaatcacactgctctgtaggttccaaaattccattgccacaagttgaagattttcggtaagtcatttttgaaactgttttatcctgaaaacatttaagttcaggctgcagaactatccgtttaaatccatccatgctgcaactgctaaaaaacttcataccatgggatcatatcgcatcaggattcattatgcatgtagttcctggacagtaacaattgtagatatcatcatatgtcaatcccagattaattccaagcaactgtgccataacaactgaaaaggcctctgcagtgattttcttggatacagagcaattcctgttgcaaactttggatcgcatgccattccgtgatatgttgctcccacataagtagaatggttcctataaattaataagtatgtcatatcatgagacctttgaaacaaaaatttttgtttccaaggcaaaaatcgctgtagtatttcatcagcatgaccacttgttgaaatcttattttgatctgaccagatctccaaggaaggcagcataactgtcatattaagctgggaaaacatctgagtccagaacaggtgcgtagtgccacaactgattttggaatgtctgcagcatatccttggtaaaagcaatgacctgtttttcaagcaggaagtgtatggtttcccctcaattttgatggaataagtggcgtgggcccgcggaggtcagccggcccaggcctgagaggatcggcaagagagacagcattg

SEQ ID NO: 451586 - DNA, 580 bp, Homo Sapiens
gagaaagcaggttggggaagggcggagggatgtcgcaaagcagccccttgggggggcatggcactgaggccttggcgaagtccaagtcaggcaccgtgggagtagcacactgcgaagaacagctgtgatggtcgaagtcacatttggcgtcttggcccaagtcgtcaaagatagggtacttcatttcctcgtagacggcctcgctctggtcatcgtcctccttcctgaagtctctgagaatgttccccaccatctcgatgtacacgggctcctcttcctcggggtctcccgcggggctgcccatctgggacaaggaggagtcccgcggcagcgacgtcctccggggcccatgctttttgatgtacgtttcatcgaaagatgtgctcagctgagtgttcggatttcgcttcggtttgggaggaggaatcttcttggaatattcatcgctgtggggtcttggtttagctgacgcttcagtcctctcaggggttttcccgctcttactggctgcagtgctgctgactgtctctgatgaggtgctcagcttggtgctggggtccctcttgggtttgggtggtgg

SEQ ID NO: 451587 - DNA, 811 bp, Homo Sapiens
ctttctggtggtgctttccagcttctggagttgcttggctgtctcgtcaaacctgcagccttgtctctgtgtagagggcctctgcgcatttttgttcagcacgggcgttcttcccattccctttgctgctgcaaagaccattctctgttttgttcctcttggaatttcttcctctcatggaagtttaaatcctctcccatgaatttctgcattcctgatatcgtattccgaacatcattatctgactgccgggctggaagatctttcttaagggctagggggtcggacagatcaaattcacggcgagtttctggcttctgaaagctctgttggaagtcattgatagccctacagagatttttcctatccctctttttccggttttccaatatgcacatgattttgtcattttgcctcatttcagcagcaaaggtttcatgtctagctttttcagtagcttcttttatcttctggtcatgaacttgaacatcccaggcttcagtgtctcccccaattatcctgtttctggcgttgaagacccgcttctgcctgcacagctccgcgtgcctcctctttgccaggttggcgtcctgccgcaagtccctgggcagcgccaccgccatggtctgggaacccatggaaagcctaaggggtttttagaacacgcaggatcaggagaacaggcgacgaaaataaggaagctgtagcgcaggcaaggtcggctccttcggtcgggcaggggaaagacaagcctttagcgcagttttccgtcgggctcccattgacgccgcagaggtacagacgctcccgc

SEQ ID NO: 451588 - DNA, 1060 bp, Homo Sapiens
ccaaggaaggggcccccttcgtgggcctttccgggttggccccgtgggggcctgacagttgttttgtgccggccctgcagagttccgcggggggccaagtttccggggccccgcatgttggcctcgagggttttggttccgcccccagcagtcccttttagctgggcccttcttgccgcccgttgcagactgtggccaaggcctttggggtccggaaagcaagacctgtgttgctgcccgcggggctccttctggggactgccgtgcggcgccgcacttcttcttcaagcacttccaggtttccggtgcagttcctggccctgaatttccagcacagacttctcggcctgcagggggctgctgtgctcctgcggcccgctggctctgcagcagcagctcctgggcacggccctgcaggctccccagctgcccctccaggtgctgcagctgcccctgcaaagctgccttctctgccaccagcatcgcattactgcgctccacctcaataagccgcacattctgggtctccaccagctgaggctccgcacgctttttgggccccagccccgcggggccctggcgcagctggaacagctcctcttccagctgcagggccctggtcttgagctccatcagcgcctcctccttgctggtcgccgccgcctgcagctcagcttccagccgctgctccaagccctggtacctctggtgctggctttccttttctcgcagaaattcctggcgctcgagagccgcctgctccagctcacgctgcaaatgctccagccgggcccccaactccttgccccgcaccacagctttctccagctcctctcatgagcccacggttcttcatgtgcgcagtgaaatggtggatgcgcccggtgggcatagccaccccagccatgtgacagcgagacagctagagaggctctagcagaggtgggtcagggtgagagaccttggctacagggtaaacggccacggaggtctggagcccaggaagtcaggagactgacagtgggggctgagggcgcagggggcgccaggatgctgccag

SEQ ID NO: 451589 - DNA, 933 bp, Homo Sapiens
catttattgctcttaggttggttggtcctacaaatcttgatcaatgtttaatgcaatatcagaaaacattggttcatcaagttcttccactctgctcaagttaggtgctccattccgatcgctgatttcagctagtgttttgcctgagtctagtgttgcttcctctgaatgtagaatatcttcattcctaactagatttttccatattcattctcatctccttgcctaattgttcttgagctctctgtagttcttgtattctctgcctctccttttcttgcatttccaactctagctgcaatgccagctgttgctgctgaagtaagagctcctctgctttgagcctctccatcatttcctgctccatcagagctaattctctttcacgctccagcttggccatttccttttgtctcagttgttccatggtcacattttccttatacttgtaaatccacaatgctaaatattctatcggatccactgggcgaactcttgccacttctgcaagaccttgagttaaacaggccccaaggtgcttttgaagatatcttgactccatttctaactcccacacctgggagacagctagccagccagccagccaactgggcgggggcacccgggcaggggtgccagatacagtattgtatctggcaacctcccggggcgctcagtgtggttttcccacccgggagtctggaagggtctcccgcagcccgcaggagacgcagcgctccccgctcagggggagcaggaggacagctggccgctttcgggagccccaggcgcgaagcggcctctctccgcctcaggtgagtcctgctcgacgcccaaggcccaacggtcagaaccgcctctgcccgccggacccagcgaagctaggggaacaaatcccaaaaacagttcgggcctttccggtgcgctcacccc

SEQ ID NO: 451590 - DNA, 778 bp, Homo Sapiens
ttatttccttgactgaaatgacagaaagcactctggaacatagtaccaaacatgttttggcatcttcatggatgtcaccaattcacgatcaaccattactcttactctcgaagggtagagtactattgttaagacaatgttgatagggtttttttctctttctaagattccatattgcagtagtattttgaagatattagactgtcttgtctgagctacataaaagagaggtgtgatgccacttaatgggcttggacagtatactggtgtgaaagttctccatatcagtgccaggttacaacttctgtcttgaacatagtcttttgtcttcttgagaagcaattccacaaagtcaggattaccttttctggcaaaaacccagtacagaattgtattcacacatatttcagtgaagtcgaggttaaaacttacttcaaaacggtatcctgatttttccacaaatgcaatgtaatctgtgagtagtgcgtcaaaaccatccaagtccacatacctcagaatttttgccagtgatctgtaaatccttggttcgtaacagtgatatccccactgacccaaaaactgtagggagggtcttttaacaattttgtcaaggagattgcagaatatattgcttcttggacaagaagtcttaccacataatttagtagatttactcattgttacttatagcagcactgtagaaataaaatcagaggtaagcatactgtaatcctccagttacatattttgacaatgtggcaggctttactccacaaac

SEQ ID NO: 451591 - DNA, 553 bp, Homo Sapiens
acctttgccctggaagatttatcagcatttggacatgagctgggtcctctaacactgagagaaggtcatatctggtaagtttattcgtcagctcaaactctggaaggagggccaccaaattattcccttttattttgacttctggtatagcatagttcctgagaaacttctcgacgtgttccaagagagaaaaaatacctccccccaagctaagctaaaatgttcccttgaaatgcctaaagaagtctggggctgtattgtcctatgacacccatcataaattaaaaagtcataatccccacagtgatttcagggctctcaaaggtgttttgactttcatggccttcctatcatgatgtcctcttgaccttctgcttttcccctttgatctttgtttcttgggaaagaacttcacttctgctggagatggaggtggttcccgaggtatagtgaaagtggtcttaaccccacttcagtccttttgattgctgtttcaagactctgaatgtactagagtctctcctttttcctcaggtgagaattttgttaattt

SEQ ID NO: 451592 - DNA, 292 bp, Homo Sapiens
atattaatgggaaagtggctgtttctaccaagaaaatggtttttgaagtcttgaatccattcagtaggtgtacgtttatatgaaggcaaacgtttccaggagccatcttcacatttcttcataaactggtcaaagagcagtcttaggtccttgttccagctggggttggggacagaacagtccttaagaatgacttcctcagaagaaaatgacctctaaaagacagaagaaaaagaaaagtaagtaatgggaggtgcattctatttcataacatattctcccaatttctaag

SEQ ID NO: 451593 - DNA, 1121 bp, Homo Sapiens
ttcagaagacaaaagcaggtttattagggccctttggccaggaatgcctaagatatgagttaaggccagggccgtgagaaaaggtgactctcctgaggccaaacctttgcatctcagaagccctggctggagaccttaggagtcagttctgggagggacctggggatacagaggggtctctcctgaccctgggatctttgggcttttgccaggattggggaaatgatctggggggcagggagccttgaatccacagccttcatttcaataacgaccatttaatttgttccttggcagactgaagaacctgggccacactctgttccagtcaagccgccatcatctgcccctaaaattcaccttctggatcacttgctgggggtcactctccaagaatcaccaccgccatccacaatctcgtccagcaaccaagaaggctccgtccatgttctccagcaaccagcgcttctccacgttcttccttaacatgtggttcagagactcaaacaggcaggtgagaacagacatgagcatcagctcattctcgtaggatgagcccaccacgtataggaagaggtcaatgctgttcttgtagacgatggtcatacccccaaaaatgcaatctcactctcagtccggctggtcttgttgaagacatttttctcgaaaaccatctgctccttcatggaggggaatgtgtcatcataatactataaataatgggctcttctaagaagacacagttgagttgacacctctttgtcctatagctgggaggaacgcattgcaaacgccaacccaatgattccctaaatggggtcttcgcatcagctgcgttaaaatcaccccagcaggcaggttatccggccgccactccagggtcattaaatcagactctccagtgggacctcggaattcgtagcttagcaagctccccaagtgatgctgggagtaaactaacgtttgagagtcacaaacatgttttggcaatataaccagatgggactggagaaattaaaaaatgagaaacatccctaaaaaagcaagactaagctgcgtgggaggccaaacgaggggggtcctttgggctgtttctaccatgacaaaatcgccattacccc

SEQ ID NO: 451594 - DNA, 1416 bp, Homo Sapiens
  misc_feature (279)..(288): n is a, c, g, or t
  misc_feature (599)..(611): n is a, c, g, or t
gtgataatatcaacccgtgtttttaggtgcttcattgtgcataggaccctattaatcttgggaatagtgcttttcattaccgaaagtcccgattgaccaccgtcaaaaggaatgaaccctttgcataccccaccaggaaatttgttggtaggtaccacgctcaccctggacatgaattagctctgacacatcatgaacccaattaggtccataccagcttatctaaagagatattaatactttcttcaattaaacatgcttggaggaatagatgatagnnnnnnnnnntcatgcttcctaaaatgctgtatatgagaaagtaacttggcttttaaagaaaaatatctctttaaaaacatggtttaataaattacattcccattgactcaaccttttggttgactgcactgaaattgtgtaattactatgtttttgctcccagaaatacttcagtttgctcaagaaaatacactctcatggaaagtttttccaagttgatgtcctccacatcttcaagtcacattaaggctgaacaagcgtgcacatattcccccaattatcaccaccacacgtttattttcccaacgtatttttccctnnnnnnnnnnnnntccacgcaaatagttgtctctaagtcttgttcccaatagctcagtggtttcataacaagtaaaaatggcgtaaatatgtaaaaaatatatatatgtgtatatatttcaaactgataggcactgagcacacagggcctctcttcccatgtatgtattggttgtttggtttgggtagttatcaaatcagaaaaatgaattatctggtgatcagaattcagagtaaaatactcataaatttaatgttataaataatctggtgtaccaagaagcctactttaggccaccataatattcagaatcttaacatactaatttaaaaattacatgaaaaattgcaagcaaattattgcttacagtagaataaagtcacaattttatatcttctttatagacagatacattttatataatttaaagcaatgaccctacagctgtattcttgtacttctgctgttttaagaggtaaagaggaagaaaatggttctgtttgtccccagcatgagtgtgatgccagcttctagagggaggacggtgtacggactcaaggaacgctctcatggagaagctctggccagacctggcacgtacagcacgatggctgttactgcaaccagggcagccaacatgggcatccagggccagggtttctttctctaccacaatggaccgaaacaccaaaacaggaaagccaggaataggccgatgaatacggctgggacgggttgtaatatggaaggattatttcctttctctcggagcagcttcaggttgtttttacactgtttgagctcatctgtgattgccc

SEQ ID NO: 451595 - DNA, 940 bp, Homo Sapiens
tcaccttgtccattactctcgggggcctcttcgtatcgctatagtcaatgttttcttcaatggttttgtctgccggatttccctcttctattttggcctgagcttcccgatccagtggttcggctgtgtagagacgaagcctctcttggctctctcaaggccttttccctttgctgctccatcagcacctgagaaaaggtctcaaggcttccgctgagcagggcttccgccaagggaggtttgcgttccttgagcagggacagatcgtggggtttggagagcagcatgctgcggatcagggcggggctgcccagaccttgcaggccggccaccttctctcctgacgccaagccctgtgaccgctgggcagcgggtgtgcgctgctgctgctgtccagggtgctgtggacgggagctggacgtcccaggcaccgcaatgccactgaagtctacacgaggctggttcggggcacgccctggagcccgaggtcccacattgtccttctgcagtaaaaccacgatatcgccatctttgaggccgtaggagcccagggaacagtggtcctcgatgaggagtcgctccatgtggatgatctggatctcttcgacggggactctggactccgcttcgcagaggaccttgaagtttcggagctcaaagtcggggctgacctggagagagaaggtgacctcggagaggtccctccgcacgcagtacacggtgatcagcatggcgggggcccgggcgggccgggctagcagagggcatgggcggctcactggcgggctggggcgggcctgcgtcgttggtgccgctgctcctcaggacttggtaggtagggaccgtccgggctcattcacctctcagagaggcgcgacactcatctgtctgggggctgtctcccagcctcagtgcctgctgtgtggccaggtggagcctg

SEQ ID NO: 451596 - DNA, 743 bp, Homo Sapiens
ggaagaactgcctccgctgctggccagaactgtctgccttgatagattttgacctgcagatcttctgggtgaccccaggtgaacccacagcacctgtctcaaagtattcagctccttgttcctagaggataataattttctcaaagcccggtacctagatcgtgaccatttggaagaagaaacagccaaattcttcactcaagtacaccaagccattaaaacgttacgagatgataaaacagtacttctggaagagatctacacgcacaagaatctctttactgagaggctgaataagatatctgatgggctgaaggagaaggacatacagtccacactgaaggtcaccagctgtgctgactgcaggactcacttcctctcctgcaatgaccccactttctgcccagccaggaaccggcggacctccctgtgggctgtgagtctcagcagtgctctactcctggccatagctggagatgtttcttttactggcaaaggaagaaggaggcagtaaaggaacagggcagcccgcatgtcttccagaagtgaacagaggccgcagctaccaccgtcacaaagttcactcatctctgggtcccggtgaccccatccccccataccctccatcctgggtcctggggccccaaagctctgaggcctaggagactgcgctgtctcgtggtttgcctactcctacacctttgtaaagagtctcttcattaaaacccctctttcatagccct

SEQ ID NO: 451597 - DNA, 883 bp, Homo Sapiens
ttcattcctctcctttctcactgctcttttctttcctaatttcggcaaagacggtttttttgtcaaggcccattgcaataatgcacttgtagcaaggagatgatctctcaacacacacaacccaagtagcctcgtttgcctccaagcctggaacctttccgatgcttgtattcacaacaggagcttaacctgttcacctgcatcccattcaggaaaaaggtgagactgaaggggaaaccatgatgccttttggaaataaactgaaaggtctctttttcaagtagtttgcctttgtagacacaaaggttttccccaccacagtgctgctgataaactttaatttcatcccggaagtcaggattatcagaagataggtgcacatttttccccaaatagatcattgtaatagctgcattactatgtaaggatgttttatgaatccttcttgaatcctttgtcaaaagaggttctaagccatttggagcagtggttggacgaaatcttctccttctccatgtttcagatctattttctcttgtgattttcccagttgggggaagtggaggaggaataggcatcatgtaactgttaatgtttggaagttgatatgaattcattctctgtgaattgcctatggagttcctgaacttcatcactgccttcttgcccttggcaagcatggaaagcacccatccaagtactatctaggggagaggaaatcctactcattggactttgagtatttctagtcctaatggcaagttactgctggaggatacagaggattttagccaaagacctttgagttttctggtacctttggctagcccattcccaagatgagatgggtgtatcaggatcccaaattccggaccgtacagcc

SEQ ID NO: 451598 - DNA, 1689 bp, Homo Sapiens
  misc_feature (1249)..(1249): n is a, c, g, or t
  misc_feature (1333)..(1394): n is a, c, g, or t
attttccagtagacgaactcttgcaccgtctcaatttttttgtagaagtatgcagaaggtacttgtggaaaatgactgtggacgcttcagaaaatgtacaatgctgcgtcatattcagtcactttccatttatctttaataatctgtcgaaaattaaactactacatacagacacacttttaaaaatagagagtaaaaaacataaagcttatcttaggtcggcagcaattgaggaagaaagagagtctgaattcgctttgaggcccacgtttgatctaacagtcagaaggaatcacttgattgaggatgttttgaatcagctaagtcaatttgagaatgaagacctgaggaaagagttatgggtttcatttagtggagaaattgggtatgacctcggaggagtcaagaaagagttcttctactgtctgtttgcagagatgatccagccggaatatgggatgttcatgtatcctgaaggggcttcctgcatgtggtttcctgtcaagcctaaatttgagaagaaaagatacttcttttttggggttctatgtggactttccctgttcaattgcaatgttgccaacctccctttcccactggcactgtttaagaaactttggaccaaatgccatcattggaagacttgaaagaactcagtcctgatttgggaaagaatttgcaaacacttctggatgatgaaggtgataactttgaggaagtattttacatccattttaatgtgcactgggacagaaacgacacaaacttaattcctaatggaagtagcataactgtcaaccagactaacaaagagagactatgtttctaagtatatcaattacattttcaacgactctgtaaaggcggtttatgaagaatttcggagaggattttataaaatgtgcgacgaagacattatcaaattattccaccccgaagaactgaaggatgtgattgttggaaatacagattatgattggaaaacatttgaaaagaatgcacgttatgaaccaggatataacagttcacatcccaccatagtgatgttttggaaggctttccacaaattgactctggaagaaaagaaaaaattccttgtatttcttacaggaactgacagactacaaatgaaagatttaaataatatgaaaataacattttgctgtcctgaaagttggaatgaaagagaccctataagagcactgacatgtttcagtgtcctcttcctccctaaatattctacaatggnaaacagttgaagaagcgcttcaagaagccatcaacaacaacagaggatttggctgaccaacttgcttgtccaacagccttattnnnnnnnnnnnnnnnnnnnnnnnnnnnnnnnnnnnnnnnnnnnnnnnnnnnnnnnnnnnnnnaggcttttagcagccctgaaaccatgggttttcatttctgtctctagcggataacaggaaagaggggatgaaaaagaaggttttacgggccggttagaacccccgaacgtatttctctccctttggaaacccccaaggcctaaattaacatttccttacctccttttgggaaaaaattttttcaaaaattaaagtacccgaagccccccgtggggtggccgctaaccccacgtccttggtgggcgggccctctgacctcccgagagaaagtttttatcgaacaacattgcgttgg

SEQ ID NO: 451599 - DNA, 1063 bp, Homo Sapiens
gtttgtgaatgaagaagacctggagaccttaggagcagcagcgccactcttgcccatgatcgaggagctcaaacccccctctgccagtgtagtccagacagcaaacaagacggattctccttccaggaaaagagataaacgaagccgacatcttggtgctgacggcgtctacttggattgacctcacagacatggatcctggaagtggcggccctgtattttcccaaaaacggagatccttccggactcgcaaaacatgcaagcgacaacggagcccggtcagccaaccagtccccgcagtcggtgggcagctcgggcgtggacagctggcgtggagagcacctcggacgggctgagggacctcccttccatcgccatctccctctgcgggggcctcagcgaccaccgggagatcacgaaagatgcattcctggagcaagctgtgtcatatcaacagtttgtggacaaccccgctattatcgatgacccctatctcgtggtcaagattgggagtaaatattataactggacaacagtagcacccctcctcctggcaatgcaggccttccagaaacctttgccaaaggccactgtggaatctatcatgagggataaaatgcccaaaaagggaggaagatggtggttttcatggaggggaagaaacaccacatatcaaggaggaaagtaggccagagcagtgcttggctggcatggcccatagcaccggagagcaatcgccgcagctcagcttggccaccagggtacagcatgaatcatcctccagtgatgaggagcgcgcaggtgccaagccatcagacgcaggccacctccctcttctgcctaatgtcagctacaagaagactctcggctgaacttccgagcagcttaaaagcttgaagttgaagatggccccacgacgtggttttcagttgtcaccacggcagtaccaaggcacgtgccgctgttgaggggcccatctatctggggacctggggatgataagtcctcattctgattttgatgggcacattcccagatcgatatctgggcacattttggcccc

SEQ ID NO: 451600 - DNA, 1342 bp, Homo Sapiens
  misc_feature (1229)..(1265): n is a, c, g, or t
  misc_feature (1274)..(1274): n is a, c, g, or t
  misc_feature (1279)..(1279): n is a, c, g, or t
  misc_feature (1308)..(1308): n is a, c, g, or t
  misc_feature (1314)..(1314): n is a, c, g, or t
  misc_feature (1317)..(1317): n is a, c, g, or t
tccccacaacccccccattagggattgtgcggaaatgttggagggggatatttcacaactgccccatatcctttattgccaggggcattcgttccccatctttaattccagcatttcccaatgcttttaggttggcttgcgggactctgaatgctggcccaaattatctttccattggcattcatggacatggcaggttccttccgacccagctttaccaatgatgctcctttcatcataggccccaaagcggacattgtttgaccctcttagactggccacgcaccataccctttccattccatatttcagtgtgctctcaagccggtaggtgcttgaatgccaaatacgtactgttccatcttctgaacctgtgataatgattggcaactcaggatgaaagctggcacaagacacattttgggcatgtccttccagtgtctgcacacatgttttattctgataatcccatattttaacaagacggtcatctgcacctgaaatgaggtatggcttgtccccaccacctgtagtaatcaatgcaattcacgcctttctcatgtccttccaaagtgaagtttggtgacgaagagcccaactgccacaccttgatagtcctgtccaaagaggcactggcaaactgattgttatctttggggttgatcacaatctgcataacataatgggtgtgtccttcaaacacttgtgagcaagaccattttttatcccagtcccagagcttaataagcatgtcatcactgctagttagaatgaaaggctgggttggatgaacagcaatacagcgaatgtagtctgagtgtgcttcaaacatatgaactctctccagagtattgtaattgaacactctaatctgcatgtcatccgctcctgtcacaacccaattcttccttgcaacaaactttgcagctcgaacaggaagatcacatacttcaaatgtcttcaccagtgtctgtgtttcatgattccaaacacacacactgccattgtaaagacttgccaacatccatggctctgtaggatgcagatccacactcttaactcgatcagatctagcagttagctttcttttgatatcaagtcgcagaggcatggctgcgtcggtccaatcccgggaaccctcgtttgttaccggctactcaggccttgagataaacccaccgatccactccgctctcgacgaattcgagctcggccgatttggcctgatnnnnnnnnnnnnnnnnnnnnnnnnnnnnnnnnnnnnncgccgccancccgnccggggttgaacactcccgcaagtgggcncccctnatnaattgaggtgctagtacatttcccc

SEQ ID NO: 451601 - DNA, 810 bp, Homo Sapiens
ttggttgaaagcgccaggctgtcctgaatgctcattttcctggcttgctttgggctttgaaggcatgcttcggctcccgatctgctgataggagcgggccagcatcactcagggaacttccattccacatggccaggagcgagccagatgccttccgaccttccagccctccaagagagtagacattgtcatgcgatttatgccttgagctatatttggaatagggaggcttctctgagagcctcaaggccctttcactgtcccggccagtataatgatcaaagtctgctcttccaagtggatatccactgagggagggatgtagtgttgagtaaaggagtttggaggtttcataggaatatttttgtcagttccatcataagagaactgcttgcttccctggattttggctaaggaggggctgcttctgacactggttcccaaaggagaagggcttctctttgcaggcacaggttgtgagacgggttaaataggagccagaatagtctccattggctttaaatctcagactggaagagtatttctttgggctgaggctctccatcatgttttgggaatcgttctcaacagaatgcaccacagagtcttcctctaagctaccattttgtaaatctagctccttttgtatgtagctatgctcttccataatcttgctggaatcgtctcatctttcctccaaaccgccgctctacgctggcgccgccgccctagcgcctagcctttgcccccgcccaccctgtctccctccgtgagcccgccggcccctcctgactcgcggtgagcagtcag

SEQ ID NO: 451602 - DNA, 1226 bp, Homo Sapiens
aaaagggggaactggggccttggtgcccagggtttgttcccctttggggcctgggccttccttcaacaagaagcccccaagttcccccggggaccatttcacttcccctggggcttttgggaacaccctccagagaaatcttttttaccctccctttcccatgtccggggggggaaggaacccaggaatggcccaggtgtatgactggctttgaaggcgtagtttcccgtttatttaccccatgtggatccctggttttcccaagcatggcttggtggttttgatttctggctgtgcttataaaatcacttttcgtggggcaagggagagagggggaaaatgggggtgtggactgaggaaatccccccttgcttgtcttcttttgaaacccgggcatctctgaagtcctgcgtgtcaaggggatcaagagatgactttctcagaggttctaggtgatgctgagaccttggtgtctctaaactctgggcatgtggacaggaggggcttgcggccgtgtctctgacctgtgtgatgtgcaggagggtctcattgactcagcgcctgcgcgttgtgcctggctgtgctctctgtttatgccccctctattctcctctctcccccaggggattttcatctcaactacagagtgtcctcacccaggcctgccttccggccagtatgggcttgtacatcaggcaccttcctgcatgtgtggcctccggcctgccctcctctagccacattcaagtcctttctcaccagtttaaaaattgtgaaagtgaactgccacctatttcagaggagacatgactgccagaaacgaggtcttggtgcggaaggtctttggagtgggagggctctcaggtgcaggtggcaggtgttctgcaccttgctaggccaaggagcccgcagtcagagaggctgggaagtgggagtcaggggcagggggccttccagccatcttcccccgtaccccccagctgagaacagatggaaacgtgaagacgggtagctggggcggccagggaacccaagtccgctggccgaagccaaagcccggcaccacccccaattcttgctggtggaaagcaccgtgaaatcaaccagcggcatctctgaacgcgccgcacagcccgcgagggagcctgggcaaggacggagcgggcctgcaccggcggttgggcgggctccgggggacggggtccacctgggaccgcggcgcgccc

SEQ ID NO: 451603 - DNA, 1019 bp, Homo Sapiens
  misc_feature (128)..(128): n is a, c, g, or t
cgatctcgtagggggttttttccagttcattcacagattttgttgttgccacagccaaagtcgcggacgttctgcccgtcaccctcattttttggagagccagcagtcacactggaagtgaaagtctnggtcgcgggagtgtcccttcacatcgacataggtcagatgccagccaggaaatatccctttgttgtcgtgccagaccctcagcttgcagaggtggcccaagctcagcatgtcagggaagttgaatgtgtccgtgttgttccgctcaaacttgtcccagtttgccgactgcttcagggccagtgtcccactatccccgttctccccgaagatgatgatgaacacgttggcatcagtgcctgctcccaggatgtcgctggtcttaactgcgacggtgtaggaggtccactccatcatttcttcctcatcgataacggcacacatttcacacaccagggtcttcttgcccttccgctgggacagccagtctccatagtagaacatggtcaggtctccagtgttcatgttcttcagtaggatcctctccaggaaccactccggccgactgcccaggccatcaatccggatccgcatcttggtgaatggagcaatgtctaggatctccatgatgaaggtgtcgttctgctcccgctcaaacctggctttctttttgtccagctgcatctcctctgtgctcccgttgatgccgtagagggtcatgaagatgttggagtcagtgcccccgccaaccacatcccctgtccacaccgtcatttcatagagaacagagggagcactgcctcaatccactggagaagtgagacaatcccctagttccatgatgttcacttgagattggggttttgccatttagcctgaggtgtgctccaaagagaatgtctgccctctgtctccactggagggtgaggcgcagcctgctcttcctggtgtgccttcaccaagcccccacctcggttcttcctctgtgaggcagatcccgagaattccggacc

SEQ ID NO: 451604 - DNA, 447 bp, Homo Sapiens
  misc_feature (84)..(84): n is a, c, g, or t
  misc_feature (328)..(328): n is a, c, g, or t
  misc_feature (342)..(342): n is a, c, g, or t
  misc_feature (359)..(359): n is a, c, g, or t
ccactggaaatattgttcaaatagcccacagttcccctacacttttctcccaaaaaacaaaagaaaatgctgctaggagttggnaaaagatgttttgttcccttagatcacaggttgtggaagatcatctgggctgcttcaattatattttaagtggttggatgttgtttatcacctggatgggctataacgtatggaaccaagggcctgggagataacgttcgctcttgaattaggcttttggaccataataaaaggaaggcttcgggggcgcttttgggaacggcccttgggcccctttccaaaagggcccaagccctttttcccnggttccaacctcancctgagatgccatccanagtactgcttcagcatctcccgcagcttcccattgatatctagcagctgggctcgtctatgttggaggctcagttgctccagtttcac

SEQ ID NO: 451605 - DNA, 1029 bp, Homo Sapiens
tcccagggagttgcccctgggggttccttcaggggccccggttcgaggggtccatttttcctggtagggtagatgggtattcatagccaggccccaccatgggaggacaaggttgcaggggcccagtaaatagggcttcagccttcgggcagggttcccctgccccagggtaatgcccaggtttcaacacccacgggcttcccttgggggcaggtcccactttgagaaacccctgctatgaaggaaagaagcttggccaggtgtgagcaggtaagaagctcctcaaatctccagggaagaccctgggtccagtcagcatcctcaaggcccaggcccaggggcacagcctcctgaggccatagttcagtggggacaaagtgggggtccagacctgcatcttccaacccttctggggctgctgccagggtccctggcccccatgcctcagagcccccctgcacaggctgtcctgggctctgcccccagctcagctccatccctgaggacccctcctgctctgactctgcctcagtgtgctccatcagctcagggtcccagttgtcttcttcccagtcctctgactccagcaagtctttaaagtctagaaaggcagccttgaagcaggtgaagcaaatgcttagctgatctccatgttgaagctgatacatccaggaggcgtagaggtaggacatgccctcttcctcataccgcatgctgaccggagggcacatggccaggctgcctgcctactgccggggtggacagcaagagctgggccttcagaggatcttggacggtctggccacaggtgctgaggccagtaggatgctgggcggcagggatgaaggggacaaggagcaggaggagaaaggggtttcctatccagggatttggggtggggtggatgacctgggtcccagctcagtggggacctgcagagggtggaagcttgaacttctggaaatgtcttcagcttctgcagttgctgtggtctcaggagagcatcctgggtctctgatccaaggaatt

SEQ ID NO: 451606 - DNA, 1074 bp, Homo Sapiens
  misc_feature (48)..(48): n is a, c, g, or t
  misc_feature (97)..(97): n is a, c, g, or t
  misc_feature (253)..(253): n is a, c, g, or t
ccatcgggagtctgagccccctttttccctttccgtggcatgtcattncaggtccattttcactcaatcccggccccagggatccggacccgaatcnagtgtttccatttgcctctgtagtggacatcctgaggcccagtcacagagtaagcgtgccctttcaccagcatcttgtcagtcatggattccagttcactatcactggtgacttcaatggagcaacccatgagggaggatcgctccacggccttcntaaggagcctgagcaggttctgagggggcctctggagttggaagctctgggccacgcctcctgtgaagtccctcaaggccctccatggtactgccccctgacaatgcttcataggacccactcagcttggcatacgccttctccagcagggcactccagaactcactgcgttcggttgagtgcacaaacaccagcttgtcattcttttgtgggcagccggtcatctaccaccacgttcacccactgtccaaactgccaaatctgaaaatggaagatgccagcatagtttttcttgaagctctgtcctctgggcaccacgcggtatagcagtttggggcaggtggtaagggagccgatggcagccagcagccagcagtccccgaggatcccctggcagatgtctgttggagaaatcccatccatgatgaatagagggttgtttatgatatccttgggccgctgccaggagatgttctgcacatttttggagttggggcccaggtccttgaagcccagtgagctgggttcagcagggaataaggggtcctcgaagagctccccctttcttagacaggctgctcgcagctcctcaaagctctggttaccaaagttctgggcgttgtcgtgctggcccacgcccttggccttgagccggctgttgtttatgtgagccaccattcccgtatcagtaaaagtgggctccgcacatgagccccgaggcttatcctcctgtgatccatccaggctctctgctgactccggaagactcggccctggggagtacagcatgctggtgatcccgagaattccggaccggtcca

SEQ ID NO: 451607 - DNA, 740 bp, Homo Sapiens
  misc_feature (21)..(21): n is a, c, g, or t
gtaagaacactctcgtgagtnctaacggtcttccggatgaaggctatttgaagtcgccataacctggtcagaagtgtgcctgtcggcggggagagaggcaatatcaaggttttaaatctcggagaaatggctttcgtttgcttggctatcggatgcttatatacctttctgataagcacaacatttggctgtacttcatcttcagacaccgagataaaagttaaccctcctcaggattttgagatagtggatcccggatacttaggttatctctatttgcaatggcaacccccactgtctctggatcattttaaggaatgcacagtggaatatgaactaaaataccgaaacattggtagtgaaacatgggaaggaccatcattactaagaatctacattacaaagatgggtttgatcttaacaagggcattgaagcgaagatacacacgcttttaccatggcaatgcacaaatggatcagaagttcaaagttcctgggcagaaactacttattggatatcaccacaaggaattccagaaactaaagttcaggatatggattgcgtatattacaattggcaatatttactctgttcttggaaacctggcataggtgtacttcttgataccaattacaacttgtttttactggtatgagggcttggatcatgcattacagtgtgttgattacatcaaggctgatggacaaaatataggatgcagattttccctatttggagg

SEQ ID NO: 451608 - DNA, 1301 bp, Homo Sapiens
  misc_feature (1207)..(1220): n is a, c, g, or t
ggatttaaaatcccggaatggatattccattcggccatggcctttaaatccccccccagatctggctttctcccattgggtcccatcttttttggaccaatttatttttccataaggctttacttttacttaggttgggttttcccgtttccggggggtaaagaaaattcttttctttgcctggaaagctccagcattttttcttccattttattttcagacttttccagtttctcccggtaggacttcaggacattcatttatatggcccaggtggtcttttctatatttgagaaatgggttttctgtccattttttattattctcaactttttggtacagattacttgaaagtgaatgaaatttgaattccaaaaggttcatttcgtggcgataatccccctggcccatctttaaattcgaggtttgctcagaactggcagtttctatctttcctaagagctgcatcaccttcatgtccaagttcttggaaagagtttccagggcgggcacgaattcttgaatggctttctcaatttgccggtgctcttgcctgaataagtgaatgtctccagaaagcttcacaatgcttgaatcacatctggctactcttcctcgaagatctccaactccttgtaggtgtttgatgtttatctcgtgtactgcaaagttagttcctgtggccgcctgatctcgagctcttatttggtcttctaaaatctcaatattttggctgagttttttgacgatgctggtgatggtctggatgtggctttccagtaacttcctggcgagcgattcctcttttcgaaagccatgggtcccctgcaggcaagcagagatgtcctccttgatgcggaaggcttgttcaagaaggaaagctatggtacgcgcctggttgttcagtctgtcttctagctgacctctctgggtgtttggaatgatggggagaaaagcatgactcttgtcaacatattcaactagatctgtagaattcttggttgacattttggctggagataatcttactttcttttcttggttattgtctgagccaggaagggggccatcaggttcaactggctgttcctctgcagtcgcagttggagaggcacttttgtttacatttgtatctgaactcatgatgcttgcttttccagctttattttttgtagatttgatatttttgaaaaacaatctctgtgannnnnnnnnnnnnnctgaggaagccatgtacccaggaattgtaattgcatcctaactaaggtcttcctgtttctgggcctcttccgcagggtgac

SEQ ID NO: 451609 - DNA, 364 bp, Homo Sapiens
tgctaggtgtcactactctcagagcacataggctaagaggcttcctcagtaattttcatcaggccttctccccatccatttccaatgcttagccagttatgaaaattatatgaaaatcctgaacaaatctaatgcagttgtgggagtctagtagtgatggatcacatggcaagttcttggaccttatcatcaaaacagtgctgggaatttctgagctctcactgttgatttctattttattggctggcacggctgtcagtaatctctccttcccgccttctagcctagcgcgtttcgtggaccccttggtttctgcgacaagccgcttacgtttgcctgagccgtgttgccggggaccagcgac

SEQ ID NO: 451610 - DNA, 1124 bp, Homo Sapiens
ggtccggaattttcgagatagctcggcgccccaaacgagttgcgtcgatgcctgaggatttaatgggagaaatcccaaaggagtgccgcttcctgggctagagacaagcaccagcctgcagtggagaacgcaggaccccgctgcccagaaggagcagccacggcctgcggaggactggcccagcaaggtcccaggtcttccctctcctcagcgcctaagagagaggcccagtgccgggtgaggagtcgcgaggaagaggcggaaggcgccggaaggcaccatgttccgcaagaaaaagaagaaacgccctgagatctcagcgccacagaacttccagcaccgtgtccacacctccttcgaccccaaagaaggcaagtttgtgggcctccccccacaatggcagaacatcctggacacactgcggcgccccaagcccgtggtggacccttcgcgaatcacacgggtgcagctccagcccatgaagacagtggtgcggggcagcgcgatgcctgtggatggctacatctcggggctgctcaacgacatccagaagttgtcagtcatcagctccaaccccctgcgtggcccgcagccccaccagccgggggcggggacagtccctggggctgctgggcgggatgagcactgggccagccgactcatacatgtacctccatagcccccagtctgagcgccctggccccccacggcccttaccctcaggtggaagcggtggccccccctatacggcccccaagcatatgtctgggctccccagtccccagagaccccggggcccctgcgccaatgggtcttgcctgttaacgcccacaaccctctgggtcccccttcgcgcaagcttacggccttacttgcgcagccctcgtgccccggcgtctcggtgttgtcggtcccgcctaacgcacgttccaccgcccccacgatccccacatttgagctacgcgctccaccctcctgcgtgtttagctgttacacgcccgtgcatacaaattgccgcccaccgcacttttctctaagcaatccatgtgtctaccctccgcccgttcgagccgccccacccccccgtgttgctgccacctacccagatgtccgcggcacctata

SEQ ID NO: 451611 - DNA, 864 bp, Homo Sapiens
gcagtatctagagttaacagtaggggatttatttttcaatctaaagtttttcacctctctctagtaagacatctgaaactcataagccatctttaagaatttcttacaaaaacatgctggaagacagtggatcttgtttgtatcctgaagatttttttctcttcgttattttaaattaattgtcaacagatgtgcaactgttaggttggttcttaagtcactcggagaagagagagatgcatctactcaaggttggcacttggagaaacaacactgcctcttcctggcttatgaagttcagtgttctttggcttgttagtcagaactgttgcagagcaagtgttgtttggatggcttatatgaacatatcatttcatgttgggaatcatgtgttgtcagagttgggagagactggagtctttggaagaagctccactttgaagagagtggcaggagttatagtgccaccagagggaaaaatccaaaatgcatgtaatcccaataccattttcagccgatcaaagtactcagagacctggcttgcacttattgaacggggaggttgtaccttcacacagaaaattaaagtggcaactgagaagggagccagtggagtgatcatctataacgttccaggtactggcaaccaggtgttccccatgtttcatcaggcatttgaagatgtcgtgtggttatgattggtaacttaaaaggcacggaaattttccatttaattaagaagggagttctcattacagccgtggttgaggtggggagaaaagcacatcatctggatgaatcactatttggtctctttttgtgattgtcacaactgtaccttagcatatttcatcttttattcac

SEQ ID NO: 451612 - DNA, 1141 bp, Homo Sapiens
  misc_feature (169)..(169): n is a, c, g, or t
ttcggtggtttttgggggttccggaacccagtttccccatgggctttaatcccaaaacctgagaggaattgcgcgggaagcttccccctgtccccggattttgaaaagggataaagggaggccaagcgcaaaattcttggaggagctgccactaggcttttcattgaanctggcggtaagtggccgaaagaaaggttcagaaacccaggtggtccaagcagttagaggaggtcccagaacctctgggtaatagtccaggttgaaaggccagcttcccataatgctcaatgaggtccatcttgaaaagaggtttgatgtggggcagttccacgtgcagcatgtggccagggaggtacacagtactgaaatgaacttggcagggtctgtgcagtagtgagaatccacgaggtggacggcagtcagcctgaggtcccactgcgccatttgggagaagatgctgcgcaaaggcgccgtgatgcgtgcagagctccacctggcctgggcagtcgaagaggaagtagtggccgcggagggggtcgagcttggcacgcagccagtccaggttggcttccaggtactccatgcagtagagcaggccgccgttgggccccaggcgcagcgcgtccatcacgtcgcccagccccaccagctcgcccacgtccacggcacactcgtacggcagcccctcgttggccgggtccaggttcaccaccgccacgcgccggcccagcgcgcgcaggaactcactcatgcccaggcagtacgtggtcttccctgagcccggcgggccgatcaccgcctgcccgaaggccgtggtcggagcggcccctgccattggcggcccgcggcccggagcaggtcaactcacagggaaaacggggcaggtagccgcgccggagacgagactgagggcgagggtcccagtacgtatacctcgttggcggccagcgtcactcgcctcaggcggaacagctgagaccgtgtcgcgcaaaaggagataacaggccgatactaactagactaactcgacttccggacagcgtcggaaacggcgagccaacgagaggaagtcccgccctcacggcggggacgaagctagacgccgaggggcgggcggatcccgggaattccggaccggtcc

SEQ ID NO: 451613 - DNA, 1067 bp, Homo Sapiens
gggacatttctccgtcactgttggataatcagagaaaaaaaggacgttcagaacaccaaggtgcttggtacaattatgccaagtgccctgtctttaaagggagtagcctaattctcagcatttgggagtttttgactaaatgtgtggatatgatttgtatttcctatttcttaatatatatgtgaagatacaatactgacaagtacttagatttggaggttttgcggtactgaggggagttgggggaagaatggaaataccattgacctcctaaaaagttgttacttgcaaagtttgggaggtgacatcaaaaactcaactgcccttacaatagtcattccatccatctgttgcttatttgaattctcatttatttttactttatggcattaaaatacaataaatctgtcaattatgtattttatattagtagtagcttaagattgggtcacttcatttcggtagatataattgttagtattatccttcaggacaaaaagcatctgctaacaacctgtggtttaaaaatataggccaactttatgttcaaacattatgttgataatatttttagcagtattacacagtgggaggtccaaattggattagacttttgcattgaattccacagtattggtaagtctagcacatactataaagtctttgctaaattcttttgggtacattatttttaaaacctgtctgtctgtcggtatcacacagaggtcacttcttgagtaaaataagatgaccttaagaattcacataattcttgaagaagaatataagtcacgatgcttccacatgaggccgcgtcacaccaccatcgtttggaaatccagcaccccagccgttttaccctaagataacagtgcagcacttagtgtgggttgaatgtgtcatgtgggaatgatttctggtcaccttttcagttcatggttagtccttttatgtctgtgtgcatctatgttcgtctgtgtgtcaggtaaatatgaattgaatagatgacttcttatatatgttctagggccaagattgacagacacctaatattcatgacttgagaa

SEQ ID NO: 451614 - DNA, 1526 bp, Homo Sapiens
  misc_feature (1395)..(1451): n is a, c, g, or t
ggcctgggtggcgaattcggcacgaggcccagcaagaaatctacctgaatgtggccgtgaacaccctcaagaagctcaggtgcctggcccccagcgctgtgcccggcctcagcaaaaccggtggccgcagggttgtgtcccacgaggtggtgttggggggcaggttggccgccaagaccagcttctcgctcagccgtccaagcagcccccgggtggaggacctgaaaggggctgccctgtacagccgcctcagggagtacctgctcacccaggaccagctcaaggagaacggctaccccttcccgcacccagagcggcccgggggcgcaatcatcttcacagctgaggagaagaggcccaaggactcttcctgcaggacctgctgccgctgtggcaccgagtacctcgtgtcctcttcaggccgctgcatccgggacgaggagtgttattaccactggggacggctgcgccggaaccgggtggccggaggctgggagacccagtacatgtgctgctcggctgccgccggctctgtcggctgccaagtcgcaaagcaacacgtgcaggatggccggaaggagcgccttgagggcttcgtgaagacctttgagaaagagctctcaggagacacccacccggggatctacgccctggactgcgagatgtcctacaccacatatggcctggagctgacgcgcgtcacggtggtcgacacggacgtgcacgtggtttatgacaccttcgtgaagcctgacaacgagatcgtggactacaacaccaggttttcgggggtgacggaggctgaccttgccgacacaagtgtcacgctgcgtgacgtccaggccgttctgctgagcatgttcagcgctgacaccatcctcatcggacacagcctggagagcgacctcctggccctgaaggtcatccacagcaccgtggtggacacgtctgtgctcttcccccaccgcctgggcctcccctacaagcggtccctgcggaacctcatggccgactacctcagacagatcatccaggacaatggtggatgggcacagctccagcgaggacgccggcgcctgcatgcacctgggtgatctgggagggttcgaggagacgccaagaccaagcgatgacgcctgcccgcctcccacccgcctctcctgccgtcccgctggtccttagccccatgcctcttccaaaacagtgcaataaatctccggtaacccgtccacctggccgaggcagcccagagcagcgggatgagctggcggccagagaacgcccagcccagcccacccccgctcacgtcctgccgcaccccttcgccggtccccaccctctgccccccagccctctggcgtctctagaaactgctgctgatggagaccaggacannnnnnnnnnnnnnnnnnnnnnnnnnnnnnnnnnnnnnnnnnnnnnnnnnnnnnnnnttccccgggggggtgggccggggcaccttcttgcttccctaaccttggggtccccggggggccgggcctttgttc

SEQ ID NO: 451615 - DNA, 1022 bp, Homo Sapiens
  misc_feature (54)..(54): n is a, c, g, or t
ctttcaaggaagaagttccccttccagattgggtggcttgcctgcccagctggncccagggacatcccccagatgaaccttccgtgggggtcatgaacgtggcatttgatgttgatggtccggagggtgctggcattctcacacaagttctcaaggcagctcgtcggagatacagttgtagttgaggttcagggacacaagattgtggaatgtggacatgttctttttgaactgggggctgttgtagacagcaaaggtgatggctgaaatagtcctcgatgttgagctctgagatcacattctcattcctcatgtagctgagggagtcgagaatttggcagccttgctccacggtcagcctggccccttttaggttgagataatccaggcgtttgcccatcttctttaagaagaagctcaagctgctgatgaatgagctcctgatgctgttcctccataccaggcggtccagctccaggtattggatggaaagagatttcagacggttgttgctcttactcagacaagacaggaggccccgcatggtgacctggaacttcttggtcaagacagcattgtaaggattcatgaatttgacctccaggtgctccagataacgaccaaacttcttaacataccaaacagctgactcaacttcagatgcatgtaccctggaaggtctcccgctgaaggtgatggttctgtaccgccagagctcagcagaatacatcatctggttccactttctgcagacaagagcagccctggacctgtccctgtctcctagccaccagaaaacacggcacagacacaaatcgggcagaaaggcccagcagctctggtcttggggctggatcagttcactttcttcgtccatccaggaactgggatgtacagtgcagctgtgtgttaggcagggcttccaaaaatgaggaaaggaaagcaatcacttgctttctgctccgcccgcgcagctgttgctccgacgccaactccaatcccgggaattccggaccggtacc

SEQ ID NO: 451616 - DNA, 1039 bp, Homo Sapiens
  misc_feature (53)..(53): n is a, c, g, or t
  misc_feature (87)..(87): n is a, c, g, or t
  misc_feature (145)..(145): n is a, c, g, or t
ttgactcccaagggggtggtattttgtggacttccttcccacagcattcaganggatggggctgtggatgtgcttcttctccacctncgttggtttctgaggtctgctctcattgacggctctgctcctccctgtcagccctgancctgggttctttctgtccggatggaagtggcacagtgatgtaacttgccagactaatggtttgtgcccaggactttaattttaaaggtgactggggtgaacagatatggaaccagccttcaatcaggatacaaatctccaggaggcaacagcaggcactgaatccagaaactcttagctcatcatggtggccgtggatctacagctcagccctttagagctctgtgaacccaggaagcccccctcatctgtttgaggctcagcttcttcattcattaaaggggaaagaacactgctctgcccacctgtctgggctgtagtgagaatcatgaaatgatgatgatggagcacccttcctaaattgcgacttgtaatcgtgttactgctcctggtcgcatcactgccatttgtggcctgaaatttccgaagaagccaacttgaatatgtgaattcattgtggttcagataagagccatttacaccgctttcacttagtaagaagtgactttggggacctcctcagttcacacttgtagtctgcaagccatattgtaagaaccccagctcttaacttcttaatccttagttcttcagaattaaattagctttaattttaagagcactttataatagatgatggcccagccaactcaaggcaattaaattacatcattctttttgagatgtgtcctcattgtttaccaagggtgaaagctatgagaggaagatcttgagagagaaccagggtgggaactcagttgacagagggtaaagatgatgagtctggggacggaaacaagatggcatcaacaggaccatacaagaagaagtggaagttgaagagaatgaaggaaagatgaagttcaataaggcagatatcccgagaattcggacc

SEQ ID NO: 451617 - DNA, 1187 bp, Homo Sapiens
  misc_feature (154)..(164): n is a, c, g, or t
  misc_feature (404)..(474): n is a, c, g, or t
cgagaatgtcgtcagactatccccgtggggcaaacttttcggcgcgccggctaatttgcgctgggtgttgagcccttgtgcccgtgagatcttaattttgtgccctcgggggctttaatttctcgtggggggggtgtggcccctattgttcctnnnnnnnnnnngtcttgagggtctccctccccacgggttccccccccggtgcccgggtttctccccagctcggagcgcccggtgttaaaacacgggcggccccgtcgcctgggccttttattataaagcggccccctcattaggggggccccccttctgtgtcccaacaaaaccgggggtgagcggcgccaaaaacttgggccgcccctcccggggggaaaaatccttttggggcgcgcggcgcccccccnnnnnnnnnnnnnnnnnnnnnnnnnnnnnnnnnnnnnnnnnnnnnnnnnnnnnnnnnnnnnnnnnnnnnnnccaaaaaataacccctttattgtttgtttctctttgggtggtcattccattcacactgttaacagtgcacctgctgtaccatttcatttggataattctgacaatctccacttcttcatgcgtctcagtcagtcctcagtttcttcggcttctgttattgtccctgttacatcatccttatcctcgtcactcttcatcgagggcccagcacttggaggcccaggactcgcaggcttcagccctaacttgctgctggatgaggccaactccgccttttcgctggacttctgtggcagcgcgacatccacagggatggccttttctttcctgctctcctgaatgactctgtagatgatggtgatgccgcaggccccagcgatgatcacaatcaaggcagagaacacgtggatgtaaatgggaaccgctttcttgtagcagacgccttcgtagaagcagcacccgagctcctggcatcggtccctggagacgttgtagtcacaaatgtcatacagaggaacatcacacactgtgaattgcttcaggaggtgccgcggagagttcttcacttccagcacgtattccattgctgcagctgacagatgaaggggccgagcacacctgcgcctcacgtcccaggcgggtcccctcagccacctgtgcctctcagtcccactccacgtggaaaacaccttttaggtaaaacaacaaactgg

SEQ ID NO: 451618 - DNA, 947 bp, Homo Sapiens
  misc_feature (752)..(752): n is a, c, g, or t
gctgggtggcgaattcggcacgaggccgcagttgtgcacaccccagcccaggctctggcaggctgccaggcggggctcgccgccttcgcagtgcacgttgtccagcaggatgtgtccggtgccatagccgaagaaggcgttggtggtggcggccatggccgccccgcagcccagctgacgacagaccacagcggcatccggcagcccccagtcgtcgtcacacacggtgccccacaggccactgtgcaggatctccactcggccctgacacagggtggagccagccatcctgagacgtccgtacagcccgtactggtggagtgtcaggaggccactctgatggtcatggtcagcaaagacctttttggcaccgggaagctcatcagggctgctgacctcaccttgggcccagaggcctgtgagcctctggtctccatggacacagaagatgtggtcaggtttgaggttggactccacgagtgtggcaacagcatgcaggtaactgacgatgccctggtgtacagcaccttcctgctccatgacccccgccccgtgggaaacctgtccatcgtgaggactaaccgcgcagagattcccatcgagtgccgctaccccaggcagggcaatgtgagcagccaggccatcctgcccacctggttgcccttcaggaccacggtgttctcacgaggagaagctgactttctctctgcgtctgatggaggagaactggaacgctgagaagaggtcccccnacttcacctgggagatgcagccaactcaggcagaaatccacactggcagccacgtgccactgcggtagttgtggaccactgcgtggccacaccgacaccagaccagattgctcccttatacaccatcgggactccatggtgtcttgtcaacggctcactgatcctctctgattcaaagtcccgaccgggcaatcc

SEQ ID NO: 451619 - DNA, 1123 bp, Homo Sapiens
  misc_feature (486)..(547): n is a, c, g, or t
tttgttccacgcggggaggggaacgcgtaggagtcactgagaatgaaaagactcccaaagagttctgggggcccccgaagggcgagagatccaggggggcaccgccactcctgtggggccccgggccgggctaaagggagcccggggttgggaggaaagcactgggcttgaggaggagggaaaaggccaagtccccaagtttggccccccccggggtcaggtttcccccaagaaaccggcccaggcccccaagccggaaacggggccagggggttcttctggaaaccgctggtaaataacaggctgtcgcgttctccgccgcccgggtgcctcgccatgccactcctgggaggccctcctcgtccgcgacttcttcctcccggagctcctcctcctctggctgaggcggctcgcagaccaggcccggctcgctaggggcgctgccgttctccaccgccacgaggaacggactctcctcgtcgacgnnnnnnnnnnnnnnnnnnnnnnnnnnnnnnnnnnnnnnnnnnnnnnnnnnnnnnnnnnnnnnctcctcttggtcgggggctgcctccttgggtcgtttgggggcgtcctccggcgggtcccccgcgctcctcttcagcggccccttctcctcctcagtgggcttgtcgtcgtccggcttccccagttcgtcgccgccgccaccagcgtgggtcggcttgtcctcgtcgccctctgcggcctcgggctccggccaaggcccgtctccgctgcccttctctgaggctaatgggcagtcggaggcctggaccgtggggttgttctcgatttcccacagccccgcgctgaagccgcgcctcttgttgggcttgccgaacttctccttgcactccttgtacgggaacaggcgtttgggactcaggaaggccgtctcgtgggtcccgaagaaaaacacctggtagcggttgggctgggtcatgtgctctatcctcgccggccagtgggcatagccctttaacttggcaaacaccaggtccccgctcttgtacatgggcatgccgtaggccgacatagctggttctgcggaccccgcctgggccacaccggaagtagacgccgaaatcccgggaattccggaccg

SEQ ID NO: 451620 - DNA, 875 bp, Homo Sapiens
gtggtaattgggttttcctcagacttgaggcgacgacacactcattggaaggggacgaggaatccaggatgtggcagaagactggagaggagctaagggggtcggtatgtggatccagtgaacccgtccaggtgccccaagaggctcgtgaatatggacggacccatgaggccacgatcggcctccctcgttgactttcagtttggagttgtcgccacagagacgattgaagacgccctgcttcacttggcccagcagaatgagcaagcagtgagggaggcttcggggcggctgggccgcttcagggagccccagatcgtgggtttatggtaaaacaggcagagaacatctgcaggcaagccacaatccagccaagagataataagagagagtctcagaattggagggctctgaaacagcagcttgtcaacaagtttactctccgtcttgtgtcatgtgttcagctggccagccaaactttccttccgaaacaaaataatcagcaacattacagtcttgaatttcctccaggctctaggctatctacacactaaagaagaactgctggaatcagagcttgatcgttttgaagtccttgaacttccgaattaatctgcccactcccctggcatatgtggagacgctcctagaggttttaggatacaatggctgtttggttccagccactgaggctgcatgcaacctgcctgacactgctcgacctggtctatcttctgcatgaacccatatatgaggagcctgttcgacggcttcaattgagaactccactccccagtcagctgcaacgggaaacagtttacttcaccctgacggcaagacttccatgctgctgggcacgcagcgaactccatcga

SEQ ID NO: 451621 - DNA, 1139 bp, Homo Sapiens
gggtccggaattcccgggatcgagcttggcggttcctctggccactttctcacagtgtctttgggcgtcttcttgactgaatctgactccattggaggctgtgatccatggaacccagtgacatgcctgctggctaccactgccccttagactctgccccctgggatgagaccagagacccccagagcacagagctgatccccaggagagccatcagccgctctccaacctgcgcccgctgccgcaaccatggtgtcaccgcccatctcaagggccacaagcgcctctgcctcttccaggcttgcgagtgtcacaaatgtgtcctcatcctggagcgccgcagggtcatggctgcccaggtggccttgcgtaggcagcaggaggcgcagctaaagaagcacctgatgaggagaggggaagcctctcccaaagctcccaaccacttcagaaagggaaccactcagccacaggtcccctctggaaaggagaacatagcaccccagcctcagaccccccatggggcagtcctgctggcaccgacaccccccgggaagaactcctgtgggcctctgctgctcagccatcccccggaagcctcgcccttgtcctggactccggtgcctcctggcccttgggtccctggacactggctgcctccaggcttctccatgccaccaccagtggtgtgccgcctgctgtaccaagaacctgctgtctctctgcctcccttccctggctttgaccctggcacctccctccagctgcccactcatgggcccttcaccacctgcccaggatctcacccagtactgacagctcctctttctggagagccccaagggccccctagccaggcccgcacacactcaactctgatactccagccctgtgggcaccccagaccctcttcagctacaggcacagggcctctggagccccgtgccctggacccgacatttggcccctcaaagtggcagctggcacaaaaaggcaccttgaacccctccggggggctgaaagattcatcccagggctcctccgggtgaacccccttctgggcccccccaacccttggcgtggatctcccctggtttcacccctgggggccacccaagttcctggtgtgaggaaagaagatt

SEQ ID NO: 451622 - DNA, 874 bp, Homo Sapiens
tgggcccatctgtagtatagagagccttcgcttacgagagaaacttcccaccactgtgaaattgctcccatgtcccgcacacacgcccagcggtcacggagcattggtcgccagagacgccgagccgcgcctgggcatctgcttcccagagaaagtacacaaagcatttccctctgccccaaggcccagccgtggcaccgagggccgcccttgtgtctgtcccgcgcttccttcagttgttctggtgctgcaccgtaaacaggcacagattacccttgctagcaggtctgatgcttattccagccgattttgcaagccctggctctgccatgttggcctccctcaaattgcattgtcaccaagacccctgtggtttttgacaaggcgctgggcatggatgggtctttccgagctccactgtgaatcacctcgccctctggtccttgggcctgtcctggcttggtggactcagccgctggagctgggattggggcgccctggagagtggcagccccgggctttggtgactcagactctgctgttcctacctccccagctgctgtgctgtttcttcttcgtctcctcggtgcccctcctggccttggacacctgcgcgacctcagagcatggggccggggccatcggacacagacgccttagggatttgcacggttcttgcacagcagtgtttctgaggaaggcgttttttggggtgtctccaagtctcccagcgctgcttccttgccccccgccccgccctgctgtcatggtggctgtggtcactgagcacctctgtatttgccgatgggccgtgtgccccgtctacgccgtctggttgtagttgatgcagtcctgtcacctgggttccgttgtg

SEQ ID NO: 451623 - DNA, 1134 bp, Homo Sapiens
ccagttttttctcccccgtggggtttaaaaaagatgttaaattacatggccgcggaaggcctcggttttcccaaatttttttggagaggttcagctttttcccctgaaaaggggcacccaattttaggattttggatcccccggaggtggattccggtaatggccattaaaaggccctttataaggtggggagggcatcccgaatttccggaggtggttttctttttcggaacggacctttcatcttctttaatatgcccttggggtatgaatttttctaattttagatccatagtaatcaattagacaaagcaactgtctatccagacggtatgaggaactctttgcacagatagccaaacactctgttttgagtgaccaatgcgatcttcttcctcccttttttaatctacagacttcccatttgcaaagaagcaatagtttcttcttgctccgttcgttttttcttataatgctggcacttcacctgcaaagttttctgctccttttgaagatcttttattttattctgttggtggcaagccctatttagtgattcatcctccaattcaccaattttggatttcacactttccataatttgttccaagtcattagctcgttgttcttgattggctgctcggctttgctctagctgaagttcatttctaagctgttgattagtttctataagctcctgtatcatgttctgttgacatgatgtttcttccaccaacaatttcaaattctgtctcatcctttgtgatgactgtttgtcaaaaatgatgagatctttgagatctgttcttttgactagagacaaaggttttaagccatgcatcatcaatagcacatttatgctttcccattctgcttcttcctgctgtttttcagtcatgagtctgtctgatggttgactggaatcctggggtttaggggctaccggaaacatagttactcagtcatagcatattactcttgcactttacacctggtcattcaggttgatctcaatgaaatgatcacccaacgagtctcatgtctgaaactggatcttcatcttactcagtcgccggcctcccaccagcagccagccgggccaggttaggctgggatcagctacgtcaggccccg

SEQ ID NO: 451624 - DNA, 835 bp, Homo Sapiens
ttggattcattgaggaatgtgtccccaaatgggcttagtagtacttccaatacgactgatggtctttggatgtgttccgttagctttctcctcagtactttctgagggagactttgtgtttctcttcatcatctactgcccattcaagcttctcattcttgattgagttgtacagagctttcagcagatccttggagaaatcgacaccctcatttaccccttgcagatttgcaatgaactcctgacaggtcatcttctttccaatattgtggccatgtagatcggtattaagaagcattattgcacaggtaaggcaatggactccatcttgtgaagcaatggtatctgggttaccataaaaatatctattggagaagtgtattaaaactctctctcgttcttgagtttctcccacaagagagaatgctttaaagaaatacctgagtgactgatccagcgtcattcctgtaaaatcaaaaaacttcagatattcttctgcaactagtttgctaaattcgttgttcttgccaaggtgttttgcaacatctgatcttttgaatctgtccagctgataaaggcgtttggccaaccttttggctgcttccacattgctgctggtaccattactgagattttctggggtctccttttccaaaatttcagtgctccccatttcagaatgagcttctagccgtgttgttttcaccccagcattgcagcaaccatacagacaccaagaagagcccatcgcaacccatggggtgcgcctggaccactccttcctctccgaagccccgtccagtattcttcagctcccaagttcagtgactgccga

SEQ ID NO: 451625 - DNA, 211 bp, Homo Sapiens
caaagatttctttttattcacctgccatgggaaccatttagagaatgggaaacggggaggcagaaaataaatgtgtttgaacataaaagcagagataagcccgacatgttttggatctaagtttcacaaatccacacttacgtggccatgtagatcggtattaagaagcattattgcacaggtaaggcaatggactccatctaaagaaagt

SEQ ID NO: 451626 - DNA, 1035 bp, Homo Sapiens
ggtccggaattcccgggatcccagtctaggcagaagaaattgcaattgtgaaaggaagatttgcgtgaaagaatggtgtttttggctgagtgaggaatttgaagtatctggaaaatggaagctccactggttcaacagcctctcctccagtttcgaccccagtcacaggacacaagagaatggtcatcccgaaccaaccccctctaacagcaaccaagaagtctacattgaaaccacagcctgcaccccaggctggacccatccctgtggctccaatcggaacactcaaaccccagcctcagccagtcccagcctcctacaccacggcctccacttcttcaaggcctacctttaatgtgcaggtgaagtcagcccagcccagccctcattatatggctgccccttcatcaggacaaatttatggctcagggccccagggctataacactcagccagttcctgtctctgggcagtgtccacctccttcaacacggggaggcatggattatgcctacattccaccaccaggacttcagccggagcctgggtatgggtatgcccccaaccagggacgctattatgaaggctactatgcagcagggccaggctatgggggcagaaatgactctgaccctacctatggtcaacaaggtcacccaaatacctggaaacgggaaccagggtacactcctcctggagcagggaaccagaaccctcctgggatgtatccagtcactggtccccagaagacctatatcacagatcctgtttcagcccccctgtgcgccaccattgcagccaaagggtggccattcagggcaactggagccttcgtcaagttgccgcttcattccgccccagaggatgagcttgagcaacctgacccaacacagatgctgtatgacaatggaaaatccacctgctggacgactacctttggccgctgtgctcgctgtggagaacaacgtaatttggggaaggtacaggatggacctgcccatggatcaggtcctcccaccgggaattgttttaacc

SEQ ID NO: 451627 - DNA, 999 bp, Homo Sapiens
gtgggtggggtactgaatgtctgggcttgattgcataacttgatagaaaagctaggaaatttttcacttctcagcattaatagttcttgtggtttaagccgttttttccataccagaccctgcaaggatttgaagaagatgaagagcatatccatatacaacaatgggcacttactgaaggccgtcttaaagttacgtgttagaatgtagcaggttactcattttggatcctatgacagagaggcaaatgttcatgcacacttgagttaagcagtagtgttgggaagaaaaacagaggagttctattaagacggttgaattaataaaaggaaatttacaaagtgtggacttacacttcgtcttgtccagtcaactgatgggtatgctgggcacgtcatcattgaaactgtggctccaaactcgcctgctgcaatgcagatcttcagcggggagatcgacttatcgccattggaggtgtgaaaatcacatcaacactgcaagtgttgaagcttatcaagcaggctggtgaccgagtcctggtgtactatgaaaggcctgttggccagagtaatcaaggtgcagtgctgcaagataactttggccagttggaagaaaactttttgtcaagctcatgccaatcgggttatgaagaggaagctgccgggttgacagtagatactgaaagtagagagctggattctgaatttgaagacttggcaagtgatgtcagagcacaaaatgagttcaaagatgaggcacaatcattaagtcatagtcccaaacgtgttccaacaacactttctattaaaccccttggagctatatcaccagttttaaagccgtaaatcagctgtagggaagtcacccactagccaccgaaaattcagtccaacagcatggaaagtaaagcttccagacgtaaaacttctgaagataccggaccaggaccacggtcaaaaccagcccaaggcatctgcgaccaaaccacctgtgccacca

SEQ ID NO: 451628 - DNA, 973 bp, Homo Sapiens
  misc_feature (17)..(17): n is a, c, g, or t
gcaagttccccaacaanccaataggccagttgctaaaattgtttgtgtgaggggggtctcaaaacttccaaacaccactttgggcaggtttctgtaaaggtccagaaaatcccaggtgataaatataaaatcaatccctttcatataatgttttcataggtatcccaaaatgaattagcccttttatacatctggtccaaaaatttctgaacatttgctaaagttgactgaaaaaataaagatatgccctttgcctcataaactgaattgaattactaacaaattattctagaggtaatcacttcattacttcagctacaaaatctacctaattggattttgataatcaggggaaatcttactactaccgtgtccaaagcagttctgtccattttcctgccagaatggtcatgatcctggcaactgttagcctgttcattctgaggcttcattcaaatacatatataccacaccaaatataccacagatacagcagaaatggttcctgagacctggaggatacaatcttgcatagaagagatatgttgaccaagtgactggaggatcataagggctgtaaattaccagtacaaaattctgtggaagattaccacagaattaccacagattcccttgttccctagtctaagggaacaaggatggcttctctaaggagcgatgtttaagctgagacttgaagggtggtgctactgacgaggtgagtaagtagcatgagcaggtaggaggattccaagccaaagaaacaggacatccagaggctccagacgaaggaggatgatgtatgtggaactgcaccgaggctagtgtggctggagtagagagaggcaggaagtgtctaaggctgaggcaccagaggcaagagtcagtcagatcatcctaggccttagaaacttcttagagcctgtgggttttattccagagatgactaaaagtcattagaaggtggaagagt

SEQ ID NO: 451629 - DNA, 809 bp, Homo Sapiens
  misc_feature (558)..(617): n is a, c, g, or t
gttgggcttagtagccccagggcataaactcatggcgtttaaagaattggctcgttagcaaataaaggatttcaatatatgatagatacctatgtcagcctcattgcctgtggtcattaccaaacagaaaatcaaagttattgaaaacttgtgggcagttcaaggaacatctctgcttctctgctctgtgctttctcttccctctcttccccagaggcaggagaagcaagtcctcaggagatgctgcaagtagctggttgatggaggtttttcacttttatttttcataaaagcaagaatgaatgagaactagtgggaatgtccccttcccagctgggacaatggatgggtcgaaggtgaagagtctctgttcactggtaaggtgcgtgcacagaggccacaggaagggtgggcttgccaagcgggtacgtttgttgctaaccttgcgcgcacacacaggttgtgactcttacgggcagcatggtttctgatccttcctaaggatgcagcagtcttttaaaaaaaatattgtattataataataataataatatgaannnnnnnnnnnnnnnnnnnnnnnnnnnnnnnnnnnnnnnnnnnnnnnnnnnnnnnnnnnntagggactggggtaggaggggacaggaagaaaaaaatgtcattcgtcagttaggtcctgaaccaaaagaacttctgtgtggctgagtccggcctcctgtagcgtagggggattgggccactcctctgaaggcactccagggcagcactcgcctgggaaaattggcttcaatctgaaacttttctggctttcc

SEQ ID NO: 451630 - DNA, 1531 bp, Homo Sapiens
ttgtgccaggattttccaggaggtcagactcccagctctctgtggctccgaagggagtgtctgaccctgggaggcttgccttcgagggcagtagatactgttggccaagagacctttcgtttcccaaagtttggtaccacatcctgggtctttgaaagaactgagtgtcctggggagccaggagaagggtagatcctttcccctatgtgccatgggactgtgaatgacaggaggatcgggccctgcggtgtgtgtctgtgtctgtgctgcccatcaggcttggctcactggtactgcagatagtttttgagagactgaggcagggtcagggagctgatgtcctgcaggcgctggcggcccagggccgagcggatggatctccggcacaggtccatcagtggcaggggctcggggtcaaggccgttgatgtagcgcatggtgacttcacagtggccccacacggcactcaccaccgggtacagcttcttgcccttgagacctcggaaggccacgcccaggtactggccatccacgatgaagctgagtgtgccctcatccatgtccagcaccacgagcagcgagtcgggcagcgcaaaggcctcgtcgggccccagaaaggccgggtaggccacgccgggctggttcttgccgtcgtggtagaggcggctgcggcccaggtcccagccccacgactcggcgtcactgcctaccagcgccgtgtagcccacggagtgcaggggagcacgggccgtgtccacaccaactacagcgtgggtgccgcgctgccgagccggccagttgatctgccaggcgtgcaggccgcgggcgtggcccaccattgccgcggatgccgtcggtgctctgggccacaggggtgccggtggaaggtgagccggtcgtcgtccttgacgaagacgttgagcgagcggtcctcggggttccacgcgtgcctgcagctgcacagccagccccgccgctggcatgtccaacagctggtccagccgcgccggccgcccgggctctgcaccccgcagctcccgcttggccggccgcagcgccggctgtcgcacctccagtgacttgaggctccccgagagcttgtggcccatgcttcactgcggggagggggccgctgcaggccaccgctacctcgtgggagcctccactccccgtagccaggaatgggccacggggctgggaaccaggcttccggacggtagacctccacagcctctaccgggctgcggcaggggcccaagctccataaaagagagggcaagcgcctgttcgggaagaatccccagcgctggcaggtcctggactccctggagaggggtctgctgccgccgccgcccactcaggggcgcccgagtgacccgcaaatgccggctctctccgcacggccaggggcgcgtcctcacggatgatgcccggcagcagcgccccctctgcgctgcaggatggcctggagttaggagcgttcttggcgaagttggcgcctcgtgccgaattcgccacccaggcctcgctc

SEQ ID NO: 451631 - DNA, 1096 bp, Homo Sapiens
  misc_feature (147)..(310): n is a, c, g, or t
  misc_feature (365)..(378): n is a, c, g, or t
gggaaccgtcccagcgtgttgcggcatctgagggcccgagatccttgggtccccttcccttcgggctgcatcattccaaacgtgcctctgtgtccctggtcttcgttcccaccgcaattgtgttctatttaccgaaactctctcgtnnnnnnnnnnnnnnnnnnnnnnnnnnnnnnnnnnnnnnnnnnnnnnnnnnnnnnnnnnnnnnnnnnnnnnnnnnnnnnnnnnnnnnnnnnnnnnnnnnnnnnnnnnnnnnnnnnnnnnnnnnnnnnnnnnnnnnnnnnnnnnnnnnnnnnnnnnnnnnnnnnnnacaagtagcatccaaacagcctgcttattctgttcttgtctaagcacttctgatnnnnnnnnnnnnnntacatgtacagatgctttatccttttggtgcactatagagtatatccaggggaggccaggccagccccggccccattctcccgaacaagaaaacaaactcagcgatgtttgctcactttcctgcaggtccatctgtattttcatgcatgttaagcctctcattcaagttgtacattcatgacttctgtttttctatgtctctcatgtcctggttccaacatgtacaataagtgaggtgtgttttaagcatcatctcagccaggaaaggcttttgctaccattccaaagccaacatgaaacttcgaaacttcatgtcaacaggcccctgaaacctcctgagatgatacagagggagtgcaggggtcatatgatagatattcgttttcaagtacaccttaatttctaaaagttttccatttcttcatttgttttattttatgtacaatcattaaggtcatacccttcatgacaggtacttgctgaaattgagactcttctcccttttgagcagaggtcattttctcttgacattgaattccagtatttgctgcagaaaagaggtgtcaatgaggactccatggatactttcagttgatcagtattggctctgctgcagggtgattttggcttcacacataaatgttgcagtggcatttgtccaggggaaagcccgcttggaggctgtaggatgaccctgatggaggctgtcactcaaaca

SEQ ID NO: 451632 - DNA, 875 bp, Homo Sapiens
  misc_feature (21)..(21): n is a, c, g, or t
aggctgataccggtcgcaggngtaggatgagatgggcagttaccttctctccgtctctctctcggggactctatttgtggctggtggagctgtcttaaacgaagagaaccatgagcaatgaatcttgtttaccttattacacagcccacagctactcttcaatgagtgcgttcaaaacctccatgggggacctgcaacgacaattgtacaacagaggagagtacaacattttcaagtatgcaccaatgttcgagagtaattttattcagataaacaaaaagggagaggtgattgatgtacacaaccgtgtccgaatggtgacagtgggcatcgtctgcaccagccccatcctcccactgcctgacgtcatggttctggcccaaccaactaaaatctgtgaacagcatgtcagatggggccggtttgccaaggggagaggtcgcaggcccgtcaagactctagagctcacgagactgcttcccttgaaatttgtgaagatctccatccacgatcatgagaaacagcagctgcgcctgaaactcgccactggccgtactttttatctgcagttgtgtccctcttctgacacacgggaagatctcttttgctattgggaaaaacttgtctatctcctgaggccaccagtagagagttactgcagtaccccaacacttctatctggggacgcaccacccgaagacaacaaaagcctagtggctgcagagctccacagagaaggggatcagagtgagactgggctctacaagccttgtgatgtatctgcagcacctcttctgcttatgctggggggacaagggaatccaacatgcctccacggaacggctagtgccggttctccatccccgaagcactca

SEQ ID NO: 451633 - DNA, 1200 bp, Homo Sapiens
  misc_feature (276)..(276): n is a, c, g, or t
atttctcttttagaacgccccccgagggctctcaccggttgccaaaataacaccccgttttcatttaagacccagcgggtttggttgggattcctccctccaggatgtgggttgggccattttgcccggctttcggaaccagccccccttttgatgggggtttcccgggtggatcagtaagttaaggctctttgtacagggggcggcgggattaatctccggttccaaggtgccaaatataattgggctacatgttacccctgtccatcattcccnctgtaaaaggtagggactcccaaggtccaggatgcgcacttggttggtgatacatcacaacacacttttcattccgcaggaaggttcatcggtgtaccagtttcggtactgggaattgcttcccatcagaccactggtagagatctgggcaggcaccagatgtttgcccatctccattcctccaaagccctatccagaaatcaccatcagaaatccctgtcccgggttttgtcaggttttgcaacatgctctctattaacttctgttctgcttcattctcaaggctgaggaggactcctccctcactctcacaagccaggcgtgcctcctgaaagctcactcggctggacagttcatggaagtaggccattttgtagcagggatgcttgaagtcagcaaaacacaccttttggccgctgaccacgcggcggcagaaggctccgtggccgcagagcagcgcggcgcccagcagcagcgagaccacgcggctcatcgcggcgcggtggcagcagcaggtgttgcgtggagcgagggcggcctctgcccagggcgcagcccgcgactctgactctgcagcctccctgcctccctgccgggccctactcccgccgcccgagcccagctgcccgaccccctgcgcgcatcgccttcggccgggacctgccgcctgccgcgcctgtgccgcgcgtggatgtgcggggctggagttcaagacttcgagggtgcgcgtttgggggactgaagttagggggtcccgtgtatgtcctagaggcgaagcagaagccccggcttggaccacaccgttgcgctttgcttctcttccccggcctctgacaagtgagaggctgagccggtgcgcctggtcctggatcacagcagcagccccgctctcgacgaattcgagctcggccgatttggcctgat

SEQ ID NO: 451634 - DNA, 845 bp, Homo Sapiens
tgaagtcataattccttgggggttaaaattaaagcctgtacctttcacaaaagcagtgaagaattcaaaggcccaaaccccaaggcaactgaaccaaacgtctggggaattgtgaagtgtcctgtgttcttcccaacaacgtatttttgaaaggctgaccgcgtactttgtttcagactttggatgatcatggaagttctcaaaagctagcaactccttcttccaactattgtttacagccttaagacaagtacccgttcccccatgtgaccccaggtgggccctgaacttgggataaccaggacaggagacttggagcaggaggtgcgggggcgaggagggctctctcccgggcgattggtcctaacccgaggttccctcgtggcaagctgagccgactccccactcgtgggctgatgcccgaggcagacgcggcaggcaggcggcttcgggagcgcataatctgcacccatggggacgatggcaggctggcgaagggagagaggtggcggcaggactaccatttgaggctctcaaatggtgtggggaagagggaaggagaggcgcgaaaaggaggaaaacccctggagacgctgtgtcgggcggaggctagggagaccggcttcgcgctccaacgacgcgcatcactcagactccaaggcaagtgcctggggctagattttccgtccactggggctctggggatctctgagtccatcccagggccctccaggaacgccttcgggagcgcagcccggccccgccgctgccgctgtcacccgtggccgctcccgcctcggttcgtttgtctcctccctctaacggctccggcagcaaccgccgct

SEQ ID NO: 451635 - DNA, 1064 bp, Homo Sapiens
gaattttaaaacccagttattctactctaatacagttacttatttttctttcaatatcactttttttctaagtatgtctctcttggacatggtttaatccattgccaatataaagagacataggcttaatttatagcagccctgagttaacaaaaagagataatcctattcgcttatttgataatccagctgaacctgaagtactgatttcagcctgttcatcacctgaatgggctgcggtggttagagggtttccaacacagctactggaacacttttaaaaggtaatgctgtgatccatgcagccaggaagggtttggtccctcataactctgcaatcctctgggcccagttttctttttcctctcccggttgatgacactaggcccattggtggtacggctttgggtttccttcagtctcaagatctcagtcagggtgggtgaagtggaagaacaagccttcttgcagaccactggttggttggcagcctttgccatagctaatctggttgttttcaggtcagtgacagtcacttttaggagagggttcgtttgctttcaaaatccatctccccgttcctctcagggttctttgccccaaaggactttgcccttccttacgcagtggacaccttggcaccctctgcaaacagacagtcccgcagaggccctcgacgagtgttactccatctgtttcgcgctcctaggagaggtgtagcagaaagcagtgccccaggcctccacgcgacggtgaagcaggaaccaggggctgccagcagagcagcccaggtgcgtcgccttagggacagagctgccaagtgccgagctggggctgccagagccgagccgggaacggcatttgccagagccgaggcggaagccggagcatttgggggacgggaccgcgggaacccggaaacgcctgggctgcaccgagctggcggtggctacggcgacgggagccggcggcgctgcgggtcagcggtcgcgtaggacccagcgcactcggcagcctggggcgcccggcggagctgaaccgcggcccccggtggtgggctcagc

SEQ ID NO: 451636 - DNA, 847 bp, Homo Sapiens
ctgggtggacacctgacaccagagtcttggaggctctgggccagaagatgggacactcccagtctcgggaggatccacgcggagatgagatgcgcgagtctctggaggttccgggtggagactggaacaacccgagttcttgggaggctctgggcggagactggacacccgagtcttgggaggctctgggcggcgactggacaccggagtcttgggaagctgaggacggagacgggacaccggagtctcgggaggccgcgggcaggattccccacagggatatttaccagactcggtgggtacctcggttgtcttctcccgggcctcacaacgagcccaagcgtcctccagcttcctctcgggatccagctgtttcagcacctgtagtaggagatctggaggcatatcttttcccagattggggtacatggccaagggatgcttggtcatcagctgggcttccacttcctctacgaacgccttccgtgctggctgtactggcgagagctcggaaaatagggccgctttcttgagcagctttttcttcctgcttttgcggtcagcttggggacctctgagagatattttggggagtaaaaactcgtcacggcgacaaacaagcgtatcttcaggagactgacaggcgtagcggaagtcgtccatgccctccgtcacaaatacccagttctgggtgtccacaggcgggaacctcaggcgcctgtgcttgcgcttcgcgaagtacttggaaggcggtttgtcacagtaccagggcttggagtccatgccttgggaccttggccggtcctgtggcctccggtcccccatggtggccctctctgttgtgcca

SEQ ID NO: 451637 - DNA, 911 bp, Homo Sapiens
gggagggcattccttttggggattgtttcagggcctgaccctctctgctctcaagctgcagtgtcccttggagggattccccggagctgggttcagcttcttgtagcttcgtcctcctgggcctgattggagtgcatgtacttgagtccgccagcttctcgatgaaggggaacaaggctctgggcagcccttccagccatcttggaaaaagttgtgctgggcgtggaagaacttgatgaggctctgaaggaagtcaggaccttgcgttcatctggctctcccccggctttgagcagatactcacacatgtgcagctggaagatgcgccgctctctctgcatgtcctgggccacctccccagggatccctcctgtcaccctggcccgatcgcgctccttctccagcttggccattttggcttcatagtccttccatgccttctccagctgttttttggaatcctgtcgaccgtccctcagctgccccttcatcagactgtccagggggaaagagacaatgttgttcaagttctgaatcaggttcttgaagagcgcagcaacctcgcgggtgaacacggccaagtttaggaagcctgtggacagctcatggctgttctgggacaggtggctgttgcctaaggattccacggcctctcggtactgctcttcattctccacatggccaaggccggagctatggattgcccgcacagccttctttattctctgcaggatggcttggtctccttccaagatctcctcccgcgccagcgccgcccctcggtaccggggcatcttggcggcgaaggcggcggccaccagccggggagctgaggtcctccgcggtgacggccaggaactcggcgacgctgaactgctccggcatggctggcgcgagcgtggagctccgct

SEQ ID NO: 451638 - DNA, 1149 bp, Homo Sapiens
  misc_feature (984)..(1053): n is a, c, g, or t
agggaggaggtaatagtccggtaagaggcgaacagggtgcagattgccaatgtcaaggatacaagcggggggatggtgttccaggagaggttcatagcccgtgtgcaatacgacgctttggagactaggggagagcatattgtggtggcagaggttttgggacgccacaataaggcgcgttggataaacaatctgtggtgtggcgaggcccagaccgaggtgtggacaagggcctttcataagaggcgcccggggccgcgggtatttttggagggaatcatgctgggataggagaggggcgttgaatttacaccattgggccgaaatctcccgaataccgctcgccgggagaactttagggcgagggggccccccaataacgctggaggttcccccaaaggcgttccgttctcgaggggccaagtcgcgcagggcgtatacccagcgggccctgccaagggctggtgggggcctcagcgggtcggtggagggcaacgagatgtgccccccgcggaccgcgatccccggggggcactccacctttctgatgggtccccaggggaaggctactggccggaaagcgccgctgtggctgagagcgaagtttcagagactcttatttaaactgggttgttacattcaaaaaaactgcggcaagttcttggttgtgggcctcctcatatttggggccttcgcggtgggattcaaaagcagcgaacctcgagaccaacgtggaggagctgtgggtggaaggtaagagcgcccgccgcggcgcccgcgcccccgtcccggtccctcctcgcggttgatagagatattcgccagcgcacacctagagcctggctgcggccggcgaaaccccctgcccgcacccgggggattgtttattgtttgggcgcctggccgggagccaggcccgcccgacaaaggccgcgctgtaatctactcggggcgctgcgccggccgaggtgtggtgggagagannnnnnnnnnnnnnnnnnnnnnnnnnnnnnnnnnnnnnnnnnnnnnnnnnnnnnnnnnnnnnnnnnnnnnccgccgccgctgccgctgtccgcctggtccgcgccccgagaggcgccccggggctggcctctcccggccccgctccgcggcccggcatcccgagaa

SEQ ID NO: 451639 - DNA, 974 bp, Homo Sapiens
gaaccagtgggccccccatttccttttggggtctccttggcccaatcccttggtgttttccttaaaaaaattttggccccggttttccccagtttcccaggttatggcggaaccaacttccctttagggtttctttcccaacccaactttgggagtccaggattggccaacaaaaaattggtgaaacccaagtcttaccggcctggcaaaatacttgatgacttcaggagggattgtttggattattgagtatggaaaggtggtaaattcatcaaccgtgatcccatatcagggacgtgtcctcctggaaatgatcctcctgttcgctgcaatgccctacgagcattttcgtccatcaggatcctcgtttaatattaaagggtcttccactaagatcatatttgttcatagtttctagggctttctttacaaattcttcatctttgaatttcaaccacaccacaacccccttgattgttccttccgcatccttaaagagctccacgtatgtaacctcaccaactttctctctcattagatctttaatagcttgccatttcatgtcatatgggatgttgctaatgaaaactctgttacgatttggacccttcttttcgtccagtgcccgaattcttgtcttttgaataaggatgaaatctattggccttcttacttcctgtagatttttcctttaagtcagatttctcttcttttgctgattcatcattctccattttaacgccattggagctgctgctgtgctgcggctgctgcttctccgcctccgcggggtgcggctctcgccgcggctcgcccggcggctctgcgggctgcaggtgcgggctgtcgccaccagtggccccgggcacctcggccttgttggcgtccgccatcccgccgccgctgcctccgcctcggccgcctgagctgaggggctccgagcgcgacaatggcggctgccgggaagcggtaac

SEQ ID NO: 451640 - DNA, 837 bp, Homo Sapiens
gatccagctcctgggcatcgcggttggcgggtcggcggattctccattgtttgaccagtgatgctggtgtgcttcgggcgtttatctcctcggcggatggccttgacgacttcctcactgctggagacaccccacaagagggtacacgctgctgctcccatttctgtacgatactctgcctgctgcaggagttgctgcttcgcttcattcagctgctgtcgaagagccagtttctccttcgttctctcttatgttgtcggcctgcacggtttccaggcgggctttaaagtgctcacagtccattttcagctgctctaattcttgctctttcctttccaggtttttttctacaatctttaatttctggaagctctccagcacctccccatttagtattctgggtaagaagtcccgtatttgcatcacttcagttgtcagccgttccagatccttctttctgactttaacaaattcctctttagttcccatgtgccggcaggcctcctcagcggcgcccgcttcgcccatggccgctgccgcctccgctccgttcgcctgagcgtcggcgcgccctctgacccctcatgccagaaagcgcgggaacgaatccacgccgggggtcgggaacggagagccgccaggcccaaacctcccagaatttgcgcagtattctcggcctagagagcgaggagtggccttggcgaggtccctctttggctcttctggcttagccggggttttaaacttgttatctcgccgtctacagcctgaattttggcaaccgaaaggcagcgccggcgccacgtgcacacgggctgggccgctccgccagctgcc

SEQ ID NO: 451641 - DNA, 940 bp, Homo Sapiens
  misc_feature (99)..(99): n is a, c, g, or t
ttggtttctggcagggtagcgagtgaaggtcccacccttttgcttgggacttcatgccaccataaacccacatttccggaggggaccggtgatgatatnccaggtctttcaaggttggtctctcgctggttgagaggcccgcttcctcacgcagacgcagatgcgatgttcttgcgggggctccagggactgagatcttgctgctgtccaggtgcctgcgatactcttcgatcatgtgcatgattttcgtagttggggttttctggtattgacatcgagggcgcgtctagctcggatctcctgctgcagccgcctgcgcttttcccgctgctcctgcagtttctggatttcccagaggcagggagactttttctgcttcatcagacaaggtttgctggggaccctcacatccaggctgtcccctgaggctgtttggtttttctgggggatcatcgcaacccatttcgtggcggtacgctggtccctgatggccgaagagggcgccagagccaagggggataagggcgggggcggcatggggtgttcagcagagtccagagctggattcagcaggagtatggtctccaggtcaatcttcttgccttttttgactgctttctccacccactctaccgtgacccaatagttttctctgttgatctccgtgaccacagcgaggtggatccgcttgtcactgcgctggatcgccacgtagatgccctcttggatgtctccgaaatgtggcttcaagggtttcaggggcgagagacatggggattcagggaggcagaactggctggccatggtgagtgatggaggtatcagggagcgctccagggcccttggggttggagcagcaggacccaagccagcctgaagcgcccggagcactgagcaggggtgcagtctgtgcctgcctttggatccaaggaattccgga

SEQ ID NO: 451642 - DNA, 840 bp, Homo Sapiens
ctcactctctctcttttcccacccttaagccaagtacagggataggtgtctcatcattggtggcttaaaatgatgtttttgaacaagaagacgccccatgggtacttttggtgactagcactatctctgtttttttccttttaaattcctgagctatggtttagcagtacacccttttatctccattgctactgaagctgaatgttacttgggtggaaagcataactgctttcttttctatgtccttaaaccctttgataatgttactgtttgagagtccctgaagccaggatactagaagagtctggcttgtctgaacagctgaactacgaaataatggagtagggcaggctttaccaagccaattcactcaagttgtctcatctataccccttcaaaccctgtgaggctgggctttccagcctctaggtgctgtgctgtcctgaggcctgggccatggtgcccaaggaaagcccctgaagctcaccaggaggaagaagcatgcagggcacccctggaggcgggacgcgccctgggccatcccccgtggacaggcggacactcctggtcttcagctttatcctggcagcagctttgggccaaatgaatttcacaggggaccaggttcttcgagtcctggccaaagatgagaagcagctttcacttctcggggatctggagggcctgaaaccccagaaggtggacttctggcgtggcccaggcaggcccagcctccctgtggatatgagagttctctttctctgaactgaaagacattcaagctttatctggagtctcatggacttgcttacaggcatcatgataaaggaccatccaggt

SEQ ID NO: 451643 - DNA, 1267 bp, Homo Sapiens
  misc_feature (208)..(208): n is a, c, g, or t
  misc_feature (213)..(213): n is a, c, g, or t
  misc_feature (1144)..(1182): n is a, c, g, or t
aaagatttcgcaagggacttgaaatccttcaaagggtagtcccctttggcagaaaagaagattttcaatttttccaaacttctgaaagtgctcgagatgcatctaaaaacctgttgatgatggtgggctttggcaaattacagttgctcaaacagatgtggctgtctgttgacccctttctgtggaaaccatttgcaaccccatccanttttntgcataggcttgtacctttgttttctgttgcatgggttgttgtctcatagccatatactgcatgtcttcttgcagacgattaagaggggaatctggcttgacacgaatcccatagtagtggtatttggagtttcctctagtgcccaatctcctggttcgtagccccataaaaattgatcttattaattttccaaaagaggcagcattgactgggtccagtttgtgttcctgacagtgtcgaaggtagtggttgtacagagtgcttctgggaaggctcactccttctgctgtctcataattgtccaacagccactggagatggctgttgagaagagagcttctgtgagtggacagaccgtcagacttttgcagcgtctcaatcgccatttcaattgtcgctggggaggcccgagttgtgtgtgtcactgagtgaccagaattctccattgagttgccgatcagataggttcctccagagctgctgatgagttgtcctcctgtgacgcccatctgaatcccaccagtgcccaccatactgtgggatgagaccacggtagtcacctgggcggaactccctctgagtatcaaagtaattccctccagtattttggctgtacatctgtgtctctgtgtaaggatacgttgttgttcggattgctccattggtatagacagtatcgcttccttccacatactgcacctgagcgggatagacatgttgtacctgctgcacagtctgtacctgctgtacctgttgttgtactggtacttgctgtaccacctgcgtaggcactgctgcttgactagccacagatgtttgtaaggtcactgtcgagcctgtgtccgacccagtctctgatgtctgcatgatggtctcttggctgtggattattgtggtgttgttggtgggtgatggagatggtgtggtggnnnnnnnnnnnnnnnnnnnnnnnnnnnnnnnnnnnnnnntagttgttgttgatgggtaacagtcgccaggactacggtgactatggcgcttgattcacaaggcaacggttgctataactcacaa

SEQ ID NO: 451644 - DNA, 1165 bp, Homo Sapiens
aaagtagcgaggcctgggtggcgaattcggcacgagggatttaaccaccactctcatgtgctccttctcaccaaggccaacctcaaggttttcacactgaaaactacttttctcaggtgcagcttcctgatcaaaactagtctcaacctgagttgcacgagaggccatggacaactgtgccatgttgccagcactgttatcagactggctgggcacctgggcatcttcttgagtgccaaaagactgatcaaacatgatcgcactatcttcctggttatcagtcattccgtcagctttaggattatccacaattttcagagaatctggtgaaaagaactcctcccgagaatgaacgccctgaaggcccattctccggtgtaacatctgaaatggcagactcatctatggagggtcggaggcgctgcctggcccgctcctctgcagactgcttgcgcttatgaaggcgtctcatggggaagggcgtgcgctgatccaggttactgcgcatggaagagctcatgggggctggctgctcctcgccattctggctggaattgagggctgagctcacgatgcttagtcccagctgctgtagcataaaggagcgctgcatgcgggcgctctgctcctgaacgcgctcactggggggagacatgggcagcgtccttgtcgttaagtaatgtttacatgccttaacaacagagttcaaatgcaggtgagaggctgccaataagacatccattacattgctctcccccagcatgagggtggaggtatacatcatgtcaatcagtgcagcaaaggcctctgctgtcaccacctcgctatccagctggatcatgttcatggtctgatctccttctgccactgagaacagggctcggaaatgcgtgctgcatgctgccagcacggagcggtgggctttaaagtgtctattccccactacaatgacacaatcacagagctggccatgaagtctctggtagttcagctgctggaagatttgttcaaagtgaccaggaaaatccatgatcctgagtcgggctccgcccccctcctcctcgctgaaggaggcggtgacccctctccgatcggactcggcagtgtcagaggaggtgggaacgtcctgaccagcgtctccgttacgggacttcctcccccttcc

SEQ ID NO: 451645 - DNA, 775 bp, Homo Sapiens
tgagccacagtctgtgataaaacggagtgtattggtttgctttcaagttcagcaattcgtgaggttgcagcagacactgttgtttcaatacgtctttctcttcagataaggctttcaacacctgctccctcctttctccttctctcgttgtctcttccagctgttcaagcaatgcggtagtactatatctggccttcagttggtctctcagtcgctgtatttctttgtccttctctgtgagttgataagcattcttctccttctcagcctcaaggactcgaattttctccaaaagtctgtgtctctctttatcagtcagctttcctttcccacttgtgatttcatccactgatgtctttaagtgtgcaatttctccctttaatttttctaatgtagtttcggatttggagttactaggcttcgatccccacttacttttaattaaatctttggtacttctggaagacatctctgaaatggtcgccaagtccaaagaagcgatcgaagagacaacggtcttgaggcgcccagccgggtgccaggcacgaagtgagcgccagggaaaaggactgttatcagagcgggcagagattgaatcccgcggacgcgatctgcccactgacctgccctccctggcggtccggaccggcccggccccggggctgcgggtcctggccgcccctcgccaccctccgcggtcgcctcccttgggccagctagcagctgaagcgaagcgcggcgctcgcgtcggccgagtcacaccatcaggtgtgga

SEQ ID NO: 451646 - DNA, 777 bp, Homo Sapiens
  misc_feature (90)..(90): n is a, c, g, or t
caggaagacaagtgtcctgctctgtgtcatctttgggctttataaaccatgttccatctgttgtctcatttgaatctcaggaaaacctgntgaaatattgttatttttcatgttttacatgtgaggaattggaggcttagagaagttgaccaagtatcccagacatactcaagtgagcagtctcagagtaacatcttgaacccagatctcctgtctccaaatttgtgctcattccactatttcacattaaaacctgaagatctccctgctcttttcatcttaacataatttcagcttttgtgtgtggctctccaagtcacagagcagcagcagctttgaggataagaagcagtttcttttaaggataagaagcagtatggttcttacctgcatgttggaacaggattccaggagaatgaaccctagtgtgagccctgcaaatcaaaggaggcaccttctaggattttctgctaaagaggcacaggacacatcagatggtattatccagaaaaacagctacagatatgatcattctgtttcaaatgacaaagccctgatggtgctaactgaagaaccattgctttacattcctccacctccttgtcagcccctaattaacacaacagagtctctcaggttaaatcatgaacttcgaggatgggttcatagacatgaagtagaaaggaccaagtcaagaagaatgaccaaataatcaacagaaaacccgtattcttcaggggtgctctggaacagggctcaaattctcagctgatggcg

SEQ ID NO: 451647 - DNA, 1025 bp, Homo Sapiens
  misc_feature (835)..(835): n is a, c, g, or t
ttttttttgcttttgaaataataaaactttattttgaaaacaaacactcaactcaaaactcttaactaatttatatgattcatactgtctcttgttaaaaatccacacgggggattttaagtctgtatcaggccatgaaaagtttagatatgaagaaggcagttttctttttttcttaatgtttacaccagaccaaagtgaatcattttgagagaaccaccatctctgatttcctgttctctgccgtcttctctcagttctccgtcttctgcattacaggtattagtcatcaaaaatccagaacagatgtctttttcaagttcattccttctgtcaattatttgtctgttagaagagccattcagtattctttgttgtaaaatatgtctgtgggttgggcaagagggagggaggttatctggaaatgagtcttctccttgaggtgctaaagacaggccaataaatgcttcatttagcatatcccctctgtccaagggtcccaggagttctgaaatgtctggcacaaagccagtgctcttccatttcaacaaactgcaaccccagaggttattgattctgcatcaatgtcactagctctttttcttgccacttcagctagtgccaattcacctttatctagtgcaaggtaatgaatatccataaagaggtcacgagcaccaacgtcaacagctaggagaaatgccttttcaaacctctggtacctgttctttctggagtcttatcaatcttgtcagtaacaattttgtttttccaattgctcaggtcaaaacacttgaagtcatgcttgacttctctattatattctttgtccatnttgtcaaatgatactactactttaacaggagtttctgagcaagtgatggaagaatctccttgcatatttgctgatttgatctctatattccatatagtggaatccagaagtggtcttgttggagcatagaaggttccaaggcttgtctcaagcttctctctctggagtgagcttctgtctaagaagatgg

SEQ ID NO: 451648 - DNA, 913 bp, Homo Sapiens
cattcattacacctgattgttcaaccctgtaatgtaacttgatgcttttaccttctgcttaatagcaagaagctttgggtaatgcggaaatgtctgctttcttccggcaattgacctataagcttttgctttgaattcaccttgtcagccaaacataaggctcccgaaaagcacaggctcagaaaacggcttttctacaattttcacttctcctctctgttttgccttatggattcttcttcctggaagatgttctttaccttcttcaggcacaagcattaacacagacctgccaaataaattagtgctgcatatgaagcatatattatgcctagttaaagcagttctttgctggaaaggagatgatttcaaacacaagaaccctgttctgacctgaatgttatataggggttgcctcggcgcattaacttccctcagcagacgaccagatatgtcccttagctctaaaagtctgcatgcaagctgaggatgcagaagtttggccactgatttggaggatctggatatgctgtttaatccacgaattaatgttgctcgattaatcttagctaaagcaatagccatcctgattttggatgttttctgcgcaggttctcttttctgattagactgtgataatcttaggatggtgggaaattcatctttaaactcatctacaaggtccatgattgctttctggatcccctcgattcttccagaaaagttcttcaacacctgcccacatatccacccaacaggtttgattggcatggtgagttcttgcttgggttcctagtccttaacaagcttgcaggcctgggtaatgcttgtcctagtctgccattagtgaaagatgagggtagccttccacttgggaaagccagcaaggacagaactcacagctcactgctgg

SEQ ID NO: 451649 - DNA, 1137 bp, Homo Sapiens
agggggtgacacccccgttccccaaaagttaatgagcccggcttcataaaaccgttcaggggatggatttcctggaggaacttgtgaatttgagaaattccttatcagaaattcgcaccatcagaattcacctcgaatattaacgttgtggcccaaaataaagaaggcaattaggaaaatgtctcctgtgttctgaccaggcacgatcaccaggttccccagttttcagttttccgccacaacagaagcactgcacttggtcatcagtgcctgtgtagtacagcccagcactggccagctctctcggggtcaagtgggcagaggctggcccagttgtgaaacgactgtaatctagcttcttcactatgcatggcggggctcctcgggtgtatggagtctgatctatccaccacctgtccagctctcaaaagccggtctgcacgagtctcagacggcctgtctaaagcacaacgcttttcctctcccagatggttttcaacttggtattgactatttgggacaccaggatttgcaggtttcgtggcactgtcttcaaaataaaagctgcggataaacctgcaattcggcgctgatttcttgtgtttgtcaactcctgagcccccacgttgccacctgtctaccgcttcagggcagctaaggccccccagggcgtctcctccaacgcgccgatgcccaggcaggcccaccacctgcaaagccagcaaacgtttttgatctattaatctcttctactaattcttcatcctcattgatgtctgcagacacatacgttttagatccttcgaaactgttcaaagttatcttctcttgaatataggacttgtccaccgtctcgcgccaggatagcggctccaaccgcccaggcgatcggccttgtcccaacgggagggtcccgcggagggacggtccgagccccctaccattggaaatgccaaaccctgccctaagccgggcccagccacccaggctgacgacccacgattagcaccgcgcgctctggggagccgccaaggtgcagccacttcccagagctccgaagggtcagcaagaaaagaggaagccacgaacgctcccagcctccagctggaaaccacgcatcccgggaattccggaccc

SEQ ID NO: 451650 - DNA, 1446 bp, Homo Sapiens
  misc_feature (154)..(190): n is a, c, g, or t
  misc_feature (722)..(759): n is a, c, g, or t
cttcgcgctctgttgtttctgtctctttggctgtcctgtttgttgttttggttttccgttctcttcttcttttccgcctttgttcctctgtctagctctctctctcgttgttttctgtttcctttttttcacctgtccggcatcgttattgtcnnnnnnnnnnnnnnnnnnnnnnnnnnnnnnnnnnnnngtttgggtgaggtggcttgtgtttgtcgctttctgggctgctctgtgtggggattgtttttgtcctgctggcttccccgcggggtggataagatgtttctgccttcagattgttgctttgttgctgtggtgctccaactgtttttgcttaggcgcgtgcggctattggcgcgcgttgttgtgtgtgcacacccctgtttatcgcttgtgagggtgtgttttatgttgtcccctcgggggctgtttaagatcttcttgtgggggtagcgttgtttgtgccccacatttggttcccccccctctcgtggtttatgtggttctccccttgcccccaatggtgcccccggttgccgactttttttcccgcttccgagcgtttgttttatatccttgctgccccgcgttcttcgtctttatattcggctcctcctcttttggggcccccttgtgtacccgagcaaatcgtggggttagcactcgataaacttggggccccccttggggggataatctttgggcgcgccgcccccccnnnnnnnnnnnnnnnnnnnnnnnnnnnnnnnnnnnnnngtaatttcaatagcgttctctatctttattgatacaccactgcacacatgagggaaacagtgctttcctggaaaagattggagtccatcacatttcaaatgggggaagtaaaccctgatgtggacaagggactctggcagtcagagcagctgcagtagggctcagaggagcaatccctcttcgtggcaggtttttgagcaacgattatcccttctaggttcttcattttgttttccactgtcttaagttttttcaaaattttctcttgcagacccaaggacaggaaaagattattattgtcttgaattcggagaccacttccttctgggttggctagcaaagcctcaaaaatatgtgagcccttcttgtaaagtttgtagagtgtgattacaaacaacaatgttttctgaattgactgaatacttcgtttccataaggcatatattcctattcccaataaaatcaagaaagaaatcctcaagatgatttgcacagctggagcaagattatctaatagtcccaacttgtttgctgaggtgcactagtctctcccaaaaaacttgcttgtatccaattccatactgtgctgagagagagagactctaagaggttgtcccagctagaagatgaagatgttgacattttaataagcagcagctctaggaactatcccgagaattccggacc

SEQ ID NO: 451651 - DNA, 1039 bp, Homo Sapiens
tttaaaagaaaaccctttcccaaaaattaaccccggcggttcccagggcttgggccagtcccgtgcggtggaaggcaaggcccaagcttcccccaattttcgttggctgatcatggtgcaggcagggctttttcgccatgtcttcttttggagaaactcttggtcgggcgtggcccgacttcccgaagcttgctggcgatgaggttcccgctcagcccgagagtctggtgggcgccgccgtagacgtcccgcaccagcatgtccacattgctgtgctggcccctcgaggccaggtgcaggagctcgtcaaacttcttcgttttggtgagcagagcgccaagcccccagaaggtgccgcctccaatggagctgccgccgacccactcgaacctgtcctccgtctccaccttcacgatggagactccagagccgatattgacaagaagataggggaaaatgtgggggtggttggtctggaaccggaactcagggtcggaatccttctggtacacgaaggcctcatgggggatgttcttgagcacgaagttgcaccccttaatcaggcacgtcatcacgtcctccttgtcgactttcagccgcagcttctcttcgatgaggtccttgaacttgtaggccccgcccccggtcgcctggatgaccttggtctctgtgttgacgagatggtctttgatgaagtccaggcaggcttcgatgtaggtattctcaaacttaatgaagtgcagtcgagcagtgatctcttcttgaactgaaatctcatagggcggctcatgttcacgttctgtgtcctttccggagtggtcgaaagaccgcaccttggcgactttgtgctgtaccgttgaatagtaggccagcttggttaacgacccgcctatgtcgatggcgaagcgcttggcgttctccaggttgcggaagatctcgtcggggggcagcgtgatgctcttgtccagactgtccccgctgctcccgctgccgctcgctccacactccgccattttgaaagtgcccggccagctccgct

SEQ ID NO: 451652 - DNA, 1739 bp, Homo Sapiens
  misc_feature (117)..(117): n is a, c, g, or t
  misc_feature (239)..(239): n is a, c, g, or t
  misc_feature (241)..(241): n is a, c, g, or t
  misc_feature (588)..(596): n is a, c, g, or t
  misc_feature (618)..(639): n is a, c, g, or t
  misc_feature (723)..(784): n is a, c, g, or t
cttctatttatcggggatacccggggattttgggggcggggcgagaatggggcgaagtgttgacaaattggggcgagcgagccgcgggctataatcactcatgggcggtcgagtaanatagttgcgccggcgtgtgtggttggtgcggacttgtgggtattagcggggcggcgatatagattgatctggcgagagacgggcggatcgggggatgagggtgtatagggcgcgagagaagngnaatcctgcttcggcgcggggcgggtttattcggcgtataagcaggatgtggcggcgggtgaataggcagggggtgatattggggagggcgggggccgttgtcacgctcgcctgccgcgcacaccccatgcggtcaattaagctgtgtcacgggagcggggggtggatagcgggaatataagaggcatgaaagataggagggggatgggacgcgacgcggaggtagtgggtcgcgggtgtccgcgggaggcggtggccgataatgggtgagaggagtaggaggagggtggccatggggaatgtattgtttttgtggggtttggtgtagggagaggaaggtcgctgacnnnnnnnnnacattgagcatacagggcgaannnnnnnnnnnnnnnnnnnnnnttaagcgctcacaggcaccccatggggggtcgggcgacttggtcggggtgtcattgatggcgctgcgcgatatgcggcgggtcnnnnnnnnnnnnnnnnnnnnnnnnnnnnnnnnnnnnnnnnnnnnnnnnnnnnnnnnnnnnnncgtgtgtctgcagagaccgttggctggccaatttgcagcggctttcgggggtgcgcgcggctcccggggaagcaccgtcgagcggccacgccaattctggccgctgcgtcgcttgggagtagggatccgggaagttgaactcgttcagacagtgctccctggtgtccagcaggctgcgcacggtcagggtcccataggcgaagggctgctgcctcagggtctgaagcttgttccagtacttctgccggaacttctccgccctctcggctgcatccacagagtctggctggctcgccactgcgcgcttcactaccccgtccagggcctcctcaaagcaggtgagccagtattttcgggccagagcgtcatcggtgaggtccaccgtgtcgggcacgtaggagggcgggtccaggaggagcggcaggtcaaccagtggcctctccagccggtccatttccagcaagtcaaaagtgccactccgcgcccgctgcgccgggccgagctcgggtgatgcactcatcagcccggagctgcctgcatagttctctccccagctgtactggttaggattgtcctgctcagctcctttcaggaacgctccgatggctcccaggtagccttcgtgcctcagaaacagcgcctgcacttcccccttgagaagaagttgatgctataggtgatggtgcgcatggtcacggggtggccccggataaagaagcctccaaagtacacgcggtccaggctgtgcagccgtgcgtggaggcaggccagctgcccaatgtcgttgctgatcatgtgcagcaggctcttcgccatgtcttctttggagaactcttggtcggcggtggccgacttcccgaagctgctggcgatgaggttcccgctcagcccgagagtctggtgggcgccgccgtagacgtcccgcaccagcatgtccacattgctgtgctggccc

SEQ ID NO: 451653 - DNA, 1126 bp, Homo Sapiens
  misc_feature (273)..(289): n is a, c, g, or t
taaccggggggtttctttccccgggccacaaataacccagtgttggggaggtttaagattattagaaactgggaaacccagaaaatttctgagtttcccagtgtgcaggttggacaactaaatcttggtggggggaccttcacataaatccacattttcttttcgggggaattcaatttcctttccaataaaataataaggcctgacccaggagatttgcaaactctggctctgtggacctttaagggtcaaattaggttcttctctgtcccnnnnnnnnnnnnnnnnngaagagctggaaaacgtctatccaagatgacctacaggtcgaacccaatctcagaatgcagtagatgggtatctttttctccagattatctcagctctaggagcccctgcctttgtgatgtctccaagccctgagttactgtgttcttggcaggactgtactccacccaatccctgaagaagccacagtcttaccacactcagcttcctgatgatccaggcctgtcctcatggacccttaaccccttggtccttggctctccaaggtatcgatcccaccattgctttcctctgccaatccagggtcaagcccctcttgcattttctgaagttctgagccttttctttatcacctcattcaagtcgctagtgaaagtatggttcactcccctgccgtatgcttgcactacagtttacaaaatgctttcacacccatcacttttttgacccctccaaggttaggaagacagggcaggtattgctttatctgctgggaggataaataaacgaaggccccagatgttaaatgacttggttgaagtcccagggcttgttctaagacctgtatcttcttattcctctgccagaccttttcccactgctccaagtgacctttccacagtcctgagcagtcactgatcactttgtttttaggatcattcccatgcaggatgacacagacccatatctcctccagtaacatgcgctctgtgcaactaagctccacacactatcacttgcagatggaattagaagccctgctaacatgcagcttgaggacattcatgtccatactgtttgggacctgcacagtcacagtgcaatcccggaaattccg

SEQ ID NO: 451654 - DNA, 770 bp, Homo Sapiens
taggagttccacataatgtatagtgcttttcatgtggcattttcagttgagttgccagcccaaaatcagcaatcttgatgttcatattacgagtcagtaggaggttagaaagtgtgaggtcccggtgtagtataccatgagaatgaagatacaacatccctgtgatgatctggtgcatgaagtgtcgagcttcattttctgagaagggtttcactctattctttagatacctgttcatttctccattatggcacatttctaataccagatacacataattgctatcttcaaaatagttataaagctccaagatagaaggatgtttcaattggcaatgtattttcacctcattttggactctctgtaccattcctgctttgtacatggctttcttatctatcattttgattgcaacttccaaaccagtgtgaatggactcagctctgtagacaccagcaaatgatcctttaccaagcagatttccaactttaaaatcctcgatcttctccccgatgcaggtcgccatatttccaggctctggcctgggttctccggattagcttccttcacgcagtcccttcgaggcagcgctccaagcagccagccggccttggcgcccatcaggctcggctctctaaaccgccgctccaggcgacgacgctgaaaccacggaaagttctccctgacaccttccgaggcctgggcggtgcctctgggctcccattttgaaaatctcccgccgcttgccgtccgagctaggctggtggtga

SEQ ID NO: 451655 - DNA, 812 bp, Homo Sapiens
gtcaaacatcaaaggtaacctacattctccgtaagtgaatgttttaactagaattaaggaagaggaaaaaggaaacgggtaaataagcagctatggagacctgagtcctgagtccatggggtgctggggctggtcagcgggtaataagtcatcaaatctagcctccctctatctggcaggaagtggcatgctggtaaggaacaaaaaggtaacagccacggcttagtgggaagagagggaactgagaaaccccaaacctagaagtgccaagggttagtgttaaaagagacagatacacgtgcatggggcaggggtgattgttcggaccatctggaaaggcctttggctgtggatgcatcagaaaccccaccctgggggatgatctatgaggctccggggctgggaggcccccagcacaggtgtcaaacgtacatgaccacatggctaaaaagccccatatctgtccattactcacaacacacaattccccccacccatattgccatgtccaaggcagatgggaggggataagatgacatctctcttggctcttgggcgggcgagctctggctgaggacctctccaccagaggaggcatcatctgcccgcagactgggactgtggggtcatgattacatgcgattgtatcggcatgctcagttctgttctttggctggccatctgagtgaggaccgaggtggccacagcttcatctgcagagcgaacactgaggccattgctaggggctgttgctgagctgtgctgaatcacaggggctggagaacccgttggctctgagctttccttggggc

SEQ ID NO: 451656 - DNA, 1616 bp, Homo Sapiens
  misc_feature (544)..(564): n is a, c, g, or t
  misc_feature (1015)..(1023): n is a, c, g, or t
  misc_feature (1571)..(1571): n is a, c, g, or t
cagagtagaaaaaaactgggctcctttgagttagctgcgtgtgaagtctgtacctagcagggctgctgtgagcatgagtgtaggtgtaggctaagaagacggtgaatggggtgtgagtggggcgaggtggaccagcgattgcatggcgttggccgagggaggggctaagactgttgattgactcaagaagtcacttagcgtcatgagggtccgggtagtctggtaaggggtcgctggagagtgtgtcgcccctctcccccaaccaaaagcttccctccaaccagctgctcttgtcctctcctcccgagggccctgtgccctcccagcggacttgcaggggagaacgtccatgtttgtgcgagtcacaaaggcgcccgttccaggggtcccagaacgcccgggcgtggggctgggggtgtggcgcagcgaggccgcgcagcaagcagtcctcccggcaccgtcggaagcgcagttgcagcagccgtcggacaagcggccggagcagccacggacaagcagtccgggccccgccactgggcattgnnnnnnnnnnnnnnnnnnnnngaaggctcactggctttgagctctctgggtacagtgtctgagtggaggcaaagtgcggttccttcaagatgtctgtgttgaagaagaacaggagaaaagactccgacactccccaggaaccttcggagaaggccaaagagcagcaggcggaggcagagctccggaagctaaggcagcagttcaggaagatggtggaaagccggaagtcttttaagttccgaaaccagcagaagattgcgagtcagtacaaggagatcaagaccctgaagacagagcaggatgagatcaccctactgttgagtctcatgaaatcctcgaggaacatgaatcggagtgagaagaactacatggagctgcgactcctgctccaaactaaggaggactatgaggcattgattaaatccctgaaagtgctgttggctgaactggatgagaagattcttcagatggnnnnnnnnntcgcaaaccaaaaacagattttcgcaaaaatgcaggaggccaataacccccggaaactgcagaaacagattcacattttggaaacccgtttgaatctcgtcactgttcactttgacaagatgctgaccactaatgccaagctccgggaggagatttgagacctacgatttgagaaggctgcttatgacaatgtctaccagcagcttcagcactgcctgttgatggagaagaaaaccatgaacttggccatttgagcaatcttctcagggctatgagcagagggtggaggccatggctcgaatggctgccatgaaagaccgccagaagaaggacaccctctcagtacaacctggagatccgagagctggagcgtctctatgcccatgagaagcaagctcaggtccttcctgctcgtcaagctgaatgatcgcaatgaattcgaggagcaggccaaaaagggagaagctctcaaggcaagaagcatgtcagaaaacagggggaggagagttttgagagctatgaggggggcccacctcccgctgctgaanctggctgaaaatggaaacctaaaccagctcattgaagatttctgg

SEQ ID NO: 451657 - DNA, 1096 bp, Homo Sapiens
  misc_feature (217)..(217): n is a, c, g, or t
  misc_feature (777)..(785): n is a, c, g, or t
ttttcccagacacgagtggtttttcttcgtgggaccaatttcctgcgggaattgccaggaaggatggtcttcgtcccggaattcgtggggtccttcttgtgcatcatcttccaagtcgtttgttgaggcttccgtgacattacgtgacccgagcaaaattcctctcctccttggcccagaaattcttcaatgagctggtttaggtttcccactctcnagccagctttcagcagcccggaggtgggccacctcaatagctctcaaaaactctctccccctgtttttcttgacatgcttctttgccttgagagcttcctcccctttttggcctgctcctcggaattcattgcgatcattcagcttgacgagcaggaaggacttgagcttgctctcatgggcatagagacgctccagctctcggatctccaggttgtactgagaggtgtccttcttctggcggtctttcatggcagccattcgagccatggcctccaccctctgctcataggcctgagaagattgctcaatggccaagttcatggttttcttctccatcaacaggcagtgctggagctgctggtagacattgtcataagcagccttctcaaatcgtaggtcttcaatctccttccggagcttggcattagtggtcagcatcttgtcaaagtgaacagtgacgagattcaaacgggtttccaaaatgtgaatctgtttctgcagtttccgggggttattggcctcctgcatttttgcgaaaatctgtttttggtttgcgannnnnnnnnccatctgaagaatcttctcatccagttcagccaacagcactttcagggatttaatcaatgcctcatagtcctccttagtttggagcaggagtcgcagctccatgtagttcttctcactccgattcatgttcctcgaggatttcatgagactcaacagtagggtgatctcatcctgctctgtcttcagggtcttgatctccttgcagtggcggggcccggactgcttgtccgtggctgctcgggccgcttgtccgacggctgctgcaactgcgcttccgacggatcccgggaattccggaccggtccagcct

SEQ ID NO: 451658 - DNA, 1144 bp, Homo Sapiens
  misc_feature (152)..(152): n is a, c, g, or t
  misc_feature (259)..(259): n is a, c, g, or t
  misc_feature (322)..(322): n is a, c, g, or t
ataaattgatccccttccctttccctaaaattgaggttagattcagcccgggcttggaaaagccgggcccgtttgctgggtccattttggatgggccagggcccaaagggggcaagccaagaggagcccccccctggcaaccacttaaacancggtggccatttgccccacagagcttccccagatattgctaacccccgggaggagggcaggaatcctcccagtgtcccccccgggcagcgcgcacaccccaacacgntcaggcttgaagctgccgtctagttccttgatagcccagcaggcgttggccaccagcttgtcnaagtgttccatgggggaccagggtgtgggtattcatcacagaatggagggcccaggatggatcttccaaaggccccagagattggatggccagggagggcagtgtggccaggacctctgcagtggccgtggcgtaggcctcccggagctgcgggcgaggcaggccagccttcagcagctgctctgcctgttccagcaaggcttccgtcagcagaaccacgaaggctgtgccgtccccactattctctgcctgggtttgtcctgcttcccggaggagccatgctgctgggtgctccagctccagggccctgaggatggcagtggcacaccccgtgcacactgtttctcctttcatggtcaccaggaacttctgccggccgtgggggccatagcaaggccggatgacactggccagggtctggactgcagccaagctgctcagcaggtggggctcctcctcttctggactcctcgggctctcccttgggttcagtgccagccgctggggcagctccagggctgaagggactgtgctgtccatggcccgcagagagaggagaggccaccgtgggttgtagagatgctctagaaacagcagctggggcactcctgacaccgatcgttgaaagtactcaagaggtcagtggaagcaaggagccaaatgcccattgattggtatctgaagacatcagcacggaccagcactccactgtgggtccaaggatgagctccaaagagcccagtcctaaagccaccccagggttgattctgtaaaggaactgggtcttggggcctctcaacctgatcccgggaattccggacc

SEQ ID NO: 451659 - DNA, 1035 bp, Homo Sapiens
  misc_feature (821)..(841): n is a, c, g, or t
attcggggtgagggccgtccgcggcctcgctttcgcctcctccgagccgggccggcgatggccgcagctgtgaggcgagcagaagaatagaaggaaggtgataggatgtgatgatagaattgtgatagccaagcaacaacttttcctaattcggcatgttaaaaaataagggtcactcatctaagaaagataacttggcagtcaatgcagttgctttacaagatcacattttacatgatcttcaacttcgaaatctttcagttgcagatcattctaagacacaagtacaaaagaaagagaacaaatctctaaaaagagatacaaaggcaataatagatactggacttaaaaaaactacacagtgccccaaactagaagactcagaaaaagaatatgttcttgatcccaaaccgccgccgttgactttggcacagaagttgggcctcattgggcctccaccacctccactgtcatcagatgaatgggagaaggtgaaacagcgctctctccttgcaaggggactccgtgcaaccatgccccatctgtaaagaagaattcgagcttcgtcctcaggtgctgctttcatgctcccatgtgttccacaaagcatgtcttcaggcttttgacaagttcacaaataaggaaaacctgtcctctctgtagaaagaaccagtatcaaaccctagtgatacacgatggggcccgcctgtttcagaatcaaggtgtgtgaccagaatccaagcctactggagaggatgtgtgttagaaagtggtacagaaacctgaggaaaacagtacctcccacagatgccaagttaagnnnnnnnnnnnnnnnnnnnnngttcacagaaatcagccaccgcatcctgtgctcatacaaaccaacattgaagagctctttgcagaaatcgatcagtgcttggccataaatcgaagtgtgcttcagcagtggcaagaacacatggggccatgagatcacagaagagggaatggggagaaaattccaagttgcaggctctgcggccgggagaccca

SEQ ID NO: 451660 - DNA, 1121 bp, Homo Sapiens
attatgtataaacattatttcccccccaaaacccaggacccggttagtctcaggcaattcctggccttttcgagggcaacccttggagaataccttttcccagaccattttaaacccctgttgctttaccgaaagatggtttccggaaaataggcctgggttttaaaaacaattctccctgggtccagattcaggggcaagatttggtttcctcatccgtggataacaggtaacaagcttggtctcaaagaaacttgccacgcttgctatatcttcagcaggtgcatcaaatggttctcccagaactgctcctttgctgcaaagctcaagtgctgttctgaactgtcctgctgccaaggcgtatttcttttgtctatagcaagagctggcatcctttaaggctacctgaagccatttgtcaatctgaggcagaaagctgaaattatgtacactcaaagggtctactatttcagcagcttggcatgttggctgactctcagtagacatgaaggactctacaaactcatagcgaacacccatcttcatcaatgtagaccaacttcatttccacatccattatgttctttaaggggatgtgaggcagaggcatggtgattaactgattgtcaagttctgttatctttgcctgtttctttctagttggcttttcttcaccttctgccttccgtttaaaggctgctttctttaaatcattgctttgtttttctttgatgccctttgtcatttttgttctttcaagtgtgatttctacctgtttacctccacagtttttcttaatctcttgtgacatttccaggatgttaggtgggtgcgctaaggtggacattttcttgcttgtgtttatctttggaacaagctgatcatgatagatcctattcactgcattctccaaactcctactgcttcctgcatccatcgatcctgcccaaaactcctaagcagttgtggctcagccccgcggggacagggcgaagctctggactcctcccagccacagcatctgccaacaccggcttcccaacgtcccactgcgaggcctgatcaggctgcttgctcgcggggacgccaggacttgaaacgtcccgtgccacgaggcccat

SEQ ID NO: 451661 - DNA, 1150 bp, Homo Sapiens
  misc_feature (185)..(224): n is a, c, g, or t
ccaattgagaatattgttttcccagccttaggagtatttccacccaaatttgatgaccccacagaggattccttccattggggaagtgcacaacttggccaaaagcgggcatttgaggaaaattttggatgggcttcctgggtggtgctaacgagggtggctggttgcaggaagaagttcaccannnnnnnnnnnnnnnnnnnnnnnnnnnnnnnnnnnnnnnncagtaaaaattagaacccggagggccgcgcctgaacttattgggttggacggggtacttagttaggcttgtggatgaaagccttattggttggttttgtaggaatcatcttggtgggccaaccccgcagtcctgaaaaacttacccagagtctctccagccaaagagcttggaaacagaagctctcccagcttggacggtggggtttccagcttactagaggtggtggaaagagcagttccagaaggtgccacaggtctgctgctagatgcggcaggttctcctggggtggtgtttgatgcggatgtgattcctgagggaggtgagctttcaggaatggcctcataagaaggtttgcttcccccaccagatgagaatgcgtccggctggcttgactctttagtggagggtgttgccccttgtgcagcagtgaaattagaagacggtgttggtgtgattatcccaaaattaaagccagtccctgatggagaaaatgagaaaggcttgctgaactgcccagaagcagatggggttgaagtcacagctgtttctatcttggctgtccctggcaagtgaaaacagaagtgaacacctcgtaacaaaagagaggatttcatgatcagcaatgaatggtgaatctcggaaatttcttgcaagtcacactacttgcccagacatgcataaagcaaagttccttaggtttctttgattctaactccaagagtgacaaaaacctctccaatgaagtccttgaaaaaagagtatatgatctttcaaaacctttttgtaaaatactcaagtctttgacagttctactatataattttccttttaacataaagctttaggccctggtcgagaagtgctagataccatcccgggaatcccggaccgggccgagcggaggggaaaggggaggggaatggg

SEQ ID NO: 451662 - DNA, 1103 bp, Homo Sapiens
  misc_feature (194)..(202): n is a, c, g, or t
aattggcgtgggccggaaattggaaaaaggacccagcccacagaattctttcagagattaaaattattggagtttcccggggaaaccagcttttctccctggttgttggtaaggttgaataccagtgttgttccctgcctttaagggctacaaaaaggagggagggtgcgaccacctaggaaaaggacccaatnnnnnnnnnctttccaatggcacgtttatcacaggaggatgtgatattaataaaccaatttaggcagaaatggtgttattctcaaaaatataatgtagttaatgagaatgttctctatgacgttcaacctggctgtggccattttactgctttctctgtgtaggtattgtgtatacaactggtctcccaacttaatagggaagcatataacagaaagaggcaccaagtccaagaacacaaacacaacaagaaataaggctagtggaaagggataaagaaaccctgagagtatactgagaaatatagagcctggaatagcaaaatgtttgcaagctgggtaaaaaatatatgtagcaaaataagctacaagtacttgaacataaaaggtgtccttgtatttggataaaacttttcctagagccttggcatcatccatatctctgggaaccttcatattcactctttcttcttcactaagctgaggaaaatttttatatacctgaaaacattaacaaaagcttgcagataagaaaatggacaccaatataaggagtgacattcttgctgatccagcttctacccaggatttttccttctggtggtctctgctgccaggcgccgcgagaccccgcgtccccgctgccccgtcccccacgggggtcgtgtggtgagcgcccaactgcgatcgttcggcgactctgcctttcgccatggctgctgcaaggtgaagggagcggtgcggtgccgcgccccctaaacaacaaaactctgttgcaggctccttactacgccgaggcgccacggctagagccacttccggcgcgacctcctcacccgagacgacctcagcccagcgagtactgcaacctcctgcaaacacccgcagcgcccaccacaggctaaacccgct

SEQ ID NO: 451663 - DNA, 848 bp, Homo Sapiens
tgcttccaactatatggacgcatatccgagaggggcaccaagctcagctgccctcttcctagaattaggcttagtggaaaggggataaagacaccctgagagtattctgagaaatatagagccctggaatagcaaaatgttgccaaagaaaatatatgtagcaaaataagctacaagtacttgaacatcaaaggtgtccttgtatttggataaaacttttcctagagccttggcatcatccatatctctgggaaccttcatattcactctttcttcttcactaagctgaggaaaatttttatataccctttacattaccaaagctgcagataagaaaatggacaccaatataaggagtgacattcttgctgatccagcttctacccaggatttttccttctggtggtctctgctgccaggcgccgcgagaccccgcgtccccgctgccccgtcccccacgggggtcgtgtggtgagcgcccaactgcgatcgttctgcgactctgcctttcgccatggctgctgcaaggtgaagggagcggtgcggtgccgcgccccctaaactacaaaactctgttgcaggctccttactacgccgaggcgccacggctagagccacttccggcgcgacctcctcacccgagacgacctcagcccagcgagtactgcaacctcctgcaaacacccgcagcgcccaccacaggctaaaccccgccccgtgccgcccccgagcctcgcgtgctcgcgccggcccagtaaccgcgagacaagtcagggtcctggaccgcccccttcagtgccccgccccggcccgcccgcgggaaagaggtggccgccgggcgctccgct

SEQ ID NO: 451664 - DNA, 798 bp, Homo Sapiens
  misc_feature (134)..(146): n is a, c, g, or t
tgcgggtaatgggctaggcggaagcgctaatgggaacgcccgcgcggtgtgaaggctatttcgggagttatccgcggaattttattctccccatgggcgatttcgggagccgaattaatacaggaaccattccnnnnnnnnnnnnncaagttatggcaaggcagaaggggggaaaaaaggctaagattaaaggtgcgccgggtggaaccgggccccaggaagggccagcaagcaggttccggttgcgctcatgggttgggaccaaggcatcaagtagctcccggtagcagttgtggtgctcacctttccaaaggcagccagggtgggccccacagcctaaggggcagcgctgctgtccattctgctggcaatgctggcggtgttcatccaggacacctcgcagcacctgcacagtgcagccctcgttggggcaggccgttagctcaaaggggcatgagtcctggtgctccttgcgatgggccagggggtgtgtgtctatgcagccggcttcggcgttcttgcacttgacttgtaggcggccaatggtttttcggagtttattcatttggaccatctttttccttttcacctcttttctacagcatggacaggtgttttgtctggctagccacctgaggatgcactttttgcagaagatgtggctgcatggcaaccttgttggcctcttgagaaccccatggcagacggagcacaggaagttgctgtcaggagggctggcgaagaggttgagatcgtacccgccactcatgatctgtatctggacagcagctccacccc

SEQ ID NO: 451665 - DNA, 1050 bp, Homo Sapiens
tgccacatgtgttgaactgctttccagtgttgctggcctcaacagcattcctggaaaacgcccgatggctgcatcaagttgcctttaatgacttcaatccctccctgcaaagaacaggaagatggcaccttagggtaccggttcaggtaggccttcaagagctcctcggcctcctcgatgttgacgttcccagtaccgagcacgaaggtgaggaaggtgtggtagcacagcaggagcatgtcaccgggcccagagcggaaggtgtgccctgacgttccctcctccaggtgcagcagcccatagtccttgtttcctgaaaaccccacaacttccaacagcctcaggatccttagtagggaagcatggacagtgtcaggttgaaggcccttacaccaagcttcactcctccttcaaagtgcgggtggttctcacccttgcagtattgtgaggactgaacaaggctgtccagctccttgtaggtctggtagctgtttcgaactttgatgccgcctttgatgaagctcaccatgttctcgtcctgcaggaaggtcagggctgctcgctgcagcaggcactctgcatagcagacctcagcgtggatttcctcttcagtgaattggcccagcgtggggcggttcaccaggctgctgaaggaatctgttacagaagacttcctccggtgcctctgacacagcatctgtgcctccttcatcatgttgccggcaagcaggatgtcctgagggtcaaaggtcatcatggcctgcatctccaggatggtggcatatgtcagtgagtggtacatgctttccttggttctgggcttgaggtagctgagtgcttctgagaactggttggtgaggaagaggtccagggcggtcatgcactggtccagggcctcatggaggctgctctcaggagtccctccacaagggtaaagggagtctttgtggcccttctggcccattgggctctgctgcccccccagggggtgcagcccagccactaaatcccacagcccctttttccatcccgggaattccggaccggtcc

SEQ ID NO: 451666 - DNA, 1776 bp, Homo Sapiens
  misc_feature (48)..(61): n is a, c, g, or t
  misc_feature (364)..(408): n is a, c, g, or t
agtcatgcttctgcactgcagcctgagtgacagtgagactccgtcccnnnnnnnnnnnnnncaatactaagtgaaagaagtcaaacacaagaggctacatgctacatgatttcatttataagacattctgaaaaagacaaaactaggaacagaaatcagattagtagctaacaggggctgatggtgggaggaagggattgcctacaaagggaaatgaggggcctttctgaggtgacagaaatgctttatattgggaatgtggtggtggttatgtaactatacatttgtcaaaactcatcaaactatacacttataaagggtgaatgttatatgaaaattaaatctcaataaacctgacttaagnnnnnnnnnnnnnnnnnnnnnnnnnnnnnnnnnnnnnnnnnnnnnctaagaaaaaataacttacagtttttccagttcaacagtcatcgtgagaatgttcttaagtgttgtaagtgtgatgtgtgttgttcccatgtctagatattttaatgccggcagttcaaagagatatggatcttcgacagtagtcagaggattgcgattgagaattaagttgtgtaaaaactgcattccgtgccaggcctgaaatgttccaaggctcagttttgtaattaaattgcagcccagatttatatactgcaaaaatggtagtgattcaaatgtttgtctttcaatatattgtattttattgcaggataaatctaaatactggagggatagcaggccttcaaatgaatccttaggtaattcagtcaaataattttcactgagaattagtttctcggtccaactgtatgctttccatacatttccatcaatgtatgaaatatagtttccttggaaatttaaggtggtgaagatgccattgtaggtgtcgggctctggcacaggcacttggcggagcctctgctttgggctgagaccaacacatgacagagtctcatctccgcaggtgcagagctcacatatgttggtgcttgtggaggccttctgttcctctggtgcagtttcagactgcaccaatgaatcctgcgaagattctaactttgtaggtggacctgtgacttcagtcaggcttcgatgcagagtctgaacctggtctggatgaggagctgtagtcttctccagggctgtggaatgtctagtctctgtagtgtgttctggagttatggcaagtcccgggtctggaggctgagttgaggtctcctccgtggttggagatggtttaacctctgtagtaggttttgtagttatggtaagctccaggtccagaggttgaacggtggcttgagtcaggtgtgaatgctgagcctgacccttgtctgaaggtggaagtgtcacctcagggtgtcctggaggaggagctgtagtcatcagggctgtagaaggttcaacctctgtcatggattttggagtgatggtaaaccccaggtccaaaggttgacactgtggctcgagtcaggtgtgaatgctgagtctgaacctggtctggatgtggaagtgtcacctcaggatgcttctggagaaactatagtcctcttcgggggtgtacgaatgtccaacctccgtagtaggttctggagtgattggtaagtcccaggtccaaaagctgaacctgtaacgctgggtgacactggatgctgagcttgatcctgacctggtgttggatttgttaccccttgatatactcgaagcttggggtacaactttcttaggaggctgagttggggtctccttcatggttggagaaag

SEQ ID NO: 451667 - DNA, 267 bp, Homo Sapiens
ccccagctactcaggaggccccagctactcaggaggccccagctcagactccagagttccctaatgtagttgtagctcaacctccagagcattcacacctgactcaagccacagttcaacctttggatctggggtttaccatcactccagaatccatgacagaggttgactttctccaaccatagaaggagacgccaactcagcctcctaagaaagttgtacccacaacttcgatgtatatcaaaggggtaacataagtccaacacc

SEQ ID NO: 451668 - DNA, 963 bp, Homo Sapiens
gctcagcttcagtcgtcactgtcgaactctgaggatagaccttgacagtatctggggccccctccagaaggggtttcgggcccttgtaggagaatctggtgggtttgtcctctggccttccctgggagggtggcgtaggtggggctgggacaggtgggggcacatcagcagcttcagttgtatcagcagatgctgatgtgggggccagaggcggcatgatgctgaggtttgggtctgaccccagttggccccatggggcaatgggtctttagtgagaggcttctgtggtcccagcacgcccttagactgcagtgaaaacttgaggcaggagaaggcaacaggtaatgaccgaagtagccggaggagctggggctcacgggctgtagacgtcagccccagctgcagccaggaacaagagaagacctggtagatgacatagatgctgtgggtgcttcggagccagggaagagtctgctgtaggctcacctgccctggtggcagcaacaggaaggcaaccttcttgcgcaggtcacccatatgtaggcggatcttgcagggctgtccatccaacattcgcgtctcttcataggctctctctgctcggccatttggtgagtattcccgagtgcagtgggcgaaggcaccctcagatcctgcctgctccaggaggcttggtagtggccccactggtttcagtgccctccggccctgccgacctggcaaagccaggcgggtatgggctgggcgggactgttttaccagcacacccagtaggtcatagcaggctgcatctgacaggaaaggtactgctactgcattgggcccaaagtgctcctcgatgaccttatccttgatgagggtccaggtggcatcagcttcatccagtgtcagcaggttgggggtacccaccaacatggtggggtatgggagggattgggcagggcagtggctgctgcaggaacc

SEQ ID NO: 451669 - DNA, 1600 bp, Homo Sapiens
  misc_feature (122)..(122): n is a, c, g, or t
  misc_feature (165)..(165): n is a, c, g, or t
  misc_feature (497)..(497): n is a, c, g, or t
  misc_feature (586)..(587): n is a, c, g, or t
  misc_feature (681)..(681): n is a, c, g, or t
  misc_feature (729)..(729): n is a, c, g, or t
  misc_feature (860)..(911): n is a, c, g, or t
tcctctagtttgcgaactcgcgtgctggacgagtgctgccggtatcattgtgagagagattcttccagcattgcatggcacagctttatgaccgatagccttgagtagggctggggtcgggnccttgcatggggagggaggcagggcgcgacgtgatgcagagtncacatagacgctcgttagcggctgtgaccccgatgttaagaacaagaggtatggactatatatgtgtgtgaccagatgagatggtgggacacgtcgtgaccgtcgatgggagctagcgaacaatatacatgtttttccctctacctacatttcgtgtcgcgaaaatatggagagagggatgcggccggcgggcgcgcccggaagtctctgcgagcatgtcgaacccacgtccgctcgaccagaggcgaaggccgccgagcgcgtattggggtgcgagagagtattccggccgaggtgggagacttcccaatagatgatgtgcgcgacttgtnattccttgatggtgttagtttgttgagggcgtattaatactacactgcgtctgaaatagggaaaccggctagacaccaggacgaaggannacgacatgcgccgcgcccgctggtcggttagggagtgtgtggaagagagatctaagttcatagagcgccactgcgcctgtgacagagctagcgnggccgcactcgatgcagctagtcgagccgcagagcggagcagagtaangggcgaggcggtgtgtgcgcaagagggcgaggatgggcggaggagaaacgagcgcagagcggtgtcgttcacgcgggccgcggagtaaagaggcggatattggcacgcgcgtgagtggcctttgtgaaaannnnnnnnnnnnnnnnnnnnnnnnnnnnnnnnnnnnnnnnnnnnnnnnnnnngttgcctggttgtgtggcactgtagcgtactagggggtccgtggtgttgtggcgtccggtgcggagatgtgggagggtggccagcggcgcaagggtagggtgtgaagggtgcattataggggtggagatggcgaactggcgcccacggcgtgcgtgggtgcggccctatcgctcaaggcggggggtgcggccagggagggggagtgatcccttgcagaggggtggcgtccaggacccgtgtgtgcaggagggtccagcgctggcccacggagaggccttgagccggtcacctcttccctccttcagaccgtcggtttcttagtaattcttcgggctccagcgttggacagggcgaggacgcgcctgtcgcagcgctgggaaatgttacaaaatcacacccactgagccccaggaggaggctgctcgcccaaggtcacgcggagagggcagtagcctccagacacgtttcctgcctgcccctgccaggcccggcctctgatgtcacggggcttccgaggggtccaaaggaaactttcagctcccaaagccaaccccggggtcctccgaggctcaggagcctccctcgctcggcccagtccggctccgtcccaccgcggaggcgctctcccggcgccccaccgcgcctcagctcccctctcccccttcactgcgaccgccggggcgccccc

SEQ ID NO: 451670 - DNA, 1361 bp, Homo Sapiens
  misc_feature (41)..(41): n is a, c, g, or t
  misc_feature (81)..(81): n is a, c, g, or t
  misc_feature (104)..(104): n is a, c, g, or t
  misc_feature (242)..(242): n is a, c, g, or t
  misc_feature (1102)..(1131): n is a, c, g, or t
cttcgcaacccccttgcaatctggccgcaacaatgcggttnaatgcccatcaatcactgaatgtggcaaggagcaagaggnagagagacttgaggccatccaanccctgggctatgtaagccagactctggtctcccaccttgtcacagaacgaaacatccagccccgagaggcgcaggctcccatggccagatgcatgatgcccgtgtcactgatgttgtcacaggagcgcaggttgaagntgcgcaggctgcccatgtgcgacaggtgcaggaggccagcgtccgagattcccccacagaagctgaggttgaggagcctcaggcccgtcagccctcgggagatgtgctttagagaaagatctgtgagcttctggcagtcctgtagcgtgagctgctccaggcccaggcagccctccgccgcgctgcgcgtcatgccggccaggtgcccgatgcccacatccgaaaggtggcggcagctgcggaggttaaggctcttgaggcgctgcagaccccaggcgatgagcagaaggccagtgttggtgatgttgctgcaacctcccagctccagcacctccaggcccttgaggtactgggctatgcggcccaggctgctgtcagtgatctgcttgcagaggctcaggttgagagcgcgcagggagccgatctcctgcacaaacgcgtggcccagcccgttgtcggtgaggttgtagcagccgctgaggttgaggctctcgatgttggccatgccctggatcacgtagctgaggctgcggcggaggctcaggatctgcacccggcggatgccccgggcctgcaggctggggaacagcgacgggttggcccggcgcaggtgcagcttggcctccaccccccgccacaccgacttgtggtaggcggcgtcccgccaggcggtgcacacctgcgccgcgcgccccttgtcccggacgtccaggtagccgaagatcatggccagcagctccgggaacaggcatgagatgtgggtctccatcttcctcctcccccctccgcggcgctggggggaggaggcgcgggccccgccgctccggcctcgggcaggcgacgagagcgcttctccccannnnnnnnnnnnnnnnnnnnnnnnnnnnnntcgggcccaacggccggcccctccccgccttccggctccggccgccgccgccgctcctcctcctggtccgtccgtccttccttcctgccggctgcgcctccggcccggccctcccccgccccgggctccgcacggcgctcacatcccgggcggggaaggcgcctcgctctcgctcccggaggccggccgccgccgccgcctcggctctacccacgccgcgcccgggccgc

SEQ ID NO: 451671 - DNA, 1238 bp, Homo Sapiens
cttcccataacacatcttctgtttcagattctggccttgcactctcagaatcctgtctggaacttgaacagcgagagctgcaactagtacccgatttaggggcgtcctcattagggtaatgtttcttataatggtgtgactttctattccgaagaacaccttcagaagtcctgtccacatgacgacgtaatgagtatcctgtttcaggaccttcctcactggagacttcatcagagacatttgttattgtcctttgggtatctttgctaggaccattcctcagtgttcctgtgttccaggctgtctcttctggtcgaatagtttcaacactgaggttcatggttttgtaattccatcttcaccgcttttaacagtcttcttccccatcaagggatacatagccattgtcagtttcagttgatttatcaattgaattctttgctttctttgatcctgataaaaagaaagcagcatgccagagatctctgaagacagtgccaacgctgtgagaggtgcttgtaccgtggttctgaactgctccctcttgtgtgttatctgtggtactagaaccatctccttccctatgtacttccaaatgggctgcttttcttaatttccttcttcttttaccccctgtacttagaggaggtttgggtgttcttgtggaaacaatctggcaatgcacagttcccaggagcagcatcagccatatcggcccaatcacctctgtcagaggtatgctgtgtgggctagaagtggagcagaataatactattgcagcaacttgaagaagataaaggacaagaagccagaaaaagatgacctttgatgttacttgtaaccaccaccggaagaaaaaggggaaaaatacaactcgaacaattccctttctggtcagagaagtccaaggactttcaggctttgcctttgcaaatgcagaccctcttacaagatcaacatctatgaggtctggtttcacatgtgctgttttctttggtttattccttagccccttgatttctctctgttcaacagatttttcccatatttgttgatcatatgctccaatcttcttttgataccagactatagcatctgtgactttggacgccatttattccactgaaatcacacattggtcattttaggcgtaggagcgagcgccgcgccgctaggaggcggctgaggtgcgcgcgggagactccgaagctagcgccgccgccaacagagcccccgct

SEQ ID NO: 451672 - DNA, 589 bp, Homo Sapiens
caggaaaataagatcagctcttaggcaaaacacaacccagaaataattcacaaattctttccaaataacgggtcaggctgcctccggcatgtcagtatggaacatttaccattttgtgacccaggggaaccaacctgacctgagggtttacacaagggtgaggtggagagcacaatattattatttaagaaaaatctccatgctcttttggtagatttcagttttttgttatttacattttgtcatatacctcaatgactagcttgaaataatcctgtgatagttggcattttagaaaattcttaagaaatgacttaacacatatgtaataactgttttctatataaaaacactaataaagcctccagtttttcaatcttaggcttgacaatatagtgagagctctggtagaatatccagttacaagcctgtaaaatgataaccagggttagtgacagaagaaagagggccagggcagggacgtggaggcccaccttgtggcacaatctgacctgtactcatcatgggaatgtcctgggtagatgacagaccttccccttaccttccattcttctaactcccctgtgga

SEQ ID NO: 451673 - DNA, 1107 bp, Homo Sapiens
aaggatgggcccctgaaagacctggggggcggaagtggcacggggcatccacctgggacccaccatccctaaagggccctccatcccggggggttctgagtcctttggcccagggccctgcaaacaagaacctcctgggaccaggttgctgcaaggcctcagggaaacccaggcacagggctgcctccagagatgcttcactggacgacttcttgatcagtgtctgtagtacaggcaccagcttgccctcatccccggacttgagtcttcttgtctttagagacagcagcccaggagttaagagccattcgtagccccgtcaaagtctccatcctttgaccgtcatttttctccttcagctgtttgatgagagcccggatcacatgcttattcaggcaacccaggatggccagggttcggtaggcctcgtacttcactttctctggaccagtttgggccacctgctgtagtgcctccatgacaaacttgtcactgatgcgtaagcatcccagagcctgtgctgcatagaactgctcatcctctctgggagattccaggctttttgtgagttcccttaatctttgccacttcagggggtcctgggtaggctctaagggcctggatcgcatctcagattttatagtcagcttgctcattgggagatggaacattttgatgtgggtttgatgtacctctttgatgtacctacagtcatctctcattttcctcaacatcttctcagcctccctgttcctctcgctgatcatacaggtcgtgccagtgcgtgtagatctcaggtttcttgaagtagcagtacgggactgagtttggcttgctcggatgctgcctccagcactctggacttgggggaaactcttcctttggcatctggtagcaggacaagggcagatgaacaggagccatggcttttctgagttctttggtcttgtctggatattccagccatgggtacaggaacattgacctggagacatcagagatatcagttgatttttcataggccatcttcttctcctggtggggccagagggaacctgcaggggggaatacaaggcttttaggggagtgggggcacagctggaggag

SEQ ID NO: 451674 - DNA, 1194 bp, Homo Sapiens
  misc_feature (53)..(63): n is a, c, g, or t
  misc_feature (134)..(197): n is a, c, g, or t
  misc_feature (200)..(209): n is a, c, g, or t
  misc_feature (266)..(380): n is a, c, g, or t
  misc_feature (1007)..(1007): n is a, c, g, or t
ccccagaaggcagtgaaaaatttttggggggggaggtgtggccccaaatttgnnnnnnnnnnngaaaagagagggttgtctttccaaaaaagatccccaaaggggcgggttttttccccaccccccgggttgtnnnnnnnnnnnnnnnnnnnnnnnnnnnnnnnnnnnnnnnnnnnnnnnnnnnnnnnnnnnnnnnnttnnnnnnnnnnggggggggcggtaaaaattggggcccccccaggggggttttttagggcggccccccnnnnnnnnnnnnnnnnnnnnnnnnnnnnnnnnnnnnnnnnnnnnnnnnnnnnnnnnnnnnnnnnnnnnnnnnnnnnnnnnnnnnnnnnnnnnnnnnnnnnnnnnnnnnnnnnnnnttttttgaacaaagtagcccttcttgtttattgaaaatacctgcaaaaacgtcacttaggaagctcagaagagttgaaaggacttttagcaaatttcacatacaagcacagatagaatcactgtgagtatggggagttggagagttgatctgacacgcaagaagctcctcaaaggcacagatactggcagagagggtggggaggactacaaacagctacatgtgtacactcacatggcttgaagaagggtaaagaagccatgtcctgggctagatgactgtttctgctgtcacctgtgtctccttttgtactgagctcggttctcctcccaaactctccagattgtccaggtacaggctcccgtggtcctcctccatactctgggaagtggacaacaagtgccagcaagggcaaaccatttcttgaatgaggcagatggtaccagccactatgaacagaaagatgccgaagcccagcacgtagtaaggccacagcacggagaactgcagggggccgagcttcatcctcagagccttgatctccagggcatgcagcaccaaagccaggaaggcacaggcccctgtgaagaagctgatgcaggctaacacaaagttttgcttccaggtncctcgggaagaactcggatgcaaagggcatcatgatgaaggtggtgacgaaagccaagaaaactgcagagagcaggaaaacccggccgaggatgatgtaaatggataagggtcgaggcttccagcatttggcattgaagcagttctcaaataggccactgaaaaagacttcgtgggactcctcgttt

SEQ ID NO: 451675 - DNA, 167 bp, Homo Sapiens
accatctgcaggagcgagggcgtgaccaggggcgcacctacgtcctccctgggaggcccaccacccttgctacagcccaccggttccattctgagggagcttggccacatgccctggggcggaactagcaggagctggggctggcggagctggaggagggtctgggc

SEQ ID NO: 451676 - DNA, 802 bp, Homo Sapiens
gatcatctgctgtttcttttcatgtcttctttctctggggctaaactaacaggcaggtttgttgataacagttcattgattttgtcagtcctctgatattttctttgtgggctgacacatcctcagtaatattggtttccgatatcatctcctgtttcttttcattgtcttctttctctggggctaaactaacaggcaggtttgttgataacatttcattgattttgtcaagtcctctgatattttctttgtgggctgacacatcctcagtaatattggtttcctcggaaagttcttttgcttctgtgatcttctcttcgaaaccgtgccatatttttaagaatatctttaatttctgtttaagagattgttaaacttctgtgcagtctgttgttctgtaacttgatggctgctattctttaggaaagggagagagccccaggaggaaggggaatgtgatccaatttcgaataaggcaatggtaatcctagggtccagatattcttgatgaggatcaggagtagggttaagggttttggagatggtgggcatctcagctgacttagcagagctggccatcaggacagaaggaaagcagaaaactttagagattccaggaaggacaggtgatggtcctttgtgcaaatgtgggtggagactgtggaatcaagcagaagtcagagaccaaggttaaggattaaaatttgggagatgatgtttaggtggaaggtggcatctcagacagccttgtggggaggaagggtgggaaaggggaccaaggctggggctccatctcttctcc

SEQ ID NO: 451677 - DNA, 1118 bp, Homo Sapiens
ttccaccttcctgtgttttggactcttttcccctgggccggaaaggtttttcccctggtcccattttctttaaggggttcctcttaggcatatttggcacatttccgggttttcttggggattgtttcttaaaccaaaagtttttttccaggcattgggctccttttcctcttcttcggttctttaatccagattcaaccgccagatgttcctttgggtgaagcccccagtccagggggagcccaggggcccgtgggggaagttggagggtttggtgttaaatggtaccaaatgtgtagaattctaagtcaccgcagtgagattttgctgctcctgctgggtcacaattttggcaatctgagctctgagagcagcaagttcattttcgagagcgcaaatcttctgcagtgcttcctcatttgccagcgctggggtcttcagctgaggctcttcttgagacaagtctggtaaggaaatctgtctgcttggggccttctcaaagaaaagaaggtcatcctgaaggggtggccttgatctgacctctgtccttagtcttgctgaacactctccttcttctttggctacccatccaacatcagcaaaagacgccactgcatcctctcctgggtggctgggactccattctgttgcatggctgttaatctgaaactgaactcttggacactgaatcagagacaaattagtaccaattttccttacgatacttcgagacgaaccatatggcttcctagaccaaagtaccgattgcatgcttactccaacttgttgaaaaaccatcctaattaggcgcttaatccagccaagcatttatatggcaaagtctccccaaatttgcatttcaagtacttcttcaggcatacatagcagcacatggtccataaaacacactcggccgcgcggcagccagcaccctctccggctcctcaggcttctagcttggctgtcccgtggcgttgctgccaatcagccaatccccgccccaagcctgagccaggctgatcaatcagctgtttcctcaggctcggaggcgggcacaagaagctcggcagaggacgcggcaaccgctccgcaagccggctgctgagagtcacagtcgg

SEQ ID NO: 451678 - DNA, 810 bp, Homo Sapiens
ttgttgatgtttgtgtatgtagctgcatggggcatgtgtggtccgtgggtgtctgacaagggtacccaagccagggctatttctgccatgggagccaggaaggggtgaggaaggctggtctggtctgggaaagggcagggttcaggattgggaaagacataggagcggggatctgcactgggcataaccatgggcattgtgacctgcccaatggagaagggcatccgaggagccagagagggactgggttgaaacacctgaagcatgaagtctgtctctgatgggggtggaggtaaagtgggagtagggatttgaggaaggctgctcagcttggctccgttcctcactaactggatatgactattaaattggtcacgaacattctttttcattatccgaactccattcagtctcgtctcccactcctgtttggaacgaactgtctccagtgttgggggagttgacttgaggtaagtaaggtgcaattctgcctctttttctgcttcttctagtttcagtaccagtaactctttccggctctctagtgataagatctctgccttccaggcccgttcagtctcttccataacctgttcctatttagttcgccatccatgattccttgagtctatccagttccatttcccacacctctcttctgcccttctcacagaagcattctcaatttcagctttgcagatcctgctccttcatgccgaaactccttctgtctcgtgttctctatcttcgttctcgggcttgtattcgccacccaggcctcgctaccttagaaccgttatagttactggc

SEQ ID NO: 451679 - DNA, 659 bp, Homo Sapiens
tctcgtccccaccgaggcggtcgctgatctgcggcacatcacaagtcagaagctcacagtgctgtgtttggatatttgaagcggaccttctcctccatgtccaggggcggatcctgtgtgatgaggctcaccagctcctccatgcactgctgcctgcacaggaagtccagcagcttctggttctgagccttacactcctgcaagatgtcatcttcatccattaactcctgcagcgtcacatgctccttgtccagcagcttgtcaacatgggacgtggtgttcaagtcaaacttccagaacatcgtgacggccgcagagcttctgtggaaatctcttgtttaaatcatgtattcaggcaaaacagaaaaacatttgtggtttttttcttggagtatatgcagctttaagaaaatttttttcattcagtggaagatttataatctctttacctgccctgcgggccgggcgtcgcggcagctcttcggaggcccgtgtggaggcccgagcggaggccagggcgctggtggaggcaaagcccgggcggcctcgggcgggccgcacacacatgggcccggccgagggcgcagcgcctacggacaccggcacggccggccggcggctcgagacagactcggggccgcgggcggcacatgcaatga

SEQ ID NO: 451680 - DNA, 824 bp, Homo Sapiens
gtggtcctcgccttgacctcggcttagcaacctcgggccccagtcggtctgttccctgggagtcaatcaattaagatgttggtatcatctgttgacgcatctgacgcagcttctctgagtttctggctccagggaagccagagggggcctgggccggagccggttcagggcgcctcctgcagcatgtccacacccagcaagcagctctggtgctgactcgaggtcgtgcagggctctggctgtccagcaagcccacgcccagcgccacgcggccactggcaaggtctgcagggggccgggtgcccgggggcccctgtgggagagccacgcggacccgctgcagcagcagcaggctgccggtcatcaggtaggcagccgtgaggaagaacagcaggaactgtgttcggcggagaaacttctggagtcaggaagaaaggtttggccatgcccctgggcagcagggctcctggctggagccccagggatggctcctagcgcccaggtgggagtgaggccagggcctccggaggcgtcatccttgcatcctggctcctggcacctgcctgtgctcgcctggggtcactcactgttcctgccccgtttccagtaggtgttcaaatggcaccattacttatctccagtggccacagggtcctgcagctgcagcctctgcccaggcgtcaaggacatctccattccagggctctaccgcccctcatctcctggcgcagaaatgttttgcttttgcctctgcctctgttcaagttcaccaagagacggagcaaaccctccgctgaccggaagcctctcttggtagcggaacg

SEQ ID NO: 451681 - DNA, 1032 bp, Homo Sapiens
gggcccttctaaatgtgccaaagcaggagggtcttcttggctgccggtgttctggatgtgcccccagcgagattccccagaggatgacattgctgcgggcacgtcaaaggcgcatctgcagccttgccagctcattgttttgctgcaggatctcatcatcctttttctcccatgtagcgcgccagccgggccttggcgcgctccatcttcctcctggccttcctgcgcagactgcatgaggtcgtggcgcatgctcaccagcgtcttgtagcgtgcaatcacctcatggatctcctcgaactcggagttctccaccaccttctctaggtacttgttgaagatgtagtagtccttcagcttggcgctcagccgctggtgctccagccgcagcgccaccatctcctgcttgcgcttggtcagctcctgcatgtgctggcacttgagttctcgctccttgttggctttcttcatggcgcggatccgtttctggtcgttctcctggatgaactgctcagacttctggatgtgagccttcagttgggcttccttaacgcccagttcctcccagcgcaggttcagggtttccattctgcgctgaaacatcttcttcttctgcaccatagtttgatgcatgatttctgtctcctttttcttctccagtagccagatggatggggactccgacgccccctcaacattggggagtttctggagcatctgcagcagccgctccccatactgcagccggaagtactcggccaggtcttcctcttccatgatgcccagactcatggtggcagtgacctcacggcccaggcagctgactcttcacagtgaaattgtgggtagcagagccacaggtggctcaggggtggtggctgcactcttgtttctcccttcggcctacagggtcccacagatgatggagtttgagactccacagaaggtggctggagacaggttgggcggctcaggacgatgtgctggggcagttatgggagatgtggatcccgggaattccggaccggtcca

SEQ ID NO: 451682 - DNA, 839 bp, Homo Sapiens
ccagggaactcttctgtaatgcaaagcaattgctctctgttgttccgtcatgtccacgtggcacagaataacaccttatagagttggaaaagatggctatctccacattgctggattggtctataattctcacagaaccttctggaacatttggtacatacagggtaacaggaaagggttattgactggaagatttcatggttgccattgcccgtaaagcctctacttcattacgtggggaagaaaccttcatacatcctaagtaggtcagtttattaaataaacactatcttcttcaggtagtccacctggagaagatggtctgggtgtagaaatttctgtgttagacggatccaaaattaactgaagagatggcttatttgtttggctggctggaatatctccaaacgaatggtctgaaatctcactggaactttgacaatcaacaagaagactgcttggccttttctcggaatctctcaaaatctcttccatggctttttccaattgttcatcaccattagaaactatcttcagttgaggtttttcttcatgttttgtagaattatcatctgcatactgaggaaccaaaacaaattcttcactgttcattgtagccacagaatcagatgatccactaaccttctgtaatgaagctctgacctccatttcagttctgcaaacttctcttcccacaaccacctcttcacgtctccgcgggcgctgccgagacaacaactccttcaggcgcccgcgttccaccctccacctcgcgctctgaagccgggccggtcccgttcgctccgccaccgctggagcccgaggaggcggagggactg

SEQ ID NO: 451683 - DNA, 196 bp, Homo Sapiens
ggcggccctgatagctcctggcattgcgcttggcctgtttataagtgggggaacaggccgcctgctggacctgggtgaggggggcaacagccccacgctgtctctgagatttgggcccaagcttcttaggcatctgagttgcccctcctcgtttaccaccccattagaaagaggtgagggtgtaggggcacagggc

SEQ ID NO: 451684 - DNA, 712 bp, Homo Sapiens
gtttgacgcctgctcaaatatggaagcacctttaatgagagttgacatgacttgggggatttcctaaccatcatgctcttaacacaggtgcctggttaggaggttccttccacctggctgagcccagacaccgatctgtgagagcagcacagtgcaagggaaggctccctgcaaggggggtctgcaggctaggctggcccttcagggtagtgttttggttctttcctgaagcaggaggcctcgcttggagcattgctttgctcctaaattacttaaccaaacagcgacttattttccacagtcaggtagacaaacaccacaatgatgaaaataccaagcacagcaagcttcaagcccactgggaaaccttcttctctccagctctcgatagtctggtcttccgcgcagtagtctctctctttggtgatagtcccatatgtgattctggtgcttggtgctcttgcagcccaccttcttcccttggaaggcttataatccaagcaataggtatctacagctttgcgtttagtggtggaagcctcaggccagtagtattgggccaggtgaaaatccaagcttctcaagttggttctgcaatttacagtcactcagacacttcacatccaccatgatgatagaagtttggcctcttcctctgatggtagaatccccttcacatggttatctaaagtctatgcaatcgagttggtac

SEQ ID NO: 451685 - DNA, 910 bp, Homo Sapiens
ggggaagacttagactccttctttatattgggtttccttgagcctttggtggctgctttgtgtctgctggagggcatgctgctagccaagtctacaggggtttcactttctatcttcaggcctccacgaggctcttcagcagctgccttctcagcctttttgggttgttttttgcctacagttcttctctgtgttgtgctgtcactctgtgcaggagatttctgcctcccacgcccactttctgatcccttttggatggttttggagtctcgtcccggagtagcggaactcgtttctttaggtccacttgtatcagtgtagctattcccagtgccctgctctcggccttcctttttgtagccttgagatgatgggatgttactgtccactgaagaggcgggtgacactttatgtgggttcactttattcagccaattatcaagttgccatttgtttgttggcgggggttcaggctcgggagatgcactctgggatggctcatttgcctcactgtcactggaactactttcactctctgagtcagatccagagctgctttcagatccactgtggctactagaatcatccctggagttatctgctccttcactattatggtgtgaaggttcagagttacttcctggtgtactcctcggcattgtcttatcacaatcctgttccccatcactgtcttcactgctgcttagttttaagtcatcttttaacatagatttagactggtgcccatttgaagttttagaaggattatatcttttttgttctccagtgccaaaattggactgctgagactccttagttggaaaaggaaatttggaaggttctgttttgcatggtgtatgaatagccgttagaggggaggccatgaatgcgtcatctccttgaatgggcc

SEQ ID NO: 451686 - DNA, 1024 bp, Homo Sapiens
  misc_feature (135)..(161): n is a, c, g, or t
gcgtccggtattcccgggatccgggcaaacgcccgcacgcgcccggcccctagtcccatcgcggggagggtactatcgcagcttctccgtcaggccttgggccatggcctcgctacgcaatgccaacccgaggcnnnnnnnnnnnnnnnnnnnnnnnnnnnttcctcaggtctgcgaggcactgttatgtggtatacttgttacatgtcctgaggatccgctgaggtatttagagggaatgatcatggttataatcaaaagtggtcttcagaatcttctttgatgactccggaattgatgataaaagcctgtagcttttatactggacatttagtaaagactcatttttgcacttggagagacatagctcgtacaaatgaaaatgtcgtcctggctgaaaaaatgaacagagcagtgacatgctacaatttcagacttcaaaaatctgtatttcatcactggcactcttatatggacgaccagacagaaaaaccttaaaaatatgctcttgcgggatacaacagatcatctaattgtcacaagctaaccattatcctaacaaaatggcggaatacagcaagacataagagtaacaaagaaagaagatgagctgatattaaaacatgaacttcaattgaaaaaatggaaaaataggttaatactcaaaagagctgctgcagaagaatccaattttcctgaacgaagttcttctgaagtctttcttgtagatgagactctaaaatgtgacatttcactgttacctgaaagagcaatattacagattttcttctacctcagtcttaaaagatcgtgataaatatgtggtccaagttcaattcatgcctggatgttgatgacacacactgaacttcactgttggaaatgctgccacatgtagagaaccttgcaaggagtttgaaatgtctctgaacctgcccaacattcgcagatgaattcactgagaccacattcttgagggctgccagggggtcctggtgtatcatcatgtctacacaactatgac

SEQ ID NO: 451687 - DNA, 884 bp, Homo Sapiens
cgagctcctgctgcacgaagcacttgtagacggccggctggaaaacctgcagctgcctgccgccggtggaggggtccagaaaggtggtgaagtcctggccggagagctggctctcccacgtcaggggggtgtcgttggcacgccagttgacgggcctgtacatggatcctaagggacagtcgagccacacaaattctgtcttctcatcgagcctgaagttgtcaaaaatgacgtaatccacccttaactgtgtgttattggtgcactggacgtggcaggcttccacctgcagctcaggccgcaagcggctagaccacaccagcacctctcccagatagagccagcagggcatggcttcctccagaggctcctcaatgtagcggtaccccaggcgtttacactcgcccggctcctcacagcggttgcagtcctgccagggctcccaccaggtaaaaatgagctgtttgctgcccaaatgcagggtctcgttctgcaggggcctctgacccaggtccttgtgtgttatatgcagggtggtgacatcctgaaagtcaatttcatactgcaccacttggcggccattcttgttccagcagtggtagaggcccgtctgggagggcaatggatctttaatgagaaggctgccctcgggcattatttccatattggaaatattggtgaggctggtgagcctgcccttcttgccttgtgtgaataaatagtaccagtgcgcccccgaggagttgcaatacaggagaatatcattgcctgagagtagggcctgttggcactgcttaccactggggcagctgatggaaaagtagaaccccagtgccggggcagcaaagtggagcagcagccacaatcccgggaattccggaccg

SEQ ID NO: 451688 - DNA, 1022 bp, Homo Sapiens
  misc_feature (63)..(118): n is a, c, g, or t
  misc_feature (141)..(156): n is a, c, g, or t
acccgcctcgccgatctttttgctttgttttgtttttagctgctgtgtccccaacacctggannnnnnnnnnnnnnnnnnnnnnnnnnnnnnnnnnnnnnnnnnnnnnnnnnnnnnnntagtggtatgagaggaagagggnnnnnnnnnnnnnnnnggcttcttggaagaggtgacacttgaggatatatttccaattaaatatacctaagtgactgcccacctctgcaacccaatgtcacattcgagtcttactgaactacttgactgcatttcccgagatctcacctcttctcgcctgtaccctgtgcgcggaaagtcagccctccaccttctccctgcttccactcccaaaatacttcgtggttttgcagctctggagtatttaccgtgttggctgtttaaatttctgcctccatcagaaggcagaaactgactcgcgaactattccatccccagccgatagtagacgcttaaaaaagaacgaaagaaggtgggtggaggacttcagtaacatcaggtggcagcctcaattttatcgtttgtgaaacgtggatagtaatccctctatcacgtggctgttgcaggaataaagtgaaaaaacaaaacaggctagcttgttcaataaatgtgagttgaattaaatctgatttgtggtcagtagaaaaagatgtgaatacttggaaaggaagacacatttttttaaatatatgcctggtaaaacggatcagaaggcaggtccccatggagcacaccctcgccctaaacatgctgaacccgggctgccatagcctgcgtggtccctccaaggtgactgctccgacaaaagggtacgctcttcaaacgcatacgtttaaggcaattccagaaaccctcggctgtgccgcgactacacggccattaaagaaaagacgactctatgcccgccgtaatgttctcagatcacagggaccgtatttggagctgggagggagggaagccttttcttcacggggggctaaggcgtcttcgagcccccttcca

SEQ ID NO: 451689 - DNA, 728 bp, Homo Sapiens
tgggcaacactgaaacccaagtcttgtaaagaatgtcttctgggtttaaaggtacttttgctgttgatgtctgttttcaacagtttcaccccttgatgttcaactgccagtaggtcttgatattttgatttaacagattctggaagcatagtcaagatttctgattgtttattgaaatcatttaagaatagagccttgaaaactttcagtaatgttcctaggacatcttcatctgagataactttgtctttggattcctctggaacatatcggagggtcctcgggttgtggcttaggttcagtgcgatccagggaacgaagcggtacttgtaacggcgccatcgctgccacaggccccgcagcagacggccaggcatggctgccccgcggggccgtgaccaggacggcgcggggaaggcggatcgaggcctcgggcccgccccggcccgggaggagagggggccgcgctcggccgccttcccctggctccgccctcagtgttcctggcaccgcctgacttctgttgctctggggcttcgtccttcccctttcctgacctcacctctctgaatgagaggcgcgtagagcctggaaggaggtccccttgaccactttttctttctccggtcgctcgggtgcttccgtgggcgcacacagcgctagcctgccccgggcgaagggtcaccgggcctcaggggcggacccgcccccgagaccgcgtcccagga

SEQ ID NO: 451690 - DNA, 922 bp, Homo Sapiens
gatcacctattatgtccattgacagtgagttgtatgagtcctgagaatgtttttctgtcacccctgctgtatgactggataaagatgatgatgaagacaatcgcagtttaacatatcttcgttttttaccacagagtgaacaatctactggtgtggcactaggtccccgggggcagctgaacttcatctctgttgtagtttctgacagctccactgtgatgaacagaacgttctctttgccagatataatgggttggtgcaatggccataacctcctcacaacatcgcctgcttacaatagccctatagtcaattctatcccagagctggtcccttaactttaagaaattagggaacaattgttctccagtttttccctaaagcccatggaaaaatttcgtacttggtttcttcttcatcgttcttcaactgtattagccagatacagagcaataaagaaatttatcctggtatgctcacttatagtaaatttagccctcttgaaataaacaaaggtcatagccaaaagatacttgtctgcaattttacagcagcagtccatccacaagaaatcttgaattaaatcgtcatcaaataatttaaagaaagcagtcatatcctgacgctgtataaccagacaaggtcctttggggcgtttagatttgttgttattatgtgtatttttttcaaatgcttgccaattatctttacaaataggacgcttcagagtaatgggctttttaggctgatgtgatctatttgaccctgattttacataaacagtgacagtaggtggtgtctcacaacacatctgattgtgcctcattttggtttcccaatattcctgcggaagcccggggctgcgcgggagagggccgggcaacggcggtcaaggctccgtcgcagcgctcctggcctcaga

SEQ ID NO: 451691 - DNA, 868 bp, Homo Sapiens
  misc_feature (88)..(88): n is a, c, g, or t
  misc_feature (128)..(128): n is a, c, g, or t
gatctttccccacagtccttcactgacagcatgggggtttaacaatgcgacaggtacaattagtaaatttagccagtgtttgcccggncccacaacttccccttgaaggaaaaaacaaactccatttnctctggccgcagaagcaaaaagaatcagggccatgcgctgcatttcttatgccatctgttccaaagagggctctaatgctttcagaagcatctgtgcgtgccactccagagtttgcaggtcccagcagtcttttccattcacatatagcatcatctcttaaaatctccatggcaataataggaccagttgtaataaactggatcagctcattgaaaaagggtcttgactggtgatctacatgaaaatccaatgcttctttccttgaaagcatcatcattttgagtttggttatagtaaatccagctttgtttattatttcaattatttctccagcctttgatattgcatctggtttaattagggctagcgttttttctttcctactgcccagctggcgagctgtatattgatccccatagtcaattaataccagttgtcgagaaaagacattcactttgttgcctataaataaatcttccaagtgcaggttatcatatttggtccgctttaaaaaggtgcgatgattctttacatcatgcatttcaacagatccatcccctgggtaaaataaaagctcataacgtcgaagaagtgaagcatttggatcataccactctgcaatgaaaacgaatctttcactatgattcattgtctcaggatctcagcactagaaaataggtatcgttgagacaggaagacaccaccaccaccaccatcatacggttactcaggcaacccc

SEQ ID NO: 451692 - DNA, 605 bp, Homo Sapiens
gctaatttttaaatgctttattacattaactttagtatcattagcaggtgaatataatcagattaacaaactggtttggccacaaggaaaagaaaaaacatttctgaagcttcacaaaactatgtgtgtagtgtgcaaactagaaccagttatactttcatcacttcacagaacacaagtagtgtggtgcatcaagagatgttccactgctgcaccatcacctccaaactgtagaggagagatgaaggcaaactttggaggaatttccaggcactgcagtcaaacattatctgtaaaactgcaggtataaatggcattatacaaagctcaaacatccttcaaaacttggactattgaagtctacaattaaatttcaatttttttaacttacaaggaaatcatactcatttaagatacagttacctctactttaatccccagctcagtcagatatttgtagtcttatcagaaatatttgtattaggtagttgttttatttcctattctattgcttacaattttaaaatccacattaataactccgcgtaacatttatacatagattaacagaaaggtaaactttaatttccaaattaggaatgaag

SEQ ID NO: 451693 - DNA, 1424 bp, Homo Sapiens
ggagttcaagcagatgtatggctaaccggaaacaggtgggtcacctcctgcaagaagtggggcctcgagctgtcagtcatcatggtgctatcctctgaacccctcagctgccactgcaacagtgggcttaagggtgtctgagcaggagaggaaagataagctcttcgtggtgcccacgatgctcaggtttggtaacccgggagtgttcccaggtggccttagaaagcaaagcttgtaactggcaagggatgatgtcagattcagcccaaggttcctcctctcctaccaagcaggaggccaggaacttctttggacttggaaggtgtgcggggactggccgaggcccctgcaccctgcgcatcaggactgcttcatcgtcttggctgagaaagggaaaagacacacaagtcgcgtgtggttggagaagccagagccattccacctcccctcccccaggcgatctctcagagatgtgaagccagatcctcatggcagcgaggccctctgcaagaagctcaaggaagctcagggaaaatggacgtattcagagagtgtttagtagtatcatggttttgtccctacctgcccggttcctttcctgaggacccaggcagaacatgcagaaccatccatggactgtgatatctgaggctgctgagactgaacatgttcacattgacagaaaaacaggctgctctttataatatgcaccttttaaacacattagaatattttactgggaagacgtgtaactctttgggttattactgtactttacttctaaagaagttcgcttgaactgaggagtaaaagtgtgtacatatataatatacccttacattatgtatgagggatttatatacattatattgaacatgctgccctagaagtacaatagtgaaggctaaaactaataactaaacctgtatactggtcgttgtaaggggcatgcagctagtagatatacaactagatatgcataaacttcaaccagctgcctttaaaacgggagctctagtccttattcagtgtaataccactagcactaataaacattacaaactaccaagatccattaaagtgacgatatacaatcagctcatgagcgacaaatgccatacgagttcatccgtgaaacgaacaatacaatgatattgatgtcaagtacagagagcaacgatccttgtccaaagcgagacgataaatagacaatcatagataaaccacacatatgaatatgtatagtacccatgtatcacgtaaagtacatggcatatcgaaggtaattagcagtataaataaaagaaacgtatggataacagcgatattcaatatgtaaacatctacagcaatgtaacaacaagacatataaacagacagtgtaatatttgtgcccgcgtggctggactagacacaaatgtaac

SEQ ID NO: 451694 - DNA, 1174 bp, Homo Sapiens
  misc_feature (402)..(402): n is a, c, g, or t
  misc_feature (730)..(742): n is a, c, g, or t
  misc_feature (802)..(802): n is a, c, g, or t
  misc_feature (807)..(807): n is a, c, g, or t
cctgcagtgtcctggctgttctatctacacggagtgtgtgtttttttcatcaccccaccgagaggggtgttcgtctcccccgggggtcctcttagccgtgtggttccgcgtgcgcgtcttgttgatgcgccgctcgtttgttctgctcgtctataatcaccctgcgtgttattgtggccacctgtcggtcacggcaaggttgtttgtcgtgcggtcgcgcccctctcggtagtggttctctgcatggcggcccgcccctgtggtgtgttgcatatctgtataagtgtatcggtattagtatgtgtttgaacttgttaaaaagaagtgaaatctgtggcaaaccaacagaggggagaaagaaatcagacgtaagaaaagcgatgagccgttttcccaagaggnacaccagcaacatcttctgagtcattaagaatagaataatgcataggaaaagtgaatttggaatattttgagccgaagtccccatggacttgaggagattaaccgattaatcttctgtggaaatatttcttggcctgtattcatagttcctttctgcacagctttgcagtagcactgggaaccgacaaccttgaaatcacgctgtaaaaattatcagcatagccattcccagagaaaacgggatggatttgatttagagtttctcaagaattcccccttcagaaaattgttactatttgacttgtctgtcagttacctggaaaggacnnnnnnnnnnnnnaatttgacctgactcagagttcactcagtgtgaataatcttttcctgaggcattttccanaacanatcagcagcaattgtttaaattgaagagggctgagaaagtgataatggttggggcaaagaataagaccaaaaaccataaaagaaaaatctgggaaatgagtagcctgtaaagggctttcaagagctttgacatattcctgggaatctggaaaaacacgcatattgcaaaatggtgtgcatgcccaagaaagacgttagaaagttcttatatttcacctgtagctgacactgaggttctgtacaaacagaaggcgtgaaggtttagaaaatattttaaactacttgccacaacattgaaagtgtgccgccagcacatacactgaacctcttgaccaaggtggggagacctattggtgcagggcattta

SEQ ID NO: 451695 - DNA, 1124 bp, Homo Sapiens
  misc_feature (168)..(184): n is a, c, g, or t
gtttttttctttgagaacggggccattcccggaaattccagctttggtaacgccccaaattccagggggaaaaggccccccagggaaaaaggggaagggaaagtggtcaaggttaaacagttttggtgccggcagagacgatcgttaccttgggccatggcagatctnnnnnnnnnnnnnnnnnttcttccctggatccccccgggccacgggagtcacgccagcgacagtggaaagcctcccctggcagcgcgttccgccactagccgcaccccgccgagctctgactccggaagaggtctcctgtggcgatcccgccctttcgtttgaatgtttgtgcctttgatgggctcttaggttggatcgcctcagcgtggtcttgccccattggagccattgccggcctgttggcctggccgcttccgccccttccctatcccctcgcggagggcccgccccctgcccccgctccggctatgcggaggagagtatatactacaggagcgcattatggtcggaaccgccgagcccccgtgcactgtgtcgctgcctgcggcccccaccgccaccgtctcggagaaagaaccgtttggcaagctgcaactctcctcccgggaccctccgggttctctgtccgccaagaaggtccggactgaggagaagaaggcatccgcggagagtgaacggagaagggggcagcggcgggaacagcaggcagctgcagccgccggcagcaccttcgcctcagagctatggcagccccgcgtcttggagctttgcccctctgtctgctgctccctccccgtcctcttctcggagcagtttctctttctccgctggcacggccgttccctcctcagcctccgcttccttgtctcagccggtgccgcgcaaactgctggtccctcctacgctgctgcacgctcagcctcaccatctcctcctgcccgccgccgccgccgctgcctcggctaacgccaagtcgcgcagacctaaggagaagcgggagaaggagaggaggaggcacggtctcggtggggcccgagaggccggcggggcctcccgggaggagaacggggaggtgaagccgctgccccgaggtgggtgccgatcccgggaattcc

SEQ ID NO: 451696 - DNA, 884 bp, Homo Sapiens
  misc_feature (670)..(670): n is a, c, g, or t
ccgggaggctgtgccgccggcctgagcccagagtttcgcggcctccgcgatggcagaggtggaggaaaccttaaagaggatccagagtcataaaggggttattggaactatggttgtaaatgcagaagggaagaagactaacaccatgtcacagagcaagaacttcagagcagactcactatagacaagatgttcaggggagtgcatttcatataaaaatatgttaacttagtactcaagtagtcagttaatggcttctgaaagatttatgcacaaaaatgttcatcatcaccccattagctataaaaaatataaggtaccaaatgaccaaacaataggagattgattatatgtccataaaatagtgaagtatgcagttattaaaaataatgttgatgacattgtcaacaaggacaacttgtatgttataattttgtgaagaaaaaagcaacagtcaagtttgtaaatatagtttcacacaactatacttaaaaatctacgtagcgacaaaaggatttgagggaaataaactaaaattgttaccagagagggataagccatcacttttttctcttctttacaactatcagtattttccaatacttccacactgtacttattacttttctaatcagacaaaaatattaaccaaaattaaatttcataatanggtattcccatccgaacaaccttggacactcaacaactgttcaatatgcaggccttcttcatcacctgacaatgaaagccaaaagcacagttcgtgatattgatcctcagaacgacctgactttcttaggaatcagatcaagaaactgaaatcatggtagctccagataaggaatatcttcctgatcgtcattcagaatccatgtgaatagact

SEQ ID NO: 451697 - DNA, 1073 bp, Homo Sapiens
aaagggaaatattttaaaaattgaatatcgatgatacttctaggccctggattaggagttcctgattaatttctcgttcgcagatccagaaggataaaagtgaccccctggaaggctggtaatttttagcatttccactgttacatctttccaggcttccatgtccttggctatgtcttcagatccaacaaaacatgtcaagtcacaggaaagaacagccttagatggtacgttagaggtgcaacttctaacaatgttcagatctgcccttatgatgggactacattgtttcacaaattgcttggcttcagcaaaatgctttggggggtgcctcccaaattgccataaggtaatgacttattgtgttcttcgtgacgattcatcatctttgggaatgcgatgccaggcctttgaatgtacaggagttgcacttgacaaaaataaatgcaatggttctggttgattgttttcttttagacctagtgcagtcctaaaagcaatgtaggatcccatactgtggcccaaaaatgcaaatggtttatcctggatgactggctgcagagcaccaaccacttcatccacttaactggggagaatgtccattttccaagaggttcttcaactctgctttctcttccaggaagccttaaggagtgcacttccagcaaatcatgagtatcttggccccatttggcaaaatgagtggagccacctcccatccagggaaagcaaatcagcttaaaagttgcctcagggtttttgtataagcagttgaaaatgttttcattcctggttctcttaggttggtctcctctctccatgctgtgaggtgaggttgcaagatggctggtctctgtggcgtgttgagtgctcaacagaagtcagttcctcttgagacgaagaacctctgctcggccttatgcacacagaagagtgagtagatttctttttaaaggcgctgactcttattgacctctccaatccttgccaggctttgagatgaactctgagcagacaatctgaaagatgactttctttggattgccaaagaaagagaggacacaggaaatgag

SEQ ID NO: 451698 - DNA, 1127 bp, Homo Sapiens
ggagcaccattttcctgcagccatcgattcctttcaggatgctgtgaagtgcttatcagagttcgcctgcaacgccgctttccctgacacgagcatggaagcgattcggctcatccgcttctgtggcaaatacgtctctgagaggcctcgggtgctacaagaatacacaagtgatgacatgaatgtagctcctggtgacagagtctgggtccgaggctggttccccatcttattcgaactctcctgcatcattaatagatgcaagttagatgtacgaacaaggggactcacagtcatgtttgagatcatgaagagctatggccacacctttgaaaagcactggtggcaggacctgttcagaattgtgtttcggatttttgacaatatgaaactccctgagcaactgtcagagaaatctgagtggatgacaacaacctgcaatcacgcactttatgctatttgtgatgtttttacccagttttatgaagctttgaatgaagttcttctttctgatgtatttgcacaattgcagtggtgtgtcaaacaagattatgaaacagttggcgcgatcagagtacaaattgctttagaaaacttagttatatccaatggagagaaattcagtcctgaagtctgggatgaaacctgcaactgtatgttggatattttcaaaacaaccatcccacatgttttgctgacatggagacctgtaggaatggaggaagattcatcagaaaagcatttggatgtggatctggaccgccagtctttaagcagcatagataaaaatccctctgagaggggacagagccagctctctaacccaacagatgacagctggaagggtagaccatacgcaaatcagaaactgtttgccagcctcctcatcaagtgtgtggtccagttggcaattgatacagaccattgacaacattgtgttctaccctgcgacgagcaaaaaggaggatgcagagcacatggttgccgccagcaagacacgctggatgcagatatccacatagagacggaggatcagggcatgtataagtaccttgtcttcccagcacctcttcaagctgttggactgttgcaggaatcccatttcattctcaaaggcttcaattcca

SEQ ID NO: 451699 - DNA, 1558 bp, Homo Sapiens
  misc_feature (712)..(712): n is a, c, g, or t
gggtccggaattcccgggatccatcaagagagttcttgagatcaaagtttccaaatggagacttagctctggcaactgcagaaaagtttacgaagaatctgaaggaccagactgatggctagacttcatccagagacaacaatggggtgggacccagtgaaggaagtgaattgggttatgagttccacagcataagtaatcccaaaagcagggactgtgagtgctttttattccatgcaaaagagagaagtgggtctctgaggagtatctggggctggctggctagagacgctagggaaaggtagacaaggcttcctgagtgtgtggtgctttcttgctgacttgccctatatacctaaagtccatggtagaaacctgaacctacagaacctccaccaaaagagaggagagcacgggattctcagagactggcttccacttgaacagggaaggccaattccctgtgggcctgtcaacatcaacttcagttctctcgcccttacaggaggcctctgactgtatcactattttagaaatattgctgccatgtaagcttctttcaaggtgaagcttggaagctattctccaagtccatcctcagcagctgaggccacaacagattaactgaagagaccccttggcttcttcctcttgacctttgacagctgaggtctctgcagagggcctgaagtacccgtggactctttctcangtgctgagagggttggggctgaggagaccagtttttctggctggtttacacattggctatcgatttccttgcagggaagcactgttttgaggtagtgaggatctccagcgccttgatgctttctgtcccacttggacgctcttgtgtggtgactgccatatacagatcctgcagattcatgacaaagggctttccatcaccgatgctgcatgcctctggcagtttctctatcataaattgttcccagaaggaattttcttcaaatggttctgtcttcaatcgatctcgaatcagcgtagccccactctcctggtagtcttggatctctaggtcttgtcatatgaagtaacgttgctagctccctcacttggcactgtaatgccagactcatgcccatcagaggacgaatcaaatgttgggagaccagggaaggactagctagcatgcagtggaaattccaatagaaggggaggccagagagctcacttcgcacccgtagaatcagtgcatctgccacacaatcacaggagaaggtagcttcgctagggtgagcagcgtccttcaacaatgggcgaaggagattatccaaatgacagaggaaagctgcaggaggagcagtgagccgcttgttcagctccttggctcgctggctgaccacactagtgtccacctgttcatgccacacctgttgaagatctgaaacctacaaggcatagccctgcttggtgataaaaaccttggccaagagggagttctctgcaagctgtagccacgcccatggctgcatcaacaggccttgctccagttcttccatcttcactcgagccctaccatccacgccgggca

SEQ ID NO: 451700 - DNA, 1091 bp, Homo Sapiens
gccctttgaccagggtgaggttcttttccagaggggcctgaaagtaccccgtgggattttttctccaggggcctgaagagggtttggggcttaagggagaccagtttgtttcgggctggtttaccccattgggttatggattccctgccagggaggcactgtttgaggtatgaggatctcccagcgccttgatggttttgtccccacttggacctcttgtgtggtgactgccatatacagatcctgcagattcatgacaaagggctttccatcaccaatgctgcatgcctctggcagtttcatgataaaaaagagaccgatgcagcatgtagagttctaggccaatatgccgggtctccagttttgatgggtatatcttttaactctatcataaattgttccaagaaggaattttcttcaaatggttctgtcttcaatcgatctcgaatcagcgtagccccactctcctggtagtcttggatctctaggtctttcatatgaagtaacgttgctagctccctcacttggcactgtaatgccagactcatgcccatcagaggacgaatcaaatgttgggagaccagggaaggactagctagcatgcagtggaaattccaatagaaggggaggccagagagctcacttcgcacccgtagaatcagtgcatctgccacacaatcacaggagaaggtagcttcgctagggtgagcagcgtccttcaacaatgggcgaaggagattatccaaatgacagaggaaagctgcaggaggagcagtgagccgcttgttcagctccttggctcgctggctgaccacactagtgtccacctgttcatgccacacctgttgaagatctgaaaccaacaaggcatagccctgcttggtgataaaaaccttggccaagagggagttctctgcaagctgtagccacgcccatggctgcatcaacaggccttgctccagttcttccatcgtcagcggccgcgagagcgcccactctcttagccgcacgcacgctttcctgcccgctcgcgcaaaccgaaaggcctagagcctcgtgccgaattcgccacccaggcctcgctaccttag

SEQ ID NO: 451701 - DNA, 836 bp, Homo Sapiens
agactctgccctgcagctccaggacttctaccaggaagtggccaacccactgctgacagcagtgaccttcgagtacccaagcaatgccgtggaggaggtcactcagaacaacttccggctcctcttcaagggctcagagatggtggtggctgggaagctccaggaccgggggcctgatgtgctcacagccacagtcagtgggaagctgcctacacagaacatcactttccaaacggagtccagtgtggcagagcaggaggcggagttccagagccccaagtatatcttccacaacttcatggagaggctctgggcatacctgactatccagcagctgctggagcaaactgtcgtccgcatccgatgctgatcagcaggccctccggaaccaagcgctgaatttatcacttgcctacagctttgtcacgcctctcacatctatggtagtcaccaaacccgatgaccaagagcagtctcaagttgctgagaagcccatggaaggcgaaagtagaaacaggaatgtccactcaggttccactttcttcaaatattatctccaggagcaaaaataccaaaaccagaggcttccttttctccaagaagaggatggaatagacaagctggagctgctggctcccggatgaatttcagacctggggttctcagctccaggcaacttggactcccaggacctcctgatgttcctgaccatgctgcttaccaccccttccgccgtctggccatctctgcacagccaggctggacctatcccctgacagcatgctcttctgtttgaaaatctcctgtgacaaaggccattctagtggagtgtatgg

SEQ ID NO: 451702 - DNA, 784 bp, Homo Sapiens
cggacccgcagcttttcccggagagacgccttttcgctctccctgtccagcagcgcctctcggtgttcgctcgccaacaactttcaactggcgctccaggccgccgcctgtctcccctcagcgcctcctgagccgccagctccgcctgcagccggccgttcctgctcctgcagctccacgcgcaccctgctcacctcggccaccctttcctggtccttgaggctcagctcctgctgcagctcttccaggctccgccgcaggccctcaacttgcaggcccagctggcttgacccgggtctgggcctcggccaccacctgcttctgctgtaggcaagcgccctgcgcctcgtcccgtgcctgcgccagcagtctcagcttgtcctccaggtgagccaggcgctgttgctcctccaggcgggcctggctcttggccttgatcagctcctcctcagcctggccacgctcgctgagtgccgctgctttcactcggctcagctcctcctccagggacagccgcgccgcctccagcctctgcacccgctcctgcatggccttctcactctcctccaggtgacgggtcatatgctccacctccttgatgcgcaggctttcggagtcctccaggctctgtctgcatcttctcttctccatgtccaggcgctcctcggcctggatggcccgcatcttcagctcagctgacatgctggtcatctcctgcctgcctctggaacagctgctcctgctgacacctgaacttccgctccaactcgtctacctggttttg

SEQ ID NO: 451703 - DNA, 991 bp, Homo Sapiens
  misc_feature (68)..(68): n is a, c, g, or t
cgcaggccctccaacttgcaggcccagttggctgacccggggtctgggcctcggccaccacctgtttntgctgtagcaaggcgccctgcgcctggtcccgtgcctgggccagcagtctcagtttgtccctccaggtgagcccaggcgctgttgctcctcccaggggggcctgggctcttggccttgatcagctcctcctcagcctgggcacgctcgctgagtgccgctgctttcactcggctcagctcctcctccagggacagccgcgccgcctccagcctctgcacccgctcctgcatggccttctcactctccctccaggtgacgggtcatatgctccacctgctcaggggcagggattgtggggccagagtggagagcgggcctccctaccttctcctcacggactccccaccctccttgatgcgcaggctttcggagtcctccaggctctgtctgcatcttctcttctccatgtccaggcgctcctcggcctggatggcccgcatcttcagctcagctgacatgctggtcatctcctgcctggtctggaacagctgctcctgctgacacctgaacttccgctccaactcgtctacctggttttgcagaagcaggttcttttcattggcagcagacaagtctctgaggagtttagactcccgctctgcagcttcctgctgctccagcttgagctccttggcctgcctctgtgacaggctcagctgctcctgctccgctgtggccaggagctcccccaggtcctgggccttctgctccgacagagccagggcggcctctgtcatctgcagcttggccttgagagcgttgatgatggagtgcctctcattcagggcttcctgaagctgccctacacgggctgccgacgccctgctgctcttggccatctcttctcgctgcttatcaatagtctccatcaagtcgaggaactgcttggcctcgtgccgaattcgccacccaggcctcgctt

SEQ ID NO: 451704 - DNA, 528 bp, Homo Sapiens; identical to SEQ ID NO: 325205

SEQ ID NO: 451705 - DNA, 618 bp, Homo Sapiens
tggttctccagcaccgaggcgtcgttgtacataagcgccagctctgagttggtgttaatcagaaactggttggagaccccaggatggtccacgtcgtggatggcgcttgcaaagagggcagccaggagttccaagtctgtgaacagcagcctgaaaaatgctgaatatgatagctgtgaggggccggttcccacttagctccgccaccttgaacacatcaagtccccacttgttggtgtcttctagttccttggccagttgctcctcctggtcagtctggaccccaaagcgtgggacagtggctgaggagaggctggcactgtggcagagcccatgtaggccactgatccgggacatgggctgtggggcctcctcagcggtcaccttgggcagctccacctcggtctgctggtccagggaaggtccgggagatgtacttcggacacctggttcccggagcggctggtttcggacagttgggtcactcccggttcaggatccgcttgaattggctgctcctaggcattgctggcgggcaagggccgccacgttgctccgcccggtccgcagactggccaggacctgttgggaggagctggtaggcggtgggaaggagag

SEQ ID NO: 451706 - DNA, 935 bp, Homo Sapiens
agcggagtgcccaacaggctccttactcaagctcgggttcttctcctaggcggaagccagaccagagagcgtgcgtgtttttcccagggtgccccgcgctgctgttatggccgcctccttgaggtagtatccgcacatggaattctagggccgcaggtgtatttacggtaactgtcgccactagatttcagcgcctttggactctcctgttttcactttcttttgttgactcccgtgtggccctcgtgggagcctgttttggctgcagcggtgtctggggtgatgtggaccccggagctggcaattctgaggggattccccactgaggctgagcggcagcaatggaaacaggagggggtcgtcggttcagagagtggatctttcctacaattgctgctggaagggaactatgaagccatattcttaaattcaatgactcaaaatatttttaattcaacaacaaccgctgaagaaaagattgatagctacctggagaagcaggtagtaacattcctggattactcaacagatttggacacaacggaaagacaacagttgatatttctacttggtgtgagcagtttgcaactttttgttcagagcaactggacggggccccctgttgacttacaccctcaggactttttgtcatctgttttgttccagcaattcagtgaggttaaaggactggatgcatttgttctgagcctgctcactctagatggtgaatcaatctacagcctgacctcgaagcctatactactgttattagcacgcattatcctagtgaatgtaagacataaactgacagctattcagagcttgccatggtggactttgagatgtgtgactattcatccagcatatgccttgaggaaacgactcacctctgattatactctgcccgaacacccggatagatccagtgatgaaag

SEQ ID NO: 451707 - DNA, 1094 bp, Homo Sapiens
gtaaccttggaatggcctttcctaattggcccagggctggatggcctaccccggggaagcctcaaccccccaccgggtgtccagtgttttccagaagagttggggatcccgaaagaaagttccaagaaatggaattggctgaaaggggttcccctgcccttggtaccaatgtcttgcttcccaagaagagcccagatccaattaccggtgccacagtttcatccgctaaattatgctaagatttccattggaccaacatgggtttttatctccatactgctgcagtccaaccagtctcgaaatttggaagcttttttggagaaacttaattgtcgactttcacagaattctgcatattgagctgaatccataattcgagtttgtctttctgctctctccattctttcttgtttaacttcatcaatttcgtcatcttcaaacattgctaaaagttctcctgtctggtccatagagttgaggaagtcctgagcaatcttttgtcttttgttcgcattattgctgccactcaatttgtcttcgagaagatcatcctcatcgatgcctttgacaatctttgatttgtagtctcggataaacatgtattttagcagtcttctaagttttttcttatctttgcgcatcaaaaacagaagatcttcaggagtgattacccttgctccccgcagctgagaaacttcagcagcttgctgtaacagattaattaactgagtgtgtaccacatcttctaccaaaactgctgtttcatgaagaggccttctagcatcacctaaagaatacatcatactctgtaattctgttgcaaagcttatagacttccctgtactccttccactacttgaagttgcagtagacattggactagctgccgtattattcatctctgctttaagaacccttggaggcactgctgcgcttcccgcgaggagaatgtgggggtggagatggtgcggtttctgctgctgcggcccgggacacgcttggaaaggggcggggtgggggactgagagtgtggagtgtagaaagggaaaaggtgactcggatcccgggaattccggaccggtaccagcctcgcg

SEQ ID NO: 451708 - DNA, 674 bp, Homo Sapiens
tggagggaggctggagcgatagctctgctgtcatcaggtctgggggtgttttcagacaccaggcctgaggcctctccctgagactggactcaaagaatcattaagatctggaacgagagccaagccaggacttgggagcagattcaacataggcacctgagccatgtctgggtgggcctgagggatggtaccagaccctaatcccggggccccacaggaggggggacttggtgtcatctttgggtcttcatggaagaccaggttagcccctggactcagggccatgtccagtctggaggtctctcaatgccagtgcccccttcgtctccaacagccaactgtcacattcccagcagcagtctgcatgcatggtgtttttaagcaggagcgggcccctgggaggagatgcagaaagaaatcaagtcagggaagagtgcctttttcaacacttactgcacagtccacaggccaggcatgcacgtctgttaacaagctccgcacttcacctggagcatccacatgcgtaacagaaaattcagctctaagcccaagatatgaagttctacactgtggaatacagccacgagcaggagacttgtacccagaagtgccgcaaggtggtaactcccttgtgggaggctgtggagactgcccccacccctagactttcccag

SEQ ID NO: 451709 - DNA, 908 bp, Homo Sapiens
taagaggatgattgcatttgtggttttgtgcaaatgaatggcataattttaaatttttaaggtaataaaataattttagaagcaggttcatgcagtggtcaaagcaaggaatggccaagttccttccaagaggccctctaatctttgacacccaaccgggcatcagacacacactaggtaccatggggcacgctagaacaagtctccttcaagagttacttatataaacatcaatatacacacgttgatatccttccttccatagtacaagtacaggtcacaacttctctcaactgtgggagtagtcagtttatacttaaagtgatttaatgtccctcctggagttctacataatatatctctataagaaggtaactaacagaactttctagttttcacaaccgttactctgatactttacagagtgccccccatgtcctatgacataaacatccagcaggtaagatttgccaggctgaagacctttaattgtttctgtggtcactgctttctgcaggttttgactgtggaaatatttacagaggaccttttctgacttcttccttatatctggtcctagacattggttttgctctcttttcttctggtcttcattgtagttatcatccacttcttttttgtagatgcaaaacttgttcctttcctgagtgcctagccaagccacggtggccgaggaacaggtacggagcttgtcaaaggctttgattcttgtgtcttcaggaagagagggaaatgactgcttagtaggccttgtggtagctagaattttcaacatagatgctcctttcttgtttcctttcagtcgaacgaggtatttagctttagcccctcctctaagctgaaactgctgaatgccttccacattctgagacagaagaagtttccca

SEQ ID NO: 451710 - DNA, 1148 bp, Homo Sapiens
  misc_feature (115)..(115): n is a, c, g, or t
tagcggtcccacgttaggaggccctccttttttaaagaaaaagagggggtctcggtcaaaacttggcgcccctgcgagaagatcttctaaaagggggccccccagtgttttggtntccacgcgtcggttgtttccgggggaggcccagaatgttattcgttttacaagagggaattcccctgggttttataagtaaggaccctggagcccccccggttggggattgctcaaggggcaaagcggggggagccaaagacaagtcccaggcatgaatccttcccttgaagtttgacccgaaccccatttaacgtctaatgtggggttaggttattcccaaagtaagaatccagaattgttaacgcccattccaggaaggcagggacaccactgagtgttactgctggtactttggggccagagcagggcaggctggatgcgcggaggaaactcatatttaggtcaaaagcctggccaagactagggaatttttctgttcgtcgtccacctctccaacctcacatcctactagtcttccaagaggattctaactgcacatgactccctagtttccggcttctcttcctaaggagggtctgcggcccgtctgcaccaccctcttccccaccagtcccgtttttcctgtccatgcttggatggatccggccgagccgtcagccgcagctgcgcgctgctcccccgactcgcaccccctcggcgaagcgctgcattttatgtaattttctgccgggctgctggcttgtgggggatgtggctgggtctcggcagccttcagcgccgcagacgctccggcaacgccagcatacgaggcccccgccccaggagcgcgggtccgggcggcgttcccctctgcgggaggcgcggcgagccaatcctcactttaaaagctttcgtgtcctcgaagcgaggggtcttccgtgcggggcaagacgcactggccccagacgaccggtccgtgaaatgacccttccgagcgacccggagcgggcgaccttgcccaacccgcgactcggggcccctgcggtcccgcgtagaggacccaggtcccacggggggcggcggtgaatcgccccctcttgtggccgcgcttccgcccccggcacccgcccgatcccgggaattccggaccg

SEQ ID NO: 451711 - DNA, 844 bp, Homo Sapiens
  misc_feature (170)..(170): n is a, c, g, or t
  misc_feature (183)..(183): n is a, c, g, or t
  misc_feature (185)..(185): n is a, c, g, or t
attggggggggatccccaagcccttgtgtccatggcccggggatcttccttagggaaaccggcatagggcccatgttcacttttcccttacggggccccgcggcgccaaaacggatggttttaaaaagtcttctcggaggcccgaggcgggcccacaattttataatgtnaaatatttgtatntnttttccgcaagctgattattttattggtatattgaagttagagcatgatcacattatgtttcaaggcatttgaaacactgtcatcttcttattcacttcctgtcattgaatcctagattactgaggagactgcccctgtggaggtccttgtgggcggcccccttggggaggtggtccctggggctttccaggaggaggtgggggaggaccttgctgatggcctccctgttggggtggtccttgtggccttcctcgaggaggacggggatggcctcacctgttggggtggtccttgtggccttccttgaggaggagggggatggcctccctgttggggtggtccttgtggctttccctgaggaggtggtggaccttgttgctgctggcctccttgttggggtggtccctgctgagggccatcatcctggttcccatcaccagcagagggttgagattgctgtcctcccaaaggtggtccctgacgctcctcatctatgaactgctcagagtctcctccatctgatattaccaagggaacgtcttcttggctgacatcttcatctaagtcctgagctgagctgaaggccagcagggccactgacagcagaatcagaagcatcttgcagaaggctctggtgtcactcccaactttatgctcc

SEQ ID NO: 451712 - DNA, 200 bp, Homo Sapiens
gatctgcaagtccccaccagactcaggagccccgctggcttcacccagtggatcttgcaccgggccgcaggtggagctgcctgccagtcctgcgccctgcgcatgcactcctcagcccttgggtgagcgatgggactgcgtgccatgaagcaggtggcgactctgatcaggtgaggcttgacccgcacaggagcccatgg

SEQ ID NO: 451713 - DNA, 954 bp, Homo Sapiens
  misc_feature (882)..(882): n is a, c, g, or t
gtccgaggggactggctccgccacgccccgcccctggctccccgggagggcggctcagggcggggacgggggcgtggtcccgccgtataagaacggagggggcggcggcgggacggctcactcggtgccgctgcctaggggctgtagaggtcgcgccgctcctgctggggcctgcccacgccaaggacctgcctctgtcgcctcctcttctattgcccagtttccccagccagaacatcccctgaagatggcagaggagagcagctgtaccagggattgcatgtccttcagcgtgctcaactgggatcaggttagccggctgcatgaggtcctgactgaagttgtacctatccacggacgaggcaactttccaaccttggagataactctgaaggacatcgtccagaccgtccgcagtcggctggaggaggcaggcatcaaagtgcaggacgtccggctgaatggctccgcagctggccacgttttggtcaaagacaatggcttgggctgcaaagacctggacctgatcttccatgtggctcttccaacagaggcagaatttcagctggttagagatgtggttctgtgttcccttctgaacttcctgccagagggtgtgaacaaagctcaaaatcagtccagtcactctgaaggaggcatatgtgcagaagctagtgaaggtttgcacggacactgaccgctggagcctgatctccctctccaacaagaactgggaagaacgtggagctgaaagtttgtcgactccattcggcgtcagtttgagttcagtgtggactctttccaaatcatcctggattcttgcttttcttctatgactgttccaataatcccatctctgagcacttccaccccaccgtgatnggggagagcatgtacggggactttgaggaagcttttgaccatctgcagaacagactgatcgccacaagaacc

SEQ ID NO: 451714 - DNA, 747 bp, Homo Sapiens
gttttggcaggtctgatttaagaaaaactgaaggtgtattttcacatagtatgtcagtggtagacttcgtaattagactaaatcgtgtatattttgcaggaggatacagaccacaattactatatatctcgaatatatggtccatgtgattctgccagccgggatttatgggtgaacatagaccaaatggaaaaagataaagtgaagattcatggaatattgtccaatactcatcggcaagctgcaagagtgaatctgtccttcgattttccattttatgggccggttcctacgtgaaatcactgtggcaaccgggggtttcatatacactggagaagtcgtacatcgaatgctaacagccacacagtacatagcacctttaatggcaaatttcgatcccagtgtatccagaaattcaactgtcagatattttgataatggcacagcacttgtggtccagtgggaccatgtacatctccaggataattataacctgggaagcttcacattccaggcaaccctgctcatggatggacgaatcatctttggatacaaagaaattcctgtcttggtcacacagataagttcaaccaatcatccagtgaaagtcggactgtccgatgcatttgtcgttgtccacaggatccaacaaattcccaatgttcgaagaagaacaatttatgaataccaccgagtagagctacaaatgtcaaaaattaccaacatttcggctgtggaggatgaccc

SEQ ID NO: 451715 - DNA, 617 bp, Homo Sapiens
tagtattctcgttcttatgttgcaaagaaatagccgaggtcattatgcctacactagcaatgtggagtagccgtctaatagatctactagtgtggccatttttcctgtcctgcagtgatatatagtgacgaagaatgtaatctctccatgtcctggcatatattcccgtgatcttgccatcgcaattgtggtgtaacgcagggttattagttaatggcccgtggttcttaggtcggggcccctgcagtgctagaggcgcggagtctggatttccaggctttgtgtgggaccggaggaattaagatttatcccactacccctcgcactatccccctggcgcgtaggatcccggcctcccagaatccgcctctcagcgacatggtttggagctccacactcccaaaggcagcagcaacgccctagggtggcctccgcaggaccccccgcggcatgtcgtcacactgggatcaccgctagggatggggagaggctccaactggctcccggaagtttgctaaacccagctgggctgtacggtctgcgttagacaccccattttacagacctggacgctgaggcgtgaagttcattaactcaatcaacgtcccgcccgctca

SEQ ID NO: 451716 - DNA, 1109 bp, Homo Sapiens
aaggggtttttccttttttcggggcatttttccagggggcccttggtgtgttcggacccctccaaattaggggctgaccaaggggggatgcttacccctgggggccctggaagcttttggggcccgcccgaaagaactccccaggcgggaaggcgtttccttggccacacaccccctgccgcagacgacaggccgcatcttctccccctggagccgagccccccggaggcccgacggccgggttctcgggccccccatgaagcggcagggtccccctcgcgtttgaatgtcccccagctcccaccttgccagccagcgtccgcgacagcttcaggcggccgggtccacttgtcgcggggctcggcggtgcgcgggggcagctgccgcgtcgggctcgggcgaggcgcgccggtgccacatgtcgcgcacgccgtccaccacgcacaggctcatgttgcgcagcgagaagccctggcgaacgcgggccttggtggccgcgtgcgtggacacgtcctccgagctccgcgagtggccgtagggcgccgccttgagtgcagaggtgtccgcgagctccggctccatggcttctgcgctcacggccgcgccccgagtcgtcggcccagccaccagcacgcggcgcacctcctcgccgaagacgtccaggaagttggcggcgaagtggcgggagaaggaggcgccggcgtcgggcgtgtcgtaagctgggttgtcccgcaggaaacggcagaacttgtgcgcaaagtccacggcggccgcctgcgcatgcagctcgcagaactgccgccagtccgggaccgggaccgggactgggaccggggcggctgcggcggggccagggccggcaccattcatggcttccgtcccatcgcagccacctgcggctacaggcgcgcagctgcggccgagcgggctggggcgccggctgagcgctgcccggaccgcggccgggctccccgggcccggtggctcatggcccgcggcggactgggctccctccctcgttcaccgcctcgaaggctcgtgcgctcctcgcggtcccggcgcgtcccccgccctcgtgccgaattcgccacccaggcctcgctaccttg

SEQ ID NO: 451717 - DNA, 793 bp, Homo Sapiens
  misc_feature (104)..(190): n is a, c, g, or t
ccggtcagacagggactccatttcttgtgtgtccacgtccttgattcccttggcgtgagacaacgaacctcaggtatttaccccagacaatgatgcagcttcannnnnnnnnnnnnnnnnnnnnnnnnnnnnnnnnnnnnnnnnnnnnnnnnnnnnnnnnnnnnnnnnnnnnnnnnnnnnnnnnnnnnnnaggtttgagggaaacaggatcaaatcaaaagagtcactcaggactccagtcctcactcaaggacaaactgttccacctcggacagggagagtttccgcattctgagacccagcataacaggtcctgaccggcatctggcactcggactcccaatcatactggatcacactggctcgggatgtgtaaagtccagggcttctcacatttgatgacaccaaagccgccagataaactcttacgcttccaaactttaaggttccttcgaaaccttctggtaaaactgttgttccacggaaatgggaacgtaacggatgaggcaatcttccacagccgcacacagttgtgtatccaccgctaaacggtcccagtcatacattcaacgacccacgcggagtcagaagctaccaccacacactgtcaaaatcacgcacacacagtgacggccccttgcccactcggtcactcgcccacaatctctcgctagagaatcacacgcagatagcacacccagcaccacagaccccaggaagcaacccagggactcgaacacacgaacagcactcctccgcgcactgcgcaggcacgcctgcgtccggctcaccg

SEQ ID NO: 451718 - DNA, 1055 bp, Homo Sapiens
  misc_feature (862)..(862): n is a, c, g, or t
  misc_feature (871)..(871): n is a, c, g, or t
  misc_feature (924)..(924): n is a, c, g, or t
  misc_feature (979)..(979): n is a, c, g, or t
  misc_feature (998)..(998): n is a, c, g, or t
agcggaagcatccaagttccctgagagctaccggccagggtcgggaggctatgggagctcagggcaggcacctcccatgctcccgcgggagccaccaggacatgaaggtcataggcctctcctctcctcctcttcctgtttgacctgaatgcccccaggccaactgcctcaaggattccatttgagaagatgcaggctgggtgtgtggggagcagtagaggggctggtgtgtgcacatatgtgcacagctcaggacagaggctccctggacttggggcgggggcactagggccccaactctaaccctcgttctgccctgttgacctctgctctctggaccaaaaatggaggactcagtctagactagttcttagggtctaggagccaccttaagttatgtttatatgcaaaggccatttttctgagaggccatagctttcatcagtgtgccaaaaagcgtgagatcctctgctctaaaagcctctgccccagcgctgcctagtttcagagcccccgatggcctcacatggggttttagagcaggcagagaagctgcaatggggccaccagccagtcctcagagtcctgggttaaggcctcctctccaggaggccctgtgtaaaggttttctctgttgcctggaggcaggagtgaactggtaggcaggaaaccctgagggtacctaggaggcccctagcctgtgggttggggagggaagacaggaccccctggggccactgaaatggtggagctctcagagacctgagttctggtcccttcttgccactttttgggcaagatcgcgtcttcccacagggcctgtgtcttgctcagtccacgtgactctgctttctcatcctangcctcaggntggggtggcaggcccctttcctgctttgccctctgccctccctctctctgggncctgcccagtctctgccaatctgggtacctcccaggagccggggacactccctgnagtcctctgggagcccttnagccacactgaggacaccgaaccctgggaggaacaaccagcaggtgaggaatcctgg

SEQ ID NO: 451719 - DNA, 1240 bp, Homo Sapiens
  misc_feature (121)..(121): n is a, c, g, or t
  misc_feature (322)..(322): n is a, c, g, or t
  misc_feature (1153)..(1153): n is a, c, g, or t
tccttgggggagcctcctaagagtttccgtggtggaaggaaacttttccccacacaggaaagcctgaatccaaatccttcctccgacgaaatagttccttctgcgttttttaaccccaagnccaacacatcccttaattgcgtcgctgatagcccaatcctgaattcccaatatcaaaacttcgttgatgggtatccacgctttctttgtagagattggtgacggcggtggctgcgtttttggaaggggacccagagagaaagtcctggctgctgacacactcggtctttgtagagtctgggccacggcggtggccgagttnctggaagaggtgtccacagcttctgctgcttgtgctcgggctgcgcggcgccgccgcctcctcctgcagctcggggggcagctgctcgtccttgttcggccttcggccaggcactgccgctcccacttggagaaccagtgctcgggcccgtgctccctggatctcggcctcgccctcctccttccgctcctccatcctccgcgggcctcccgcggccttcgccgccaccggccgccgcgtcctcctcaggcggggcccccgcgggagcgtcgtcgtcaagcggcccggcggcagggcctggcgaccgacggcgccttctcctttcagcggcccaggcctcctgcaccccgacggccggcgagccccgccccgcggccccgtgcaaccagggacgacccccgccccaggccttcccacccccgggcccggccgaaggtcgccgcggaccagataaccgctgccgcccctcgcctcggccgccgcagcctgtctaacgcccccccatggcgctgcggcctccccactgccgccgccgccgctgatcgccgagccctccgcgcagctcggcctgcaccgcggagcccaccccaagactgagcaacgtcgtcgtcgtcgccaccgccgaggacggctctgcggctgctggtccccgccctactccgcccacatgctgacaggagaagcaccgcccactgggcccaagctaccctgcccggttgaggcgtggccgctccaagggcccctattagtcggattcggccggttccgcgtggcggcttctgagcacagcgtcgtgattggttcttcggcctgtctgcctgacgtaaccanttggctgggggaagggagtgaatgtcaggaaggatgaaggaggaggagggggaggagctgacagtggttgcgtccgagccagggggc

SEQ ID NO: 451720 - DNA, 887 bp, Homo Sapiens
  misc_feature (788)..(801): n is a, c, g, or t
ggaatccctgactttgttagatgtggaacacaggaaaatcacctgttgtcctcccccagattttgttaatagtccaaagaagaaacatccatgggattcttaaccgcagatatgcctagatataaaattgatggaatgcctaattggtccataaaaggctgtacaagataatctgtggcaaaagtagaaaacaagcccccaaggtgatggagattggaagagctggcaatgctttcttgaaaatggcaaggagtaataatgtaaggcacaaaccaattaatatggctacgaaacaggctatggttgtgttccagtctccactggctgttgctgaggctttaccaaccagaacactgtagaaaatgaaatctcccaatccaagttttactcccctttcctctgggtcttcaccagcgaggatactgctggaaagttcctggacagcagctcgtgactcaggtgtagagcgatgaggccctagatgactgtccctctgggcttcccattcctcactgaacccgccatcatcattctctgcaacagtgtcttgtgactccctttctgtgctttctgcattatacttggaatttttggatactctcctttgagcttccgggtctccttctgccatattcaccaaccacaccattgttgctgttgggaaagacaaaattccaggtaagcactggacacacaaagtatgcatagacaacaacaagccatcatttctccacacaaatcgccagtcttcctaatgctgccttaagactgttcaacaatcagaagtnnnnnnnnnnnnnnggttctctttggttttagcaggtaagagaagaagttctgaaactgaatgtttactgtagtactcaactgcacctgctatcacaaac

SEQ ID NO: 451721 - DNA, 1839 bp, Homo Sapiens
  misc_feature (513)..(513): n is a, c, g, or t
gttatgttataatactctttccgtgattcagagagtcttgttagtcttctttggatataattgttagtgtgcttgtgctttctgtttctatctctttattcccatatgtttggcatgatccggggacagggcagtgcaggcagtatttttccatcctccactcagaggaggagtcgagggggcaggagccttcttcacaaaggagaatgactttttaggctgcctcagaacacccagtcctccctaccctaaccctaatctggaatgcaatagagaatggctaacttattagattctggtgatcctggtagtcaagaggaagggctcagaaaggggcttggtggagctggtcaccaccagatgaccatggctaaattgtggccaccaaggagggggcagcatgaatcagaagtggagatggggtggagggaatgaggactggaccagtaaggatctggaggtcataacccttagcttctcctgtgccctcatctgcgcactgcacctccttcntgctgctgtcctttcctcaccccttgtgggctgcaagtccacctgggtgtggtggaggggaagagggccctggggaagtccagctaccataggctcaggagcagaatcaagggaagcgtgcaggagaaaagagagggcacccagggctgtggcctcacagcagggttttcattctggtgtgccatcacagcaaaggtagggtgtggccagtcctgggagaagagttggctgtgaaaacgcatcttagctgcaatggcctccgtgaggcaggggttgtgggagaagaacccttccagcatttcacactcctcctgcaggttgccactgcctcggcaggtgcagcttaaggcaacactggtgttgacattgctgacaaagttgggggtcatggcagtcccaatcagccccaggtatgctcgtagacatctggactgctctgttgcacaagttcctaggatgtccatgggatggcagtgggtctggaaatccaccaggcgtgatctgcaaagcgggtcggagaagcagaggcgccgcagctccaggcagttgggggcccggagcacgcctccccgtaggccttgcgcagccggtcacacttgtcattgagagtacacagcatggcaaacttgaggcagaggtctgagtctggtttgagcatgttcagtttgctgagattcattttccagggtttgctggtcactgtgtcttcatagggggagacatccagctcatagttaccaagtctgcgggcacggtgaacggtccaatagatgtccaagcaggcaacctggttcttcatgcgccggtggcacatgcagcctatcagagagctgttcctgagttgctgtgctgcctccaggcagtcagcagggaccgaaggctcctctgagggcagtggggtgcttatgctagaggtgcaggaatccaggtggtggtaggcagcactgcaggtgggatcagcctggcacttcctcctggcctggagacagctgttcatgagtcggctttctgtgggaagggggtctccggctgcgagaggcagcggcgacggcggcagcagcagcagcaacatcaggactacgggcggcagcaggtcgcgggttcagggggcgcaccatggcgagctgtaggcgccgggctccgcgctcccctcgctcctcccctggagctctgagagcggggctccctcgaccggcacctcccgcccaccgcctcccgccctccagcgcgacgcacacactctcccaccagggtcctgggcgccgccctccaactccgaagcgcgcgtccacaccacgcgcctccagcgctggtccgagggaccgc

SEQ ID NO: 451722 - DNA, 649 bp, Homo Sapiens
  misc_feature (122)..(134): n is a, c, g, or t
ttattgaataagaaccaactttatttttcctaagttctaccccataggaccaggtcatattaacaattgcttgatgcacaataatccgtgactcaataaatactttacaaaaataatgcagnnnnnnnnnnnnncttaaaacataaaaaattaagattccccagattgaccctcccccccttttatatttatttattggggatatattggtagatgaaaaaattgttaaaatagtattaaaataggtgaaatgcggtccattatctttttcccatttgttttgttgttttcctttggaaaagtgctacttcttgtttttacatctgaacttggctgcagtcttctgaacctgctaggacatgagcagaaattctactgttttggggccgtttagcagaatgatagcattatgataatattgatcttttattttaaagcctatttaaaaccagtcctcagctttgtccctaaaatatcatattccctacccagtctgaagaagagacttttggaatctgagactccagcaaggtgcctcatgaccaaataacatttggtttaaggtgggcgtttacatgttttgatatatttccattgcattatttttaaagaaataaattccaaaattccctttctcttccacttccct

SEQ ID NO: 451723 - DNA, 905 bp, Homo Sapiens
ttggtcattcttcgtaatcagtaaagcaacatctcttgcagtctccactcgccggagaatagcatgtgccgttgttgatttagactcttacagcttgtcatcatttctcgtcgaagtcgggtaatttcttccctgtgcctgttcataaagaaggaagatcttgtctctctcagatttaaagaaccttgacattagcctgaatttctgccaaatggcgctcatatttttccagcatgcatttaagttcttcacgatctcttgttgttgtcttcaaaagttctacatcaccagtttgcaccccgggcagttggtgatgggcgtcttggacttttagacctacttcgcatcatctttctcaaatgttgagcttcactcttatagtgatctttgtctgcttccaaagtcttgacaaaggaatcaagtagatttaagcctttttattgtatcttccaatactataatattattttgctggcaaatgagatcaatcttggcttcttcaagttccttgttggcggaatccaccacaaaatttttctctttttcgagttgctctgctagttggtcaattttaatcaattctttacaaagatgctcattgtggctggttaaatcatctacttgactgcttaccacctccttactatccaagagtttcctaacatattcttccaagccatgatttgtctgtttgagatcttcaatctgtaatttcagtgtcgagatgaatctatcttggtttctcacttcttgttctagctggagagtattctggtagttttcagcttcagaaactggagcccctagaccacaatcatattctttggtggtaaccggagtggggctcgtcttccacctccccggcgccccagctttgcttccgtcccgctcgcccccaggcccgg

SEQ ID NO: 451724 - DNA, 1241 bp, Homo Sapiens
tggttccggtgtgcaggtgcggtctgttggtaggcagggacgctcgtggttgacatcgtctaaggggtggacgcatgtcggagtccgtgccggtccttcgtgcacgcccagtgcgttcccgccggaatcctgttggaggttagtgctggctgggactcgtgctcgcccagcttctgccttgtaatgctgaccccacagcagcggagtcctgcctcgtccgactgtacaccggatgttgcctcctgtaacccggtcttgagtgaatctgttttgggattcatgcagctgccatttctcctggtgatcccagccaagggcacatttgtcttgtctgtctgtctgcacaccaaagttttcctccaaaccctttcacatagtctttctgggactcgtgcttctccgttttgccttgatactcaaagcccacggcgctcttatccactttgtccttgtcgataccgtatttgccgccgaaacctttggagtaatctctctgtgactcgtgcttctccgtcttgccctggtagtcgaagcccaccgcgctcttgtctactcggtcggcctgcacgccatacttgccgccaaaaccactggagtagtctttctgggaggcatgcttctcagtcttcccctggtattcaaagcctacagcagactgatcaactctgtccatctggacaccaaacttgcctccgaagccacggaccgagtccacctgcgagcagtgcttggaaagtttcgactgatattcgtggccgacagctgacttatccattcggtcttgttccacaccaaatttccctccatagccatgggaagcttttggtcctgtttcaagttccttctccttaagggtctgatgctcttgaaagacattctccctcagcttgtgtatgttgatatgctcctggtgcccggagccctgcaccgtcttggcaccccatctttgctccttctcactcacatcattcacaaaatcagggtcggtctcccagtcatcggcccccgcgtcatcctgggcgatggacacagcgtggcctgctgaagctttccacatctttctttccgcttggagataaaaggctgttcacgaaattctgtttaaaacacagtaatccaatgaggaatttccaggcattggggactgattccgtcgccgcctggggtcggtccggcccgggtcggccctggattccgccgcgccagccgctccccctcgtgccgaattcgccacccaggcc

SEQ ID NO: 451725 - DNA, 592 bp, Homo Sapiens
tttagctaatggcccaagctgcccgagaagagcaggggtgtgccatgggggccacactgaactcttgcatgtgcaccaaagccagccccaatcatggccggcacaagggttctgcaggtccagcctgtggctctcatgtctatcagcgtacagacagcaaagacacacgacgcgatatacaggagcagaggcggccagaacacgctgtcccccaatgccagccacaagcggggccagctcagggtgtagtgggtgaaggcgtcctgcagctctgtgatcctacaaggcggaggtggcagtagcacaggactccaccgctttggaggctgcccagtcgattttggtatccagtgagagtcctgacagcagcacattggccaccagaagacacccaaagggagaggagcggaagaccttctggtgtgggctgggcagcaattcacttgaaggagaaacagcccgggtgtggagaggcggctgtccttggagggatcctttctaaggagctgagaaatcaacgtagagcttaatctatctgattctctaacaactgcagaccttccatgagtcaagctttggtcaaaaggacaaa

SEQ ID NO: 451726 - DNA, 1430 bp, Homo Sapiens
cacaccagtgctaagtttctcaactgtctgggacccatgttctgcctgcctttctaatagcactttcaaatttcaacagcctccccagctctgggagacagggccaggacccagccttcccttgatcccagtctctctgtgccctacaagcccagctgccagtcttgccatctgttgtgtgtgttctggcctgggcctgccctgccgcctctccccagtcactgagacagcttccacacaggctcccacagccagctgagccctgctgcaagctgttctccttgcagtagctgcagttctctttaaaaacattctttgtactacatcactcccctcctaaacaactccatcagggagcatggggctgagcagggtacatgtgtgcaggggatggcagaccatggtgacccagacaagcccactccgcttgggtgaggaggtgtccctgcaggggagtggcctggcacgggctgtcagggcccacacggggtgaggaggtgtccccacagtgaggcccagatcaggctgtgagagcccatgcaagtgaggaggtgtacacccagggacagcccggtgcagggatcacagcccttgaggcgaaaggcagcctccagcacatggtcagggaggaaggggacagcccagcatggggtgctacagccctggatggggccatgtgacagggcacagcaaccacagattggtcacatgcacagaaaatggttgaacaggtaaacttagggaggacaatgggatccagctttctcactgttggagaggtacaaatagggggaaaaataaggggagaaaacttggatcagtcctgtggtgttgtcatggtttcaatttacagatgacagatgcaggcataagcgtgagtggtgtgtgtgtgtgatgtctacgcgtgcaggtatatgtgagtatgcatcgtgtgcttgtactcccagcgttgtcccttagggacctgggagcagcgacacccaaagcagcgagtacactcagcacccagatctcctccacaaggaaccagggctcctgggagaaatggccgattgcagagctgaagcagggacaatacaagaagaaaactgggaacgacttatgtgctggaaagtgaggagctagcccaagacaagaggacatgcccaaaggcccagaagccacactgaaggggctcctcctggccacagatgggtaatttgagcatcaaaatcaatgatgactgtaacataatcaccattaagaacatgggaaaccataagatggcactggtgattacttacaaaaaccacctctctgcgagcaactcagtaattagacatgaaagaaccacgtccaggtggagacacctggcattgcctgcctgaatcaggtggccaaagtgcaccaccccaacagagcaactgtatcgcgccctcacgagaacaagt

SEQ ID NO: 451727 - DNA, 837 bp, Homo Sapiens
caggacaaggcctgctcctgtgtccactgaaagctgtctggctacccagcgaatcccacagcagggagtccctcctgggagcaggactgactgaggccctttcccttccctctccagctgtagcagccgcttgaggttcttctccagcaggagtttgtccctcacagttggcaatgagccttgggcacctaggtcactgtcccgtctgtgggagcccagacagccggccatgaggctgctatggcagttggacatggagctggagctggatgggtagttgttggggtgtccagtgcagagggtcggccgtacacggtgccggtgtacggtgctgaggctgggccgggcatgtgcccgccgtccaccacttggcacctccactgggtcctgcacctccacaagcggcaccccagcctccgtcttcatggcagccatgcgctcagtcgccttctccaccactgtctccaggctgtccaggacctggctctcagttaggaaatccagaaagtggccaaagggctgagggtgcctcttgtttcggcgttggccctggagtgctgagctgccacatgtggatggtgggtgtggcacacggcccggcttgcaggctggccgcatttctgggaccagtggcttcttgggcagctgcacccgtgcactgcacatggagtggctggcctcgtcatcggccaggtaacccgagtggtggcggcacctggccatgtggtcacctggcaggtgaccgggcctgctgcccacctctctcttcagctgcgcattcctctcaagaaacaccgccttgctccgcacaggccagtacagtctgcgccctcactg

SEQ ID NO: 451728 - DNA, 1131 bp, Homo Sapiens
tccccgtggagcccacccgggggggtatattgggggaaagggagaaaagaaaaaccccacaagctgcttttggcgggagggtcccttttttgggaactttggtaactttgcggagatgaccccaaggaaggcctccccctgctggggttcaggaaagtccggcgaacttcttcataaaaagggcgggttgggagaaggtgagacatggctgaccttccgacgagaatgggagggcagcggcttcttctttcgtgaaccctgctgttgctgcagggggctcccttccctctcccaagctgtagcagccgcttgaggttcttctccagcaggattttgtccctcacaggtggcaatgagcctttgggcaccttaggtcactggtcccggctgtgggagcccagacagccggccatgaggcttgctatggcagttggacatggagctggagctggatgggtattttgtttgggtttccagtgtcagagggtcggccgtacacggtgtccggtgtacggtgcttgaggctggtccgggcatgtgcccgccgtcacaccacttggcacctccactgggtcctgcacctccacaagcggcaccccagcctccgtcttcatggcagccatgcgctcagtcgccttctccaccactgtctccaggctgtccaggacctggctctcagttaggaaatccagaaagtggccaaagggctgagggtgcctcttgtttcggcgttggccctggagtgctgagctgccacatgtggatggtgggtgtggcacacggcccggcttgcaggctggccgcatttctgggaccagtggcttcttgggcagctgcacccgtgcactgcacatggagtggctggcctcgtcatcggccaggtaacccgagtggtggcggcacctggccatgtggtcacctggcaggtgaccgggcctgctgcccacctctctcttcagctgcgcattcctctctgcgtggggtggggagacaaccagaaacaccgccttgctccgcacaggccagtacagtctgcgccctcactggagcagctgcacagtgcgaggaagtcggctggcggcctccacttgcttatttgcataccacatccatcccgggaattccggaccc

SEQ ID NO: 451729 - DNA, 792 bp, Homo Sapiens
cggcgatgccccagacgcggctgcagttttcaaaccgcgactgcaagcttcggtagtcctctccgctgctgtcgccaggagtcacttcacgagaagccaggtcacaaccgtcggcccttgtctggaaaagtaaaagtggatcctgccacgttcggagctccctggcgcctcgcccggctggagctagagaactcgtcctgtggcggcccccggcgtggggcgggacagcggccccctggagggggcagtcccgggagaacctgcggcggccggagcggtaaaaataagtgactaaagaagcagacctgggaatcacctaacatgtcgaggaggagatttgattgccgaagtatttcaggcctactaactacaactcctcaaattccaataaaaatggaaaactttaataatttctatatacttacatctaaagagctagggagaggtaaattttgctgtggttagacaatgtatatcaaaatctactggccaagaatatgctgcaaaatttctaaaaaagagaagaagaggacaggattgtcgggcagaaattttacacgagattgctgtgcttgaattggcacagtcttgtccccgtgttattaatcttcatgaggtctatgcaaaatacaagtgacctcattctgcatatcggcaatatgctgccaggtggacgacctctgcagcctgggtttacctgaccctgcgctgaccctggctcctgcccactgactgctatcagactcactgcacccacaatacctgcaaggacgtctatgatctacatcagga

SEQ ID NO: 451730 - DNA, 827 bp, Homo Sapiens
  misc_feature (427)..(435): n is a, c, g, or t
ggtcgctaaagggacagacactgcagcccgcgggaaagcagcatccgcgattttctctggcgcaactcgggtcctaggtgaggcagccagtccaacagcttattccgtgtgtggaagggcgaacctgggcctccgcgcggcttcagcttctaggaaacaggcaagggccagggaaagccttatacgtttaccgcggcggtgtgtggggcctgcatccgccactgggtgccccacttcttcctgcagtgctgggtcctgttccattccttctagaggcttcagaggactttcctctctgactgccggcatgtctgcctggatgctgcaggaccccccacatctgccgattttctgagtctctatagtgccaggtgccccactgtgacaaggaggatgaacaaaagcaggagattagagccgtgagggnnnnnnnnngcaggagagatgctgtaggggggaagtctgatggtactgcctctaacatggaggctgctgtgtgccgctcgggcagggctggtcgctgccaggacgaagtgatctgctgtgctgtagattctcaccgtgtccaccctttccccttcggggacgcctcggtaaccagctgaagcactggttctgcgtccggaacaaagactgcggaccctggcgcgggcttcagcctgcaggacataagcgtgagccatggagcaccccacatgtctaggttgttgtgggctggacctgcagcccccactgggctcctgacttcttcctggagtgcgggggcttttgttctgttcattctggatgcggcagattactttccttctggtcttcctgcacggtcg

SEQ ID NO: 451731 - DNA, 704 bp, Homo Sapiens
tccacttcaatcagtttctagatccctctggtccaaatgtgaaaggtttaaggtcgttttcctgacaggtgtggatgagaaccatttggtttcttgggcattcttgctggtctccactggattcctataaacttaattttcagaaactgtaagccaggattcctcaatattatgtacacttaataactccacacatttgcacaacttcatccaccattctctttaccttaaaatcaagtttagcagtgtaggcaaactgaattaaaggtttcaaatcctgttaactgtcacctcttctggaagagtaatgttcagctctccatcagcctggcctacgattcttgagtggaagtaactgctgcatgccgccagcacggaccggtgagcgcggaaccgctgtccctccacaaagatggtgacatcgcacagcacatctttcttccgctggtcattaaggctgagtaaaacattggtgctatgcacagaagattcataggcaaaaaccgagttctcactcagagacattctgcataacaaatgttgtcgggaagttcagtggaaagcatgcttctaattatcatcaacatgctcatccccaagcagcatttcctttgacttctctggatgacaactgaaactgaaggcatgccagcaaagaatccgagtgagctgggcaaatgctctctacttcaacagtcttttgc

SEQ ID NO: 451732 - DNA, 1415 bp, Homo Sapiens
atagttctgccatatttattaaatggctcttgaagtatttgatctgtggttgaaggcagaagatatccacaatggtttgaggagctctgtcttcagaaatctttttgtaaatcactcttcttaagaagttctccttttcgggatttatccagattttcaagaaaatgttcaaaaactttcacataaggtgctagactggtcttcttataatctctggttctatgtttgacatcagattcagcttcattctcctctttttcctcttcattagtggaaatggcatccaattcacggcagatgaagcttatggtcggaacagtaaatggatcaaactggtccactttctgcaaatcaataggcacagagatgcgacctgttttaggatgaacactaaaagggctcttcagtagatgattgattcctttgctgacattgatatccagccgtggaaaacagtactggagcataatctcccactccagccagggtccatatttgtcatttttgatgttattctgatatctgctggctactttcttcaagtgctcccaacgctgaagtgaattgtgagacttttggaagctttgttgaagttcatcatgaattgtttcaggaacaagggctaaaatcttatcccagctttctttatttctcgagaatatcttgattaaccaaggcatattcttcaaagtatttttttattatgtttatagattttctgataaaagggtgaattttttcacttaggtgaactttctttttaacgtcttgaccaccctttacaaggctcaaatactcaactatcccagaacgtactgcagaagacagttttctaactgattcatcacagacccaacaatgaacacctctccttccagaatatacccagagacgatgcttaaatccaaagtcctccttcaatgctctgtcaatgatgcgtatggccattgtcatgagggtccagcacttaggacatatgtctgcagaactacaacatctcctcacatcgtcatagtctgtcatgtcaatgtcaaataccagttctttttcctgagcctggaaagctcccagcttcactgtattgtgttgattgggtctgtgagaatatactgcgcctatatcaatcttgtatggattcattttctgcatctccttttccagatcactctggttgttgaaggattggtagcgaatgtaaatatcatctttcaatgtgaatgaaaattcacggtgttgaaagtaattctttatcactccaccgtagttgagccagcgatagtactgagagtagggaaagagcctccggtaataaagtttaagcagctcgggcagctcggtggggtcaaacgtctccattgagcgcggaactcgccacggtaaggattaccacaggaattggcgggaacagcacgccg

SEQ ID NO: 451733 - DNA, 469 bp, Homo Sapiens
  misc_feature (64)..(64): n is a, c, g, or t
ttcattctcctcttttcctcttcattagtggaaatggcatccaatttcaccggcagatgaagcnttatggtcggaaccagtaaatgggatccaaactggtcccacttttctgcaaatccaataggcacaggagatgccgacctggttttaggatgaccacttaaaagggttcttcagtagatgattgattcctttgctgacattgatatccagcccgtggaaaacagtactggagcataatctcccactccagccagggtccatatttgtcatttttgatgttattctgatatctgctggctactttcttcaagtgctcccaacgctgaagtgaattgtgagacttttggaagcttttttcaggaacaagggctaaaatcttatcccagctttctttattttcgagaatatcttgattaaccaaggcatattcttcaaagtatttttttattatgtttatagattttct

SEQ ID NO: 451734 - DNA, 1537 bp, Homo Sapiens
  misc_feature (224)..(224): n is a, c, g, or t
  misc_feature (535)..(597): n is a, c, g, or t
  misc_feature (640)..(1001): n is a, c, g, or t
  misc_feature (1003)..(1003): n is a, c, g, or t
  misc_feature (1005)..(1006): n is a, c, g, or t
  misc_feature (1008)..(1009): n is a, c, g, or t
  misc_feature (1011)..(1011): n is a, c, g, or t
  misc_feature (1013)..(1021): n is a, c, g, or t
acataacagtggatttgccatacaagtcgtgccacctatagtggcgggtcgatcaaacttgggcgaggggtagagacgagagggggtgatatgagccacacgtatcacacaaccgccgccttatgactgcgggtgcatgctcacccgcgtttttgcaaaacgcgccgtatggggaccggatttaggcggtggtgggttagatagcagcgaccagaaagtgcggnggcagcaaaacaggggtcttggtggggcggttattatgatgcaccagttacgaggggatgggtatgtcctccggaagctcggtcggttaaggcaactctcacgggttgggggcgaaaaacggcgcatgaattaaggtatggtacagcgtgagtaagttgtgaactcgacttcggaaagcggtggggatgcggtggcggggacgaggacggacaaacaaatggaggggcgcgccctctatgggtgggaagtctcattttgtagacaggaaaaataagaggggttggcgtgtggtgtaaaagtagccagggannnnnnnnnnnnnnnnnnnnnnnnnnnnnnnnnnnnnnnnnnnnnnnnnnnnnnnnnnnnnnnggaagccgatatagagtggggggagggaaaattggaaatggtnnnnnnnnnnnnnnnnnnnnnnnnnnnnnnnnnnnnnnnnnnnnnnnnnnnnnnnnnnnnnnnnnnnnnnnnnnnnnnnnnnnnnnnnnnnnnnnnnnnnnnnnnnnnnnnnnnnnnnnnnnnnnnnnnnnnnnnnnnnnnnnnnnnnnnnnnnnnnnnnnnnnnnnnnnnnnnnnnnnnnnnnnnnnnnnnnnnnnnnnnnnnnnnnnnnnnnnnnnnnnnnnnnnnnnnnnnnnnnnnnnnnnnnnnnnnnnnnnnnnnnnnnnnnnnnnnnnnnnnnnnnnnnnnnnnnnnnnnnnnnnnnnnnnnnnnnnnnnnnnnnnnnnnnnnnnnnnnnnnnnnnnnnnnnnnnnnnnnnnnnnanannannanannnnnnnnngggcgggggtgaaggtgggggtcggggctgggctgccggtggtcggggtggaagtggtcgagggggcggttggaaataccaaggaaggtgagcagagatagggtgggagaaggggggtcgaatcgggggcggtcgagtggtgggaggtggaggggtggccgattgaatcacacgcaaagcgtctagaaccaatcttggaggcgatccagttcagatagggccaggtggccgtgtagattccggggcgcttggcacgggcacagcctaccccccagcttgtgattcccacgaccacataggcgctttccttgctgtctttgcacatgagaggcccgccgctgtctccctgtccagaaggacacagaggtcactatctgcctgagccactcttcccctgcccagaggggtcggaaggctctgggaggacatttccacagtgacatggtctcctgctgcccagctgtcgatcttgcctacaggataccccgcgcacacattggttggctgaacgcgccc

SEQ ID NO: 451735 - DNA, 831 bp, Homo Sapiens
ggactcttggatggttctcagcttcttatccaggatccttgtggtccaaggtaggaagagccttgctgttgtttggtgtcaagaagttttctggtctctcagaggaaagcagctggaaggagagagccactgtgggggcctcatcattgatagttttcaggctggtgtccatgatggggagccgctccacgtgaagcccgtccaagcctttccctgtcagcatcttctggtacaaacggctctttagcggcaacacagagatgcccaggggctggttgagggtccacggctggctgcctttcattgaagttgaggagtagtactccagcaccagggctgtgtcttctgagaagctggtagctccatctcggccttggaagaggaaggactgattccacaggggctgctctgggggtcccccaggcttggacagctgagggcatccgttctggctgacgcgaggcacgtcaaagttcatcatggacgggatagggaaggacagtggggtgatgggcagccccacagaggccaggtccctgttagcctggctgaccttaaattccttgtagttgggaacgacccgggcaatcaccactatggggttggggttgttggccaggggctcgttgactccccggagaaagatctccagagccatgtggttgcagccgatgtagcggggtatgaagctgctcttccgaacgactgttgcgtacactgggtcttggcagtggcttcatcggctttcccagactcagtgggcttcaccagctccaagtggtaggggtggaagacacgcaggtacttgatggggattttgtaggacacaca

SEQ ID NO: 451736 - DNA, 814 bp, Homo Sapiens
caggaactggtaaatggtcgaccaagccaatcaaagcatgtaacatttcctacatgtactaggaaagcgatcccatagcgaagttcgacggtttgatgtctcgatgcaagaatcccacagaatgaatgctttcaatagactccatatctgtctacccagccggagagtggtactaatggtgaatgtgcctcgggactggctacggcgaagatctgccagattccgacccttgcagctttttcaaaacagcaacttccattttcagaacttgttttggttgttgagctgattccaccttcagtgcaacattttcccactttccatctttctttcactaggattccaacactcaggatatccagctgctctcctcccccactcattgcaatacactgatatggtagaacagctacacaggcatccagttcccaagggtggtttccatttaacctgggccgtggcggacgcaggggtttctggaggagggctcatggtccagctcaggacctgggaccgtgcgggggttaaccctcggcacggcgggaccagccactgcctgcccatcccccaccgccgactgcggcgggacccgagctgcggctttccagggccggccggtctgggtagtcccctggggtacggtccgcgtttactggcggcggcggcggcggctgctgctgctgttactgctgctgccggctcccccaagccgctgctcttgtgccagcacctgctccccctcctgccgccgccgccgcctcgtccccaccgctccctatcgccgctgcggcgactactgcagagcccgctgact

SEQ ID NO: 451737 - DNA, 853 bp, Homo Sapiens
agcgtgaggagagccaggtttatagcagcagccactgctgggtactctggagccagagagtccctgggcagcatgctgtgtgccctgctcctcctgcccagcctcctgggggccaccaggccagccccacctcaggcccccaggagtgtgcaaagggctccacggtgtggtgtcaggatctgcagacagcttccaggtgcggggctgtgggtgtactgccaagtggtgcctgtatggaacaaacccaccgctgaagtctctgccctgcgacgtatgccaggacatagcagccgccgctggcaatgggctgaaccctgacgccacggagtctgacatcctggctttggtgatgaagacctgtgagtggctccccagccaggagtcttcagcctggatgcaagtggatggtggatgcccacagttcggccatcctgagcatgctccgtggggccccggacagtgccccggcacaggtgtgcacagcgctcaggctctgtgagccgctgcagaggcacctggccaccctgaggccactctccaaagaggacacctttgaggctgtgggtccgtatcatgggcaatgggccccttagcttccagccccgccaggcggcctgaaggagctctgtgccaagactgtgtacgggaggtcttccgactccaggaggctgtccggtacaacttgagcttgggacgagtttgaacaatccagggagccaggggtgagtccttgggggcctggccgtgggccggtcgtcgtgcaagaaactagcatcttaccaggtaagaggtccctggttgaccaaaggcactgagggcttcgtcgccccgcagggagcactgcaggaaaggg

SEQ ID NO: 451738 - DNA, 384 bp, Homo Sapiens
acaaagatttttcccgcctccctcgctctttttcggcatctgaatgtaccttattatttcttagtcgatacataaattatctttaatgaaaaagaagacaagccagagctacttctccagggctggggtcccaggagggtgtggaagaggagatgcgggtgggacccacctcgggctcccacggaggacacgctgcttcggtgggatcgctcagcggggccgggctgcccggcactgccttctgtcccagtccatctcgcagggtcgcagagcccgccaccctgagaggcaaggctcctgcctggaatcctgccccgccgccaagcccgccaccgcccgcactcgggctcccgctaaggacgcagctgaccgggaagcgacccc

SEQ ID NO: 451739 - DNA, 733 bp, Homo Sapiens
gtgtggcagggaggaacggagtccagccttctcccgtcagtcgtcagtgcttgccggcccgcacgggcttggtaggggcccaagctgcaacgcggcacacccaggggcgcccagagcttcccagtccctccacgtcgcacagggtaccgtgcagccagcacgttgcccttggcctcctcatagagcagccgcaggacctcctcgtcatggatctggaagctccccgccgctttgggaagaacacgttccttcggaactgcaggaaaggctcatccatggccacgtcatcatctggggcaactggtgaagcgcagcagcagctccggccactggcgtcccagcttgtagggctggtgcttgggtttcagctgcacctccagcagaggggagaccagccagagcgcgaagacatccagggcgatgtctggaagctgcaggacctcgcggacagcgcggtgcagctcatgggcactgagcgtgggcaggttctccacagccaggggcaccaccgtgtcatccgctaggtataccagcacgtcagccgctcgggctcccacggaggacacgctgcttcggtgggatcgctcagcggggccgggctgcccggcactgccttctgtcccgtccatctcgcagggtcgcagagcccgccacctgagaggcaaggctcctgcctggaatcctgccccgccgccaagcccgccaccgcccgcactcgggctccagctccgct

SEQ ID NO: 451740 - DNA, 390 bp, Homo Sapiens
cctcccttacccctcctgaaatttccttagcccagcaacttgttcctgcaggggccccactgaagcagaaggtttttctctgggggaacctgtctcagtgttgactgcattggttgtagtcttcccaaagtttgccctatttttaaaatcattatttttgtgacagtaattttggtacttggaagagttcagatgcccatcttctgcagttaccaaggaagagagattgttctgaagttaccctctgaaaaatattttgtctctctgacttgatttctataaatgcttttaaaaacaagtgaagcccctctttatttcattttgtgttattgtgattgctggtcaggtaaaatgctgatagaaggagttgaaatctgatgacaaaaaaag

SEQ ID NO: 451741 - DNA, 1404 bp, Homo Sapiens
  misc_feature (426)..(426): n is a, c, g, or t
tgggggtaaacctgctctttataagggggtcagaaaggggaagcagaaggcccaccgaaaaaagggcgattgaatcttaatatcagagtgtggaagtttaaaatataccccgttgagaggggcacacggggaaggctttttagtaattttggccgttcaagggtttttcccacttggtttcaggaatcaggaaatagaatcaggttccaggaaattgtggagttggttttcaatccactgaggcttccttcatactcagtttctttgtttttcctttggttcttctgagtcagatgctttttcaatcacttggtttgtctgttctgtagctggtattttgtcatctgtctgctctgtattatcatcaagaacatcgtgttctaaagattcttcattaaactggttgtttgatgaaagcacacttcntgatggcaagggaccaactgaacttgaaccttccaccacctgcctcttctcaaaattaaactcaggaagtcttggagcctgaggttctggtttttcttgcagggttcaagaaaaaacagtaggcccattgaaaaggcagtgtattcaaatttttccttcaaagccatgccattatgagaaaaacactgctgacatataagtgcatacctgttttgtggaccatcaccaaccaaatattcaacaattctatccaaagcacctcgttctcgggggagaataggtcttgctaaaggtggacctggaggatgaagacccattccaggcactgaagtagcaggggatccaagatgtcttggtaacacatttgatgatagggctggagtaacagtcctttctgggggtccaccaggggcagaactgtcctttggtggtccaggagatactggaacttgtggaggagggccctggttagggcttgctggtgttggagaaaggtttctttgagctgcagttcgctgacgaatctcttgtccaggtcttgcagttacagctgctccagcagatggcggctcacactcctttgctttctttgagtccggatcaaacctttcaagaattaatttagccgtcttgtaagtttctttttccatgacttcttcaagtatttttttcctctgggattttaaatcatccgatgcttcattatttctttctgttctcttggaaaagaagaaaataattactgttcttatgctccagatgcctccatcgagaaaataatccacccatcttttatttgtagaaactgggcacaatgataaatatcatcaattgtccaaaggaattcacagctgcaagaagcgggcgcagcccggcccgggcgtccacccccgccagtctcggccgccaccgcccagcctgcctccagagtaggcagcagcggccactgacagagagacaagccgtattggaaaaatt

SEQ ID NO: 451742 - DNA, 931 bp, Homo Sapiens
  misc_feature (232)..(232): n is a, c, g, or t
  misc_feature (826)..(862): n is a, c, g, or t
ttgtgtcccaggaatacgggaacttgtgagaggcccttgttaggccttcttgttttggaaaagttttctttgacctgcagttcgctgacggatctcttgtccaggtctcgcaagttacagctgctccagcagatgcggctcacactcctttgctttctttgagtccggatcgaaaccgtgtcaagaattaatttagccgtcttgtaaagtttctttttgccatgacttcttncaagtattttttcctctgggattttaaatcatccaatgcttcattatttctgtctgttctcttggaaaagaagaaaataattactgttcttatgctccagatgatcaatggaaaagcaaaaaatgggagtgtcatggcaagtcttgctgtaaattcatcaggaagataccacaaatatacaattaagcatgtaaacagatagagaactgaggaatacagaattaatcttccaacccataatttttgtaatctctgatttttttccctaaattcttccaatgcttgaatttccttatctatactttctagaacttctacagttgaaggttttgtcctccatcgagaaaataatccacccatcttttatttgtagaaactgggcacaatgataaatatcatcaattgtccaaaggaattcacagctgcaagaagcgggcgcagcccggcccgggcgtccacccccgccagtctcggccgccaccgcccagcctgcctccagagcaggcagcagccgccactgacagagagacaagccgggccaactccttcccatccgctctcgacgaattcgagctcggccgatttggcctgatnnnnnnnnnnnnnnnnnnnnnnnnnnnnnnnnnnnnncgccgcctcccggccggttaaaaagcccccagggtggcgcctcattattgagtgtcctataaactttcg

SEQ ID NO: 451743 - DNA, 1059 bp, Homo Sapiens
  misc_feature (634)..(634): n is a, c, g, or t
  misc_feature (660)..(722): n is a, c, g, or t
  misc_feature (785)..(785): n is a, c, g, or t
gggaggtggcggaggagagcccggagctgctgaaccctgagcccaggagactgagcccagagttgaggctactgccctatatgatcactctgggcgacgtcgtgcacaacttcgccgacgggctggccgtgggcgccgccttcgcgtcctcctggaagaccgggctggccacctcgctggccgtgttctgccacgagttgccacacgagctgggggacttcgccgccttgctgcacgcggggctgtccgtgcgccaagcactgctgctgaacctggcctccgcgctcacggccttcgctggtctctacgtggcactcgcggttggagtcagcgaggagagcgaggcctggatcctggcagtggccaccggcctgttcctctacgtagcactctgcgacatgctcccggcgatgttgaaagtacgggacccgcggccctggctcctcttcctgctgcacaacgtgggcctgctgggcggctggaccgtcctgctgctgctgtccctgtacgaggatgacatcaccttctgataccctgccctagtcccccacctttgacttaagatcccacacctcacaaacctacagcccagaaaccagaagccccctatagaggccccagtccccaactccangtaaagacactccttgtccttggaannnnnnnnnnnnnnnnnnnnnnnnnnnnnnnnnnnnnnnnnnnnnnnnnnnnnnnnnnnnnnncctggccggccccccccggccccccagaagcttttcaaacccttccgtttgggccgggggccncccgagggaagggagactgggctcatacctggtttctatgaaaaacccttgggtccgtactaaagcggttggaattctcccccaaaataaaaaaggcccgcgcgggaaacccgagggtttttttcaacaatttcccggctggggtgctcttaggcgtcttttcctggtactcaggagcagaagcaaatattccccctgtcatcatgtgattacttcatgacacaaggaactatcggcactgctatcgagagtctcgacgaactcaccgccagag

SEQ ID NO: 451744 - DNA, 1029 bp, Homo Sapiens
  misc_feature (159)..(169): n is a, c, g, or t
tggggcgagcgtccatcgggcggggtccagggggcgttgccggtggcgtggggccggggtagcgccggaaagcgggagactccagtggtgggaggctgagaggggtggcagtccggggcccgggggagagcccccgggcgggggcccgccggtgccccnnnnnnnnnnnccgaagtggcagccgcccccagggtactggcgagcgccccagacacgctccgggccggaacgactcctcctccgttggcgggagcagcagccgccggtgccagctgcccatctaggaggaggtttggggagacggtcccgggagtctccgcatccccgacattgttaagcgtctcttcggaagagctgcgctcgcagacctcctcagggccataatccgtggcccgagagacgtcgaaaatctcggaggagacgtcctctgtgcgtgactcgtccgggtcgtccaagctctcggtgtcctcggtgatgctagtggccacctgggccgtggtgacactggtgatctggaagcagctcttcttcttggccggcatcttggacatggtgaagaaggctggagggcagagaggcacgccggctcctctgggtcctgtcggaaaccggggagggcagagcacgggcccccaaagacaaagtccgagtctgcgctggggtctgaggcccgccgctgttaagagtcacgggctgatccaggcgctggccgcccggtgagacatcctcctcctcgtttccttctctgtgtcggtctcttcggctctgcccccgtctcagtcccgcggcggctcctccttcctttttagctctcgcagccgcggcgcctcaattcaattccctcagaggcggcgagagcgcgaacccaggggcgggccggctgcttcctctctcgtctccggggcagccgtggtcagtccagctcggcgctcggcgcggtcagcaggccttggctgggggtgggagtggggagggccgaagaggaggaggaggaggcggctggcggcgggtgaggggcggtgctgcccc

SEQ ID NO: 451745 - DNA, 1514 bp, Homo Sapiens
caggaaaggttttctgagcgagtgatgagggcatcccggatcgccagtgaataatttcatggcagcacttcgggtgcttcgggccaaaggcctcacgacatacaagccgccagcgtgggctcgaagaacgtgccttgtctcctccacgcacttcatccatcgtggcgggcaggcatgggtggttgctctgtcagttcccgcagtttctggctgagctttctgcgtgcctcctggaattgactgtccagggctggagaaagggtcaccaccagccctaagatcatgtggctctgcagaaagtccctctgctttagcagcatctcctccaccagttgtgacatgtttttcaaatattccacgtcatggaccacgagggactgagaagggctcagggacatcggtgtgaatgtcgcttgcaagcaggacaaccagtcgatggcgggggccatttccttgagctggtcgatagtgaccatctggaagagcttgccctgtgcccgccgctgctccaggggcctcagaaactggaacagccgtgaagtgatggagattgacaaggaaggagtgttcttggcaccttgccttgggtctcctccccagcaaggttccccagctgatttcaggtaagtcaaggtattcccgaaagattctgggcatagatcttctgttcttgatcttgcttgaggggaacatcaaactctggctggtctatctggatgactggtgtgtgtggagaggcaggatgaggtcctaggtaggctctgaagaaagggaaatggccatactgactcatcagaagtctcagcgttcggttaaagtttaaggaagtccatttaccagagatgcgccagcctccaagctcctcaataacttgtctgaggggaccagtccctgcagcttcaatggcaagtgtatccatgcaggagttgtagaactggaaggctttctcctccccagagcctgggtgccaggaattctggacctccagtattctccgaagtcggtttttgttctttgtggcaagctcctgaaaagaattattggtctctttggcccttccacaggcaaagctgaagaagtcggtgcagggggccacacttgtgttcccagaggccaggtaatgatcccggagatccaaacacacagatgtctcacaggggcgagggccacagttctggaagttgtagaacaaaagcacagaaaaacaaaggagcaggcccaaaatcaggatagctgtcagcacccgcctggccactgcccatggcctgctcccttccacgggcagcctctcttctggagtgctctcttggctccagagagttcccattccacctgcctggctgcgttccctcggctcttcctcactttggtccccaccttccatctgtctatcttctgtggctccagaatccttcctggttccactctaggagctgattcggaggactggggtccaggaaacaccccccgccccagttccttgatcctgatcccgggaattccggaccggtacc

SEQ ID NO: 451746 - DNA, 1314 bp, Homo Sapiens
ggggacactgctcttggatgtccttttgtatcatctgacctaaatgcacaggatggtgaggtacgtggctgtctctgacttttaaaggcacgtagttgtctccctgggttataccatttttcatttccacatcatcatcttctaagttatcctctccaaatcgttccatgtgtgtgtttttgaaagatttccaccaatagacatatcatctaggccagaaagaattttattaatacttccttcactggatggtcgatttttcagttggatcggaaaatgtctccttggacccacaatgatgcttgtttttcttccaggaagtgctgctggggtcctataatagagcctggccggcatattctaatccaagcaattatttcagcatgtgtaaacctgtagtgtttcattacataacaggctatcaatgtccctgttcttccaagaccagctttgcagtgaacggcgatggccccttcggtgttctcacagatgttcaggaaccttcgcacgatgttgtcactgggtgtgctgccatctatgaagaagaggtcatagtgctcgaagccagcgtctgtgaagcgctttgcctcataaatctttttgtttagcctcacaactgcagtcacattatgctttttgaaataaggaaagtaggcttcaggggcgtgaagaggattaaccattctcaatttttgcttttaggatgtggtccactaaatgctaaaaattttcctggaacaatccagttgaagtcaccattttcaactcgctcataatgttcatattcatccacatcaaatgtctcaaagtcaaaaaatccatgttgtaatccctttctgattccctgcaaacagtcgagaatggtgagattgtaagtgcaatttccaaaggaagcatccctgaatggaagatagggggggtttgagccagacaggagtgctctgtaggcttcttctggtgtcttctttaaatagattactgcataggcacctatcaaaaatgctgcatttgctcttttccgttggtcaaaacaggtgtagtgcactattttctttcttgacaaactgtatgattttagtttcttgtttagtttgcagcaatatctgtacaccattgccaagttcagcggtccaaaatctgcatagaaattttcatagaccagctcctcatcgatggagaaatagtgggtatttactgtgctttttggtctattccttaaagtagcaaaatataaccgatcagactctgatataacttgtactttgttctcacgggacaaaaagtttcccatctggttctccacgccctctcatc

SEQ ID NO: 451747 - DNA, 1481 bp, Homo Sapiens
  misc_feature (1358)..(1366): n is a, c, g, or t
agcggagggtccggagcagctgctgccagcccgcgggcactgaagtcctcccggctgccgctcgagtagccacgggcgcgatcgggaccagaagtctcctcctccatgatcactttggaagccgggggaagactttgccctgccctgagagctggtctgcgtttcccaggcgcggcggcggcggagcagcagctgcagcagccgagtccaaataggagcggccacagccaggggcgtgtgcgccccgcgcggagcgagctcgggttcccctcggaatgtccccggggcgcccggcgcgctgaccccgaagccgcctccgccttcggcgcctgctgcctccctcggccaggcttgttgttcgggactgtgagcttcctggctcctgggcagtggggaagcccccggggtgcgagtgacctcagctggccacgacccagccctcccccgtgcgtatctcgcttaagatggcagcggagtcaggtgaactaatcggggcttgtgagttcatgaaagatcggttatattttgctactttaaggaatagaccaaaaagccacagtaaatacccactatttctccatcgatgaggacgctggtctatgacaatttctatgcggattttggaccgctgaacttggcaatggtgtacagatattgctgcaaactaaacaagaaactaaaatcttacagtttgtccagaacgaaaatagtgcactacacctgtttgtgaccaacggaaaagagcaaatgcagcatttttgataggtgcctatgcagtaatctatttaaagaagacaccagaagaagcctacagagcactcctgtctggctcaaaccccccctatcttccattcagggatgcttcctttggaaattgcacttacaatctcaccattctcgactgtttgcagggaatcagaaagggattacaacatggattttttgactttgagacatttgatgtggatgaatatgaacattatgaggttatcctcttcacgcccctgaagcctactttccttatttcaaaaagcataatgtgactgcagttgtgaggctaaccaaaaagatttatgaggcaaagcgcttcaccgacgcttggcttccagtactatgacctctttttccatagacggcagcacccccccgcgtcaacttcgtgccgagggtcttgaacctcctgcgtaaaatcgcactgggccttcttcgcctccccgcccccttttccctgctcccacccgcacaaccacactctgacttgccccgccacccttgacctccctcccgtctttattacagtcctttgcccaagacaacgtgttagcaccctctacacgagaacccttaacaattttctnnnnnnnnnacctcactttccttctcgcaccccgggtatcacctattgctgcagaccgcgtccatgccccacctcatgcagaactaccttcccactcctctccgtttcccgccatccactctct

SEQ ID NO: 451748 - DNA, 688 bp, Homo Sapiens
agggagagggcaaggagagttccttagggcctcggaggggcttgagaacctttaagcgggtggggcggatcccttagttgttattgttgtctttaacctgttgggcattaaggacattgcagcaatagacctgtgccccaaattgctgacaaaggtgggaaaaaaagaacgttccatctggccgggtgggcatagaagggggtggagggagcgcctgggtattgtcaggtgaggaaggtcagagggagccgtccacccacgtggccagcgaaacggagcgtgggaggaggcccacgaacacctgagatcaaaacccacagggcacgtgagaagatcccaattccagggcgcgaacgaagtccaggagcttcaaaattggcccgcatcatgaaaacatccggcagacgattgaagactcactcttgatgcagacgctgacccgaggaaggaaaagggtgagaaacagctaggcagacacagcagagcgggaaagaggccgacgccgacggaatgcaggaggcttgggggtcgggcccaggagatctgatctgagagtaacaagttacaggagcgcggaaaatcacagatggaggaagggccgtcattacatatcggaactctctcctgagttgggggacgcctgcagagtaggcatggaaggatcccaacatcccagaccgtaccagcc

SEQ ID NO: 451749 - DNA, 987 bp, Homo Sapiens
  misc_feature (536)..(536): n is a, c, g, or t
cgccagaagactcctaggcccttggggtggcgcgcctgccttttctagttttatacaaagacagccacttttagctactgctaatgagacttgagtctatttttgtacaaaagagaagcaaaatcttttttctaaacctgtgcctccctctcctcggacacccagggtctagccgctgccctgggtcctgcctgcagtattacagaggtcgtcgaaaggtgcagctgcgttctgagggcgtggggaatgggcaggtggcctctgctggtctctggctctacgtttaggcacccctttccccagcctctcctcctcgggcagggtctctgctccagcaagcaaacagggtggcccaggtggctattttgagaactccagctggtgcccccagacagctgctcagagccaagggggcagagggctttcagcgcccccaggcctgccctgcttatttcaggccctcagcttgttcgggggccactgtgtttctgttgcttccaagttgagacttgggccgcagcggcttcagacttttnttttgcgatgtcctcggtttcccatttgttgctgctgctgctcattccacactgttgagaccttgtggtctcgatgctgctggcctccctccgtccctctgtccacttgtgggtcctggggtcgtcttagcagagccaccgccaaggtttgcactcagggaggggctgatggagggctgggcgccatggggtcagggaggccccagggacccatgggcagagctggggagccaggaggatgggtctgcctgctctgggggtgcaggctctgcagacaccccaattgctgctctgttgctgtgcctagtctagtgtcccccaaagcatcggggggccacgcaagtgatgggtgtgtgagtgtgcgtatgtggggaccccccatgcatggtggggtctgaggccgtgtgttcccatttagggctgaatgaagccatgacttggaaaggtggtg

SEQ ID NO: 451750 - DNA, 1149 bp, Homo Sapiens
  misc_feature (240)..(317): n is a, c, g, or t
aagcgagagggtatgtgagggacggatgggcggtactccatccgaccatgcgcgtttgtagggaagaggggcgtagaggagagtaagctacggtgtatgggggggataggagagggcggcgttggaaaggcgggagacgcgtacgccagtgggagtggaggcggtccaaggccaggcaggtgggcccaagtgtcacaatgcgggggccggggtggccccaggcgcccatgcgtaagcccnnnnnnnnnnnnnnnnnnnnnnnnnnnnnnnnnnnnnnnnnnnnnnnnnnnnnnnnnnnnnnnnnnnnnnnnnnnnnnggcataggtggcccaggcagcacaggtggtttaggtagtggggcccccagaggaacacccaaagcaggatccagagcaggagcagcataataggcccccacccaagaccatgtccaaagggtggggccaggtcagcagtagcagtgtttctcaacattagcaccctctgatgtcgtttccacttggctcttctgttctgaaaccaaacctgcactctgtcttcagtcaaattcaggcgtgctgcaagtctctctcgcgccacaacgtcgggatattgagattcatcgaaaaagttctctagctcctgcagctgaaactgcgtgaacgcggtgcggcggcggcgtttcctctctgggggctgtggtccctcagcggtttgtggcccctccgccggctgtggcccctccacggtcgtctggggcggctcctcctgctcttgcttcagctcgagcaggggcggctcctcctgctgttgctccggcttggtcaggggcggctcctcctgctgttgctccggctcgtggccgccgccaccctcacggtcttggtcgtccgaggggacggacccttccgtgccaacgttgttttccgcttctgttccgtactcaggtttggaccgtgtattctcctcgtcctctcctccccttgccatcagcgaggtcacggtaagtttctcatcattcacttcctcgatgtcctcgccgactgccaggctgcggtagccaatatcactgtgggtgtacccgcgaagagactccatgcttcaagcgctgtcgataaagctgtgcacttctgcagactctgtgcgtggttccgcgatcccgggaattcc

SEQ ID NO: 451751 - DNA, 1079 bp, Homo Sapiens
  misc_feature (198)..(198): n is a, c, g, or t
caaaggcatcccccgggggcgggacggggttcatggatgaaccagcgggtcatggtaggcccttcagggtgaagccccatacaccccgttgcttcctgaagccccagccaaaaggcgccagcctcacttcagttttcacccaccgggtgctcaatacatttgcgtccccaaatttccggctccaactccaggcatctnccaggtggtcatggatttggtccatgagcttcttcagcaagtcccccaaacgggattcttggctgcgcctgtggcagaggttgtactgtttgcaaggctgttggctgtgctcctgcagctgggggcagcagttctggggtgacatgatgcaccacgtgtcccaagttggcacagagctgcaggacgtggttgatggccccatcgagtttggaggccccgccagtgcctggggaggctgtgagacccagcacctggggtagcggctgtgccctctggagtttaagttctaggtactggctcatgatgacgttgtagacggtgtccttgtgcgtgtggtggcactcatccaccacgatcagggagaagacagtgagctccacgtgctcctcctcctcggggctggtcagtgccatctgcagaagctctgctgtgcagatgagcaggtcatggcaccgggccaggtggccaaagccagcacgtggtcccatgtccccactcagggttgtcacggtccagcgtccatccagcatgcgcctgaactcttcaccatgctgggtcaccaggtgcaccctgttgaccaatacaaccaccttggctccatccacagtctctaggtgccgcttggccacataagcagccgcccgggtcttcccggcacccgtgggcagccagatgatgatattcttgccctccagggcaggcatgatcacctcccattggtaggaccgaagctccattctgctctagtaggtaggtctgcccagggcagtcccacttaactcagcctggtgccactctgctcagctcagagacccaagatggaaactgaaactgagggaaggagccagctgagccgacttaggaatctcccaatcccgaga

SEQ ID NO: 451752 - DNA, 1060 bp, Homo Sapiens
  misc_feature (121)..(121): n is a, c, g, or t
aaaccatcccccattagggggggcatttccactggtggataataccctcagaagggttgcaggtataaaaatgagcaagagaggccagaaggttgaggaaccactccactgcccactgtcntgtaaatactgtgtggtggcctcatcacattttgtaaaaggaaagcaaagagtccatccatcttccttgtatgacatgtttaattccctggtagtgatatgcaggttgctgataaatgggctgagctaccatcacaggggagctacatacagaacgtgaaggccaaggcggtgggaccgaagttacctctggagtatgaaaataagcaacaccattatggtaagtataaggatatccagttgaagttgttagatacattgttccagctgctggcattatactagaacgagggatccgtacttgttggttttcttattgctggaccaatgttcagcttcgttatcctgtataagttaagtttgttcagcctcttgtaaaatgttgtttgtgcatcttcttgtgtttcaaatagtgacgaaaccatacccttgtggatactccagctgctgtcagtttacaatgcttcacttgctttcacagacccatactgggaaaaaaattttcttaaatcactttcgtttgtcttaaaatcgaattcctcctacaaagatgcgattagggatcactgttccatatcttggggcacttgttgggttattcaaaggcacaggtgacacaggattaggggatggagataatgaatctgtttgcatctggtttgatgtttgcgtcgcagtcactgcctcggcgctcctccccctccaaggccagcaagttgcggcactgggggaaatggccgcggcgacaacttcctcgagttctctcgggtcatcgtgaacttgggcaccgaaacgaggatccaccccctccccaccaaagtgcgggagggaaaagaaggctagccagcgagaaattttgccccacaaatccgccagcagcagtggcgggaagcctcaacggcagcgaccccgccgctggcatcccgggaattccggaccc

SEQ ID NO: 451753 - DNA, 1263 bp, Homo Sapiens
  misc_feature (28)..(28): n is a, c, g, or t
  misc_feature (43)..(90): n is a, c, g, or t
cccttaggggggctggctaatagagtancctatatgatgagannnnnnnnnnnnnnnnnnnnnnnnnnnnnnnnnnnnnnnnnnnnnnnncacaagaattctgcccacttttttaaaaaagtagtatactttctgtattaccaacagatagctagacagatatgtgaaacttgtgccttttaagcaaatacattaacattgggggttttttaatacttctgtatctttaatatgtgtgaaaatgttacatattaaatacagccggtgtgtgatctatacaattgttgtgcaaggtctatatgaaagtctcaagggtggcagaattggttcagatttttccattttcctgttttccattttaacactgacagtcaagttgcctaaagtgttgaacaaatactgacatgtaaagggagtttcactctatgtctttgtgaaggaggaccttaaagagattttttttctgtattatacgttgatacagtacactgccaggtgaaacaagagccttaataaagcatgcatcgcccacacccctgtatgagacccccacagaagggatcgcttgcgtaaggcaccattatgaaggtcaacagtgcattaacagctagaaaaccagaaattagtcctcaaggcataaataagagaaacatagctgcatgagaaaacagtttctaagcgttagtggttttatccacccaactgagaaaaattttaggttcttaagtctaatgaaacattagaccagcaattcccagccccagctttgtgacactcaatacgtgtccaatttcttctaagggcatcacagaattctccaaaaagttaattcaaattcagaatcatttaaaaataatcctgtgttgcacaatgcctttctggaaggggagtgtttacaaacttggaggggaaagaaaagttgtatattgccaggcccggatggctagggggtcactgtattagacagattggatcttagctgctcattaactggaatcagtattgcagtcctgacttaaatggaaagttgatgcagctaagaccatgcatgacattttgtattcaaggaaaagtttaaaggtctgtgttatatttgtaaataccagcttataccatgggttacaaatgagttatgttgtagcgtgtaatacacgatacgtgacacattgcacattcaatagctgcaccagacactaattgatccctgattccgagcgtacagctgctactaaccagggttataggacaaagctcctgtttcct

SEQ ID NO: 451754 - DNA, 720 bp, Homo Sapiens
tgggagaacagaggcgccccggatctgccagctttgagccctccacgaagtgtccagcctgccgggtgaacatgagcaacgagtccctgtcgccaagggggacagactggtggaggtggaaggtcaggaaggacacaccacggagacaatgacaccaggagggagactgttccaggcagaggcaacagcgagtgcagagacctatcgggagagctggggtgtatgtgacgcagattctgagggccatgagccgagggaaggagccagacgtctgtcctgctcagatcccaccaagaaccggccacctcactccagataaactccagactcttcactgagcccaaaggcaacgagcagaagcgtccagaaatcacacagagctcagcaggtggtgaggcacctggacccgagtcacccagcagctgaacaggccatccctgaggccatgcacgccccggccctgcaggtgtgacggccgaggcttccacgacggggggtgagtgggagctaatatggctggtgaaagcactgggttcagtggggatggcatctcccgccctctgtccaaggtggggaaaaagtcagcttcaggtgagggagaccttgacgcctggctttgggctgattccccactcacttggccttctcccaagcatactttcctgctttgtagcctcgtgccgaattcagccacccagcctcgctaccttagtaccgcta

SEQ ID NO: 451755 - DNA, 1813 bp, Homo Sapiens
  misc_feature (321)..(374): n is a, c, g, or t
atggaggtaagagtcgattgcggcgggtcccagatgcgtggcggcatcgcggtaggttgtcgtaggacatggggaccaccagaatgcggacgcggttgaggtacggatgatagaggaggagagagagggtaggggtcggcagtttagatgcatgatggagggggtgtggtttgtaagtggggaatgggaatgaggtgcgtcgtgtagataaaatgagggggggcagtgaaggagtattgggacggggggggtgtactgaggggtaaaagaagaagggagaggtttaacaccggttagaacgcaggggggtccttgagcaannnnnnnnnnnnnnnnnnnnnnnnnnnnnnnnnnnnnnnnnnnnnnnnnnnnnnaaacccttgacaatgtggggggggcataagtggggccccacggggccagtcctcgtaactcccatgcgccaccccccccagggcctcaacagtcacaacagtcagccaggacccagccacccgcagaggcaggccccaggtggagcagtgaggggtggggtgccggtggagggtcaggcatgctcttcttcccctttcatagtcagggcagctcgattctgccagggtcatgcagagtgccccggcaccggccagaagtcctcgcccaggtgagcgcagagccacatccattcgcgcccacataatttccatggagagcccatgccgcccatgcacctcctcagggcacgagctaatggcctgctcaacgcccactctaaaggcttctcccaggtgagcaacgcccaccaccctttgcagactgactcccaggatttctgttcccaagtgccacacagagtgccttgtggtgcatctgtgaccctcttggccggggacacgtccccgtcttttgcttcctggctgagccccgcacctgtctgggcacccttgtctcccttgttctcttcccggtcaccagctccagcagcaaaccacagagacacaaatgctcctctcaccgcaacacgcagggcctgggagagacagaggcggccccgggatctgccgtctttggagccctccacgaagtgtccagcctgccgggtgaacatgagcaacgagtccctgtccccaagggggacagactggtggaggtggaaggtcaggaaggacacaccacggagacaatgacaccaggagggagactgttccaggcagaggcaacagcgagtgcagagacctatcgggagagctggggtgtatgtgacgcagattctgagggccatgagccgagggaaggagccagacgctgtcctaagtgccaggggaagttgttagaggtgttaagcgtggcatgacgtggctggatttagggtctgagatgaactttcctgctcctgaatggactctgctcagatcccaccaagaaccggccacctcactccagataaactccagactcttcactgagcccaaaggcaacgagcagaagtgtccagaaatcacacagagctcagcaggtggtgaggcacctggacccgagtcacccagcagctgaacaggccatccctgaggccatgcacgccccggccctgcaggtgtgacggccgaggcttccacgacggggggtgagtgggagctaatatggctggtgaaagcactgggttcagtggggatggcatctcccgccctctgtccaaggtggggaaaaagtcagcttcaggtgagggagaccctggacgcctggctttgggctgattccccactcacttggcctctcccaagcatactttcctgctttgtagcctcgtgccgaattcgccacccaggcctcgctc

SEQ ID NO: 451756 - DNA, 786 bp, Homo Sapiens
  misc_feature (77)..(88): n is a, c, g, or t
  misc_feature (178)..(194): n is a, c, g, or t
attttttctcgggggaccccccccggggggattttccaaaaggggctccccacagtggaaaaacctggtgtttattnnnnnnnnnnnnttttgttcccctcccggggcccgggctttttcccaggaaggttttgccccccttgttttcttttgcccctttaaacccaaattggggggnnnnnnnnnnnnnnnnncccccttcggaatttggaaagccaggtgctggctcctgggggttccaggggcctggcatcttccgtggttctcttgactgtcattcccactggtgcttcacggctgcaaggtggctgccacagctctgggcattgcctccacctgctcagatcccaccaagaaccggccacctcactccagataaactccagactcttcactgagcccaaaggcaacgagcagaagtgtccagaaatcacacagagctcagcaggtggtgaggcacctggacccgagtcacccagcagctgaacaggccatccctgaggccatgcacgccccggccctgcaggtgtgacggccgaggcttccacgacggggggtgagtgggagctaatatggctggtgaaagcactgggttcagtggggatggcatctcccgccctctgtccaaggtggggaaaaagtcagcttcaggtgagggagaccctggacgcctggctttgggctgattccccactcacttggcctctcccaagcatactttcctgctttgtagggatgtgggttcgcgggacagtaacaggagcctcgtgccgaattcgccaccca

SEQ ID NO: 451757 - DNA, 1042 bp, Homo Sapiens
acgagatttaaatattttattccaacctgtgtaataggggtctcctcctccttgaactgtcccgattggctggggtcacgtggtgagggtcctgggtgaccaggcctagccttggccacatgagtccacacagtggaaaaggcttggctcctgtggtcggcacacacgagactctggttgcgcctgctgggtgtggaacaggcgcaccatcgccatgcctgcagctcacaaagctcctgctggcctgggatgcactgggagcagctgccatgggtccgtcagctgaagtgaaggaagtcctggccctccttgcaagtgcagtgacctcagtttgtcctcaaaggtgccccctgtgaggtccagcttcacgcagatgacgaagggtggccggcggctcggaagtgcaggatggggattcggggcttgggtctttcctgagagtcctcgtggccatagaagcctttcctgatcttgttctcgtccacgtcacagaatgccaccaccttgcgctggctgccggcagtcaagctgcggtacagccggcgcccctgcttgccagcgttccagatggtgaaggccgcccagcggggcagggcctgctcttccaggaagcggacgcggtgggtccagatggtcgtcccgtagggccgagacgcaagcctcggacggcggcctgctttccaacttaacgctgcggcacgcggcaggcaggtggccgagacctctgtgtcctcacagttctaaggagggaactgtctgcccggattcgaggacgcagtgcgtgccgcctgtgggtggtggcgatacagcaggagactctggtccacgcggatgacgccgccgcccttcctgaggtgctcgtagaagaacagcaggtcctccgggacgccctgcagggcgggagaagcagaggcatcactggggccccagaaacgcgtgcctgccccggatgcacactacacctgcgctcagccggccaaccaggaaccggtggaaaaggcttttgttgcaagaaaccggtctagaggctcaacagggacat

SEQ ID NO: 451758 - DNA, 1118 bp, Homo Sapiens
tgctgcacaagactggtatggtactagtcaggaacctgtgagttgactagttgtgtcagaccctactggctaattcacaggaagactttattatacctcttgccattttgcccaagtcattaatgacagctttagttgatagatacaaggcgtgtaaggatagcaggagatccagctccttggtctgctgtattcatatataaaaatgtttggaaagctgattaaggcatttcattaattaagccttaaaacaactgaaaccaaatctatgccaaggttcctgcttgacatgtgttcctcaaaagatattatctcaacatctataaagctaagaaagccatatttaggggaaaatctacacagtatattagctcttcaacatgacagagaaaaagcaaagttccttcatttggaaattgggtctcctcttcacatactctgacaaaatattatatagtctggccaaaagatataggtgtcttgataatttgctcttttaaaccttgctaataaagataaataaatgcccatcacatagacattaactagtctaatcagagggaccacacaggtcgcttttcagaacctactttaatatctaaacagagtcactgcagatcaatacagagctcaccccttttccagaaaagtagatctctgtaatatttctagggtttgacatcattgggaaggcacaatgcagtataagaaatgaactgttacatccacaacggctagcatagtactatgtcatatcaccaagtgcctttttaattagtttcatattcctaggctttcctttcgtttctgcagtgcttaataggagaactgaaacagaatccaataagaaagttttggtcaattgaaagactttaaatcagaaagtttcttgctgtcactggataagcaagtaagggattaaccacagaaactggacatccaagacatccttctctcctaaaacacagtcccacaatcctactgcacaaatctagaatcctgtaacagggataagaaaaaaatgttaccatctatcccattatccaaattctctcagaagcttaaaccagattgaaaccattctttaaaaatcagaggcatagcttctactaaatgca

SEQ ID NO: 451759 - DNA, 1182 bp, Homo Sapiens
  misc_feature (402)..(402): n is a, c, g, or t
ataattggcggtggttcaaaacccttttggggacaaaatgtgggtgttctcggagagccccctggtcttttgtggggttcccgggccaattttacccgttttgtgtcttttcgcgggaggccaccccttctatggtggagggagggcacaggggctttctgaagggtttcgggtccaccaaggccatggccggccatttttgcgttcccagactccatggggccggggaaattctgatgggggcccctttggggggggcaaggaaggccccacccccccgggattctggccagccatgagggaccctgccaccccaggggcttctgggggtcccctgaacctgctggggggctccaggagggggggacgacctgggggtctgcagaggacccagattgtccncgggaagggaaactgggtctccttgttcacccatgatgggcggggacagaagggcggttctcttccggatgctggaagcgcacctgctgtggggcgtgataagggtatgtcccccctcctccgccctcgtttttctttaccaacgacttgctggagtgaaggatgtgtctcttgttgaagcgccgccaggcctcctggatggccttggccgccatcatctgggaaatcagcttctgccggagccaatagcccctccagttggcttggatgagcgtggctgcacgggcgtgcatcatgtccatctcgtctaccaggatgttcttgaaggcctggctctcgaccacagcccggaggcgtgggacgcggcgggacgccgtcttgccttcggcaggctgttgcggaagatgctccttggacttgaggccctcgtgctggggctgtggaggcgctttctccattttgtccgggagactggggtgagcgggggctggaggatgcaccgcccactgggtgacaactggctcgtgaactgtagctaggcggccggctgcattgccttgattaccggacaggtcagctctgccttgaagggtcatagatttggaggagtagcaggagaagaaggtgcaatctcagaagccagcctgcaagaggaggcagccttcagcctttcatccatgcaatatgcagctacactgccctgggctgcccctgaagctaaacctagcagtctgaacggccgtcttggagcctgatcccattactccgggccgtacagcc

SEQ ID NO: 451760 - DNA, 837 bp, Homo Sapiens
ccgggatagtcttcagttactttggcaagcctgtgttaaacaggaggttctgatcctaaatagttggtctggtgtaaattgtctttaggagtaatgttcattgtgcgtaacatttgcattcacatttaaattctcaactatctgaagaagaaatagtcattagacacagacctgggcttgccttactgtccctgtgactaccacttcccccatgtacacccttgggctgagcaatataaggtcaagggtggtgaatgggattttcctgaagaaaaatgggttgtcagtatgttccttcccacacctaactgcccagtaacaggagggcggcgctgagctcccggaggcctgtccttggaaatctccaccaaatcactaagactccagtgaagagccagggaagaggcgtattttctctcctcttcccccactggggtgtgtagggaggaggaggtgcggtcatgcctcccaaagctgcacaggcatcaatcaggactgaaacagtccaggcaggcggtgcgtcctggtcagttcagggctgaaacagtccaggcagttcaggactgaaacagttcaggcaggcggggcctcctggtcagttcagggctgaaacgggccgagtaggcggggcatcctggtcagattcagggttgaaatatgcggggcaggcggggcatcctcgtcagttcagggctgaaacgggccgcccgcgtaggtgggtcatcctggtcagttcagggctgaaatgggccgcgttaggcggggcatcctcgtcagttcagggctgaaacggccgcgtaggcgggtcatcctggtcagttcagggctgaaacggat

SEQ ID NO: 451761 - DNA, 929 bp, Homo Sapiens
  misc_feature (850)..(886): n is a, c, g, or t
gtcactgttgaaaatggttcgtgccatacagatctgtgtccccagtgggaaggtgtctaatttctgatcacgtgtaccattgccctgagttgcagaagtacttagggaatcctttatttcccggttggggaagggaataaaaagtcctttgtttgagtccatttcgatcctgctgtcaacattagcactgacttttgatgcagagctctcacctgttacacagtttttcattgtcttctccctagagcttttttccacctctaaaagaaaattttcactgttgcccaactgactaaaatgcagcttggcagcttttctctcaccttcacgtacagttcggtcatctaatttctccagagtttgtagtgtatatacagcaaatagcctataatctgtatctttccttacaacaggattaagtctcaaatccagttctttgaggaagggtaacggttgtagacgggacacttccactaatgaaggaatgttgttataatataaattcaggtcttggagtgaacataaatactggattcccttaaggctagtgatcaaattccttgataaatctaaggatcggagatttttaaaatttctgaaggcatcaccaatggaatggattttgccagcataagatccctgcaatgaaagagactccaccagttctgtagtctcagttactggggaggctgagacaggattgcttgagtccagaagttcaagtccagcctgggcaacatagcaagaacctgtctccggctgctccagcgtcagcgcccccaggcggcgaatgccttcctcgtcccgccccgctctcgacgaattcgagctcggccgatttggcctgatnnnnnnnnnnnnnnnnnnnnnnnnnnnnnnnnnnnnncgccgccccgcggagagctccattcgccctatatgatcataca

SEQ ID NO: 451762 - DNA, 750 bp, Homo Sapiens
caggctgtaccctcgggtacgggatcgccgccgcgcgcagctcccgacgccgcgcccccgcgggtgcctaagcaggcgggtgcggcccaggacttgggagcctggaggactgacgctgctggcctgtggcgtcccttccgctgagccatggcgactcccgacgtgagtgtgcacatggaggaggtggtggttgtgacaactccgtgacatctgcagtggcacggcagtggtgtggagggggtgaagaccgtgttggtgacgaccaacttgtgcccctcacgggggcgacctgacggaagataacatggagacagaaaatgcagcggcggcagctgccgcggccttcacagcctcctcccagctcaaggaagccgtgttagtgaagatggctgaagagggggagaacctggaagctgagattgtgtaccccatcacctgtggagacagcagagccaacctcatctggaggaagtttgtgtgtcccggcatcaatgtgaaatgtgttcagtacgacgagcatgtaatcagcccaaaggaatttgtgcacctggccgggaagtccaccctgaaggactggaagagagccatccgcatgaacggcatcatgctcaggaagatcatggactccggggaactggacttctaccagcacgacaaggtctgctccaacacttgcgcagacaaagattgacctctcaggagcccgtgtgtcctgagcaagacccaagtcggccgagtacattcccctca

SEQ ID NO: 451763 - DNA, 802 bp, Homo Sapiens
tagtttaaatctttgtaaagctttaatgtaagaacatcagtacactttctttacataaaccttaaagcatgatcaataccaagatttcaaattttcaactttcaagtacttgaaaaagggttgcaacaaagtgtctcttcccaaaaaagcaagaacagtgatcatgcaggtgttaatctgcagacatctgaggacactggtatctgtgttggtctgtcatttctggctccactggcagagagtgtatggcaaggcattactttgaaatgcagactgtaggacaaggagtcatgacaacattttccgtcttcacctacgtctgaatctggtgttgtaacttcactgccttgaagcccaaggatctcacagactgcttgtggcaattccttgcattttaccatctgtagagaaattgcttctgccttgcagagtatatcttccacatcaattttcatggacaattcattgatatgcttaagtatttcattgaagccataatgcttttccattatttgctgcttttctgattccagaatagcacaacagagaagaagatggaaatttgtacatggtagttcggtccacattacctcccataatcgaagaatatctagaaaactaaattcccttttgaatctgattaaaagccacctgaagcaaaaataaaggtatccagagtcctgagattctaagtaactgcaaatccactgtctaacatcgaagtaaggtactcacgctgaattagctgggtcttcatgccttgcatttgttcttcaaaattctgatgcattgatcccgttac

SEQ ID NO: 451764 - DNA, 1087 bp, Homo Sapiens
  misc_feature (684)..(706): n is a, c, g, or t
ccccacccgtttccaaaaagaaagcctgttttgaggggattccctttccccaggaaagtccgatcgtcaatccttggaatttggtggttgatagctggatccagtgcaaaaggaagtgagggatttcccagttggagggcccacagtgaaagtggctggtttttagtgtttcgggacgatgctagtgttcatggctgactggaatacccccatcgcccactgcaggtaggcccacggtgttcttgttctagggttccgagctaggacagtggtcagggccgggtcggattccacgggatgaaaactgcagagcacagtttgttgtcacaaagcatcttggtgtgagattacggaacagcttgagaccgaacaaaggcccctgtaggtctccagctccaaattccaactctcccccatccctttgccgaagttactcgtctgagcgcaaagttaatggaacctcctccatttccattctgggttgagaggcttccagagaggatggctgtgtctgtcgctgtcaagggtgcctcaatggactgggatatgtgcattttattaatttcaatctgcggaaagctactgccggacacatcttcatactcctcatcatagcgatcaaaaaggtcggtggcatctactccaacgctgatcgttcccttgggattggttcgctgctgcaannnnnnnnnnnnnnnnnnnnnnngcagccgctcaaactcctctcgaatttcagcaggggttctcctcctttccacaacctcccatccttccatttccagtcctctcttcccatatatatcatagatggccctggtttgggggtcactaagcacttcataagcctggtgaacaaggttaaacagtcgttccgcctgtgacttgagctctgggtctctgtgcttgtctggatggtagagcatacagagcctccggtaggcagctttcagctcttcagaagaggcctccctgcgcacgttcagcaacgagtaatagtcttcattgtccagctcctcctcgctcaaggccgtcgccatcttcgcaacctttccctcgtgccgaattcgccacccaggcctcgctccta

SEQ ID NO: 451765 - DNA, 896 bp, Homo Sapiens
  misc_feature (171)..(212): n is a, c, g, or t
ggggggggattccaagcccctagttcatggcccggattttccttgggaaaccagctaatggccccattttccctgtcccaacgggggccccgcccccaaagggaaggttttaaaaagtttttggggggccgggggcgacccacaaaggtaggctctaaagcgaaagcggcnnnnnnnnnnnnnnnnnnnnnnnnnnnnnnnnnnnnnnnnnnacaattaaaatgttaatccatatttattttaataaaaagtttttaaaccatataaagcatattagttagtaatgtgtaattaaacatttttcaaatgttataaaaagtagctttcaaggcttcacaagaagccacatcctagtagttttgttaacttctcaatggatacacaatagtcactgctaagaatagggcataattaaaaacagtgatggaggggaggaataaaggcaacaataacacttggtgcaaatgctggaaaatgctccccaggaatggctgcagagtgtgcttctaagagttgccgatgtgctgtggctcctcaacacaagcacctaccacaccgctgcaggtcatactctctttttgtctcttcatttcctagaattttccatgcttgatcaatttcgatgaacttctgtacacattcctccactgttcctgctggtacatctgtactttgtttatctggatgatacattaatatgagtttttgatatttttgttttaggtctgatatatttgcagatgggtctgctcccaggatgctgtaccaatccttttttggcatctgctcaaccgccatcatccatggaaccagaagtgggccttctcagattagctaacttcacataggcgctgctacccactcctcgcctgctgtcggccagaactccggacccc

SEQ ID NO: 451766 - DNA, 749 bp, Homo Sapiens
cccaaattagagtgaattggtatcccattctcctattaatccggagggtggtcttctggcttgataaatggtatattttctttgcaaaataatcgggcttgacaaataatccatttccctggaaatggacaaagctcaaacggcttctcatcatgtctccaataccacagttaaagcatttcaagttgtgaacaattttagttataatgaagaagttctataattagtgaacatgtatcacaagaaatcaggctaacttcttcggcttcatccttggaaacactgtattttccaccacatctgcaactcagataaaaagagtgatcaccttcattccaagacatttcttcaagatatacttgagcatctactggtcctacatttcttagatcatcttcacaccgctgcaggtcatactctctttttgtctcttcatttcctagaattttccatgcttgatcaatttcgatgaacttctgtacacattcctccactgttcctgctggtacatctgtactttgtttatctggatgatacattaatatgagtttttgatatttttgttttaggtctgatatatttgcagatgggtctgctcccaggatgctgtaccaatccttttttggcatctgctcaaccgccatcatccatggaaccagaagtgggccttctcagattagctaacttcacataggcgctgctacccactcctcgcctgctgtcggccagaactccggaccggcttcccc

SEQ ID NO: 451767 - DNA, 1187 bp, Homo Sapiens
  misc_feature (176)..(176): n is a, c, g, or t
  misc_feature (1028)..(1119): n is a, c, g, or t
gggggagccttcatgtccccggcaggcgggtgacggtcaccgtgcccactcttttccccaagcccctgaggggccagccacggcgtagcttgcctattctggcaccacatgcaaagggcataggggcacgtgctgcagcaggggacagtggcaggggtcctttgccacgccctccntcatgtagggagaacacacgttggcaggagtggctgtcctgtccctgagtcaggcggggcccctgcttagggcttcatcgggtctctccgtcactagctaggccacagaggctctgcctctcctgccaccctggtgagggggaggtcagtccattgcagccctctagtcccttgggattgctggctgccagctctaggggtccccctctttggcggcttgaaataatccagtctggagcagtcggggtcccttgtggttcatgagcagacaatgaggcggcccctcgttcccggcagcggggaagccctagaactccaatcactacagagagcacaggggcttcaggggacttgggttccatgcaagtgttgtcccacctcctggcccgaaacctctgccagaggaggggagccagaccccaaccctgagaggacaaaaacaggaagctctgtgagtgtgggaaaactccgctgcagagatcgagatcctttccgcagtaggtcttgcccttctgcttcccatctgaggtgctggtcccttctcctggtggccccagccccagctgcagttgcgtaggggtcgcaaagctcctactgtggctgtggggtcctctggcgctgggaacagctgctgttcagcggggcactgtgtccaataccatctgggtcaggcgagcttgtgctgagctccctaccagggtccaggtctccttcctaatactcctggcccaggttctgcccatccccactcccccggggccagcctatcctgctgtgagctcacagtaatcccctggcaggttccccttcacatgtcgggcgccaggctgccgcagcacgaccctcagtcannnnnnnnnnnnnnnnnnnnnnnnnnnnnnnnnnnnnnnnnnnnnnnnnnnnnnnnnnnnnnnnnnnnnnnnnnnnnnnnnnnnnnnnnnnncgtccggacccgttagctcgcagctctctcgtccgcccgatcccaaactcccagaccggtaccagcct

SEQ ID NO: 451768 - DNA, 1004 bp, Homo Sapiens
gggtgtccgtcggcccagggcgcggtattcggggaagacggggtgtgtgtgaggccccctttgcattgggtgttgtgggggacttccgcatcgggggggttggagggggttggttccccccgccttgtgggagttccgggtggaaagatcccagtgttctcttcgggtcccaaccggggggaaatgtttccgttcaaaagggggtgtcaaacccagtcgagggcaccggcatcgcccatgcagcggcgacaggcacagctcttgccggagagcctctccttgctgaggcgctgcagggcgggcatagcccgggcaccagcttcacccggtgcgtcccatccagggccccctgagtccaggtaggggagcgtggccatgctgtggtgcgagtaggtgaagagcagggacatgatgaacaccagcaggaaggccacggagaggaaccacacccgcagggagcacttcatggtgccggcaggggggtgacggtcaccgtggccactcttttcccagcccgctgaggggccagccacggcgtagcctgcctattctggcaccacatgcaaagggcataggggcacgtgctgcagcaggggacagtggcaggggtcccttgccacgccctccctcatgtagggagaacacacgttggcaggagtggctgtcctgtccctgagtcaggcggggcccctgcttagggcttcatcgggtctctccgtcactagctaggccacagaggctctgcctctcctgccaccctggtgagggggaggtcagtccattgcagccctctagtcccttgggattgctggctgccagctctaggggtccccctctttggcggcttgaaataatccagtctggagcagtcgccgccgccgcctcagcccggcccctccccccacccctgcccggcttgaagggaagggtgggggacaggggcgactgcccccaccccattcacatcctcccctcgtgccggattcgccacccaggcctcgccc

SEQ ID NO: 451769 - DNA, 1107 bp, Homo Sapiens
  misc_feature (755)..(812): n is a, c, g, or t
  misc_feature (1013)..(1024): n is a, c, g, or t
tgctgttactggcctggaattttgggatgcccagccaggctttctgtcgcgcggggtctcccgagatggcggctatggggcgctgggagggtgcaagctcctgcgccgtgctccctgtgtgatgcccggttgtcgtgagatggggctgccctgggaggggcgggtctactggcacgtggagggtgccggcccgttgttcgcggttccccgtgtcccagtgcaggatgtggtgctgcagacgccgtgatctccgtaggggttggggctgggggctgcggagctgtctacatcggactcctccgtggtcagcccgttaggagccgcctcccctctgcccctccgaagagacgagcgtgccatgacaggcctggggaaggcccctctgccccgtcaggggttgaaaagcaaagctggaaggattcggagagggttggggccgtcttcctcatccttccttttctcggggctcccgtggcgacgtcatggcaaattcccaaactggacggatctggctcgggttaccggtccagcaggggcgagccgggcccaggccggccccgggggtctcggtgccgcctggcatgggctggccaccctctggggcgggccccttgccctcccctgcccttgcccgctccctgtttttctcctgcggccccccgtgcgccgccctttcgccagatttttctcctccctcattacaaggcgccccccccattggcacgctccccttctcgggcttctgcccgccgctnnnnnnnnnnnnnnnnnnnnnnnnnnnnnnnnnnnnnnnnnnnnnnnnnnnnnnnnnncacgcgctcccggcccggatatccgcttttctttttagcgccccgccctgccgctattgttagccgctcccctatcgtgtttgccccccccgttgatctttatgcttcccccggggtgggcgctcatatttagacgccgccaccctgactatatcccccccgctcttctcgtctcctatgtcccgccccttccccgtatannnnnnnnnnnngcctgcgaatatccctcgcccccgcctggtgatcctggagagccgtcccccgcggtcgccgcttaactccaccccgcgttctt

SEQ ID NO: 451770 - DNA, 1196 bp, Homo Sapiens
  misc_feature (202)..(202): n is a, c, g, or t
  misc_feature (874)..(910): n is a, c, g, or t
gtcccgtagaaaacccctggccccttttgatttccccaaagcgctttttgagaatctccaggcttttcttcctaagcccctctccctttggagaggtggaccaagaccttctggaattcacatgcctctctcgggagggctttcctgaattagccagggccaaggaaaaggaaaggcttctttttaaggaatgtttacctcngcctcctcaattttgggagaggtgcccacggcaaaagaagtaatccttgaaaaatgttggaggttttttgggggataaaggggggaccccggggcagaccagagtgtttgcagatccataaaacttcatcttggtgctaaagttgttattgaattatgcatttctgaatgacttcacctggttgcaacatgatgttgttaagtagactgaggctgagctcttaaatttatttgctggtaggagttttggcaggagtacacactgacatgactgtagactgtcttgatcctgacacaggaaggggaatgcgtttgatgggatctttctgtctcttgggtaagggctgctcctgggagtggtaacacctgggcttgcgggtaggtgggaagtgcaatgcctgtagccacagagcaggcggtattgacacagctgctttctaggtaaccttggtgtcctcatctgtaataagggtgtagtactgtctgctttgtgttgtcaagtggaggtctttgagggggtcccagaggtagccaggatgtctccttgttagtgaactattggtgaggaacttgctgggaaaatggatgtaatcgtggttcttgactcctgctacctatttcaaatgcttatatttataataagcaactgatgcaggtttactaggcatttgtnnnnnnnnnnnnnnnnnnnnnnnnnnnnnnnnnnnnngtacctatattctcatacccctaagaaaaacgtcagcgttttcatgtatttaaatctagatgttttaagcttaggtagatgagatttgtttgttgaatttagttcagcaaagtgaaggagagactttttcataggaatttatgatgtcccttttcaggatgatggccgaagctaaagttatccgttcataatgaaattgcttgtttttaagcattccctaaatgctgtgtggatgaaatggcatgccattctgccatcccgggaattccggaccggtaccttcctt

SEQ ID NO: 451771 - DNA, 1158 bp, Homo Sapiens
  misc_feature (944)..(944): n is a, c, g, or t
  misc_feature (1044)..(1044): n is a, c, g, or t
  misc_feature (1083)..(1083): n is a, c, g, or t
agcggcttggcaaccgggaggcttacctttggaagcttgtgcagctctagccaaggtcctgccctcttcccgccccgcccctagggtccagctcccttcacctaggagctgccaaacatctggatcaacctgggcactacgaggggttgaatttctaccattatcgcgccttttgatatttttttccagacctcctgctcacatccgtaaagcccactgattcttttactacactttttatgagaacaagacattttctaggaagatggtggcagaaaaagagaccctgagcttaaacaaatgcccagacaagatgccgaagaggaccaagctgctggcacaacagccgctcccggtgcaccagcctcactctctggtttctgagggtttcacagtcaaagccatgatgaaaaactcagtcgtgagaggccctccagctgcaggggcatttaaagaaagaccaaccaagcccacagcatttcgaaaattctatgagcgaggtgacttcccaattgcccttgagcatgattcgaaaggaaacaaaatcgcctggaaggtagaaattgagaagctggattaccatcattatctgcctctgttttttgatgggctttgtgaaatgacatttccctatgagttttttgctcggcaaggaatccacgacatgctggaacacggtgggaacaagatcctacctgtccttccacagctcattatcccgataaaaaatgccttgaacctccgaaaccgacaggtcatctgtgtcactctcaaggtcctccagcatctggttgtgtcagctgagatggtgggcaaggcctgggtgccttattaccgtcaaatcctccctgtccctgacatctttaagaatatgaatgtgaactccggagacggcattgactacagccagcagaagagggagaacattggggacttgatccagnagacactggagggcttcgagcgctacggagggagaaatgcctttatacacttaaagtacgtggttcccaacctacgagtctttgcttgctaaactaacantggcaacagctggggacttgaaaccctccgcgttggggntgggaaccatctggcccccgttggcttttagcaacccatttccttgtggactttccacagcttttctttttctaa

SEQ ID NO: 451772 - DNA, 1469 bp, Homo Sapiens
  misc_feature (1316)..(1349): n is a, c, g, or t
ggcctgtactcacttctgacttagtcctgcgccactgtcctcagctctgtgtcccagccacactggcccccttgtacttccgtgccccccagtaggtttgctccagcctcagggcctcggcactagctgtcccctctgcctggaacgctctgctctgtacgcccacctagttaaatcctgatcattctacagggtacttcctctgggaagccttcctgggtgtctccaggccaggccggggtcctcccgcagtgtagagtgtctgtgcccaacacgagcttttgctggcactcactgctgtctgctgcttttgtcttccccgttgggttaagcagtgtgtgtgtgagcggcacccagtgtatcccatccctgttgtgtcccagtacttagtgtggggctgtgcatacagtaggcaccaactaagtgcatttagaacaatgatgaaaacaaaagcacaggtgggtggcgggcaggctgggtggagggaagatgggcctccagccatgtagggggagggggtggctggctggactcggcgtctgtccccaggatgaagacaagcctgaggacgagatggcccaaaagcgggccagcctgctggagcggcagcagcggcgagcagaggaggcgcggcggcgcaagcagctggcaggaggtggagaaggaacagcggagggaggaggccgcgaggctggcccaagagggaggccccgggcccagccccgcttgtgtccgcagtcccgatggcgactccagcccctgctgcccgggctccagccgaggaggacggtgggcccccggaagggggacttcacgcggcaggagtacgagcgccgggcccagctgaagctgatggacgaccttgataaggtgctgcggccccgggctgcggggtccgggggtccaggtcggggcgggcggagggccacccgggctcgctcgggttgctgtgacgactccccccctggcacgaagcccagcccgcagcctgctgggctctcggctggagcaaaatctattccccagtcccccctgacacgggtcccctggggcccaccgaggcccaacaataaccctcggggagcaggcacgccccgcgctctggccgttccctaccccgtaaagccttcgtgtgcgccggccccgctttccctgggcaagtcacgcttgccggaggggccatgacggctctccctcggagaggcgacacgaccactcgcgtggccttagctcgccctggctgcatggcggccgtaacccagctccctagctgcccaaccgcctcacctctttgcgcgcgctcgcgagtcctccgnnnnnnnnnnnnnnnnnnnnnnnnnnnnnnnnnngttgacacacccgctgttcgaccagccgcgacggaatagtgggttgcaaccttgggaaagccgccgtgacttgccccctcacactcctgcttgcgctcccgtctccagctcgcaacggct

SEQ ID NO: 451773 - DNA, 1169 bp, Homo Sapiens
tcccccccggtaaaaatttatgggggccaataaccggggcccggggcccctttgagatactggggcgggggtacgcgcccctgggcggggtgtcaaacaagggggcggctataaatggggcccttcgtttgtcccagcctgtggtttggccttactggggggccaccacagttcttttcgttaagacaggttggctttctcgtttggccaacccgtcatgcagttccggtaggagtcaattgaattttagtgttttcactgtctgaagactggggggttttgtccctccgggatgccatcaaggcatttgggtattgctgtctggagatctaaccaaactgcagatccgaaagggctcgcaccgagtaatcggggatgtagacttggaggaagcgaagaattgagctggttattgctgctccccagtgttgggtgtgacggcgtcaatccggtcgcttcgactgagagagtctgagtgattcaagccacatgggcgaggagggggacttattttcacctggagaggctgtcagggccatcacgccatagtatgagaaggcgctcgcttcaaacttcataccttctttcccagcttcaacttccactttcccctgcagaatgagaacgaagtagtctactggcttgttgcgctggtagaggtagtattcgggggctttcttgttcttctcatcatatttcagttcctggatgacattggggtgctttagcagccttagaaggatcttctctgacatctgggatgggctaaatgcttctacttctgttgctaggaaacggtgcatggccaggaggagctgtggtgatattttaaccttcatctcactgtctgtctgcttaaaggcagaaaaatcttgctttcgttcccggtgagccactttctttttcgttctgttgtcagtgtataaatctgtttcatcaagaatctcagatttgatgatttcttcaatcacatcttctaaggtgacgattcccagaacttcataaaatggatccccttctccctcattgtttacccgctgcacgatagccaggtgagatttacctctagaagtagttgctcccgcttactggatgaggcagtggggagggcggcccatgaaggaagcttgtacagacactgcctttgtcatatctccatccggaaattc

SEQ ID NO: 451774 - DNA, 730 bp, Homo Sapiens
tgtctcagtttcgggacgacattggggtgctttaagcagccttaagaaggatcttctctgaacatctgggatgggctaaatgcttcctacttctgttgcctaggaaacggtgcatggcccaggaggagctgtggtgatattttaaccttcatctcactgtctgtctgcttaaaggcagaaaaatcttgctttcgttcccggtgagccactttctttttcgttctgttgtcagtgtataaatctgtttcatcaagaatctcagatttgatgatttcttcaatcacatcttctaaggtgacgattcccagaacttcataaaatggatccccttctccctcattgtttacccgctgcacgatagccaggtgagatttacctttcttaaattcttccagcatagcgtccaacttggtgtcattgaaaacaaagtgcaaggggtggttataaaatttggtgatggttttcaggggggtacagtcatcgggatccacgaaggcccagtctttgacaaacagcaggtccacgatattggagcgctccccttcaaacactggaatgcgggtgtagccgctctccatgatctcagacatggtgttgaagtccgggatggcttcgccggtgatcatgaagcagtcccggagtggggtcatcacgtcctccaccgtcttggtgcggagctccagcgccccttggatgatgttcgctcctccttcacgatgtctaatcggga

SEQ ID NO: 451775 - DNA, 1500 bp, Homo Sapiens
  misc_feature (1359)..(1359): n is a, c, g, or t
  misc_feature (1389)..(1389): n is a, c, g, or t
ccgcacgcccggttgtagcgttgttgtccgaggtcctgtcttcccccctagttaatacgggggacggacccgagcgtgcttttccgtccccccgcgggcgaggacccgccgggccccactgtgtgtgccacggaggcccggctgggcgcttgtgtcttggccccaggcacggcagcatcatggtcctgagtggagcccggttatgtccttggggcggggtggtgctctcctccgccccgcgtataattctcgtttcggccggttcgttttccctctgtcgggcggccatcttacttacgtttcgcggcgtggatcctttttcttcggggtgtgggtccacctcttgccagaggcggcgtcggggcggggattctggtgttgtgcgcggagctactcggtggcgtctgttctgcaaactgttcctgtggacccctcgacatgggaacgtttcccccggggcctttttgctcttaacccatacgagctcggtgcctcttcttaccctgcgggcgcccgaggccactgtgccttcgagacacacttcgttttgctacagctgtttatccacaatattaccacccgccttctagctctgaggcgcgcgccgccccgaaaattttgtgcgctcccttctcacgccacctcccgcgtaacgaatgccccgataaggacatgtttttgctgggccgcttcggaggaacggtggcagggggcccttttcgcttgggtttgggcattcaacttctccccccttccccagaagtacctgctgctgctccggcccgccaagaagcttttttccccagggaagcgtccctttttggccagccttgcagctcgatccttcgtcggttaatgaaggtctcctttcttgccgtgaccatgtggcgcatcgaatttctatggtagattcagtctgctgaagtgccagaggtttttcggcagagctagagggagtggtcgtgaaatattagggagtagccctccgattcactcctcgagcattgtctttattacgcacctgccccgttatttgtctttctgaagtattggctctgtatgaatcctctggttgtggacatatcacagcagatgatgagctgcagcttcttttagaaaggtgtccccttgacagttcagaagtagtattagactgcactttgggtgccttagaattagattttctactctcaggagggctatatcctttatgttttgcctgccctaaatgtgaccttcctcctattgagtcgtcttgtggttgggccccggcagtgttcctctgtgaacgtcgcagtgacccccctggattgttattagcccggttggacattggctcctctctcttgcggggtcgtnccctttctcgtctctggcataaaatagttnggccccgggttctccggtccggtctcggtggcgcggcttgtttgtaaatgctccccccgccccggtcgaaattccggcccgggcccccctttgtgcctttttttctcccaa

SEQ ID NO: 451776 - DNA, 1476 bp, Homo Sapiens
  misc_feature (214)..(248): n is a, c, g, or t
  misc_feature (1448)..(1448): n is a, c, g, or t
tcgggtagaggcaggcccacagcatgtcctccaaggtttactccacaggctccagagctaaggaccaccagccctcgggtccggagtgtctgccactcccagaggccaatgctgaagccatcgacttcctcagctccctccgtgagctcagacagtgtcggggttgggggtgcgggaggggtgcaagtctggagaggagggaagaaagtccagnnnnnnnnnnnnnnnnnnnnnnnnnnnnnnnnnnntccttgattctcctgggactcagaaaaggcctgaggcctgtgtgtagacattcttcaagggaaggccccccggggacatggggacatggggcaggagtcttcacctgtctgtgccagtgaggaaggctgtgggatgaggaggcaggtggggactgtggggacactggtggtcatggggtcagaggattggattggggcccaggagcaggggctttatctgttcccacgggcccctcaccccagacaaggaggagctacagatgctgttcttctctgagacgctggccatggtctcagacaccggggagcctcagggagagctgaccattgaggtgcagagagggaaataccaggaaaaactcggcatgctgacatagtgcctcttcgtgcatgcctctagccgaggcttcttggacaaaatgctctgcggaaattccctcctgggctatctctcagagaagctggagctcatggaacagcacagccaagacttcatcaagttcctcatcctccccatggaacggaagatgagtttgctgaagcaggatgatcagctggctgtgaccagaagtatcaaggagggtgaggaagtgaagactggagtgacttctttcccctggagctcaatcaagggcttcatctcagaggctgccaacctggtgctgctcagggtgatggcctggcggcggatggtgcccagcaatgcccgcttcctgaccttggacaccgagggcaaactctgctatttgacctatcaaaacctggggcttccagaccatccaagtagaccatcagcaggctgaagtcttcatcgtggagcagactgtccacgcgggaggagggcatccccatgtcctgccagtactacctgctctccgatgggcacctggccaagagaatacaggtgggcctccccagggttgctgcatcatcaccaagatggcctatctttgaggaaaaggatgaaattgaaccacgcccaggggtttgaaaaaaagcccctgggatggggaaggagaatatggagcccccttttccagattccgtgaaaccgcaagggaagaaattccgggtgggggccgacccggatatatctgcggtcgaaccacccccaaggctcgccggggccacgttcgccgaaggttccggggttctcaccctgccgaccgtgtggccgcaccgccagagagcgccgcggtntaccacagcgtgcgcccggcgctagtac

SEQ ID NO: 451777 - DNA, 1221 bp, Homo Sapiens
  misc_feature (110)..(118): n is a, c, g, or t
  misc_feature (246)..(254): n is a, c, g, or t
  misc_feature (295)..(296): n is a, c, g, or t
  misc_feature (299)..(304): n is a, c, g, or t
  misc_feature (306)..(317): n is a, c, g, or t
  misc_feature (319)..(355): n is a, c, g, or t
  misc_feature (360)..(360): n is a, c, g, or t
  misc_feature (364)..(364): n is a, c, g, or t
aaacccgtgtgataacgtctcttttatttacccctaaaagacctttaaaaaattttccatggaagcgttgtacaaaattagttgcctcccctcccgcccaaaaagagttnnnnnnnnnaaaagattccccgggttccgcggttttttcccaaaaagggcgcctttttattacgagtgccccgggtcttaaaaattaaaaggcccaccccccaaagagggaaccctgttttccataaaaagcccggnnnnnnnnnaaagtaaggtcccctaccacggaatcctttttacccttccnnccnnnnnntnnnnnnnnnnnncnnnnnnnnnnnnnnnnnnnnnnnnnnnnnnnnnnnnnttttntctngttactaaatttctttattgctcactgggcgtgattccaacatgagaatggcagtttttggaagccccacttaaagttcacctccttgggagactctgcgcttctagccttctgcatactttgcggaggacagtggctctagatacatcttccccacctgcatggtatacttggcctctgagcacagccacatgtcagcggagttttggggtcctctctcaggggccttccaagggcagggcagcttccatctggaatagaaaaatcgggatattttggcagcagctcttcatgctgcaaaacttttggagacggagcagaagtttttgtggagctaactccatatatttcttcatatggtttcagatgtgccttcttggccctctccgtgatctccaggaagtccttgtagcagtttttggccatgacagtgtatctcgtgccacagccaaattcagtgaccttggctctcggcaggtagcctgcccagccagggatcgggggctcctggagaggtttctttacatatttgcattccaggatcagggggtggtactgcagattgtactggtgcagggcctgcaggaccgtctcctcggagttgacaggtttcagtttcggggcagtggccactgcgcagcacaattcccgcagctgttctttatagcgctgtgttttctcctggaaggttttcacacagtggttcatgtcatcctccttggacattccttggcagctgaggaatggcacaaagccgctatagcctggtgtgattggcaggtttctcatgaaggtcttggaaggctccatgatttcgctctctgggcggggctggcgctatccggatcccgagaatt

SEQ ID NO: 451778 - DNA, 1128 bp, Homo Sapiens
  misc_feature (49)..(49): n is a, c, g, or t
  misc_feature (51)..(51): n is a, c, g, or t
  misc_feature (68)..(68): n is a, c, g, or t
  misc_feature (80)..(80): n is a, c, g, or t
  misc_feature (131)..(131): n is a, c, g, or t
tacaaggaggacgcaccgcgcacccgacggcaatatatacttactcgcncnggggggtgggtttattnttgtgtttttgnaaccccgggagcaaattctttatatattcccaggtggccccaacccatttnttggattaaaaggacatttccctaatttaggatacatcaccagaattcaagtcagagagtatccctgtgccagtcaataagagtgcgggtcactggaagattccttcgtagaatttttctcagggcttcattggataactcttgtattctttccaagactgcagctggaaatttgttctcttgctcttccacaagcccttgcaaaacttagagccagttgagcttggttaactatttccaagctttctttcaggtcccttggatatttcaatatgaaggttgacacacctgaagaagtgagcttgcacaaatattcttcccgtttacttgggttagaaatgggttaacttggaaaatccatttagatttccaaagtccgttccagcactctcctgtttcatagttgtgatcttcaatgcaagctatcaagtactccttacttttgacagtttttctcagcatgttgcaatttccttttggatagtggtcattcacatacagttttaaggcgcacagaagaacaactctcaggtattctgcctcattctgaatgataccatgactttggatgtctttcagctgattttgaagcaggtcatatttgaaagaaagtttgctttgatggtcaaaaaatcggtagtcgcccattacattgtggtgagacaagagtactggatttccatcgatgcagagtggtacagaatatttttggcagtgttggtggcctgcacactcaccttggtggtgcataagtttttcatcacggataagcagacagagatcatcaaaggcatttacaaattcccctggaggggcctgtaataacagtctgcgaattactctttccttgtccttcctgctcagcacgctaagtgtcatgtttggttgcaacagaagcaaagcttctgaaatgaggagtgttcaaaggataagaaaacattccatgagccacctttcccatcaaggtgtacattcaaatcccggaaattccggaccc

SEQ ID NO: 451779 - DNA, 1109 bp, Homo Sapiens
  misc_feature (87)..(87): n is a, c, g, or t
gggaaatcctggggtgttccgttcttttcaagggcgcagaagagggaaagccagggtttctttggccttccaaatacttttaatttnggaatcctcaaggaattggggggttgactttatatgagagccaagagagccgcataccttgtttgggcggatcctaataaggtgcattccgagggccaaaattctctccgggttgttaccattcaaaaactgtgtagattttttctgtggccacatgctattgggaaagtgctatgacaatggcagggacatagaagtcaaatccttttgggtatcacatttttggcaaacacataatctccaactggagcagcgggcagggcatggcgccccccacaggcgtgatgaaggaggtggacacgaccttggtgtctccgtaactgaagcccaccagtgcttgggttgcggctcacacacttcttcacaaccccttggaaaataaaagccattttcatcacatcttgcaataactttctgtcctttgaggggatctggtctttttgatttggttttctttgttggatttccttgcaatttctgttgctctcccggggccttgtttgcataattcttcttggcagcctcctggagttccatggcctgctggatgtacattttcccagctaggatttcactttccagcatcgacagctctttcagtgaaatgggccaattcaaccgttctaaagcctggtttaaaactgttttgttttccaagtactgtattggtttgtttgcatctaacttttctttttcctcttgagataatgctcgccaaacaattttattcaagcgcttttcataggattgaattgcctgttccacttttcgcttgtagatattgagtttggctccttgggggttaattaatgtcatcttatttgtgtcgttgcacacatgtgccagagggaacacctcttttgtggatttcaacctcatgcctttcgtggccattgtgtgcttcagtgtgatagtagctcagatttggcttgtgtgcacccactctccgtcctctccacatgcagatccagggaaagataaagtcataccccacacttcgagatcccgggaattccggaccg

SEQ ID NO: 451780 - DNA, 1173 bp, Homo Sapiens
  misc_feature (89)..(89): n is a, c, g, or t
  misc_feature (281)..(281): n is a, c, g, or t
  misc_feature (291)..(291): n is a, c, g, or t
gctctaggggaaataaggatcttttgcccctttcccagggccccggtttcagttctttttcccaaaaaaggttcccctatttattttcncgccactcccggatttcctggagttttatcgcatgttccaattctcccaccaccttttctttgcggccctcttcaccaaagccttctcaaattccaggctttcagatccctgctcccttctgcaaaaactccctccttctcgttctcaatcctcctctgggtttcttcccggctttatggtcaccatcctgnaatagccctntaatatctcctgggtgattctcattttcctcttctctcctttgctgaagctgctttaattgcactgggagctgattctccacttgcctctgtttgtccaggacctcctggtaacgctctttcaacagggttctctctgtcatcattttatccaaattcttttcaatatcttgatctgtgtttacctctgaatcagctgtcttaaagtcagtctgtacagcaatgttctgagaaagcttcagggaagagctatcttgatcatcatcctgatccactcggacttccttcaaccccatttgctggagacactacaggtcggaaatccaagcttgtgtccctgttaccttcctttaggatggaggtttgtggggatttctcttcagagcaattcctggaggcaagctgcttagtatggcaccctgccttaagagaccgagtgactggatggaggctctcccgaaggcttgtgtccccctcctctcctgctgtgctggccacatccttcaaatcagactgagacccactgccagaaagacaaagggctgtggctatcaagttttctcctaaaaccacctggtgcgctgctgaggtgtcacctgctgatgaaccaggattctgctctgagtgctccaaatggacatttctgttattctccttggttattgtttggctacttacactcaacagaggcgagttcttctgcttctgtgcagagtctttggtgcttagaccatctgggagaccttcgtctgatttggaagcacataaactagaagattccggaggactgggggcattggccacaacaccagcaacctcagacgctgcctcgtgccgaattccaccacccggcctcgctacctagcctatgttgttctccccc

SEQ ID NO: 451781 - DNA, 1144 bp, Homo Sapiens
  misc_feature (859)..(950): n is a, c, g, or t
  misc_feature (1003)..(1012): n is a, c, g, or t
ggaattttcgggatactctacttacttcaagggattcgaaactatcacagtggaaatgatgtagaggcttatgagtatcttaacaaggcacgtcagctctttaaagagctatatattgatccatcaaaagtggacaatttgttgcagttggggtttactgcccaggaagcccggcttggcctgagggcgtgtgatgggaacgtggatcatgcggccactcatattaccaaccgcagagaggaactggcccaaataaggaaggaggaaaaagagaagaaaagacgccgcctcgagaacatcaggtttctgaaagggatgggctactccacgcacgcggcccagcagattctgctcagcaatcctcagatgtggtggttaaatgattccaatcctgaaaccgacaaccgtcaagaaagtccttcccaggaaaacattgaccgattggtgtacatgggttttgatgcactcgtggccgaagctgcgctgagagtgttcagaggcaacgtccagctggccgcccagacccttgctcacaacggatgaagcctgcctcccgagctgccgctgtcgccagaagactctttgtccccgccagccacgtccccttctgactccgcaggaacctctagtgcctcaacagacgaagacatggagactgaggccgtcaatgagatactggaagacattccagagcatgaggaagactatcttgactcaactctggaagatgaagaaattattattgcagagtacctatcctatgtaggaaataggaagtcagcgacaaaggaaaactaaataatgaacagaaatagcgctaattttctgcttataaatgctatcattatgaaaaggctannnnnnnnnnnnnnnnnnnnnnnnnnnnnnnnnnnnnnnnnnnnnnnnnnnnnnnnnnnnnnnnnnnnnnnnnnnnnnnnnnnnnnnnnnnnggaggggccccttaaaaattcccccttggggcccccattttacgccaaccccnnnnnnnnnnataagagggggcccctaaaaggggggcgcttatataagacgggggccctggcccgccttttttacaccccccggggttggggagaaacacggcccctctggggaatttctttgggaagaacccttttctttt

SEQ ID NO: 451782 - DNA, 1611 bp, Homo Sapiens
  misc_feature (513)..(513): n is a, c, g, or t
cagtgggcttcctggggagcccatcataagcagggactgctcaggaagcgcagggagggccgaggtgggcttgcagccacccgccagggccagacgtctgcaggggctgccctgaaagccggcggtgctggctcagatgagcatcttcctcgggtttatttttttaaataaatcctctctcaccgccttttgctcccccgaccctcccagatccccgccatcggggagggcggctagggccaagcctgcagctgccgctggtcgtactcggcgatgagcctcttgatgtgggccagcttgctgtgcaggtactcgcagcggtgcttctcctggctgtagttggtgttggtctttttgatttttcgatattcctgcaaaatctgccctcgagtagtctcatactcctcggagccctgggagagctgccgagctggggcgtcgagctgggtgaaccgccgcgtgatgcgctcaatgcgggcgtgcaggtcgcggtactcgctgtactcggcatgnaagtcgttcttgtagctctggcgctgctccgaagaggagatggctgcgtacttcagcaagtagtcaggcgtctccgacgtggacgtgggaacactggaaacgctgcaggttccgtttaaacctggggtgtctgctggggctccgggggtggcatgggtggcaggtgcacagtctggaagctgggcccggggcttgtcctcagccgccctctccttgtctttgtgcttcttggacttcttcttgggcttgctgcgcgaggggctgccgtgtggcctgctgggctgggcacagtccgtcagcaggggcaggccgaggcgcacagtgggggctggggcagccgcctctccgtgctcacagtctcggccgctgtggcccaggtcattgctgacatcggccagggggtcgtgggccctcgggggctccagccgcgggggcaggtgagtgctggagctgagggtgtccgtgctggctggtgggcccggggtgggcagcaaggcctcacggccattgggcacgcccagcttcccgttgacggcaggctgagctctctgagtgaagtgcgatatccggggtttcttgttggctagggggtcgatgaaatcaggaggctgcagccgcttctgtgggggcgaggccgagcgcccacgctcgccttgtgggtactggatgcagcagggtctccaaggaggctgccagtgctctgtggctggcacagcttccggacgagcacccgcttcagcagctgctggtccccctccgagtagccaggccagtccttctgcacatccttgtacatgcagtcctgcagtgtacatcgtgccgtccttagcactcatgttggccacactgctggaggaggccatccagcgcagtccttgtccgcctgcagtcaggccgtccttctgcagtcgctatgcagcagctcagccttgcggtagggccgtagtgccaggaggtgcagcactgcggtcacggaagggcctctggacaccccgctgccaccacctcacaggcactggcaccactccttcctgatgcactcgccaagctgatgggggttgccctgcttccgggagggcaccgcgtctgatgcccgta

SEQ ID NO: 451783 - DNA, 1163 bp, Homo Sapiens
  misc_feature (105)..(105): n is a, c, g, or t
gtcgtgaggatattttcccccttggccccccacttaaaaaccccccgggcccgggtggtttcgggaggggggaaccctctggaaggatgtttttctggccggaanctgaaatggcccccccaggaaccccttcctccctgggggggagccctccctgcccatagatgacgaagtccttggggggcgggttccagggctgcctgacaatgagatggtccttggggatgtgctgcagcgtgaggttggaacagggtaaaccttctgagcgcaattggatgttcacctgggcgcggtcaccctcaaaaggccccagcaattgccaggtgtcacgttgggctcaaggatcacgtctgggggctgtgcgtagttccacagctggatccagttccagtaggagtgggccttctcatggttataggtgactgacgtgtgctcaaagtcaatgctggcccctatagacttcagggcaaagtctggcttttcgatgtaatctccgtgtatcatcttcattattttctgggccattttttgctcatcggacatggcttccatctcctggagcttggcaatgagctggttcatgctacctcggaggtcctggatttccccactgtgatgtcgcaccttctcctggtacaacctcaagctctgcagtggaccatttatgctgtcatcctgccagactttcattttcgatggtaagtgaatagaaaacatccagaatccgaaagcacagaggagcagaatgcctgtcttctccatgagcttctggcacagcagcttgcatctgcacgtgttaaacagaacctgctgggcctgagttctcagggagcaggcaaaacaggtgaaccaggacacacatcccagcatgcactgagtcaggcctagggcttggtcattgttgcggacaggcaacaggatgttgtcattcatgtttggggaggtgtcctctgccatcctgctggtgttccggcctcgctgggcaatcctccggggtctgggattgtgggccacatcttcgagtagggcgcctgggtccccagggctccttgaggaccgtggcatcgatttccttctttaggattggggatggagatgggaactctgggagctggtgaggaggaaggggctgatgcctctgaaatcccgggaattccggaccg

SEQ ID NO: 451784 - DNA, 759 bp, Homo Sapiens
  misc_feature (63)..(63): n is a, c, g, or t
  misc_feature (159)..(163): n is a, c, g, or t
  misc_feature (165)..(185): n is a, c, g, or t
gaaccccaagggattcctcccttagggggaaaaaccagggttaatggaccccattgttcccanctttacccttaactgggggcccccgcgcgcccaaaacgaaatgggttctaagaaaagctttctcggaggggcccgagggcggcccggacatgtttnnnnntnnnnnnnnnnnnnnnnnnnnngggggaccagatgaaattccaggcttttatcagaagcaaaagtttatccctatccaaaaatgaaattatacaaattcatacatatggtaaagattctagctgcctcttaaacgagacaaattttcagcagaagggcccaaaacaaaatggtcctagtcctctgaagtaaaaatatttatgggaaaaatcagtttttgtaagaaagaaaaattaagaatagtctctctcccaggccatagagcttcctttgtccaatcaggttggagcatgccaggggagatcagcttgctcagaagtcactatctaacgaagaaaaacataaatcctttcagagaaaggacactcagaaagaacaggtgaggagtgtgtaacatcaaaccaaaccaacctcatctcaaccccactcagggcctctctgatgcaatcccaaagttagcagtggcaatgcaactttcagaccaggagagctctgactgcctgttggatactcgagtcacagtccatggggtgttttgttattggccaatgtctgttaaccattaactctcttcatgattgcaccagttagaccacc

SEQ ID NO: 451785 - DNA, 876 bp, Homo Sapiens
aaaccgtccaaggccgaaagcctccagtttccccctggacgccttgctcctgcttctgctacgaccttctggggaaaacgaatttctcattttcttcttaaattgccattttcgctttaggagatgaatgttttcctttggctgttttggcaatgactctgaattaaagcgatgctaacgcctcttttccccctaattgttaaaagctatggactgcaggaagatggcccgcttctcttacagtgtgatttggatcatggccatttctaaagcctttgaactgggattagttgccgggctgggccatcaggaatttgctcgtccatctcggggatacctggccttcagagatgacagcatttggccccaggaggagcctgcaattcggcctcggtcttcccagcgtgtgccgcccatggggatacagcacagtaaggagctaaacagaacctgctgcctgaatgggggaacctgcatgctggggtccttttgtgcctgccctccctccttctacggacggaactgtgagcacgatgtgcgcaaagagaactgtgggtctgtgccccatgacacctggctgcccaagaagtgttccctgtgtaaatgctggcacggtcagctccgctgctttcctcaggcatttctacccggctgtgatggccttgtgatggatgagcacctcgtggcttccaggactccagaactaccaccgtctgcacgtaactaccacttttatgctagtttggcattctgtcctttctatacaaagctactattaatcgacattgaccctatttccagaaatacaatttagatttcatgcaaatttcattgaccagtaaggctggtgcttcaatgtcctaacggaagaatggt

SEQ ID NO: 451786 - DNA, 1058 bp, Homo Sapiens
  misc_feature (917)..(917): n is a, c, g, or t
  misc_feature (935)..(935): n is a, c, g, or t
  misc_feature (938)..(938): n is a, c, g, or t
agcgggggaagtacctgccgccatcttgctcaccagcctccaaaatgcggctggggctcctgagcgtggcgctgttgtttgtggggagctctcacttatactcagaccactactcgccctctggaaggcacaggctcggcccctcgccggaaccggcggctagttcccagcaggctgaggccgtccgcaagaggctccggcggcggagggagggaggggcgcatgcaaaggattgtggaacagcaccgcttaaggatgtgttgcaagggtctcggattatagggggcaccgaagcacaagctggcgcatggccgtgggtggtgagcctgcagattaaatatggccgtgttcttgttcatgtatgtgggggaaccctagtgagagagaggtgggtcctcacagctgcccactgcactaaagacgctagcgatcctttaatgtggacagctgtgattggaactaaataatatacatggacgctatcctcataccaagaagatcaacaattaaagcaatcattattcatccaaacttcattttggaatcttatgtaaatgatattgcactttttcacttaaaaaaagcagtgaggtataatgactatattcagcctatttgcctaccttttgatgttttccaaatcctggacggaaacacaaagtgttttataagtggctggggaagaacaaaagacgaagggtaacgctatcaatattttacaagatgcagaagtgcattatatttctcgagaagatgtgtaattctgagaggagttatggggggaataattcttaacacttcattttgtgccaggtgatgaagatggagcttttgatacttgcaggggtgacagtggggggacattaatgtgctacttaccagaatataaaagattttttgtaatggggattaccagntacggacatggctgtggnccnaagaggttttcctggtgtctatattgggccatccttcctaccaaagtggctgaccgagcatttccttccatgcagcactcaaggcatacttactataaatatttaacgggggcagaatcc

SEQ ID NO: 451787 - DNA, 1329 bp, Homo Sapiens
  misc_feature (25)..(25): n is a, c, g, or t
  misc_feature (63)..(63): n is a, c, g, or t
  misc_feature (66)..(66): n is a, c, g, or t
  misc_feature (69)..(69): n is a, c, g, or t
  misc_feature (72)..(72): n is a, c, g, or t
  misc_feature (83)..(83): n is a, c, g, or t
  misc_feature (149)..(149): n is a, c, g, or t
  misc_feature (226)..(226): n is a, c, g, or t
ttagccattccttttaaaatgtttnccaacagatttccccaaaaaaactaaattcagagcttnctnttngtnccatccctttnccatgtacccattcccaaagtgctctcggggtagaaacgtattggccaaagatatcttcaaactgnaagaatctttctggctttgaggcccttcccctcatcccaggggccccatcctcttgctggtcataggcagggcctcncaggattcggattctcttctcacactgcttctttgccacagtcagttggttgatgtacctcttcatgttcctggccctcaggagatcagctttcattgccgcagtttctttacctttgtgcttcttcagttggggaaagctgctaattgtagtcgcctggattatttccactacaatttgatcctttagttgcttcaagaactccacatcagagttgctgttaatgagcttgatgaagtcctcgtaagagggggcataggtgtaggctctcttgtgatgctcattcatttgctctctgtacgccagctgggcaagcagcatttggttaatgtaatctggattactcagtaactccactacccggcttcaagacttttgttgtgagaatttctgcaagcattatacgtaagctgagagactgcacatcctttgaggggaggagacaaaacaccagaacccgagaacacgtttgtagaaatcttacttcatcatctgagttcctcaagcatgcgtgcaacacaaaaggtcttggctgttcttcatgtctggcattggcagctttcaggtcacagaaatgagtgagtaaagtcctcacaacatcattgcagacaactttaaccacatccacgtgactcagtctgtggtgcagctgtctggcaatttcccaaaagtcttccaagagcagatggtaaagttgtccctcatctctgctgaggtttccataccaggacagaatgtaatctctataactgtagtcgaacacttctttcagagctttatccatattatgagaaattactacccttctagactgagctgactcatgtgagtttccatacacaggactctcgtttaccactcggcaaaggtctttccattctgaaaccagcctctggtccacagaactaactagtggtatgaactgaaatttgctgatagaaaatatcacaaacacacagccgccgttcttttttattcttgttttggtagagaattacaagataatcaaggcagctttccctattaacgcacgagaacaacggggcctacccgcgccgctctaggcagccgggagcagatcccgggaattccggaccggtcca

SEQ ID NO: 451788 - DNA, 1078 bp, Homo Sapiens
  misc_feature (26)..(26): n is a, c, g, or t
ttgggccactttttcctttcccaaanccccagagtgggggtccccaaatgtgttttccccagctttagggattagcccccttggtattccactgttaagcccttcccattgggtgttttcccgggatgtaaaccagggtttttccccaggtgaaccaaaaagggtttccacttgcattcggatgggagggcacagctgaaggataaaaagagcgggcccggtggcaggcttcaggtggagctgtttttttacgctgttgtggatggttattttcacaaacatcaggggaagcaggctggttagttctaagatctctgcaggcggactttctcttttttgggtggcaggaccacacctggcattgtcacagacagcagctggtcgggccagcagcatgacatcaggtagtgtgaggcaggggctggtgcgaacgatgcccattgttaccattcgggcacggttgtgcacgtcaatcacttctcctcttttgctgatctggataaagtcgctctcaaacatgggtgcatacctgaatatagtatactcgcctttgtacagttgccgctgcagcttccccatggaggtgttaaacatgcccattgcggggctgctttgggccgtgtaatacggtagcatacagcagtcctccatgtcttcctttaaatcaagacagttcccagcagctgctccacaccttccttaacatgctttagcgggcatcctgtttccttggctactctggcaggtgggctagcagtcgtgttctgcaggctttcttttttgtccccaagtgactgagaacagggagggtggggtattgattaccaaccgctcaatgccagagacagtcagtcccctggatccagactgtgccctgcttagtgcatggagctgtcaggagcacaggtgttggggccctcgtggatgtccgggcacacaggtgtcagtgctcattcgggagggacctccatttgagcctgatattccacttcacaacagcctttgctctttgattccacaaccttaactggcaatcccactgctcttcttcccaaccctgaaccatcccgggaattcc

SEQ ID NO: 451789 - DNA, 1109 bp, Homo Sapiens
aagccattttcctgaaggctgccaaaaacagacgggagaaggtcaaccaggtaacgctgtgcaaatgctcgggcggcgatttttgggatgtctcgtggtgcttgtgcattatttccccctgcgtttcttacgccgtctttttcttctcggtgtccccttctggctcttcaagtcgttgaacttcagcacgttcactattccgtagttcttcatactcacgctgactggcccgcaggttagccagctcttcttcttccattacttccagaagagactgctcaattgtcttccccaccaaaacttctaacactggtttaacttcaagatcaaagtcaaagagctctccttctagtatttgggtggccacatctttgccagttttggcaggaataaagagtggtgttggtggtctgtccaaaaatgcatctgtttggcattccatatcaacttctattatgcgatcagcaatttcttcaaggtataattctgtttgcacatcgacatgctttctgccttccacaggttcaggtgtttgtggtctgagctgctcttgggcttgttttctggcaagagccctcttcctagcctcccgttgtctctggagctctagagaatcaggctgtccgagcagtggccctgtctggagtgcataagtgttacctcgaattacccttctgtcatacattatgtttccataatgcataggttcttcatctggctgcgtcaggctgtcccggtaacggctgcgctggcagggcagtgctcggggccggctggtgtaggtgtaggtgctcggggcccgagaggtgcgatcagtcagcgccgaggccatgtccgggggctgactgcctcgctttcggtggagcttggctttgaagcaggtgggcgctaaggtgttgtgggacccggagagatgtaagtagtgccaagggcaaggattccgcgacgcgaggagaggcgacaacaagggaggcgggcgggacgggaggttaccagcgcaggaggtgggagctatactgggctcgctcccagcaccacagagaccagctgcgggggccgcatcggttgcccagcaacccagggttctgtctgggggcgggaactccccc

SEQ ID NO: 451790 - DNA, 1085 bp, Homo Sapiens
  misc_feature (110)..(110): n is a, c, g, or t
  misc_feature (121)..(123): n is a, c, g, or t
gggttccgttatggggggaccactttgttaccaagaaaagtggggtaccgggttaaactgtgggcccctggagggatttctttagaaccggcccgccccatgatatacanaggtatgggtnnnaaagtttttaaaaaattatgtttaaatgaatttgaaatgggtaaaggaaaccaaaataaccatgtttaaaagtggttctggatatttcccttttccatcataattttggcacttcatggaaccactgatttcccaaagaccagaattggtataaaagtccagcaggttttttacataccttgtagacatcgtacatgagtactggcaaacatgaaaatgtagtgaactaaacattcccatgtatttgcacatgcatgcagtagtcaaacaattatagttatgtatttagcttgcagtgtttgtttcaagcactctcttcagtagatcttgtttcagatttaagtcttacaaattctttagccacatcatcactggtcctctgagagagtattctaaggatagtcaaaccagtttcatccatagagatatttttcagaagaggataccatgccccatagcttcccttttctgctatgttctgtagctgaatggctgtcattccggataattcgatcttttttggcaaagcagtaatcctttactgagagatgaagttcataagcccctggccgattttcctttccgagaatgaactgaaatgttttcattgtactttggtgaccatgtgttgctttttgtttttgtgccttgttttctcttcttgtctccaaggttgggtcccagtatacaaacttccacaaaggggcggaacattgctgtggtctgccagtttaggtcattaatagcaatcacttttacagtgactttatgatctcccgttcctggggtggcagtgatgtccacatgaacagatatctgacccacggcatctttggaggaacgacatcactgatgtggctcagtcattttgaccaggatattatccaccccgccaagcagctatcatgaacaaattgctgaatttgtgagcatgtgagtgagtcactgatcccgggaattcc

SEQ ID NO: 451791 - DNA, 1076 bp, Homo Sapiens
  misc_feature (181)..(181): n is a, c, g, or t
ttatactccccatatctgttttggagtcgttcttaggtccccacaaggtgggttcaccagcctttccttcccaaagccattgctgcaggagatacacttgtgtcccatccaccctggtcttccacagtaggtctgaaatgtgctgctttgcagggaaccatatgagttaccctgcagcccnccgacctgtcccatattctgagggttttatctttcagaggtctgtagtatgtatggttctctggggacccagcacaggtgagtgaccacgttcctggagacagatgctctttccacactctgtcctgtcaccacatcccacagaagcagggtgttgtcccgagagccagtgcacagctgtgatgagtctggactcacagccaatccggtgaccaccatggcatggccacacaattgctgccttggttgtgaggaaccgtgcaagtcccacatcatgaccatcctgtcacgagaggcactgaagaactggctggatttgggaatacaggctaccttggtgatctcatgttcatgtcctttgaaccttttcaccacatttccagttttccaattataggccacaactgtcttatctttccctccagagacacaaaggtctgagttcaaagcagccacgacagagacggtatccatgtgagctgggctatactcttgaaaagctttagtttgaattctctcttctataatttcatcaggcctgccgtatttataagtgctgtgtttgagtttgctttgctgtttccccatcacgacacaaaacctaaacgaaaccttctgtggaggagcttgtttcagttggcacctgagtagcagcatcccttgtggctgctggaagttgtgttccccccaaaccaataggatcttcttggttagctgccctattcaataatttgtaatgtgtatcctttggaaaatagttcaggcagccacttcttaatctctgtaattagtgggaagccactgaagttaatctcttctctgtctaagcatgtttgcacggtgggctgcggggctggagctggggccggcgatcccgggaattccggaccggtacc

SEQ ID NO: 451792 - DNA, 1162 bp, Homo Sapiens
  misc_feature (1114)..(1114): n is a, c, g, or t
ttgggctctaccttgtctcagtctgagggaggaagacggcatggtcacatgggacacctaacgaggatagctaactgtatcgtgcacagcactgacaagggccccaacagtgcattagtgcagcagcttatcaaagatcttcccgacgaagtcagggaacgatgggagacgttctacacaagctccttaggagaaactaacaagaggaacacggtagatctagccttttctgattatcagatgcaacaaatgacgtccaattttattgaccagtttggcttcaacgatgagaagtttgcagatcaagatgacattggcaatgtttcttttgatcgagtatcagacatcaactttactctcaatacaaatgaaagtggaaatattgccttgtttgaagcatgttgtaaggaaagaatacaacagtttgatgatggtggctctgatgaggaagatatatgggaggaaaagcacatcgcattcacaccagaatcccaaagacgatccagctcggggagtacagacagtgaggaaagtacagactctgaagaagaagatggagcaaagcaagacttgtttgaacccagcagtgccaacacggaggataaaatggaggtggacctgagtgaaccacccaactggtcagctaactttgatgtcccaatggaaacaacccacggtgctccattggattctgtgggatctgatgtctggagcacagaggagccgatgccaactaaagagacgggctgggcttctttttcagagttcacgtcttccctgagcacaaaagattctttaaggagtaattctccagtggaaatggaaaccagcactgaacccatggaccctctgactcccagtgcggctgccctggcagtgcagccagaagcggcaggcagtgtggccatggaagccagctctgacggagaggaggatgcaaaaagtacagacaaggtaactgagacagtgatgaatggcggccatgaaggaaacgctcagcctcactgtagatgccaagacagagactgcggtcttcaaaagtgaagaaggggaaactgtctacctctcaagatgctgcttgtaaggacccagaggagtgtccctgagactgcanaaggcaaattgccggccgccccaggccttccagaaacagtcccgaaga

SEQ ID NO: 451793 - DNA, 1021 bp, Homo Sapiens
gttaggaactttgtggcccccgggtccatagatgtttaaggaatctgcttgttgggagctccgggaattccctggccgggtaaattctgacttggggggaaaccttcccgttcacgggaggaccaatgataaggtaagcttctaaaccagtgggcaatgaggttatgggccctcaaagggcgaagcagggcccacgttcatcaggctggtacaagtagacacactcatccccggccacaatgaactgcaggtcctgagaagggtcacttagggctgagcagcgcaggccacaaccatgggtgtccaactccacgcgagggtagtcttttccagaaactatataggactggacgttctctgttgtcacaacaaacaagtgagtggtctttcctgcttggcgaaaggccaatccagttacaggatagttgcccttgtgcaaaatctgggtcttgctatgccggtcccgggtgatgtctcctttgttcaatgtaacactgccatctgtgaaaccaatggccataaagttgagattttcatggacagtcaaacaagatacaacagttggctctgttcctggaatagcagggaagattcgagtgcagagtggattgccaccatctctcttctccaggttccagatcttaaccaaggggttgatgccctcttcatcttctccaacagatgccagaatattgtgctgcttcagttggtacaggtgtgtcacccgtagtttgtaggcttggaagcctgtaagctgtagggaacgtggcaagaaccagatctggccttccatatctccaaagaccaggctccctcggcctgagtcgcagacagtgatgccaggagggaggcaaaggaacttggaagcagcggatccagaagcaggtgtggccccgggagcggccccatcattgctcagcggctccttcaccagctccttgtcgaagaaaacgaagcgccgccactgcaggtaggccgccattttggcccagggcctcgtgccgaattcgccacccaggcc

SEQ ID NO: 451794 - DNA, 442 bp, Homo Sapiens
  misc_feature (408)..(408): n is a, c, g, or t
gaggtttttgtgctttatttattcatggtccttttgagttgagagggaaaaaagttttaatattttcaggttggtatcacaaggactgaataatacacttatgaaggctttcaagaaaatgcttgatttgtttctaaaggagaggctgctgatggtaatttgtgtgctgctgtgcaactggatgagctggaactgtcaccggaaagcctgccagttgaggcaaattggaagtagtgttctgataagatgacatatccacagacatccccatttgctgtgtgtaagcagttgtaccagtagctgactgtaggttagagttctggttcatataagtaggattggaaacagtgtcttgtccagtgcttaaatatgaagtttgagcaggctgtgctgttcactgaggaattncacatttgggaggcagagatctcagtggaccatt

SEQ ID NO: 451795 - DNA, 1073 bp, Homo Sapiens
ttctcggcatattttcaaggggcacaattcccccgcctcgggggtttctccacattttacacccttgaacttgggtttgggcaagcttgcgggaagaaaggaaataggccccagggcacaagttgcgctccaaataaaggttttttcggtcccccttttgaaacagggaaccacggcttagaattgttaaggcttggggcccctggccccagccaattgggttttggaaagagggcccttcatgccatttacagcatgggaggtgtcccacccatcccccagttgatagccaggaaagatccggactgggtaaagcccacccttaagaccacaggtcccagggcccagtgaaaagctccactagggcaggtgtcctccagctgaccactcttttagacctttgctgttgatcttacataagctcccctcacagattaccctttccccatcactatccaaaaagaaatctgcttctactgatctgaatatgccataaggactcagaggtatccaccttgagaaccatgatgtttatagcatctacatgaatggagaatagttggcagaagatcttcaataaggatgggctgaaggacagttccttttgatccaccccagcgctctgggagaatggggcagacaggtcagaaactttctgtaggtccgttctgatacgcacttctccaaagcacaatgccacatagtgtggaagatcatggctaaggagtttgctggaaatccacaggttatcaatttccactgtttgctggtgttgctgaaacttaagactgacattctggatccaaaaaaagcggaaggagccaatctttagctccgcctgcagcttccgctgacaccacttggtggccaaccggaccacaagccaccggcctagaaagagggcgctaagcgcaactagcagcaagaccaacagcgcggagaagaacagaggcatttaggtccgggtccggcccggcttggccccggcccccgccatgccgggccccgacgccggatccgcgcagcaccgccgcgggccgaccagctgcgcgcgatcccgagaattccggacc

SEQ ID NO: 451796 - DNA, 1065 bp, Homo Sapiens
gggtccggaattcccgggatgttcatctccgcaatacctacccgatccctgaagttcctgaaggaggctgggcatggcaccaccaaagaggagatcaccaaggatgccgagggactggatgagattgaccatgctgagatggagctgcgccgaggccagatcctctggttccggggcctgaaccgtatccagactcagatcaaagtggtcaaagcgttccatagttccctccacgaaagcattcagaaaccctacaaccaaaagtccatccacagcttcatgacccaccctgaattcgccatagaggaggagttgccacgaacaccactcctggatgaggaagaggaggaaaatcctgacaaggcttctaagtttgggactagggtgctcctgttggatggtgaggtcactccatatgccaatacaaacaacaatgcggtggattgcaaccaagtgcagctcccccagtcggacagctctctacagagcctagagacatcagtttgaattttctttctctgactctcatccctattttacctatttccattttcgtctatcccatctatgaggtgatgatgggacttttcattgtcacgtcagctgctgtgttaacagcagtgtgtgtgaagtgaacctctacctgaccatgaagaggcaagagcacagacttacaaggatttcaacttaagcttgacttggggtttgtagcgggacccagtcaaaccccattcaggtcatggtagaatctactccttggtagtcacttgtcatttttaaaggaaatgatgacaatcctctttggcatcacccccacccccacattctccccgatgttcctctccctgattctggattttgtcctacaagtctgtgccatttattagctaagttgagggttcaaagggagacaaatatcccccaagggaatatgtttgcgttaaagatggaatgtattaaatcccgccagtaaggggattgtttttccatttttccccctttggaaacttacaccctaaaggcctgtagggccttctaactcttttcggccctttcattaaaccc

SEQ ID NO: 451797 - DNA, 886 bp, Homo Sapiens
  misc_feature (73)..(143): n is a, c, g, or t
  misc_feature (147)..(167): n is a, c, g, or t
  misc_feature (209)..(250): n is a, c, g, or t
  misc_feature (290)..(298): n is a, c, g, or t
  misc_feature (335)..(422): n is a, c, g, or t
  misc_feature (475)..(577): n is a, c, g, or t
aaaacacaaaaaaacccctctccaaaaagggggtggggcgtttttttccccccaaccccctttgagagccaannnnnnnnnnnnnnnnnnnnnnnnnnnnnnnnnnnnnnnnnnnnnnnnnnnnnnnnnnnnnnnnnnnnnnngggnnnnnnnnnnnnnnnnnnnnncccccgagaagaaaattttttaagcgacgagaaatttggggnnnnnnnnnnnnnnnnnnnnnnnnnnnnnnnnnnnnnnnnnnggggcgttaaattttttggggggggttgtcccaatatgtnnnnnnnnnaaaaaagggtttctttcaaaaaatccccactttccannnnnnnnnnnnnnnnnnnnnnnnnnnnnnnnnnnnnnnnnnnnnnnnnnnnnnnnnnnnnnnnnnnnnnnnnnnnnnnnnnnnnnnngggggcgggaaaaattgggccccccggggggattttttaagggcccccccccnnnnnnnnnnnnnnnnnnnnnnnnnnnnnnnnnnnnnnnnnnnnnnnnnnnnnnnnnnnnnnnnnnnnnnnnnnnnnnnnnnnnnnnnnnnnnnnnnnnnnnngagttttgcaagtgtattcttgtgcaaaagaaggcagacacaaaataatactgtataattcaatttacataaagttcaaggaacagacaaaacgaaactatagtgtttagggacacattctcaggtggtacaactccaaaagcaaggaagcgattatcacaaaagtagttggaacaccaattaccctgcagaggtcttctgcttgactgttcagtaccatggcatgggtgatgctaacccaggctcactttttgataaatcattaggttttacatttatgttttgtgcacttttccatgtgtgctattc

SEQ ID NO: 451798 - DNA, 1292 bp, Homo Sapiens
  misc_feature (167)..(167): n is a, c, g, or t
  misc_feature (187)..(187): n is a, c, g, or t
aaattttccacccaaaattacgggaaaaccaatggcttgatttttaaggaaccccttccccaatctaaatgatttagttgggccaaatccacctgaacctagacatgcattccaaaatgaaaagcaaaaaccttatccttgtcagtgaaacttgccccaaaaccccnttcccacctccatagctgancagttacctttcatccacctcaaagtcaaaaatcaccctaagaccaaatggtgaaagatatctttctcttcttctgaccctgtcttatccttctttactagttgtacatgtcacgatgttactggctgcaatcttaaaacatctacttgcttaaaaccccaaagtctctagagtcttgtaataatcagctctgtcaagacttgggggaaaacccaaggcgatcccacaccggctttctcgagtccccgcgcgaggatcactgccttaccaatccttctgtgatctttctctgggtggcacttacctgctgctccccgggctccgctgacttcaccaggtgcttatccttgtacagagaccagagaccaacgttaggcaggaaaattaaagccaccgtgaacaacaaagtcatctgcagaaatctcttctgtttcctcttcattgcaaatggtaacagagaagaaaagttaaaggagatggctccctgactgcttcttgtgtttaatgtcaaattcctttcctctcccctgcgaagcaccagaaactgagaagctacaaacttttgttgcgtgctcagcaccaatctgcaggattcagagggagttggccatctgaactcaagttcaactccctccggagccagcttgccggcgggctccaccgggatccagggactcgggatccgggcagaactccggttcggatggaggtccacgaagtgccggaccctcgcgcgctgtctacacgctcctctgcaggcagcggctgggagccccgggaacctggtggaaaggaggctacagatgtcagcggagtccagccaggaagtggtggcgccgcgacgtcccttcctcgcgcggtcctcggaatgcgatcctctgagaagtgagcgctctgcccatcaatctcgtcccttgcccccggtgacgctctcacgctccgctgttcatgttaccattcttttctggcaactgaacgaacccacaggaccatcacgagcacctaaagggcaatattttttgatctcctcttctcgtaaaggggatggaggcggagaaaccgaagtctgtgctgggcttggaagcggacgagggcgccgcccgct

SEQ ID NO: 451799 - DNA, 1354 bp, Homo Sapiens
  misc_feature (1067)..(1067): n is a, c, g, or t
  misc_feature (1084)..(1084): n is a, c, g, or t
  misc_feature (1158)..(1167): n is a, c, g, or t
  misc_feature (1283)..(1291): n is a, c, g, or t
tcccgtgctcgggtgtccagccggcccttgccctgcctggcgctcggaccgccacctttgccgccccctcgccagcctccgcagcttccagactggccggtctgcgcgcccacccctgcctcccggaccggccaccgccggaggccgcggaggagggcccggccgcgcagatcccgcttatcgggcccatctcccgttacataaggccacccccctatctccgcgggccatcgccgccgcaaccgccgcgccagcgccttctcccacgcgcgggggcgcccctgcccaccgctcccggcagggcttttggtggttatgggggataaggggcgttgactcacccgggcggggctccgggagttgcacagaccaaggcaaatgccgtggcctctgctgtgggggtttctggaggacttctaggaaaacgagggaagagcaggaaaaggcgacatggctgcaggggccaagcccaggagccgccctccacagcactcattctgcagaagggaaatttgaggcccccagacggcaggggttgatcgtgcagagactggctccgctctgcaatggcagcatggtatggagcatcaacctgacagctggcatgtactgtgcagcccttggaatccctgactcaacgtgtcaggctgcagtgccatccgagaagacccagacggatgcttagcggattctgcccgcacaaggtctcagctgggcagttttccagcttgcatgtccgagacaccaaaatcgaggtggcccagtttgtaaaggacctgctcttacatttaaagaaactttttcgcgagggacggttcaactgaaacttcgaaagcatcattatttgcagagacaggacctgactattgaagttgcagattcatttttctttctgatgtcaaaaatgtcttgggtaggcgggaaggagggttagggaggggtaaaattccttagcttagacctcagcctgtgctgcccgtcttcagcctagccgacctcagccttccccttgcccagggctccagcctggtgggcctcctctgtccagggcccctgagctcggtggnacccaggggatgacatngtccctacacccctcccctgcccctaaagcacactgtagcatttaccgtggggtgcccccccttgccaaacatnnnnnnnnnnacggggacccacctccccaccaaggcaacttgaaggaagacagcagctcaaggaacacttctttctggggccttattaattaatggggggggcatttaaaaggaagggggggttgnnnnnnnnntgggggattggcggaaaaacctgggcgtcgcccgcccactcctagaacccacgggctcacaac

SEQ ID NO: 451800 - DNA, 1244 bp, Homo Sapiens
  misc_feature (1039)..(1039): n is a, c, g, or t
  misc_feature (1195)..(1195): n is a, c, g, or t
gaattttggaaaatgtgataaaaacaaggtggaagattcttccaaggaaccagtgcgaaggaataaaaaaatacgttgttggcctcattatcaagacgtcatctgacccaacttgtgtagagaaagaaaaggtgtatatcggacaaattaaatatgatccttgttcagatactgaaacaagaatggcccaaacattggccaacttttatcagtgatattgttggagcaagtaggaccagcgaaagtctctgtcaaaataatatggtgattcttaaactcttgagtgaagaagtatttgatttctctagtggacagataacccaagtcaaatctaagcatttaaaagacagcatgtgcaatgaattctcacagatatttcaactgtgtcagtgttgtaatggaaaattctcaaaatgctccacttgtacatgcaaccttggaaacattgctcagatttctgaactggattcccctgggatatatttttgagaccaaattaatcagcacattgatttataagttcctgaatgttccaatgtttcgaaatgtctctctgaagtgcctcactgagattgctggtgtgagtgtaagccaatatgaagaacaatttgtaacactatttactctgacaatgatggaactaaagcagatgcttacctttaaataccaatattcgacttgcgtactcaaatggaaaagatgatgaacagaacttcattcaaaatctcagtttgtttctctgcacctttcttaaggaacatgatcaacttatagaaaaaagattaaatctcagggaaactcttatggaggcccttcattatatgttgttggtatctgaagtagaagaaactgaaatctttaaaatttgtcttgaatactggaatcatttggctgctgaactctatagagagagtccattctctacatctgcctctccgttgctttctggaagtcaacattttgatgttcctcccaggagacagctatatttgcccatgttattcaaggtccgtttattaatggttagtcgaatggctanaccagaggaagtattggttgtagagaatgatcaaaggagaagttgtgagaagattcatgaaggatacagattccataaatttgtataagaatatgagggaaacattggtttatcttactcatctggattatgtagaatacgaaaggataatggacngaaaagctttcccattcaatgaaatggtacggaagtggtcatgggaaaa

SEQ ID NO: 451801 - DNA, 1191 bp, Homo Sapiens
ttctgtagttgctgaaaagaagtttattgctattttcttattttattatacaaaactagatttgcttaaaacatttcccagtctcttttaaaggaatgctagttaagtgggaggccacagctagtaaaattaccctcagtagtggtttcaagtagtccataactataaaaatcgttacggccaggatatgccggaacagaacactccccactggggtcctcagccttggatgtcagctcggcccctcaaggggtccctacacctggaagctgattccactcatcagtctcgagctgggcgcatgtggagttgatgtggagttgtagctgactggctggtggggtcagcctggcctcccagtgtggagcatgggcaccagcctcactgcgtggtcaccctagggcatatgctgcgggctgttgtggcattcctgtggccagcccagaggcaggcaggggctgtctggggtttgccatgtgcaccatcacctgggcttggggtgagctggaggagccactgaggcttagagctctggggatcccagggtccttgtccacgctgcgggtcacactggccagcttgctggtgctctcaccatggtctgtggtgaagctgtggttgtcgtgcgcctggctgggccccgctcccgggtttgttgaagtgcttgaggccaaggtatgcggcctgcaccgtctccaagtcctcatctttcagctgggaccacagctgggctgacctgttggagcgccgccgcttgctcttcttcacgcacttgaggaggcagcaggtgaggaaggccatggacatgagcaggatgatggcacagctcacaatggaggcgatcacggccaccttgaagccaaaggtctcgtgtggtggcaccagtttgcacactggggaccctgaagaccactcagcgatgctccccttccaggtgcaggtgaggagcccagaccccaccatctggtggttggaggggcagcggaacatgagcacggtccccacggaagcaccattgccacgaaggacttggaaggttgcttgcgggggtagccgcagcttagcgcacgtgcctgtgcggttccctggggcaggcgtggtgaccccggcccgcccccggggcctcgccttgccacggagggtggcggccgcccagcgcatcctgcgcgctccgaggcgcttggcgggccc

SEQ ID NO: 451802 - DNA, 1246 bp, Homo Sapiens
ctggagctgatgagctagtatcctctacttgatgaattacgccaagagtctgcctgacgtgggcattatggccgtcaacacctttgttaaggactgtgaggtaccccaaccccctcatccgagccctggcagtgcggaccatgggctgcatccgcgttgacaagatcacagagtacctgtgcgagccactccggaagtgcctgaaggacgaggatccatatgtgcgcaagacagcagctgtgtgcgtggccaagctccacgacatcaacgcccagctggtggaggaccagggcttcctggacacccttaattgacctcatctccgactctaaccccatggtggtggccaatgcagtggcagcgctctcagaaattgccgagtctcaccccagcagcaacctgctcgatctgaacccacagtccatcaacaagctgctgacagccctcaatgagtgcaccgagtggggccagatcttcatcctggactgcctcgccaactatatgcccaaggacgaccgcgaggcccagagcatctgtgagcgggtcacccccaggctctcccatgccaactccgctgtggtgctctctgctgtgaaggtgctgatgaagttcatggagatgttgtctaaggacttggattactacggcacactgctcaagaagctggccccacccctggtcacactgctgtcagccgatccagagctagcagtatgtggccctgcgcaacatcaatctcatcgtgcagaaaaggcctgagatccttgaatgcatgagatgaaggtgttcttcgtgaagttcaacgacccttatctacgtgaagctggagacgctggacatcatgactccgcctggcctctcaggccaacatcgcccaggtgttggcagagctgaaagagtacgcaacagaagtggatgtggactttgtacggaaggctgtgcgtgctattggccgctgcgccatcaaggtggagcaatctgcggagcgctgtgtgagcacgctgctcgacctcatccagaccaaggtcaactatgtggtccaggaggccatcgtggtcatcaaggacatcttccgcaagtaccccaacaagtatgagagtgtgattgccacactgtgtgagaatctggactccctggatgagcctgaggcccgggctgccatgatctggattgtgggcgagtacgcggaccggatcgacaccgcagataagctgctggagagcttcctcgagggcttccatgacga

SEQ ID NO: 451803 - DNA, 1149 bp, Homo Sapiens
  misc_feature (53)..(61): n is a, c, g, or t
tagggaaccccctaattgcccttttaatagtccaatttcagattaggttgaannnnnnnnnattggcatttaatggaaaagttgtaggaattgggggcttcagtgttaaactgtaaaagtgtgtaagagggggcttcagaggcatgacaatctggcagaaggtcacaggtcacaggccccaaggccacagggtgattgggaccaggagtcttcaggggggctgattggcctccctgggctccctacacctgcctttggggtgactgtctgctgccctctgggaagagccaattttgagtctgtgttctgaaactaaggagttacccattcgagggaagatgacctccccacaaattgttcctcacagccctcacgtgaagggcttgagggtcaggccaggacctgggactctgagcaatgcacccaagagcctgtgcccaggaatgtctaattcagaccgagggatacatgtggggagaggggcagggcccaggaaagagagcaggtcacctggggaggggagggggaatgtcctttctgccatttaccacctctctggcagcctgagcagggaagagaaccaggctggccacctttcacaccacagcctcaagctgtgacatcctcaggccagcctggggaccatgtcatgatgggaggtatgtctgcctgtgtgcatatgtgcgtactagacaagagagatcagggtagtcagtgtagggactgggagagtcatgggagctgggtttcatggcagaaataaaaatccaggctgtgctcaggaaaaggatggtgggtatcctgagaccaggcaagcgcctaaaaattgatgttcttcaagtccatggagcagcggtacctgccgtccgggaacctggagcacagcaggttgggcaagcaaggacaggtgtggtgcttgcgtttcctgaagaaggggaccttgtggctgccggggtggcactcctcgccttcccgccccagcggggtgcacatccgcagccctcgaagccacaggctgatggcacagcaggtgcctgccccacactggacatcccgctcacaggcccctgtgatcacagcacagtcagacacagttactaggaggagcatgattgagactcgcgtggcacatccggagaattccggacc

SEQ ID NO: 451804 - DNA, 1402 bp, Homo Sapiens
  misc_feature (31)..(31): n is a, c, g, or t
  misc_feature (160)..(161): n is a, c, g, or t
  misc_feature (506)..(506): n is a, c, g, or t
  misc_feature (679)..(766): n is a, c, g, or t
actcgacgttgtaattgcagtggcgcgctgntcgcgcgcggcgcagctggcacgttcccggcgtggtgtggctcgagctcgtgggccgttggatgggtgtggggggtgagtaaatgagccgggcagggcggggagcggtgaccaccagcggtactccgtnngccgatgactacgtattgtccaagtgactcgatatgcgggcgggtgtcgtacatgatggaacggtaccactctctctacgctctactcctccccacgcgagtcggacgtgtcggtggagagagaggaacggtgtcatagcgcgcgctgaggggggcgcggacgcagtataccaagttacagccgcggctgtgcggcgagttgccgcactccctgagtccggcctcagcggccgtggctctgtgtggagcggtccacgcgggtggacaccctggcggccgagaagtgtcgatgtcaggagacagcagcaacggtggcgcgtggactcgtaggtggcgcacgctctngcgtgcggcggttgggacgcgtgtcttttccttcgttggcggatcttcttcttgttgtctgggcgtaatcgggcgcggggggcggcgcgggccacgcgacgggggcgacacagttgtggtgaagggggcggcgtccagcgttggccgggggagtgggggatatgcgcggcgcnnnnnnnnnnnnnnnnnnnnnnnnnnnnnnnnnnnnnnnnnnnnnnnnnnnnnnnnnnnnnnnnnnnnnnnnnnnnnnnnnnnnnnnntggcggaaaatgcaccccagtcccaccaggggaggacgcgggggaagggtcgttttaaaggtgttttccctgatgcaggggggggcgggaccggaattccggtgttgctttggtgcatcttgtccccaatgggatgcaggctgatgtgcgggggcagcttgaaggagtttgtcaggctgtgcagctgctggacgttccccggctgccctgcatgaatagccccggtgatctcaaaggcccaggcatcccgctcctctcgagaacaggcctccaggaagtactccgtggatgtttgagtcttcagcttaatgaggagcggtcggttttcatactccaggcaggggcaggtgatggtgcagccatccaggaggatccggcccttgggaggggtcactctccgacccccctcaagcttgtagtacaccagcgtgttctgccgaaggatgaaccatcgcgccttccagttgtggacaatgtggcccctcttgaccaggaagccctccttgagcacgccgtcctccatgtcgccgcccgcacgccagggccaccccaggtgcgccttccccgcgcctcgcgctcctcggcacccgcgcagcccgcgcagtccgcgcccacggcgcccaggaagcgccaccc

SEQ ID NO: 451805 - DNA, 872 bp, Homo Sapiens
tccaaaaaggtgtttaatttgtggaaagctcttctcggaggtatggaggggggttccttgccatttaaaatgaaggattcacaaggggggggaggaaaaaaaagtggggcttgttcacgtttgggaaaggtccacaggggagtttttcccatttctataattaagattagggagggaaaaatgagaacccccactgggtagaaggaagaaggcaacagtcttctagggtctggcatttgatgagataggtattcagttactgtgcatttccattgtttttccatggcagaacatacggcagagatttgggaactcgcatgcctgaagccaggttattcttatgttctgtaactatgttgctcgcagggctgttgttgtcagagtagtgagttgtgccccagacaaatggggtgctggtctgctcccacaaatctttatcccagtcttcatcgcaaggagggcactgccaagtgctctcagccagagtctcttgtctaaggctcctggtttggttgacaacatcttgctcaatacaacttctgtcatcacagcttgagatatgatgactaatttcagctcgaggaacctggtggcgagcattgaagggacaagtagccaatttgcttgcaacatcaggatgattctttctgcacttgataagatgataaggaaacctgcaagccctgatttgatggtttttgtcataggggcattgcaatagcttctcagggtccagggagtcggtgtaagtttcttccatgttggaaatgaagaagctgaatccaagtgctcggtggacacacaccttcctcacagtcaccttcctcccacgcaagccccagcaacggccacttccggcgcctaacgttccc

SEQ ID NO: 451806 - DNA, 1099 bp, Homo Sapiens
ctggatccaataggtagtggtttcagagaacagcttctccaccaaggctgttaatacctcgaccttaaagtcacccctcaaggatgagcaggttggaaatggattagcgcttacgacagtttggactagcacttgttctcctcggagttcttgatttgcagtacagagcatttccataagtttgccactagatggtcatgctagcgagctgatggcatccgcatctgaccaaggcatttctttcttataaacatatcttcactcgatgtacatcaccatagactccaaataggataaaaagcccatgtggtgtgataagatcaggattgagatttgtgacgagtagaacagattttcctggtataccactagccccaggaatggccatccttccagtgacagcagaagaggtgattgtgagaggaccaagagctccaggaacagctggaactgatagacctgtagcttgaggaaatccaatggctggggcaaatccagcagcccctgcatatggtgaagaaattatacccggtgcaccaaaagcagcagccatagggggttcaagggatggctggccatcaccagtaggaaggtctaagcgagtgaagtctctgcttttgtcattattatatttcacattaaggctggtgagcttggagaagtcaatgcgcagagtgcagcatgcattatagatattctggccatccagagccattttggcataatgtgcatttactgggtcagcatactgaagcaaggcttgaaactgattattctttgtaaaggtgataatcttcaagactgtgccaaatttagaaaatatctgatgaagaacttccagggtaacagggtaaaagaggttttcaataattattcgaagcacagggctctgcccaggtaggactgtgccttcattggaaggacctccagaaagggccaggcttcctgattggacggcactgacagcctgcagtgcagcttgggctcgagcttgattaggtagattgtcagtcttaagttctctgtgattggaatactgaatataaacaggctggcttcgaaggtgaggagtaataggagtgtaaatcccgggaattcc

SEQ ID NO: 451807 - DNA, 1515 bp, Homo Sapiens
ggtccggaattcccgtgatatttgcagttattgtcacccagatgctggcactcagtctgggaatatcatatgacgacccaaagaaatgtcaatgttcagaatccacctgtataatgaatccagaagttgtgcaatccaatggtgtgaagacttttagcagttgcagtttgaggagctttcaaaatttcatttcaaatgtgggtgtcaaatgtcttcagaataagccacaaatgcaaaaaaaatctccgaaaccagtctgtggcaatggcagattggagggaaatgaaatctgtgattgtggtactgaggctcaatgtggacctgcaagctgttgtgattttcgaacttgtgtactgaaagacggagcaaaatgttataaaggactgtgctgcaaagactgtcaaattttacaatcaggcgttgaatgtaggccgaaagcacatcctgaatgtgacatcgctgaaaattgtaatggaagctcaccagaatgtggtcctgacataactttaatcaatggactttcatgcaaaaataataagtttatttgttatgacggagactgccatgatctcgatgcacgttgtgagagtgtatttggaaaaggttcaagaaatgctccatttgcctgctatgaagaaatacaatctcaatcagacagatttgggaactgtggtagggatagaaataacaaatatgtgttctgtggatggaggaatcttatatgtgggagattagtttgtacctaccctactcgaaagccttttccatcaagaaaatggtgatgtgatttatgctttcgtacgagattctgtatgcataaccgtagactacaaattgcctcgaacagtttccagattcactggctgtcaaaaatggctctcagtgttgatattgggaagggtttgtgtaaatcgtgaatgtgtagaatcaaggataattaaggcttcagcacatgtttgttcacaacagtgttctggacatggagtgtgtgattccagaaacaagtgccattgttcgccaggctataagcctccaaactgccaaatacgttccaaaggattttccatatttcctgaggaagatatgggttcaatcatggaaagagcatctgggaagactgaaaacacctggcttctaggtttcctcattgctcttcctattctcattgtaacaaccgcaatagttttggcaaggaaacagttgaaaaagtggttcgccaaggaagaggaattcccaagtagcgaatctaaatcggaaggtagcacacagacatatgccagccaatccagctcagaaggcagcactcagacatatgccagccaaaccagatcagaaagcagcagtcaagctgatactagcaaatccaaatcagaagatagtgctgaagcatatactagcagatccaattccaagacagtacccaacacagcatagtactgtgatcctctaaggacgataactcaagctcctagatgaatctgcttcctccggcccctgagacataatggtgtgtcc

SEQ ID NO: 451808 - DNA, 1096 bp, Homo Sapiens
  misc_feature (359)..(359): n is a, c, g, or t
tgggggccccaaggggccagccaccgcggggggccttgaaaggggtgcggtaatttccccagaaaggggagcccacccccgttacgggccaatggtaatgtgcagttgcctggccctccgtcagagggcagaaaacgtgaattcttccaatggttcccactcggtttcttcatctggatcccggtcaggccagctccaggtgcaacaaacagggaggtcatgatggctatgccggctgctgagcccagagccgctgccccggcgctgccaataatcgtcgctgctccagcggcaacaaggggtgcagctagacctccagtcacaccgatcaccgttccgcctccgacagtcgccaggcntatcaggagataacgcttccatttcctccggttttctttcttctttcgggatgcctcggccatttcagattcattcttctttgatttccttcaggctctccaaggaacatctcttcaaggacatcccagctcctccaagggcacttggagcagggaggtcatgtggcaaacgaggactctggcccgggcgtcatagtgcccatccttgagtgagaagctcagaaggtcctgagtgatcaccgtcgggtcgtccttcaagatggggtccttcagtaaaatttgaacaaacacatctgctccttcacctcccaggccgctcgcaaaagcagtcatggttggcaagacagcttcagacaactccagccactgcaccaggcctgccatgaactctgtgcagaaggagctgtgttcgggttcaggaaataactgggacagggagatgccacagagggcagcataggcgaagcggttggcctcagtcagctcccggcccgtgggcaggtgtggctccccctctgcagtgggctcagctaccagaggctgctgaggcagcctctggcatggcctgttccacatggccattcccagcgccagatttcaagaaacagccgtgggcctctctctgtctgaagacaggctgctcaggttctggatggttctttggagaaatatgcaaattgccctggaggcggctgcgaaggcaaaggcggaggcggcaaaaccggcgagcggctcct

SEQ ID NO: 451809 - DNA, 1324 bp, Homo Sapiens
  misc_feature (893)..(893): n is a, c, g, or t
  misc_feature (1070)..(1071): n is a, c, g, or t
  misc_feature (1252)..(1252): n is a, c, g, or t
  misc_feature (1300)..(1300): n is a, c, g, or t
ctcttgctgcaggccatcaaggacgaggctggctcttccgcacccctgcctggctatgagcaggacagccccatctcctgtgagtccctctgggtgtgatcatatggtgctgactggcctcgcagggacagaggagctctgggagctggctgtggctgcacgggcctcaagtgcttgtctctctgtgcccactcgacgccatggagaagcgcccctgacgaagtcgagggaacctgctgcttatctgcgagacgacggaacacttgccacgtgcttgcagagatcaccgaccacgtgtacttccggggctggggctgctgggggctcccagagttgtgggctgtgcaggggacaccctcagtctctggaagccaactgagctgtgctctgcagggtgggccctctggctgtgatcatatggtgctgactggcctcgcaggtgcagaggagctctgggagctggtgtggcagcacggggctcatgtgcttgtctctctgtgcccactctatgccatggagaaggtgagagtgcagaggacagaggaagggaggctcaggagttagggctgaggttggaggcgggtagtttgtggtgctgtctaaccagggcaggggcagagatctcaggaagttgcctgagcagccctaacttggtcccagccacaggaattctggccaatggagatgcagcccatagtcacagacatggtgacagtgcactgggtggccgagagcagcacagtgggctggctctgtgccctcttcagggtcacacatgtaggtgttggggccacagggcatggggtggtgtgtgggagaagagtcctgtgtgggctccctctgccctctccagcaccaatgccgatcatgtctttgcccgagggggagagtangaaggaaagggaggtgcagagactgcagtttccatacctggagcctgggcatgagctgcccgccaccaccctgctgcccttcctggctgctgtgggccagtgctgctctcggggcaacagcaagaaagcgggcacactgctcagccacctcaggtggtgctggacaatgttcctggnnggagtggacactgggagcccctccctgcccctctggcatagcctccgatctccctgggccctgctttggttatgggccacaaagacacagtctcccaatgcccctgtcttccccacaccctaccctgttctcagggaaatgggggggaaatttaccggcctccctcccctggggcccaganctgcttggctggcttgacccaaaggtttccggggtccccttcttaagncccttggaccccagggtttgggat

SEQ ID NO: 451810 - DNA, 2186 bp, Homo Sapiens
  misc_feature (22)..(22): n is a, c, g, or t
  misc_feature (91)..(91): n is a, c, g, or t
  misc_feature (197)..(197): n is a, c, g, or t
  misc_feature (213)..(213): n is a, c, g, or t
  misc_feature (401)..(401): n is a, c, g, or t
  misc_feature (413)..(413): n is a, c, g, or t
  misc_feature (446)..(455): n is a, c, g, or t
  misc_feature (492)..(492): n is a, c, g, or t
  misc_feature (495)..(495): n is a, c, g, or t
  misc_feature (505)..(505): n is a, c, g, or t
  misc_feature (533)..(533): n is a, c, g, or t
  misc_feature (537)..(537): n is a, c, g, or t
  misc_feature (607)..(608): n is a, c, g, or t
  misc_feature (611)..(611): n is a, c, g, or t
  misc_feature (619)..(621): n is a, c, g, or t
  misc_feature (636)..(636): n is a, c, g, or t
  misc_feature (660)..(660): n is a, c, g, or t
  misc_feature (668)..(669): n is a, c, g, or t
  misc_feature (683)..(684): n is a, c, g, or t
  misc_feature (715)..(716): n is a, c, g, or t
  misc_feature (718)..(718): n is a, c, g, or t
  misc_feature (723)..(723): n is a, c, g, or t
  misc_feature (727)..(727): n is a, c, g, or t
  misc_feature (819)..(819): n is a, c, g, or t
  misc_feature (924)..(925): n is a, c, g, or t
  misc_feature (937)..(937): n is a, c, g, or t
  misc_feature (1018)..(1018): n is a, c, g, or t
  misc_feature (1098)..(1098): n is a, c, g, or t
  misc_feature (1124)..(1124): n is a, c, g, or t
  misc_feature (1171)..(1171): n is a, c, g, or t
  misc_feature (1200)..(1200): n is a, c, g, or t
  misc_feature (2134)..(2134): n is a, c, g, or t
acgattagaggcgaggtttacntcgtgggaggtacactcatcaatgccatttgggatcggtccgcgttatgttaaccccctcaaccagctnttgtttcgggggggttatgtgagcggagcggccggggcgaggaataaagttttagtacgtcgcggcggggttagggggggagactggcccattattgggggcggcnacggggcctaaggganggggcccacacatacgtgttattggaaacaaagcacgggcggccttgaagagagaaaactcttaattaggacccagattgggcggtaggcaaagggggtgtaaatggtgcaacctgagtaatgtaatcctctgaggtatgtgttgatagccagcgagttatctgcgaattgcgcatcgagcccctttntacaagcccacnggcaagacagaggaacgaaaaaaaaaatgcacnnnnnnnnnnaaaaggagcgagaaaacgaggctaggttctatccacntgnccagcggccnccgcgcgagaggggaactaataaatagntttngcaccgcgccgaatcccactagaaggcagacaacacggggtcattccagaaagttgcgggataccccacnncantggggtgnnntgtgggctgtagganaccggggcaggcgcgcgaggacanaattgtcnnccccactcactccnncttggggagttgatctgatgcggcgttcgtnncngttgnaggntttgtcgttacgaccctaggtatggtttaatcgcggcgcaacagccccgggggctggggcggcactcttcgggcgcaccacccaccacccgntagatacgatcggtattgaccgctccccctctaggaaacagtttacccccttcgccggcgacgcgattagttgggtttagtttgacacacaaacccgttccgacnnacgcactcccgntgcgagagtaaattaaatttaataaaaaagggtatagttaggaacggggcggtcaaaagaagtgggataatgctggatggnccgcgtgccttccaacaaattttttgtatagtgctggaagtgaacccgccacgagccggccacggttgggcgtattcgcnctgccgttggggcggggccggagacnaggcagcgagggcggtgtaatagagacgctctccctattcgttttgngcgctccccactccccctacgtgatatanggggaggaatactcaagccctagcatgtatcagggagaggggtagaagagtattcaggcggcccctcctatggagctagaatagctgcggggcgaggcgggtcataatatagaagcgggcgagatgccttattgatcaacggtggggttagataaaaggggcgggaggttctgacggaaatttaaagtgtacaagggacaaagggatttgacaggcaacaggcttttgggtagatgctataacccgataccgcttaataagtttgtggtgtctttaagaaagggaaccgtacctttcaaaggcttaagcccccgtcccgttataaccaccgttaggaggtagggatagattttactttggcgctgaatgcagggtatgggcagaggggaattatcccgcgcaagtatggtattatttagtttcctcttattattgatgtgcgtgattccagtatttccacggaataatagatcaagcgggcacatttcgggtttgactaatcagagctgcagatgtggtctgacaattcctctcatccactcagttctgctctcttggttgctttctggattcctattccgcagatatatttctccctggagactgttttcttctggactagtctcttaatcttcccaacccatatttggagagatgtttcgtgctcacccgtgaccatgagaaagtgttgcactttgtggcctcccttgcagttaggcagggctatgtgattggttccagccagtgtgggctgtgagggaaagaggtgtgttacttgtgggctgagacagtgagaagctcgtgcataattctccaggctttctttcttcacctcatcacctgaggagaccacaagttcaggaatcatagccacaggatggtggagccgccattggcctcaactctgagtcacatcccgggaattccgcgcctncgtcggggagaggaagagtggggggcgtagggcgatcaccctgtcgttcttt

SEQ ID NO: 451811 - DNA, 1046 bp, Homo Sapiens
  misc_feature (56)..(74): n is a, c, g, or t
  misc_feature (76)..(84): n is a, c, g, or t
  misc_feature (86)..(99): n is a, c, g, or t
  misc_feature (101)..(115): n is a, c, g, or t
  misc_feature (117)..(178): n is a, c, g, or t
  misc_feature (180)..(185): n is a, c, g, or t
ggtgtggggcccgccccgcgggggggtgtttttttattggggcgcggccccctttnnnnnnnnnnnnnnnnnnngnnnnnnnnngnnnnnnnnnnnnnngnnnnnnnnnnnnnnngnnnnnnnnnnnnnnnnnnnnnnnnnnnnnnnnnnnnnnnnnnnnnnnnnnnnnnnnnnnnnngnnnnnnttccaaaaaactacctttattgtggttggctcgacataagatgccgccatcagcagaattataaaactgtacaggaggcacaaaaataggctgtttaacttagataatgaccctcatgtcttcaagctttaaaaatgcacataaaagttgtacaatctggcagtttataaaatataaagctaaaaagaggattttgggttccacaaagaagactgtatcacacaattaacacgtactaattaaacaattaaccatccacacagaagacataatggcacagaattcttaaaaatcacctaaaaattaacattttaccccgaccaaattaatcaccctttaataataagactactgtaaagcatccatcccatggaagggatacagtatcacttttccagttttaaaatggtcaagggtgttgtccaaaacaaatctgatgtgctttaagcaagtacaattgtaactggatacatttcagagtaaaaattaaataaatataaataggttaaataaataggtcattgcaaaaagaacactacacaaggtttacatctgagaatgcagagtaggtgactggtaatgctttctaggtaagtggggactccccatcacagctttagggacactgaaaaggaatactgtatccaccaaacacacacacagtacacaggggaggtgggggggctttggccaaagtgttggttaaggctgctccagtgggaggctcactgcagtcacgttctttgtggctttccaatgtctacagaaagaatttaagcgccggtacaaaaaatcagaaccagagttactcacgggaaatcactgtttcataaagaaggagatcccgggaattccggaccc

SEQ ID NO: 451812 - DNA, 1030 bp, Homo Sapiens
  misc_feature (671)..(671): n is a, c, g, or t
cggtccggaattcccgggatgtgagcccactcacccaactcctgaggtcttatcagcaagctgctcatcaccagcttcaggtattttctgtctgtttgggagatggcctttccctggctcctgctgtaaccagttattacgcaatgcaccaagatgtaacagtttttgttctttgagataataactggactcttgttttaccttcaagaagattaaggagtacagacacaaaggtgaagttggggcgaaggtttaataagcgaaagaagaaagctctctgccagcagagagggggtcctgaatggggtggccactatgagtcccgttctgggttctctatgaactggaaagaggaagaaaggtgcttagtctgcaggctgtcttcgagaacacgtgactcagcttgtcccgggaccttggcccaggacctactggaaagcttggcccagcaccagttagaagatgaagcgatgattcacagaggctgcttagcctggcccaggacctattaggagctgaagtgacagcttggcctgggaccaaccagaggctgaagtgatgattcacagagggcagacgtacagtccaaacaaaggaaaggagagtgtccacgggaacccactgaagcccactgtgcccatgcccaaaaatgagaagaaacatcttcctgngagcccactgtctatacaaaggacgaaagcatttttatgcccagccttgtccccttatttgagtgagttggaggtttgtgcaagattttatccaagtggaggtttttccatctgtgtagccacgggcatgtctccaggcacaacgccacgtgctagttcccttactggttcctgcagcctgatttccccccaccccaggctgctttctattttacgtggggataaggctctgaccttgggccgggggctctccaggggctcttcccttgctgtctacctaaggcaagctaactccctttcagcccccccctgggagtaaaaacccaactccttgtttggggaaggttgggccaatgccc

SEQ ID NO: 451813 - DNA, 1025 bp, Homo Sapiens
  misc_feature (100)..(108): n is a, c, g, or t
  misc_feature (162)..(171): n is a, c, g, or t
  misc_feature (174)..(254): n is a, c, g, or t
ttccccacgtttgggagtgttgttaaaaaaagaggggaccagggcccccaagttttataaaaacggctcctcccatttgggggggcccccttttttcccnnnnnnnnncgggggaaccgggaaatttggggcccccccggggggggtttttttaagggcggnnnnnnnnnnttnnnnnnnnnnnnnnnnnnnnnnnnnnnnnnnnnnnnnnnnnnnnnnnnnnnnnnnnnnnnnnnnnnnnnnnnnnnnnnnnnttatacgaattaaaatttatttcaaactgttttgtacatctttttaaaaaatgaaaattcaaaagtcttagaattaagcaatgagtctttgatatcataaagctgtgtataacaataattaaagtagtggtaacattttacccttgtaaaaatgtcacagaattaaaatctcaacttggatcctcaatgattcaactggtttatcttacacaataagcgtttggtcagtttcaagataaaatttccccagacatgctgtccttaagtccttcctcctcaccatccatcagctcacacattggggtagctggctgctgtggcgattccacagtggttgttcttgtctttggctatttttacatagccattcgagccccattctggaccccagctgtttttgacgagccaatacttgctgttattcgaatttgctccttcaaagccgtagccaaccaccagaacaccatgatccaggtttttgctgctgcagtctggttcaaaataaatgcctgatttgtagaactggaaggacgaatggcctgcatccatagcaacggagatgggccccacagttgcgactgctttcatcagggccttctcctttccaggtgcgaccactgtgaagccagtgtcattagcaacagaattctcaggtctgtacttacagatttcatccactgctacatatggataggattcctcagagtccaggcctccgttctccttgacatactggaaggccctagccatgaagccaccatcccgggaatc

SEQ ID NO: 451814 - DNA, 1133 bp, Homo Sapiens
  misc_feature (53)..(53): n is a, c, g, or t
  misc_feature (1041)..(1093): n is a, c, g, or t
acttcaatgccccaagattgagtgccctgcaaaaaaagtgcggctgggcaagnagggacctcccccatctgtccccattactcctttggggaatatttacaaaaatggactcacatcccggcgaagccatccgggatgcattctgaagtattcccagggaactgtcagtcacacccagggttaatgaggtggttgtagaccagaggaaaaagactgtcaaaaaatctgtttacaaattcttcaggattaacatccgcaccaaataaatacagccccacatcagtgaagaactcctgaaccgaagcagcagcctccaaggccatgttcctgtaggtactgcaaaaaagtatactggtgtaattttctgcttgtttgatgagagtttcaagggtttcttgaaaagcagccgcatttcgagatattagaaactttaatgtagagctggacgtttgaagaaactgctgcatatcctgcgagccgcaatctgatatctctcctccatctttcctggtgcaacatgtaggctttttggatatgcaaacctgaagatcaggtcctgcccgcggcgaatccggcagccccctgacagctcccagcagccgccactggaaaagtttccgaacttcttcgcaggtctgcacgccctcgctgcgggcggacccaaccagggccagaaggaggaggcagcgaaagcccacgggccaggtctgtgcgtccatcctcgccgtcctggtcccctttacccgccagtggaccccactcgccctgcgcgccctggctgagctgcagacgtggaagacacagcggccgaggctctcgagcggtgcgagccggctgcggggtgtacggaccgcccgcgggcaccggcttcacctgggagcagttagctcttcccggaggaggccctaagctgagacaccagagttttccagctgagcaccctctggtcttcttccctagccgagaagagtgggcggctgggcggggcgaagaaaactagtggagccgcagggagcccgcaagcatccgctctggccaccnnnnnnnnnnnnnnnnnnnnnnnnnnnnnnnnnnnnnnnnnnnnnnnnnnnnngctcggctcgcagcagatcgcaggaattccggaccggtcc

SEQ ID NO: 451815 - DNA, 1088 bp, Homo Sapiens
  misc_feature (31)..(31): n is a, c, g, or t
  misc_feature (46)..(46): n is a, c, g, or t
  misc_feature (94)..(94): n is a, c, g, or t
  misc_feature (1026)..(1035): n is a, c, g, or t
ggtccggaattcccgggatgcttatttctantggggaaatatttancacagcttgtaaatttcaatcttcccttcgcttctgtttcacttatantcatttctgaaaatcaattaggaggtacaaaatatagacacaccctgattcacttctgggctttcttctagtcaaaatggataagctacaaaatgaaactgttatttccattgagacaagaagcaccgtttaataactccagaaataccttataatcatttagtcatatactcttcacaacatatcagacaaatcaaattggaaggcaaaagaatgcaaatccagaaacagaataacattttaaataagtcgactatctaaaatatgtgcatttcacatactaagacctagaattgtctgattcagaggatctacaaagaaatcctagggaaaagtagtttctccacagacagttatataaatgaaattcataaagttttatgttatagaaaataatttttaaattaccttgttaaattccatactagtgtgatttaaggcaggactgataattattacaattaatataggaggaaactgaggcacaaagaaatttgtaactcttcgaaagtcactcacttaaaaagtaggtgacaggagactccagtttatatttcctgacttcggttccagtgttcttgccaaaatatagaaatataatcaccttttcttagaagttttcattgaaatatcagaaaaatgcaattaatatttaattaataaaatttcacattgctctttatttaggtgcttagcactggaaggtatgagaagaaaggaaagtactttgccccccgtgcaataaagcctttttacaatgtatctggggggaaaacaccaaacccccagaaaaaccttgggaaatttgtgctggctaaactggattttttttaatttgagtcttaaaatgaattccaaaccaagggaaagggatactggctgaccttgaaaaaaggttcaacaccaaggccctaaccattcacccctttcannnnnnnnnntttagtcacatgtgaaggaaaccgggacttccaagaaaccctgggcaaagact

SEQ ID NO: 451816 - DNA, 1846 bp, Homo Sapiens
cccataggacagggtttctgttccctgccctgccttgggccctcttctctaaatatattgcagtgtgtctgtatcctgctggaaggaagctcccaaagttggacccacatacctcatgttgttttttgcattgagacactgcaataactattgtctaagattgtttcttatctatttttattagctcagacctaagtatgctgttgcctgtctctggatccagaaggcttacactgagttctgaagtccaaagtaacttcttgtttttgtttctcttctagtgacagacatcacacctccagtgcaatccctgttcctaagagacaaagctccatatttgggggtgcagatgtaggcttctctggggggatcccttcaccagacaaaggacatcgaaaacgggccagctctgagaatgagagacttcagtacaaaacccctcctcccagttacaactcagcattagcccagcctgtgaccaccgtcccctccatgggagagaccgagagaaagataacatctctatcctcctccttggatacctccttggacttctccaaagaaaacaagaaaaaaggagaggatctagttggcagcttaaacggaggccacgcgaatgtgcaccctagccaagaacaatgagaagccctctccgggcaccgggccacagtcaatggcactctcctacccagcgagcaggccgggtccgccagtgtccagcttccaggcgagttccacccagtctcagaagctgagctctgctgtactgtggagcaagcagaagaaatcatcgggctggaagccacaggtttcgcctcaggtgatcagctagaagcattttaactgcatcccagtggacagtgctgtggcagtagagtgtgacgaacaagttctgggagaatttgaagagttctcccgaaggatctatgcactgaatgaaaacgtatccagcttccgccggccgcgcaggagttccgataagtgaagtgagcaggtcaacagtaggactggggcagaagctctgcctaaaatgaagtgaaagctgcacttaaccctttgtgataatgatgacacaaaatgaatattaatggaggatattcctcggaaaaacagactttgggaatgaaggagggactcaggatcattgttatcagtgggccaaagttagattttgctttcaagatttgcttttcgggcctgatgattttaaagcaaaaatcaccctctagttgaaagagcttacagctcgagtcaccttttagctatttgtctgctttttatttacccttgtatgttatcctcagagggaagatgataatatataaataatataatgaacacacccttagtttctcataagcatttgccctcaccatggtttataaaactttgggaaaacggaatattcagaaataggtttccgcccatgtactgaaaggtctgtggccatctgtgaggtagatgaagaagcagcatagtggtctccttacatctaggcctaactgttcctcttcctgcccccgggtaccacagtccaccttttagaccctactgtcgccccatcttctccggggaggggccatgcgtcctgaaaacgggacatcagattccctggtttctgtaacccaacagctgtgacgttccatcccttctaaccacccttgggctttctcctcctctggcaaacccttaatgcgggccctccgatagaagtgaaaacttgctcccgggtggatcccaagggaaccttcaggacccccaggttctggcgttcaaatgccatctcctcccccggtgggggggcaaaggttttatgggggccaaagcctgggcgtcaggacataag

SEQ ID NO: 451817 - DNA, 1260 bp, Homo Sapiens
  misc_feature (99)..(99): n is a, c, g, or t
  misc_feature (101)..(101): n is a, c, g, or t
  misc_feature (374)..(374): n is a, c, g, or t
  misc_feature (1197)..(1197): n is a, c, g, or t
  misc_feature (1199)..(1199): n is a, c, g, or t
  misc_feature (1201)..(1201): n is a, c, g, or t
  misc_feature (1209)..(1209): n is a, c, g, or t
attcggcacaggtgagcccggcaccccccgccgacaaggaggcagagaagcctgtgttcttcctagccttcgcagccgaggcccagaagctgcctgggnancccccttgctggacttccggcctgcccttccccgtgcccccccgtgaggtgatcaaggcctccccgcatgccccggacccctcagccttctcctacgctccacctggtcacccactgcccctgggcttccatgacactgcccggcccgtcctgccgcgcccacccaccatctccaacccgcctcccctcatctcctctgccaagcaccccagcgttcctcgagaggcaaataggtgccatctcccaaggaatgttcggttcagcttccacgtncccgtaattcagagcattgccaaggccccggtggccttgttcaaccatggggctgcccctgcccatggaccccaaaaagctggcacccttcagcggagtgaagcaggagcagttgttccccacggggccagggtgggccaccggagagcttgggggtgcccacagcccaggaggcgtccgtgctgagagggacagctctgggctcagttccgggcggaagcatcaccaaaggcattcccagcacacgggtgccctcggacagcgccatcacataccgcggctccatcacccacggcacgccagctgacgtcctgtacaagggcaccatcaccaggatcatctggcgaggacagcccgagtcgcttggaccgcggccgggaggacagcctgcccaagggccacgtctatctacgaaggcaagaagggccacgtcttgtcctatgagggttgcatgtctgtgacccagtgctccaaggaggacggcggaagcagctcaggactcccccatgagacggccgcccccaagcgcacctatgacatgatggagggccgcgtgggcagagccatctcctcagccagcatcgaaggtctcatgggccgtgccattccgccggagcgacacagcccccaccacctcaaagagcagcaccacatccgcgggtccatcacacaagggatccctcggtcctacgtggaggcacaggaggactacctgcgtcgggaggccaagctcctaaagcgggagggcacgcctccgcccccatccgctcacgggacctgaccgaggcctacaagacgcagccctgggccccctgaagctganangncgccatgnaggcctggtggccacggtgaaggagggggccgctccatccatgagattccc

SEQ ID NO: 451818 - DNA, 1182 bp, Homo Sapiens
  misc_feature (562)..(562): n is a, c, g, or t
tctttaattggtggggaaaaaaaatggcccccttaaaagggggggaaggggaccccccctttttcgggggcccctttaaaggaggccctttcaaaagaaaggggaaactggggccaatttggctgggcccccagttttttaacaggtaaagggggggctatatggggaggggaatccgggggtggaaggaccattcctgggtccaaggaggccaggcatgggccccagttagggagcgcatgagaggatggtgcacatgtttgaaggacctggagagtggccttgggaatagagcccttcccggctgtcgtggcttttctctgaatgcatgggggatggtttggtgctgccccaccccgatttttggaaagacacccgcttctggctctaattgtagtaatcacttagtcactctgaaattcccaggagatagtcagagaaaaaacatggcctgtgacaatgattgccctgaccaagcctttccaaggcagcagatgcttctttacttccaagcattgcccgtcatgatcaagttcttcctccagcagtgcagccacgtttnccctggtggcagacattccttttccaaggttgggcttgcttttagagggcccagagatggcaaacagcattgtgtagtgctccttagtataaactctcctctgggattgttcttaacaaggtggtttgagtttctctaggaattaagctggggctggctattatttttctggtaagacttgttactctaaaatgcatatggggccaaaatcacaatagtcttgtctttggagcaatcagacgcacatggcaatctaaggctctggtaaggaagagtccgtgggttcttattcaataaatatttaatacattgggctttgatggatgtagacactgtctgcttgggttttcctacaccaaaaggtgaagtctctggtggtcactgcctcttgtttgttcctttgatttcctttgacgaaaaacaattcttgtcttggtgaggtctattaaatctgttcttttccaaaatggggctggtagtgcatgttggacagaactggaactttccctctggtcattccttgccatcccctgggtgattcggtttcccattttgtgggatgtgctgatagggcttgtctcccgccccctcttatatcccgggaatccggaccggtccac

SEQ ID NO: 451819 - DNA, 987 bp, Homo Sapiens
  misc_feature (94)..(94): n is a, c, g, or t
  misc_feature (716)..(818): n is a, c, g, or t
cttgggttagggtcccaggttgctgggagccccccggtatcggtgaactccgtgatgtcagggttcctggatgtcccatgttcgccagccccangggagagcggacccactggagggcctctttggtctctacctggatgcaggggcaggggtgggagccctcttcttctctcttcattggcatggtgttggtggtgggggtagctggcgtctgtctccactttgccatctgattccattttttgtatcttctcctgcacgagggcccggaaggcctgggcctcgtcctcgtctgcaaagttcagccccgcttggcaagtcatctccagcgaaggtgtgcgaagaagggggtgggggtggagtagacaagctgtgaagtacagctcctgttcccagagcagccgacccagcctgcaaggccgtaaaggcggatgaagtaggacttctgggggttatccttcacgaagcacacagccccacaatgctccttggtccagtgctcagctccagggggcagcgccaggtacagctgaacaactgcagtggccagcgtcaagcattttcgtccaagcatctcaaagagtcgctggttctcgtggtcctggaggagggtggagggtatgttctgctgacaccgctggtgctcctcagtgccccgggccttcctcccattgggcccccactcatggtgctttctgcccttgtcttctctggcnnnnnnnnnnnnnnnnnnnnnnnnnnnnnnnnnnnnnnnnnnnnnnnnnnnnnnnnnnnnnnnnnnnnnnnnnnnnnnnnnnnnnnnnnnnnnnnnnnnnnnngttttgtgttgtgggaggaaggcgcccccttccccgcgcggggccgggtcggccagtcctggtcccgtcctaccggctcccctcgccccgggcggccgttggcctctctcctgcccaccgcgttccctctcctcctttgacttagtcttgatcccgggaattccggacc

SEQ ID NO: 451820 - DNA, 1176 bp, Homo Sapiens
  misc_feature (608)..(624): n is a, c, g, or t
  misc_feature (635)..(722): n is a, c, g, or t
  misc_feature (765)..(829): n is a, c, g, or t
  misc_feature (854)..(862): n is a, c, g, or t
  misc_feature (976)..(986): n is a, c, g, or t
agcgaggcctgggtggcgaattcggcacgaggaaaacagacgccgaggtgatcagtgattccaaaggctgacgctcagcagcgccacctccatgccagccaactaggctacgggatggaggggcggtctgtgaaacaccagccatcccgtgaaagctcagcttgccactgtcatgtaacagggtgggtggtggcacagcagaggctcacacttgtcaccttcagcctctagaagctccccgtggggcacgaaggctggggacagagtgtcctgaggttttgttacaaggctagactttaaaatacctttcaaagtttcatcccgcctcatgtcgcaggactgctgtgtttgtgaaagcgcgtttgtttccacaagacaagctccgtgtagtcgccagcgggtgcctggcccaggagctgccctgtggagccagcgttgtccccgagctgctcgcctgtggccgtggctccttttctgaggctcctgactccattcttgcagattctggtggatcaggagcttacattctaaatgctacatagaggtgttgaagaaaatttcataggttctgtaatagtggatgggattaaaagaaaaaatgttaaatnnnnnnnnnnnnnnnnnggctgggtgcnnnnnnnnnnnnnnnnnnnnnnnnnnnnnnnnnnnnnnnnnnnnnnnnnnnnnnnnnnnnnnnnnnnnnnnnnnnnnnnnnnnnnnnngcaacacagcgagtccctgtgtctagcaaaaaaaaccatgggnnnnnnnnnnnnnnnnnnnnnnnnnnnnnnnnnnnnnnnnnnnnnnnnnnnnnnnnnnnnnnnnnatttgatgggttgtgagaagccaannnnnnnnnaaaaaaggggggtgtaaagcagcttcccctgacagggccgtgggctgcccccgttagtgggctatgtctgtgccacagcgacagggaaggagggcttcggagctttcccttgtnnnnnnnnnnnctttcttcccttgaagatgcttaaccaaaattgggaaccccaaaagtttccccttagggaaggtttttgggaaaagaaaaaagggcctttttaaggaattaacctagggggtgaaatgggagtgtgattttaaccctctttaaaatgattggggggcaaaacaaggtttggtggggggccctcttgtgaa

SEQ ID NO: 451821 - DNA, 1139 bp, Homo Sapiens
  misc_feature (31)..(31): n is a, c, g, or t
  misc_feature (91)..(91): n is a, c, g, or t
  misc_feature (130)..(130): n is a, c, g, or t
atggcactgcctctaacctcccctctgtccncaaaaaaaccccacaaaaatgtgaatgtttgccaggcctgggaatgcctttggctggaanctgcctggaggaaaggcaaggccgtgctgccacaacagncccaggccgctctgacctgaagggttcccatttggttcaccatcgacagtcgggattggatggatgatggcaagtttcgaagcgatatctgactagtagaagagcgccgacaaggcacaaacccagtggtggacatccggagggatgaatgccggctgctatagcagtaggaagactggctggctactgaggcccgggcaggagactgtctgaccaggcccgactgcacagagtgagagctgtggctagtgcctagtgttggaggataagatgtgacaggtgggtggagtccagttcctgatccctgcccaggatttccaatgcttccctgggtcacgttgctgtggggattgttggcagttgttgcattgttaccagtgcaggaagtcccacctccagtatcagaatcttcaatattgccaccactgttacatccagctccgcaacctttcctaagcctgtgccaggttgacactatgaagttcctgatatttcccaagctgataggacccccaagaatgtctttaagctgttcgtggctgtcagagtaagaagttgtcaggggtgagacaaagattgggtagccaataggttgatcacaagatgagtttatcatgtttctcagggcttgctttgcattttggatgctacctctctctgggttacggttacgtagaaaaacaagctcctgctgttgccctgcccaaagacctcggacacattccttattcactttaatgaccctgaagctcaggtagcgtctgttgagcatgatgattttatattcattggtgccatcatccatgacatgccgcagagcaagcaaggagggagagttggcaagtactgcactccgccatgcagggtccccttcatgggctattacgaggttcttctcatgagatactatggcttcatagagcacagtagggtcatcatattcatctggagaagtaaaatgatcctgatgaagtttaatggacatacggaatcccgggaattccggacc

SEQ ID NO: 451822 - DNA, 1145 bp, Homo Sapiens
  misc_feature (213)..(213): n is a, c, g, or t
  misc_feature (224)..(224): n is a, c, g, or t
  misc_feature (868)..(868): n is a, c, g, or t
tcttccagaattttgtttgggagtcttgttccgcaaaagcttgctgggctttcaagatcccggccctttcttgcggttaagggaatgcagaagttccccaacgcgggcaaaatttcctggttgccagtaaactctgaaaaggtctccctcccattcggaaatcaaggttgattttgaatcctttcccccggacttttccccttttccaaaagngggctcagggnccagggagggcgattgtgcttaacaaatacgggcaggggccagatcataggtgaagttctgaaatttcaccccatcaaatggtgtaatgtcggtaaaagaggctagtttcctccagggaaaccagtgccagaaagcaagtctatgatataactgtaaaagtaaatgagtccagaacttgcttactggatagactgtacattgtttaatccatgtctttggaaaggaatgagcacgaagctgctgttggtgatcttgtatttcgtgagtaagactgggaggaaaaccagcataaagatgatcagaaatatcaccaaattcagcaacaccaggaatctcaagaaggagaaataggactgaatcccagtgccaaatttcccttctatgctgcggatggtcctcccgccacagctccaggtgggtcgtcatctctcgagccttctctaggaacctcttccaagacttgctgctataccgcttccaactggtcccattcggagagatacttcatttgtgtctcttgaatgtcccttagtctccgcttctcagagatgttcagtgcataatttcgaagaggaatggctgctgaggttttcagcgattctgtcctccagctgggagctgtaagagtcggttggctttagcnaaagttccgctttgcttgtcccgggaatggacagtcgttctcctacgtgcaatggaccggtagcttggcaattcttggaggaagttcacaggtggagaagagaagcaactggagtctagagagaggttctctggatggaccgcctgctgccggctgggcctgccgggctggagcgcactgccgctggactcgctcatggccgcgccccgcgctcctcagaggctgccgaggaccctctccagccgccgccgccgccgcatcccgggaattccggacc

SEQ ID NO: 451823 - DNA, 1590 bp, Homo Sapiens
gcatcatgagtagaaagttttattgcaaggccagtgacaagaaacagcatagaaaccataccaattttggtagcactatagatgttctcaataggaaatatttctcctagtccatataggagaaccttggccagggctggaaccagctgggtggtagtgatcagaacattcacacaattctttctggactggatgagaagtaaggactttaatgcagttcctaaccaggaatctgttaaaacttcaatttctgctcttaatctctgcagtgcttccttcctctggggactgaggagaccacccacgttgcttttatgcttatcatagatttctctcactttccggtagcggaaagctagtttcctcatccagtccacacctccctgaacacccacagatgaaccatggctgccactacctcctgagccactgaaaccatctgttgagaaactgtagttgctcaagtcttggccattgtcatcagaagccacatcttccacatgtacctggtcacactcctctaagtcattgaaaaatagatgagtatcagccacttcaaaaatcatttcttccattgttaaacctgagccaatcactactgttgggtcctttccatatttctgggcataggatccagtaagaagtgagtggaagatgatgatggtttcatccaagtcccacagaaatacccgttctaattcactgtcttgggaagaagtggcatcagctttcctcttgccccggttcttgctagtcatgtttttcctggactgatcatcagtatctttacttggtgtagtctgggacaaagatggacttgtagaagggtctccagaggaaagtctctgtgctgcaggtgcaggcgccatgacactaggcttctccgactggtatgtggttgctgctaatgtggtgctctctgcatcactgttagtctgacctgtgactccaaagctggagctggggtagcaggcctggtactgattctgaccaagaatagtataggtgggataatcctggtttgagatgctggctactgctgctgctggaatattggcaattgtagaagaagtagatatcaggctggcatttgtgcttgaagcaaaaggaggtagtccatacgtttgggttgcctgagggtagacagcatagggttagtctgctgtagtgtctggtattgagtctgtccagggtaagcagtttccgaaacaggaactgagagaatatgtgcataaggttttgcagaatacatttgtgaggtataatcattggatgagcgagggatgtaatcggtgcatgtcataatttcctctgacatgggaaggtttgaagcaaggcttgatgtttcaggcttctgatcactgacatctggattgcttacttgacttatagtttgctctcctgattcctgcatcttggcttttttcactggttgctctggtaaatcttgctcttcttccatgaggaccaatatttctttattatacttatgtgactggattgcaagtctctctcagcagttttcacaatccaaaggctgtaaaagccccacaacaggacatggagatcagatcccgggaattccggacc

SEQ ID NO: 451824 - DNA, 1104 bp, Homo Sapiens
  misc_feature (1019)..(1019): n is a, c, g, or t
  misc_feature (1024)..(1025): n is a, c, g, or t
  misc_feature (1033)..(1054): n is a, c, g, or t
actgggcccaagcggatagaaagctggtaaccagagggccagtaatgggaggggtaccctgggggggacccccttgcccaaatttcagggcctttggagggctccccacttagcccaattctatttttcaatttttttcaggcacggcaacttcggtagatttcttttttcttcccggaaattagccggatttctttggttgatggcattccaattgttcgtgaagcatcatggctagcgtctgggcatcggaatgaccacttggagagagaagatccattgagctaaaaattgtttctctgtcatcatcatcaatatcagacatttcagtgtcactttcaaaagggtggctgcttagtactccaatctgttgagttctattccactcgtgatccccaagagatttcacctttggctcatctcttcgcacacccatgcggcctctccttggtcttcttattactttagttgttctgtaatcagactggctgtccactagggatcccactgagtaccgcaactcagctgaggtgtctagatgagttcttggtattgtgggttcaattaaagagccagttctcattttcaattggtcaagttcagatctcagcttttcaatttcttctgctaatctttccttatcatgtaaagattcttcaagattctttctgaaagtttctgattcttgaattaaaacattcttttcttctagagcagccattctttcctttaagtgtagttgtaggcgttcattggattcagtcagaagtctatcaaccgtatccgataatctcttgttatgctcctcattcattttctctctttgcctagctctttgaagttcttgattcttctcttcaagttgaccctctaaatgtctcatacgttcttcaatatttccatgtctctcttcagctgcaaacatagtttttaaaaaataaactatcttcaaacaggcagctgaacagcattgcttgaaatatcccgagaattccggaccggtaccagctcgttttgtnggccnngttttgtnnnnnnnnnnnnnnnnnnnnnntaggtaaaggaaggcccaagccgcagactatctaagctcggggtgcgggg

SEQ ID NO: 451825 - DNA, 998 bp, Homo Sapiens
  misc_feature (533)..(638): n is a, c, g, or t
  misc_feature (884)..(884): n is a, c, g, or t
  misc_feature (974)..(974): n is a, c, g, or t
ggaaccgccaaagctgttgaaaaatggttttgaaggtgtatagggaaatttccaaaagagggggcccccccaattttcccggaaatggatcaaaccctaccaatgcgcggttacccaattttccggtttttaacccgcccggatggggcatttttcacggtttgtgccattggccagaatgcttaggaccaccctcaacctttgttcccagaccactcagccctgaacccccataaatgcataataggtgcgggcaaccgaagcctattttcccaaactaggcccccaaggcttgcttttttgcaaattgccgcgccaaataagcatgagtccaagtatctgcagatgaattatactgatctaaccagtgcatcagggcatcatctgagacgaccttcttatatttctttttttagatcagcataaatttctaatttgagctgcttcccagtatttggtcgataaactaagaaaagtttctttttaggattcacttctttaactaagatggcagttttcttgttgttccttannnnnnnnnnnnnnnnnnnnnnnnnnnnnnnnnnnnnnnnnnnnnnnnnnnnnnnnnnnnnnnnnnnnnnnnnnnnnnnnnnnnnnnnnnnnnnnnnnnnnnnnnngtaaaagccatcgtctggtcctgtcagctcagcccaaatcttggtagcttcctcccatgacattcccctctctacactaattgtgtataattctacgtggccagaggttgaatatcctggagtcagaaactttttaacatcacttttccgcactttttcatctccagaaccaagatctaagattcccatatcatatcttccattttttttggcattttgaacaactgcagtaagtgtgtccgcaanaatactgaaataacgcattctgctgatgcacctccatgcctaaaattctatttaagaattttcctatgttgttataatctttatcgagangtaagaattcccatcccgggaatt

SEQ ID NO: 451826 - DNA, 1106 bp, Homo Sapiens
  misc_feature (107)..(116): n is a, c, g, or t
gtttggaatttttccccgtgtttttcattcccccccagggcccttgataataaatggccaatcgcgccattttttcggccatggaatttccatcattctttaccctnnnnnnnnnntaacctggtcccttccatattgggggaacctggcaggtaccgggcagggagcgttcctggctgaccaggactcggaatttcccccatggcctggtcccatgttcccgcgaggcttttgtggtaaacctcccgggccccgggttcacggtgagcgtgagggaccaggcgctcttcttcagcagcggggtgtccaggctgaccggcagtttggcgcaggtggagcacttgacgtcgttgttgctccgggaggccttcaccgcctgctcgctgatggtgttgtaggcctccaggaagtactgtgaggccgagcggtcggggcacctgcccatggtcatcacgcccgagggggcgtggtagatgcacatgtcaccatccaggttgtcgtccgagctccaccagcccggggaggtgctgggccgggccttgggctccgcgcgccgctccttgctcttgctgcgtttgccatagcgcgccgcctgcgcctcgtcagggctggccttgcccccgttgacgctgcccttggacggcccctccagggagtgcgacttggtgaagagcttctggaccgagtgcaccaggtggcggatgcggccggggctgtcgctgcggtgctccacggccgtgcgcttgtactgcagggtgtgatagccatcgcggctgagtggcagctgccgctcgaactggtccagcaggttggcggggatgcggttcgccttggtggccagggtgcggggcaccagggcacactcgtccttcagctcttgctgcgaggtgtagtgcctgcgggggaaggtgctgctggccagcgggtcgctgaaggggcccacgcactcagcctggaaggagttccgctgggtgtagtatgggtggtctgcgggggtggtgctccactgggctcagcaggtagggcttgcggtcggagtggtgcgacagcgagtcacaggccgagtcgcaggtgaccccgtggtgatatcccgggaattccggacc

SEQ ID NO: 451827 - DNA, 1276 bp, Homo Sapiens
  misc_feature (475)..(487): n is a, c, g, or t
gcggaaggggtggtgcgatatgacgagttgtcagtggggactgcgtatgcagcccatatatcttcgtcagagtggcaaatcgctacacacacaagagtcacagacagatcgagacaagagtggttgaacggcaagcggacgcgggacgcatatatagatgaaaacaggcgaggcggcgccatgcggtccgcgggaagatgtaggagaggcggacgccactgtagcgcgagggcgggggtaggttctttgacaattcatagagcgacatttgggtgggtgtaaacaaaccccggtttgggacgggcgcggtttattaaaagtgttggggcgcggtcggaccggggacagggccagtccgcgcgggggctttaaatccgtacattttttgcgctgggggaagagcacttagttggggggggtcttccctttagccttcgaaaagggggccacggcctcgggttacacgggttacatnnnnnnnnnnnnnggaccggccgttcaagatccccacgcccttgaccggttccacctgtttggcggacccaaaggctccaggcgctgggtggttcggtcgtgggtagctctgcagggccagggctgcccgctgttccaccagggccaccatctcggccacagagagcaggtccacgtcctcaccggctgaggcggggccctcctcagcagcaggggggccctcccggccccctgggtcaggaggagccttggtggggtcaagacagcgcctccgccgcttggccttggagctatcgctgccccagtgccccttgaccttcatggagctggcccggctgcccccaccacactggtgggccacaaagaaggccaccttctcctttgtattcccgggcttgatgacataccacgtgtccaggaggactcgaccctcatcaccagcagctgctgctgagaggagcggagccggctgggaggcagggacctcagtggccaaggcgggtggtgtgttctctgagtgggcaggcccatggtctggctcggccccgccaccaggctcagggcaggctgatggcttgagggccgcagaaggcgggcgtggctggttctgtgagtaggtgccaaagggccgggggcaccatagctggaagggcaggaggctcccacggtccatgctgggggatgatggcagacaggctgggcttcagcgcatctcaggacctaggtggtggtgggaggctccacatgccaccatcgccgcgcgctgcatctccctcggccctcgtcgagaattcgccaccca

SEQ ID NO: 451828 - DNA, 1054 bp, Homo Sapiens
caggtttccctgggctttttcaaacacacccccccgtgaagtttcctttcaaccccaaatctttttttcctggggggcccttttcgggtactttggaccacgtaccccttcagagttctgccaggtggaaccctttttttgcctggcctttaattaattggagccagcctccctttctgacaattccaaatttttgtcttcccaagagtcattttcggaatattctaccccattagggttctggtagcctgctcatcaagggtaagggattttttaaaattttcgataccaggaatggtcttaatgaaggattccttgttcaacatgctttccatgatggcatttagttctttttggatatctctcagggagagaaggtgtgtcaccttcaacaatttttaaaacaatggataagaaattggagccagcgaatgcatgattcatgcagcacatctcatacaaaatgcatgccagtgaccagatgtccgactttgtgtcatagccttggtgtttcagagcctcaggactcatataatggggagttccagttaaagttgtggccaggtcacaggatcccattagaagtcgagaaactccaaaatctcctaactagttgcatgcttttattccttccttccttccttccccaagtacaccgtatatgatgattagatgatccagtagctgttatgaggagaggtacagttctgaagaacaattttaaggagattatttttcagaaatacattctttgcctttaagtctcgatgaagtatcctcctctcatgcatgtagtcaactcccagcagcagctggataacccattctattatttgattttctggaaagatttttccagcttgtttatattcctgaattttatcgtccagatctcggccctactcctagatggagctgcccaggaaaatcagagggccccgatgggacccaccactctgaaaacaatgcttagttccttcaatcagcagcaatcccagcaatgcaaaccactgaagacagtcctgagggtgtgacatcccgggaattccggacc

SEQ ID NO: 451829 - DNA, 451 bp, Homo Sapiens
  misc_feature (49)..(49): n is a, c, g, or t
tgatgcgaggtgatctagaggatcccagttcgacggagactctcagggnagagaaggtgtgtcaccttcaacaatttttaaaacaatggataagaaattggagccagcgaatgcatgattcatgcagcacatctcatacaaaatgcatgccagtgaccagatgtccgactttgtgtcatagccttggtgtttcagagcctcaggactcatataatggggagttccagttaaagttgtggccaggtcacaggatcccattagaagtcgagaaactccaaaatctccaattttaaggagattatttttcagaaatacattctttgactttaagtctcgatgaagtatcctcctctcatgcatgtagtcaactcccagcagcagctggataaaccattctattatttgattttctggaaagatttttccagcttgtttatattcctgaatttta

SEQ ID NO: 451830 - DNA, 979 bp, Homo Sapiens
tcattaagaaaacaaatccagaatttattccaaaaggtaaaaaaggtgaaagaagatacgtaacatgagtagtatggttgttggaagcattttttcgtattttcacttcaaagttttagaactttacactttctttgaacatgtactgtaaaataaaacaatgcaaaaattgtgttttaaatatcaaattagccatacttgattcaaattatacctgtatacaaggaaacactcattggttcacactgttcttttctctccttcccaaaggatgtgctgggtggcgtcctgatcaccgcactcctcatcgtcctcacctaccctgcctggaccttcatcgactgcctggactcggccagccccctcttccccgtgtgtgtcatagttgtgccattcttcctgtgttacaattaccctgtttctgattactacagcccaacccgggcggacaccaccaccattctggctgccggggctggagtgaccataggattctggatcaaccatttcttccagcttgtatccaagcccgctgaatctctccctgttattcagaacatccgaccgctcaccacctacatgttagttttgggtctgaccaaatttgcagtgggaattgtgttgatcctcttggttcgtcagcttgtacaaaatctctcactgcaagtattatactcatggttcaaggtggtcaccaggaacaaggaggccaggcggagactggagattgaagtgccttacaagtttgttacctacacatctgttggcatctgcgctacaacctttgtgccgatgcttcacaggtttctgggattaccctgagtctcaaacagttggaaactagcccactggacatgaaagccaagacataggaaagttattggtaggcaaatcttgacaacttatttttctttaacaacaacaaaaagtcatacggctgtcttgctactaccagataaatgatgctgctgtgcaaaaa

SEQ ID NO: 451831 - DNA, 1114 bp, Homo Sapiens
tatctcagaagatcattgaaaataatccacctgaatagtatgcaggagctggaaatttgctatgtgtcctggccacatctgataagaaagcttcattgttacctgaaggagatgaagaatcttcgcaaactcatttttctccaggtgccatccttacacgtcaattaccgcgaggaatgctcagtcgccaaaatcagctctatgttcctcaggctgaaacacctccagcttcttaaaatgaatatggtcaccttccacagagggcacctgggacagctgatcaggtgcctctagaaccccttggagaacttggaattaacttgcggctacctattggaagaggacttgaagtgtctctaccagtacccaagcctcgcttacccaaagcatctgaatctcagctacatgctgcagttctgtatcagtcttgaacccctcggagctctgctggagaaagtttctgccaacacgagggtctcgagagaggcagcaattactcttaagaccctcatcttggagggctgtcagatccactactcccaactcagtgccatcctgcctggcctgagccgctgctcccagctcaccaccttctactttggcagcaattgcatgtctattgacgccctgaaggacctgtctgtgccacaccagtgggctgagcaagttaagcctggagacgtatcctgcccctgaggagagtttgaattccttggttcgtgtcaattgggagatcttcaccccacttcgggctgagctgatgtgtacactgagggaagtcaggcagcccaagaggatcttcattggccccaccccctgccccttcctgtgcctcatcaccgtctggagaactggaagctccatctttgctgctagagaaggcgtgcccagtgggggtagagaaatcccaagttctcttccaggcacttgggacactaaaaatctactatgtaaggtccaaaccaatttttcccctttcccaattaattccattttttaataaattccaaccattttttattaaagaacaatttgaaaaccggggttttcccttggggttggctcccagctggttctcaaacgggtggggctttagggggatccctcctggccc

SEQ ID NO: 451832 - DNA, 929 bp, Homo Sapiens
  misc_feature (365)..(471): n is a, c, g, or t
  misc_feature (524)..(606): n is a, c, g, or t
  misc_feature (649)..(658): n is a, c, g, or t
  misc_feature (672)..(681): n is a, c, g, or t
  misc_feature (841)..(849): n is a, c, g, or t
gactggcccgggagatccgtgccctggagataagcaaggagcagctgctccccctgaagaggctggtgcgcgccaagttgcgttaggtggagcggctgctgcactcgccgcctgaggtcgagggcgccatggcggtgaatgacgggctgaaggctgatctggagatattcggggagcaggtccggatcgcccccgaggtcggggccggcgagggagaggccggacctgagctcccccgcgctcgcgacgaggaggatccggagccgccggtggctgcccctgacgccctctaggccagcaggacccgcccggtcccgaccttccctcgagacccgccaagaaataaaggcgatgatttccgaccnnnnnnnnnnnnnnnnnnnnnnnnnnnnnnnnnnnnnnnnnnnnnnnnnnnnnnnnnnnnnnnnnnnnnnnnnnnnnnnnnnnnnnnnnnnnnnnnnnnnnnnnnnnggggggggcccccctaaaaattcccccgggggggcccagttttaccgaccccnnnnnnnnnnnnnnnnnnnnnnnnnnnnnnnnnnnnnnnnnnnnnnnnnnnnnnnnnnnnnnnnnnnnnnnnnnnnnnnnnnnaaaaatgcccatttggggatttttggaaagacccccttttttnnnnnnnnnncaatttgggcgaannnnnnnnnnaaggttttacggccttgaggggaaaataaccatttttccggggtatatggggggtaaaaaaccccccaacaatttttcgggggttgaaaaatttttctttcccggggtgtgttttttgggaaaattttttcccccggggcgcccggggggttccaatttnnnnnnnnnatttttaaaaaacaccgccccccgggggttttttttggggcgccctgaaacccccacagggggggtgtgtggattaaaaa

SEQ ID NO: 451833 - DNA, 707 bp, Homo Sapiens
atgcgaggtcgtctagaggatccctcacgccatgtacacaaggtccctgaccttacaagtggcaggtaccggagacctgcaccttatatcttagtcccatccagtcatcaagcccatgaacatcaagcatgtacatgaaaagccctatccgtatcagaaatgggtatttagaataaggcttataacaccctgacctcagggcttagtgcttgggagcaggcccaacttactcattcatttaatcaaaaacattaaataagcttttattagatgctgggtcataagcctcaatgtaccatttacctgcagactttcttccattgctatcacaggggcctacttctttacatccaggatatgcccaagctcttagttttcacttcagttatcaataagatttcctgtgattctttcacattttcaacagtaaagttgaaccagactcggaagcgtggattacaggtgtccggcctaatgaacagatcatactcaaactcagagacctggtccacccggcccaggttaccactttcaaagcaagcatcaaagataagatgtcctttcttgggctgtccaccatagccagttggaagcactatatatttgctcacattccctccaatggcatcatcatttcccatatcattgcctgcctcagcgccgactggctattgtgacatggcgtgagggatcctctagaacgccac

SEQ ID NO: 451834 - DNA, 1099 bp, Homo Sapiens
  misc_feature (27)..(27): n is a, c, g, or t
  misc_feature (36)..(36): n is a, c, g, or t
  misc_feature (45)..(45): n is a, c, g, or t
  misc_feature (60)..(60): n is a, c, g, or t
  misc_feature (76)..(76): n is a, c, g, or t
  misc_feature (101)..(101): n is a, c, g, or t
  misc_feature (736)..(787): n is a, c, g, or t
  misc_feature (914)..(937): n is a, c, g, or t
aaatctgccaattaaaaaaattctggntccaatccngccaaaaanaacccaaggtgccgnttcgggaaacccgctnaaaagctacggtgtcaactcaaccnagcgactgcgaaagatccaatccttgtggccaatgcggtcgccccaggcaacagggggtccagggtgggcagctggtagatggcccaggctgttggggttttcgcccgccggtggccagaagcgtcttggagggattcagctcgatggcatggatgccgtcagccctgttggtcctgggccagcccggcctccttgtcccgcatgagggggatgcgcgtgatgtggcctgactgcacgtccaccacaaacagcgtattacacttggtgccgcacaccacctgcctggcgttcagccactgtgacgcgaacaccttgttgagggtgcccagctccagttggcgctccgtcagcagctcgggcagcctctgtaccgcgtagccccgcagctcgccctggaagccctggagcctggcggggccccgcgctcctacctcgcgggccttgagatagtgcgccatcgtgcgatgcgtcgccggccgcttctgcttcttgggtagcagcggcccctctccgtccgctgcggctaagccctgcgacggcgagctctcggctcccgcctcggccgcgggcgctttccgtttcctgctacctgtttgctgctgggccatggtgggcggcgggcgatctgcagcannnnnnnnnnnnnnnnnnnnnnnnnnnnnnnnnnnnnnnnnnnnnnnnnnnntggcacccgtgttggccgtggcggcggtggtggggatggctgcgcttccgcgtcagccgagagctcaggatctctaagaccaagaagctggtgcgatcgcgggcgcccagacttcagtgtgaggctnnnnnnnnnnnnnnnnnnnnnnnntggtcctggccagagatgcgcggcctgacgtagcagagccggggcgaagcgcggcggcaagggcggcagtggcggtgcagacctaggcgatccgaagaattccggaccggtaccaggtgggaaaagagggggaaagaggagggggagaagggagcggacgag

SEQ ID NO: 451835 - DNA, 1105 bp, Homo Sapiens
atcaggccaaatcggccgagctcgaattcgtcgagagcggatctacggggcggcaggaggcccgaagcaagatggcggtgaatcagagccacaccgagaaccgccgcggagccctcatccctaacggtgaaagtctcttgaagcggtctccgaatgtggagctctccttcccacagcgatcagaaggctcaaatgtctttagtggtagaaagacaggaacattgtttctcacttcataccgggtgattttcataacttcatgctccatcagtgatcccatgttgtcttttatgatgccatttgatctgatgacgaacctcactgttgaacaaccagtatttgctgcaaacttcattaagggaactattcaggcagctccatatggtggctgggaaggacaagctacttttaaattagtcttcagaaatggaggtgccattgaatttgcccagttgatggtgaaagctgcctctgctgctgcccgaggatttccacttagaaccttaaatgactggttcagctctatgggaatttatgtaattactggggaagggaatatgtgcactccacagatgccttgttcagttattgtctatggagccccacctgcaggatatggagccccacctcccggatacggagccccacctgcaggatatggagcccaacccgtaggaaatgaaggcccgcctgtgggatacagagcctcacctgtgcgatatggagccccacctcttggatacggagccccacctgcaggatatggagcccccacctctaggatatggagccccacctcttggatatggaaccccacctctcggatatggagccccacctctcggatatgggagcccacctgcaggaaatgaaggcccgcctgcgggatacagagcctcacctgctggatcaggagccaggcctccgaaatctacagcaggcccaggctccctgaaacgaaggcttctcttccctctgcctcctcttctcaggtccattcttaaccttctaagatgtaaacccttgaagactccccaagcaagaaggtaccctaaatttgaaagtcggggaataggaggaccacctccgctttaaagccattgat

SEQ ID NO: 451836 - DNA, 1073 bp, Homo Sapiens
ggattcccgggatggaggctatgcgcggaacgatgcaggggagaagctgccctctgtcatggcgggagttccggcgcggaggggccagtcctccccgccccccgccccaccaatctgcctacggcggcggacgcgactctcgacggcctccgaggagacggtgcagaaccgggtgtcactcgagaaggtgcttggcatcacagcccagaacagcagtggcctaacctgtgaccccggcacaggccatgtggcctacctggcaggaatgtggagaatggggcctgcctctgagagctgtggagaggattccatagccccctctctgtctagaacagttcctggcatgtactgtgtggtggtgattttggaccccaaggagaacaagcagcagcacatctttaacaccgccaggaagtctctcagtgctctggccttctcccctgatgggaagtacatagtgacaggggagaatgggcataggcctgctgtgcgcatctgggatgtggaggagaagaatcaggtggcggagatgctaggccacaagtatggtgtggcgtgtgtggccttctcacccaatatgaagcacatcgtgtccatgggctaccaacatgacatggtgctcaacgtctgggactggaagaaagacatcgtagtggcctccaacaaggtatcttgtagagtcattgccctctccttctcagaggacagcagctattttgtcactgttgggaaccgccatggtgaggttctggttcttggaagtctccactgagacaaaggtgacgagcacagtgccccttgtagggcgctcgggcatcctgggcgagctgcacaacaacatcttcctgtggtgtggcctgccggtcggggccggatggggggcagtaaccttctgtgtgtcctactcgggcctcctctgcagttcatggaaaaaaagggggcttggaaaaaggggatcaaccttgaagggtcccctgggctcccggccccccgggggcccccaggagctcaccttctgggggctgggcacaaaatggggtatatcccccatttttcccggggcccataagccg

SEQ ID NO: 451837 - DNA, 1079 bp, Homo Sapiens
  misc_feature (104)..(104): n is a, c, g, or t
  misc_feature (110)..(110): n is a, c, g, or t
  misc_feature (112)..(112): n is a, c, g, or t
  misc_feature (140)..(140): n is a, c, g, or t
tttggtccggattcttaaaatccatttaggggttgtttaaaaatacccttgatgggcaaattctgttaggtaataactttaactattttccctttttcatgctnccatgntnccttccatatgcatgaaaggcaaccggntccttttcctgtactaatacagccagtgatggtctccaacattccagagttggccattttattacataagtaaacgtgtcttaggatcaactgctttttctgctgtagaatgctcttttttctcatgtaggcgggcacttcgacgttcttctgagtaggcatgttgttttaaaggcattgaaaacatggtttgatagttttaaatccattccaattccatctcctacctgaaactcaggtgcaaaattttccattcttgctgtgttctttctcccacatactacttcatcatgtttggtggtgatatcttttccttttccaataaagccctttttaggagtgggaaccggttttgctggtctgtagggatcatcacgagtatcctgccagtcaacctcatcttcagagctatcgctgtcttcataaggatgcacttttcgataattttcaaaggaaatggaaactttgctatctccattgaattttttttcttcacgcctaagctgtgtatcatattctctgtcatattccatctgtagcatctgagccagcataaggtcactggaagtatcaatgttttctccagtaataaatggtccttcagcaacagcaacttcaggaaaaacggcagcttcttcttctaactgcaattctttggccagctgttcactcattacatcagccaaagaacaagatattgtattttgaggaatagcccatggacacttgctgggtccccaggccgctgccgtcccgggctcaggcgatgccactcctaccagatccattcgggaatgaaggcagagacaagaacagagcagagaggtggcaggacgggcagcaggctccgccgaggagacaggcgggacacgggcgactggctgctgatgccggagtggaggtgacagatggcggcgacgatcccgggaattccggacc

SEQ ID NO: 451838 - DNA, 611 bp, Homo Sapiens
  misc_feature (278)..(278): n is a, c, g, or t
aagaggatggttttagggcccttttcccccaataggttgctttggggattggtagcttcttttggatggatccaggatcttcttaaaaagaccccctgtatcctgcaaaccaacaatccccttaaactgttctgtccatgcagatttagttatgtgggtatgggcataggaggaaatatcattttactttatctcccaagatgtgggaaaccaaatatctatctccttatctaaagtggaaaatcatgggacagaggatgtgggcaccaccagtgaangaaacccaaatgccccacatactctgccatacataccattcccagacatgagtcactctttcagcccccagagaaacatggaaaggagccccagggttccaagagactgctctgagagttgcaaattcctcacgcatggctctactacacaagccctcagacatatgtatgaaacttaaggagtccaaagcagctcttacatgaagtggtggttctttgtagcagacgaccttaaggaaaggaaacagtactacagtctactttccactgtcctataaacagttcagtaagtgaattcaccagacctgtggctcagtttgcgggttcctcata

SEQ ID NO: 451839 - DNA, 1073 bp, Homo Sapiens
  misc_feature (144)..(160): n is a, c, g, or t
  misc_feature (240)..(302): n is a, c, g, or t
  misc_feature (320)..(335): n is a, c, g, or t
ttggcacccgggtggctcccccccctgtgtaattctccagccccttttgcggaggttcgggggccgggttgaatccacccgaggttcaggggtttggaggaccagccttggccaacaaggggagaaacccccctcttccccttnnnnnnnnnnnnnnnnnttaggcagattcttggtggccgcgcggcttgtaatccccagctactagggagggctgaggcagggagaatcgcttgaacnnnnnnnnnnnnnnnnnnnnnnnnnnnnnnnnnnnnnnnnnnnnnnnnnnnnnnnnnnnnnnngaacgacgctccgtctcnnnnnnnnnnnnnnnnttgcttggcaaaaaagatctgtatcacttaaaactccctccaaaagtgaagggtagccatgtccctcatcgcgagtcacctgggttaaattactaatctgtaaatgttaaatttcgccaatcttcttagtgtttcaattcggagagtcatgttgtgaaatgccaatctcttagtccaccttttaaaaaactttgcaggggttctccaaggccctcagaataaagtccagattcctttgcagagctaacaggatacaggagactccctgctccaggaaacttctaggggcttctctcctggggcctgttccctggttttgggagcgctcgggcgaccgcgagccagagcagcgtctcgctcatctcggacccaggcctggggctccactgacgccgacggagccgggctgctgcgggagtggagccctgggggaccagaaggggctttcacttcgctcctgggcctcccgagttccaggctcgggctagccccgcgcagggaggcgagcgggcccggctccccagaggccgaggccggcgcccgtgctccttcagctcggcctctctcccccgacataggcgctccacatgcttcatttccaaaattctcagcaaaactccgcgggagaccctggtcacatgcctatgcggaaaaggcggggtacaggcctcggaggccggacccaaccagtcagggaaagaaagagggcagaagccgcaggctgatgcagggaattcc

SEQ ID NO: 451840 - DNA, 1022 bp, Homo Sapiens
  misc_feature (673)..(673): n is a, c, g, or t
  misc_feature (914)..(914): n is a, c, g, or t
ggtgcgccgacaaggtgcgggtctcgtgactcggcggtcaggagcgggccctcccttaggttctgcgttagacctgcatcttagcaatgtgaatattgcatccctagagaaggacctggaagagcaagacggccacgacctgggagcagcaggtcccaggtcgctggccggctctgcacctgtcgccatccccggctccctgcccagagcaccatcgctacactcgccatcctctgcgtccacctcgccgctcggttcgctgtcccagcccctcccagggccggtgggctcctcagccatgacgcctccccagcagccgccacccctgcgttcagagccgggcacactgggctctgcagcctcatcctacagccccctaggtttgaacggtgtccccgggagcatctgggactttgtttccggcagcttctcccccagcccctcccccatcctgagtgccggccccccatcctcttcgagtgcaagtccaaacggagctgagctggcccgggtcaggcggcagctggacgaggccaagaggaagatccggcagtgggaggagtcctggcagcaggtgaagcaggtctgcgatgcctggcagcgagaggcgcaggaggccaaggagcgtgcccgtgtggccgatagcgaccggcagctggcgctgcagaaaaangaggaggtggaggcacaggtgaagcagctgcaggaggagctggagggcctgggcgtagcctccacactgccggggctgcggggctgtggggacatcggcaccatttccctgcccgaactgcactcgctgcagagtcagctgcgcctggacctggaggcggtggacggggtgatcttccagctccgcggcaagcagtggggtgggcctgccgggagcgggcccaccggggctggtcctgcgnccctggccagcaccacattcctctggggaacccgggtggcggccacccgcaacctgaaagggccccctacttgcaagggcccagcccccctggaggtgggggaacctc

SEQ ID NO: 451841 - DNA, 757 bp, Homo Sapiens
acacaagtgccctgttccggaggctggtgggtgggggttctagcaggctcctctcctgcgcagggggtctggggctgcggcctcactgactgccttggctcctcctctgtgcgctggtcctctgctgctctttatggaaaatgtttcctgaagatcttccaatattttgaaggatttggtccagaatggatagattttcatactgagtgttctttgaattcttttctttactggaaacactcttctcactgccaggagacacctgtggcccacgataattctcagaaggatcgccatggagatttgcattagcattggcttcatcattggaaattttgtcctcaatgccaggagagaattgtaaattctctaataattcatggtaattctcagaaccaccagcttgataattctcatcaataccagcatgtaacggtgttgataatgttgatgctgtacttggcatttcgctcggtgttgttttattcagatccaaaatctcctggaccagaatttcatctaataattcagacatatcctcctgttttgaactgaatggtatttcagtaggtgaacctggaatcacggttctcggccggagctcagtttcttgccaacagcacagcatgaggacaaagcagagggtcccgtctccttggctcactgccatgctcccatcccgggaatctcggaccggttcacagcgggttacgagagacgaagaacacgtagcaccgacccaagggcggggcgtcgt

SEQ ID NO: 451842 - DNA, 1093 bp, Homo Sapiens
ctttaagcttagaaaaagaaacttttttatttaatttaattaggaaaaacccttgttaagggggatcaggaaacagggcccaagagccaagaaaacccgaggccggttttgcatcgacttcaggtgataaaggggaggctcccccaccctgtactaaatgttttttccctggttatatttcaaatggttggtttccccaagctgttaatgctatttctcccacaagggtcaatctattctcttagaaacagaccatttcacctatttattgtgaagtgttatttaagcatatttgagaattagtatattttatttaaaagactgataaacagctaaaggacaatattcacaaatcatttacctatcaggcacccttggagcaaaacaggatgtagtagaatgaatacacagaatgcaatcaggcccaagttcctggactttagcctccactgctttcaggtctgtacgcagctcgtcaccttccaagacattttctatcaccagcaggctcaaaacctgcagtgatcatggatattaaagcaaggacttctggtctattcgtggccatataatatactttgcctttggtcttttgtgtcgtaatgttaagaaacacagagttagactcataccggttgccaataggtactacaaagcagttggactactgtagtggacaccacgccagctttataatgtgccaggaccaaagaacttggtaattttgttcaaaaggctagagcctgcagcttttggttgcacagcagaaatatcaccggatcgtccaatgccatgaatgaacctgtaatgacgacgagcaaccagtgcggatgccactctcccttccctttctcccacaccacaattgcctaagaaattgttgctgtccatgattgcaagttcatgtaaaaagagttcaagtgtactttcatcccagccattctctggacacttgcccttctccagaagcagccgtatgaggtgctcatgcgagcggcgggcctcacagccctgccgcacgtaagccggcgacaccagccgctctcccgccgcgaagctctcgcggttcatgacatccagggaattccggacc

SEQ ID NO: 451843 - DNA, 990 bp, Homo Sapiens
ccccaaagtaggggcccaaaggtgggccaaccggttatttcttcaaaaggaaatatttctgccggtatcccgggctttttaatccccattttatgtagcttttcgtcccctgaaaaaaatcctttcctttccattttcccaccagaaaaaagggctaatccccatgggcaggggagggaggcttcatgatttgtggcccgcaactacaatcccaacatcacttaaatgacccattactgatgaacaaccttggcttccattgagaatcccagtcacttcccatcctttttagcatttgtttttattccctgtaagtcacttccagctcccaggctctgtcattgctattgcaccaatacatttgcctgcagtcatctggggaataaagtgcttaatctgttcttctgagccatggtttgtaatataggacatgacaatacctgaatgaatactaaaacctgggcctgaacaatttgaataagcttgctcctcccagacaatagctgcggagtacagatcccctccaattccaccaagatgctctgcaatattgacaccaagcagtccttgttttccagctttttcccaaacctccctacttacttctccagctttctcccattctgagtgatgaggaatcacttcttcttggaaaaacttccttacacttttccggaaaatgtcatgctctggagaaaagattcttcgaattcctatatctgttaattttttagcagaaggagtttctagacgttcttcccctccggaatgagaacatcgcgcggcgggcagctggcgcggcgcacggtggccgcccaggacgcgtagggaccctcggagaaggcgtgcggccatgtccgaaacacaggggcggcggggcgacggaggcgactctgcggctactcggcgactcggggcagggtccccgggagggaggacgatcagctgaggcgtccacctgtgatcccgagaatccggaccggtccagcc

SEQ ID NO: 451844 - DNA, 1055 bp, Homo Sapiens
  misc_feature (117)..(139): n is a, c, g, or t
  misc_feature (277)..(277): n is a, c, g, or t
  misc_feature (911)..(962): n is a, c, g, or t
ggagatgggagtttccgctccatttttgccccagggctgggagtggcattgggcaccattttacaggttcaattgcactttcaggcctggggcgacttgagccgagaactgtccccnnnnnnnnnnnnnnnnnnnnnnntcctaaatttatgggcaatattatccaaagtttcttaccttaagaatcatatacaatttttaagccaccaaagcatactttcttcaaaaagttacatccaaaaatattaaatgtccaatctcatttttcagttcattntaagtctcaatactgaaatctccgtataaaaggaataataaatgctttgaaagacctgacaattaccactaaactcctctcaaatcccagtgtcctggggcagtagcccatgtgcttaagaagtccaatgacagcaggatagtggtcagggagacaggagtttaatcaggaggtgctccccagaatgttcatggaaagaacagatggattcacagtggaaaaaaagcaaatggataaataagccctttccttctttcctcaatattactaactagaaagcaggaaaatcctattaggcagagaaaaacccagatatgccctggagatacaggtaaggagtctgtgttctctcagctgtctcacaggttaatgaatcagatatatttatgacccatgctaggctccaaagtaagattcaggtactctgtatgccagtaaaggcttcaaggatactccagggtttagctagtataaagaataaaggacaaagaaaatgccagacaaccagcctgagcaacatagcaagatcatgttttcaccaaaaaaagtttttttaattatctgggcctgatggttcatgcctgtagacccagctacttgggaggctaaaaggggagggaacattggagtccannnnnnnnnnnnnnnnnnnnnnnnnnnnnnnnnnnnnnnnnnnnnnnnnnnnaagcaagaccttgtctcaaaaaacaacaaaaagtaaacgtcagatagaatcctcaattttagcaacaaaccctcatgctagatcccgggaatt

SEQ ID NO: 451845 - DNA, 1120 bp, Homo Sapiens
agtaggtatacatcgacgataatatgaataggagtaacctgttgttgtgatgcttcaagcaaaataagtacaagttaaacaaggcttgttacaaatgagcaaaaatgtttaaatgtttcttcatagttaacactgaccaaagtttcttcaaaaatcaatattgacaacagatttctaaaagtagtttttcacactttctctttgatacaatcgatggcttaatctaccttaatttctttctttaaatagcctcactattaagaacttaggtttttaaaatactctctatcgtatacatctttacacacgctgcagcgccaagactccaatggaataaggaaaaagacttcactcccctcagttattcatactatggactacttatccttttgacctataagaaggaaaagtcttggagaaatagattcctaacagacttaaccaataagtctagaagttccacaagacagcaagtcatctattcctaaagagtttatcattggaatgatcaaatgcacattctttaagtaaaaagaggagtaaatggggaaataagttatgaaaaagttgtgataaatttaaaatatggatgcactgttacatgtttatttagcgaaggtgacttggaaaaggagattcacatacttccactgtatcctccgggtaagttttccttctcttctgtagacgtctccatgttacagtcaactataaaacatggctcatgttcactctgggcttcgccttcagaggagtttgatattttggaagtggtacctttgttctgtgtgcttttcagaccaaccgcttctttcatttcttcaaggcttccttccaaaggagttaaatcatcatcatgtccttttggaagagcagggtcctcaatggtgtaagaaaagccatttccctctgggcatgcgtcttctttcccagcctgtctacaacaccttagggcttcttcaggggcagaagtcacgcaactcgaagttgcacggccttcaccatttccagttttccgaggactggagatggtttttgctgtgaaattggtaatgtcaactgttctggtttttttgccaacgcaggaaaaatcatcccgggaattccggaccggtaccag

SEQ ID NO: 451846 - DNA, 673 bp, Homo Sapiens
ctgggccaggcccaagcggaggcgtgaagccaccagtcccgcccagggcagcaccagacacagtgtcccagacgccatcagaggccaggagcatgaactcgtcctcagcctggcgtgccagtgcggccacctctggctccgcagaaacgagctgtagctcggggggcctccccggagcctccttgtaggtaaagtcgcccaacgctcgcgacacggccagagagccctcgacgcggcggcggcggatggtgccgccagcggcgtggatgcgctcgcgttcccggggtcgaaggggccggtggtcctctgtgctgaaggccacggcgccagcgcggctcagcaccgcgcgggagtcaccgcagtgcgccaggtacagaaaccgcggggagaccagcaacaccacggccgtgcagccgcccgtttccacgcggggccagagggagcgcaggcgctcgtcggcgctcaagaaggctcggcgcagcgcctcgcgcacgccctcgggctcgctaggctccgggcccagctcctggagcacatggcctggcaaatggcgtgcaccgaagcgggcagctcgagccccaccgtggccgtcgaggacggcaaacaaggcccagcccgggggcagaccaggtaacgaaagccaagtgcagtgagcatcctccatgcgcgcgcg

SEQ ID NO: 451847 - DNA, 960 bp, Homo Sapiens
ggggagggcaggagagggtgaagggcaaggggtaagaaagagcggggtgacagcggggggaacatgaatagagtgcgagagagcggggggcaagaggggtagcggtgctgcgcgtgaggagtcgaagctgagtcaccgtggatgaatgcgtgggaggaagcctgaatgggaggataactggcgaggaagaggatcgcataaggatacctctttgaggctgctcacatgtggacaaggagaatgaaggtttttcacgacttaattcgaactcgtttttcttaaggttgtcacgacttaaccagagtaacatcgtcagggggaatgtcaaatcaaagcacaactctcacaccgtctttaaatttgatggaccttcgagtagacccagacaggcaatgccaggataaaggaagctgcccaaaaggcccaaaattgtatccggatggtcttgtaccttgttctccaacgtgtcagtcgaaatggttggacgagggcaaagtacctgtccacactcattacagtcatgatggcactacaggcaaattggttacaagtatccagggatgtgatgatggtgcagagaggccccccatacacccactctccccctcgggcccattggtgaataagaaaaggcattccaactatgtggaccaaatcagccacagccaggttgcagatatagatgtcagggactgtttttttcctggatcttattatagtgaatacaatgaggatgttgccaaccagccctgttgaacagataatcccaatcatggaagggaggatgactgtatctaccacactggcagtttgataagcaaactctttattccaggatttgtttaaaagttcggcagaggtgttccaacaagatgcatgaaatggattcattgttcgtggactttccagggattaaagctgggtgctcgcgtcctccccgcgcggcggacagcccgggcg

SEQ ID NO: 451848 - DNA, 707 bp, Homo Sapiens
ttccaaaggtgaggcaggggagagattcaaaaggatcctagaatatcttattgtgtcagaaaataagaaagtgctccaaaaaatgacggaagcgtgtcacaaggacatagcagccgctgtgaaggagtttccgctgtccaaagctgggacaaccttccatagttcaatggccacaggctgatgtggtggattgtcacagtatatatcttccacagtttttttccaaaactgcattcgcatcagtccaattgttttctcagagactgagtctttaacttttccatatgtgaagttacttccaaatatcctggtggtgggtgggtttcttagcaatgtttagtgttcagatcccagtggcatacagtacagcaagacagcagcaagagtaatccagcctgagccagttccacattaaaggccctcagtgcaaaaacagagcttcgggattctgcagggagcagcagggagcataaataaccttcataatcccgtttccgcagcagctccaggcagtagtggtcagtgccccaggcgcccggtccgctggccgcagccacgctccgcccagacacctccggcccgggcagccgccgcatgcgcgcgtacagacccagaggcggccggcggcagcacaggccggggatgccaagccgcaacggcccccagacagagccgtgcgcggaggccgccatgacgccggcactgcg

SEQ ID NO: 451849 - DNA, 771 bp, Homo Sapiens
ggcaatagtttctagtgctaagtaaagaagagagctctgtgtgtttcagcataattttccagttcctgatattacgatatgctttgtcatccagatttttttctctttcatcgacgattgtcataacccatcttttagtcagattaatgtctttttaacagcagcttcccatccgctttttcttctcaatcccccagttggggcgtttctggctttccatctttactggggctctgtgaagtcaatctggggcccagaaactgggcctgcctctgctggtgtgcagacctgagaagaggtgtaccactgtcaggtctgtgggtggctcctgttacagaaaccctcttttggcaatcacttccatagttcaatggccacaggctgatgtggtggattgtcacagtatatatcttccacagtttttttccaaaactgcattcgcatcagtccaattgttttctcagagactgagtctttaaccagcctgagccagttccacattaaaggccctcagtgcaaaaacagagcttcgggattctgcagggagcagcagggagcataaataaccttcataatcccgtttccgcagcagctccaggcagtagtggtcagtgccccaggcgcccggtccgctggccgcagccacgctccgcccagacacctcctgcccgggcagccgccgcatgcgcgcgtacagacccagaggcggccggcggcagcacaggccggggatgccaagccgcaacggcccccagacagaccccgtccgct

SEQ ID NO: 451850 - DNA, 1084 bp, Homo Sapiens
  misc_feature (210)..(210): n is a, c, g, or t
  misc_feature (299)..(299): n is a, c, g, or t
aaaatgccagaggtccttccgggggggcaaagggggtttacccatcccactgggggggaagggcgttcttttgggggaagactggccggggatccaacccccagccaaattgagaccagagcgccttttcgggatcttcttggtttcggaaagcatattatgccaggggttgatgatggaattgttaggttgccggccaggagggggtgncttagtattagatggagggggtaggtgttatcccgttatcaagggaatagagggtgaaaaggcatccagcagccagcaaacgtccccanggatgatagccaggggtggagacccctttccggggtggtcacatagtgcgacgtggccaggaagtggtgctgcagggctatctgatgggcgtgcctcatcacaatcttacagatctggatgtagagctgaagcatgagcgcaaacatgaagaggaaggacaccgagaggatggccgcgttgttcttggtgagcggtctgaccacgctgcaggtggactcgtctcggaggcagttccagcccatgacgggcagcagccccaggcagatggaggtcccccagagcatgacgagcatgacataggtaaacgtgaccgtcctctccgaatggtacgtcagagcgtagtacagtgagaggtagcggtcaacagtgatagccagcaagctgcagacagaggcagagaaagaggcgacaatgaggccgatcgtgaccagcttggtggcttctgactgaagcaggtaggcaaaaacaaaattggtgatgagtccaatgccggccagcaggtctgcaagagccaggctgcctattagcaggaacatgggtgctcgcaggctggggttgtggaagatgataaggaccacaatggcattttcacaggagatgagggttcccgaggtacacaagacaatgtcccaggggttgactacgagctcaggctctggctctacggcaggaacccgggaggagacagcagccgagatgttctccgcagcagcggcatctaaataatcccgaggcagcccgcttaaattgaccttcaggatcccgggaattccggaccggtcca

SEQ ID NO: 451851 - DNA, 957 bp, Homo Sapiens
  misc_feature (849)..(864): n is a, c, g, or t
gtgagctcggcgaacaactccttaaccgaggctctggaggaagccaacgtcctctttgatggcgtgagccgaaccagagaagcagccctcgacgcccggtttcttgttatggcttctgatttgggtaaagaaaaggcaaagcagttaaactcagatatgaacttctttaatcagttagcattttgtgactttctgtttctgttcgtgggtctgaattggatggaaggcgatcctgacaagttgagtgattgtgatgatagcatagctctttccttctggaaggcaatagaaaaggaagcaacatcctggatggtaaaagctgagacattccattttgtttttggttcattcaagctagaacgttctgcaccaaagccccgacttgaacaccagaaaaaagttcgcaagatggaagaaaatggcaacatgcctacaaagttgcagaagttggacctgagtagttatccagaagcgacagaaaaaaacgtagaaaggattttgggattgttgcaaacctactttcgaaagtatcctgatactcctgtgtcctattttgagtttgtgattgatccaaactctttttctcgtactgtggagaatatattttatgtttcttttattgtaagagatggttttgcaagaataaggcttgatgaagacaggctgccaatattggagccgatgaatgttaaccagatgggtgagggaaatgattccagttgccatggcaggaaacagggagttatatctttgactttacaggagtggaaaaacattgtggcagcttttgaaatttctgaggctatgatacatactcctcatactaaagatttcttagtatagcatccnnnnnnnnnnnnnnnnctgaagttagatggagagtaaaatgtaaactgaagcacatattgtatctcttgtaaagtgaaaaagtattttcaagaacatcagacattgtta

SEQ ID NO: 451852 - DNA, 760 bp, Homo Sapiens
tggcgcgactgcattcccagacactcgagctcttacggatagaagctctgtctttttgcgcttagtgtttgtcttaccgtccctgtcctaaaataatgactgccgctctacctgagggaaagggacttcaatggtggtaatctactcgcggctggctgcatccttaaaaaagcccatttctcttctactatcttcaagatcttgggttaaccagattcacattgtatgtgccggactctttctcaggtgactgctctgtgctgtttttatctaaagaagggcaagtcacccacgggtactaaccctcccccacccacatcaagggagaaacactcctctactcttttctggacattcctgttcagagtcgaggtaagggttgcacggccccgcccctccgttaccaagccttccctcgcctgcctcgcagcctcaggcccttagaacccaggcggggcggggccgggaaaggtgaggctgctggcgggaagcgggggcggcgcgcagcggtacctagcggcgctgccccgctggcagccggaggacgtggcactgtccgagaatgcagggaggggattccgctttctcctcccggcgaggaggagcctcgacatcctgcagaggcgggaggatccttgagggcactggtgcgcctttcaggtgaggtcttagcagatgaaagcggctggctgtggcccgcgccagtagtgctttctgctccgcactcgccgtgagccaggtgtgcaaccggatttggggc

SEQ ID NO: 451853 - DNA, 895 bp, Homo Sapiens
ccttgtttccaagccacgtgcgtgggctaaagtcatatcaaatccccggtaccaggtcccccgttgaattccccaaagtagcgtctgagacggctgaagtctggtgtggagggtggcaagtaaagccgcaccccagtgaagatgtccagcaatccctttgtttggcacagcgtctcatcagcagctttccgcttctcccctactttcactggagaagactttgtggccagcttctcccccaccttcatagcggaaggctttgcagtctgcatgttgccatctttgctgttggagttactcagcttcccttctgctttcttggtactggctgagggcttgctgggggccttgcgggacacagcagaccctgagggacccttattctcttcactgctaccccctgtagtggagctcccctcatctccagccactacagtgaagtctgccttctccttggacaactggtacagttccttgagttggggaaggttagtggcagatttccagtccttatcatctcggattcgggtgcagcgagggaatcggatggagatcccgtcagctgtatgagcctccgatttggagaattcagcccctgtgatctcccacacggcagctttctttgggtctgggacgatgaagtcaggatagtagatcttgttgaccttcaaccagctgggtattttgctggggtccttgctgatcttcaccatgtctagttcattctgcaggcgggcaagcgtggcatcatcatggcctcctgcacacttggtgactgtgcaccacttctggctgccagggtcgtagcagcccatgaggaagattgacatcatgccgcctttgctcccttgcccatagaaggctccaagatcccgggaattccggaccggtccag

SEQ ID NO: 451854 - DNA, 1428 bp, Homo Sapiens
agccagaagccgagctctgtcagggctcaacctccaacttgttcagttcattcatccttctctcctttccgctcagactgtagagctcggtctctccaagtttgtgcctaagaagatgataatcacacaaacaagtcactgttacatgaccagccttgggattcttttcctgattaatattctccctggaaccactggtcaaggggaatcaagacgacaagaacccggggactttgtgaagcaggacattggcgggctgtctcctaagcatgccccagatattcctgatgacagcactgacaacatcactatcttcaccagaatcttggatcgtcttctggacggctatgacaaccggctgcgacctgggcttggagatgcagtgactgaagtgaagactgacatctacgtgaccagttttggccctgtgtcagacactgacatggagtacactattgatgtattttttcggcagacatggcatgatgaaagactgaaatttgatggccccatgaagatccttccactgaacaatctcctggctagtaagatctggacaccggacaccttcttccacaatggcaagaaactcagtggctcataacatgaccacgcccaacaagctgctcagattggtggacaacggaaccctcctctatacaatgaggttaacaattcatgctgagtgtcccatgcatttggaagattttcccatggatgtgcatgcctgcccactgaagtttggaagctatgcctatacaacagctgaagtggtttattcttggactctcggaaagaacaaatccgtggaagtggcacaggatggttctcgcttgaaccagtatgaccttttgggccatgttgttgggacagagataatccggtctagtacaggagaatatgtcgtcatgacaacccacttccatctcaagcgaaaaattggctactttgtgatccagacctacttgccatgtatcatgactgtcattctgtcacaagtgtcgttctggctcaacagagagtctgttcctgccccgtacagtctttggtgtcaccactgtgcttaccatgaccaccttgagtatcagtgccagaaattccttacctaaagtggcatatgcgacggcatggactggttcatagccgtctgttatgccttgtattttctgcactgattgaatttgccactgtcaactatttcaccaagcggagttgggcttgggaaggcaagaaggtgccagaggccctggagatgaacgcaagaaacacaccagtcagccccagcaaaggaaaccagcactaccttcaacatcgtggggacccacctatcccatcaaacttggcaaggacacctgaattttccaccatctacaatgggcgctgcatcccagtgcctcctcaacccaaacatcattgcttccacccaag

SEQ ID NO: 451855 - DNA, 703 bp, Homo Sapiens
ttaatgggggcgagctgtttttccatttgtcgagagagcgggtgttctctgaggaccgcacacgtttctatggtgcagaaattgtctctgccttggactatctacattccggaaagattgtgtaccgtgatctcaagttggagaatctaatgctggacaaagatggccacataaaaattacagattttggactttgcaaagaagggatcacagatgcagccaccatgaagacattctgtggcactccagaatatctggcaccagaggtgttagaagataatgactatggccgagcagtagactggtggggcctaggggttgtcatgtatgaaatgatgtgtgggaggttacctttctacaaccaggaccatgagaaactttttgaattaatattaatggaagacattaaatttcctcgaacactctcttcagatgcaaaatcattgctttcagggctcttgataaaggatccaaataaacgccttggtggaggaccagatgatgcaaaagaaattatgagacaccgtttcttctctggagtaaactggccagatgtatatgataaagagcttgtacctccttttaaacctcgagtaacatctgagacagatactagatattttgatgaagaatttacagtcagactattacaataacaccactgaaaaatatgatgaggatggtatggactgatggacaatga

SEQ ID NO: 451856 - DNA, 398 bp, Homo Sapiens
aggatcccccccctatggaatccaaccttctttcacaatggtagcatcgctcatgatgactcccctctgagcccccaacttggagaaatggtactttgtgatatcagctttggggtttggattctctgctgccgcccttcccactctctagtgatgactcagcctttttatcatatacatcttgccagtttactccagagaagaaactgtgtctcataatttcttttgcatcatctggtcctccaccaaggcgtttatttggatcctttatcaagagccctgaaagcaatgattttgcatctgaagagagtgttcgaggaaatttaatgtcttccattaatattaattcaaaaagtttctcatggtcctggttgtagaaaggtaacctcccacacatc

SEQ ID NO: 451857 - DNA, 805 bp, Homo Sapiens
caggatgacaggttggtgctcaacctgttgacgtaaaaccggccccggacggtgtccttccccaggatgttctcgggcctcgcagacatacctccccagcgtcctccaccttcaccttgttgaactgtagtcgtgagttctttctgccgttgccatatttgatgcgaatgtctcggctgacggttgagctccttgccatccttgaaccaacggtaggaaggctggggattaccggctgctgcctcacacttcagcgattgcttctcacccacctgtcccgtctggctcttcatcttcttcaacttgggccgggtggcgcagtcagtgcacaggatcttgcccacctctttcttgagatttttgccgttggtatcgaggggggacaaaggccgtcttaaagactaagggctgttccgtgggctccaggaaaaagatgtagcgctggttcctttcgagcggcacacaggagcccacgctgatcacctgctcgcgctgcagccccccgctccggagcggccacttgtccagcacctttaccaacgccacccgacccgaggcgggcggctctcgggtgctgttggagctggagccgccggctgggaccagcccctgtaccttgccctccaccaccacgggtgccttgtacgcctggtcctgcactgacttgaggctgggcgagtagcaggcgagcgacacaccgaagagcagcatggagaacgccgggggccgggtcgcgcctcatgccgccggcggctgcggctcgcgaacgggcggcggctctccgggctgcggggctgcgatcccc

SEQ ID NO: 451858 - DNA, 1101 bp, Homo Sapiens
agtcccattaatacttccattccccaaaccccagggaaaaaaggatccaaggtctgggaagtctttcggagtcccttcaaaggggattgaattttccattaagccatgaatttccatcccgtttcagccccagagtttagaagaggatgcttaggaacaacccgaaggaaagagccatgcggggaagataatttagtgggtaaccagagaataattctctcttcagtagtgtgtactgacgttaaatgccgatgataattcatctgatcttacaggaatattccctttaaatagagagatgagagtctgaaatggcccagaggaaaatagattctgaagcccaatatagtcttgataccaaaaataaaattaaaatgagaaactaacatgataggttcaaggccttttgggagcctgttttctttgccagatttcacattcttacagcttcatggtctttttcttctaacaaattaatcagctgagagaagctgtctttcagtgcatccatgtcatccagtgagcagggctgtagaatccagcgttttccacgtgcaagtggttcaagttcaaaatattttttgatctcttgtactgagcgagctgctggcttgtcttgatgattggccaatattaaaaagggtaaagtgcataactgtggatgctgaagagctgagtgcagctcatttctagcagcttctaaatcatcctctgaagaggcactgtctaatacaaatattaccccttgagatccttggtagtagcggctccagtatttccggatgttatcagcccctccaagttcttttacattcaagatggcattctggaatggcactgctttaatactaaaacctgtggtcgacacgacgttatcggggctttcactgcagagtttggacaacagactggttttgccagaacctgtgaggcctatgcaaaccaggtcatattctggtcgtgcaggtggtggtcccttgcagcaaagtgctctaaaacaagtttattgttgttttcccagataatccatgtacagaaacgcctcagttatccggagatcagacatccggcagcctaaagcatcccgggaattccggaccg

SEQ ID NO: 451859 - DNA, 685 bp, Homo Sapiens
tgttttcttgggtttttgtctgtcagtgtgctgttggtgtgctgtgcggtcttttgtcttgggtttcttgttcttcggtttttgtgtggttttgtcgttcggtgcttgtcggttcgttgtgttctttcgttggtgccatggtccatgtccatcggtgtgggtccagctgtcatatcgcgggtttgttggacccaaggcggggaagctgcctctcctgagcgtcgagcagcctcttcttgggttctggcagcggctcagccatggcggggtggtcccggcgcagctcctcctccaccagcatcagcctgccaatgatgctcttgatctgggaatccttctctgcctgctgctgccttagcctcttctcactctgctccagtcgggcctgatactgcatcaggattttgctggtttgttcttcctgggacagcagcctccgctcatactcttccagcttccggttggacatgtgcagccgctctttcagtgagtgaatctcctcctcgtactccttcaccctatccagccggctctcatccatcgattttgagtactccttgagcttgtactcttcccgctcgatgtgggcactctcgatgtcagccgacaggtgaggcatgttggagacccaggccactgtccgctcagaggctggcattgtggggttcaatgtggatggtgtctg

SEQ ID NO: 451860 - DNA, 819 bp, Homo Sapiens
cgcaggagcacttgatgccaagaggttcaagaccagcctgggcaagtatagcaacgacccctgtgtccaacatcgacgacatcgtccaacacttacaaccagaaactaaagacatgcttattgacgttgtcaattttcccaatctcagccccaatagacactgtgtaaaagctgttacctcaggggcagtgtatatcggggtgatgaaggccatgcccgcttcctctcttccaggaaagctctggttcgtcctcacgatgctgctgcggatgctggtgattgtcttggcggggcgacccgtctaccaggacgagcaggagaggtttgtctgcaacacgctgcagccgggatgcgccaatgtttgctacgacgtcttctcccccgtgtctcacctgcggttctggctgatccagggcgtgtgcgtcctcctcccctccgccgtcttcagcgtctatgtcctgcaccgaggagccacgcatcagccgcgctgggccccacgccgctgccccgacccccagggagccggcctccgggcagagacgctgcccagcggccattcggggagcgcggcggcctccaggtgcccgacttttcaggccggctacatcatccacctcctcctccggaccctgctggaggcagccttcaggggccttgcactactttctctttggattcctggccccgaagaagttcaccttgcacgcgccctccgtgcacgggcgtggtggactgctacgtgtcgcggccacacagagaagtccctgctgatgctgttcctctgggcggtcagcgcgctgtcttttctgctgggcctcg

SEQ ID NO: 451861 - DNA, 717 bp, Homo Sapiens
ttcctgcgttcgtttatgagcttgaagagccaagagatggcacagggaatgatgcccaggttcgtgcatggaatcatcctttccgatcatggtgtaggattttcccagtttggcgtggccgaaacagaacacgcagccatctgccccgttgaccacagactggatcacctctgccacggtgcctgcacacacttcagcctgagaagcgtcttgtggaaaaactgcatcgaaggcaaacatctttggaggaacctggttgcctctcttttggaaggcattttgacctccacaagtcaggggatcgtacaaggtgatctgcttcttccgtgggtccacctttaagaaagagctggattctgaagtatctcgagccaaggtggaacagatgcgaagcatgactttcaccttgcccagccccggggtgtccttcaccttgttgacagccctcagcaggcagggtggggctgggggaggggaggtctgcagaatcccactgaagctggttgcaaagagcggtggttcggcagcggaagaagtggaaggccgatgtttcttctttttagaagacagatttaacttctgggcagctactgctttccaatccatcatcattgataagtcatggctaaataatcaagtgcagaatccatttcttccacgtctgctaataaatagcttctctcaaatgtctcttgcagatctggggccatctcagga

SEQ ID NO: 451862 - DNA, 1013 bp, Homo Sapiens
  misc_feature (861)..(861): n is a, c, g, or t
  misc_feature (874)..(874): n is a, c, g, or t
cggtccggaattcccgggataggggatcggattttgcaaataaatggggaagatgtccagaatcgagaagaagcagtggccttgctgtctaacgatgagtgtaagagaatcgtgctgcttgttgcaaggccagagattcagctggatgaaggctggctggaagatgaaaggaatgaattcttagaggagttaaacttggagatgttggaagaagagcataatgaagcaatgcagcccactgccaatgaggtggagcagccaaaaaagcaagaagaagaagaaggcacaacagacactgcaacatcctcatccaacaaccatgagaaggacagtggagtaggacgtacagatgaaagcttgcgaaatgatgagagctcagagcaggagaatgcagccgaggaccccaatagcacatctttgaagagcaagagagacctggggcagagccaagacactctgggaagtgttgaacttcagtacaatgagagcctcgtatctggtgaatacattgactcagactgcattggcaacccagatgaggactgtgaaagattcaggcagctcttggagctcaaatgcaagattcgaaatcatggagagtatgacctgtattactcaagcagcacaattgaatgcaatcaaggggagcaagagggagtggagcatgagctacagttgcttaatgaagaactgagaaacattgagcttgagtgtcagaatatcatgcaggctcacaggctccagaaagtgacagaccagtatggagacatctggacattgcatgatggaggattccggaattataacaccagcatagatatgcaaagggggaaagctagatgacatcatgggagcatccangaaaagtctgacnaaggacagtttctagttgcttacaacacagcctggagaagctgccagaaagtactcccgcctccactggtaggacccgtttccccctgaacaagtttccccttttccaaaggggtgggattcaaacccttccaccccat

SEQ ID NO: 451863 - DNA, 863 bp, Homo Sapiens
ggtaggaagggccttaaaaatgctttcacgggcgtagtgaatccatcccccggggtttagagggaatccgaggacccgccccctttcgggggtctttgttggggggaaaggacttgctttctgtaaagtgaggaatgtccaggcccggggaatttggaccccaaaaattttccgggtttccagtttggatgggtaatatggggtttaccctctgtggggggcaagcgttgggattatccgtcccatattcagaattaaggaggaacatcatagccacgccctcttggtttgtcactggaattatgtgagtggtacaaataaaagtggacccatttttgtgatagtaggtgacctccactttcctctcttgtgaccccagcaatgcctgggcaatttgggcaatatcatgcctgttggtctcgggtccatggagaaagtcgcaggtgcatggcttttgcatgacatctggcctggagaaaccagtcatctcacagaacccatcgttgcaataaatgatggcacagttctgcactctggcatttgcaatgataaattttttattttgcccttcaaatttccgaatgatggtccccagaaatgtattttgtggtgccacatgccccctgcgcacaggcatgttggccccggtcttccgaggagcgctcccccggagctctggagttctcccgggatctctcctcggctagagcccaggccagcgcgcgagccgctctttgtggcagagcatcctcttttgaaaccagaattctcttcccattagcaccacttctagacacccgctttccccaccggagtccaatccattcccctcaccttccggagggggccatcccgggaatccc

SEQ ID NO: 451864 - DNA, 1084 bp, Homo Sapiens
attttgtgatgcacctacgggtgtggggtggtccttagtgttatggcgccgtgggcattagggcggttttgtcccctgtggctcacggtgccggtaattgtgatgtaagtgggtatgtagggaacacagaggtcccggactatgggggggaaagaacatctgtgttaaatgtaaaggggacccgtgggactatgggtgtcagccgtgccctttttccacatgggggactccgcagggggtttgcccgaaggacatggtttttgtcgggagcgcgccgcctttcccctcccccaggtgttgactgccaacccaccgtttaggttgagggatgaggtccctgctcttcgcacggagccccccaccctgccccgccagggtctacccctggtggatgaattcctccagggccgcgcactccgacaccagctgagggaggccgctcctcaacaccacgaaggacaggatgggcagcaggtcatcggcaccaatggcagctgcagcgatgggcgggggcccggcctggggtgtggcctctggggtggggcagtagtcttccgcacagacacagatgatccgcagggtccgcactatgcactccagcttcttctgggggcagctctccaggaccagcagtccgagctcctgggccgccgcgcagtaggggtagccagtggcccccttggcctcagggttctgggggaggagcttggtggggatgccaatggcggtggggggtgcattcctgtagagctccatgctcctgctcagggcagcctcccgggctcggtgcacgctcctgtacagggccagcagcagaggccacagcggggagaaaaagggttcctcaatgcaggccaggcagcggtccttggaggcagctgtgtttaggccttcgaaggccagaagggtcagcgagagcagcctgtctacggcattgtggatctcctccaccgcggtcttcagctgctgcagctggggctccggctgtaccccacggccccggccctgccgctcagacgtccccaggaactgctccaggtcctcgaacgagctgtccttgtctgatcccgggaattccggacgc

SEQ ID NO: 451865 - DNA, 773 bp, Homo Sapiens
ggatgtggaggacgtacgggctccagtactcctcgctgggactgacagtgcaggtgaggttgagggcaagggccccagtgccgtccttggagactctgtgctccaggcagagttctgtgttccaccagttgccacagtgctcccagggtaggtcgctggtgagggaggcgaagaggtagaagagcacgtaggcgatgatcatgttgtagtagatggccaccaagcccacgatgagcagcatggctgcgccaggcgcctttgaagagagggctgatcttccagacagccaggggccctaggctggagaactggcccagggagagctccaggaagaagagggggatgccacagatggccagcatgaggaagtagggcacgaggaaggcgcctcctccattggtgtacgctcgataggggaagcgccagacattccccaggcctacacagtagccaatgcaggacagcaggaagtccagcttgcctgtccagttcccccggtgtgcagcaaagtccacatccaggtcgacatcgccctggtcactgggggtcatcagcaggtctggggtgacaggcttgcggaggtgagctccctggagcttcttcatcttggagagcgggtggccggggctcagctgccccggagcgcagagagcgagggcacgagagatggtccgctggccactgcagcctttgcccccgcggctcccgcgcaccggctggggcgggcacggacgcaggcgctgccgtctggcggctgcgggcgtggagcgcga

SEQ ID NO: 451866 - DNA, 935 bp, Homo Sapiens
tttcgttcttgctctttctagggatctttctaggatgttgattcttctcacaatatttcaatgtcccatttcgtgtttcttctcccttccaggggctgatttacaattacatgagtcttgtcacaataatttcctcctttaacatcaaggacaagttgatcactgagataagagctgatagttccatttttatttcagtctccacttctgcctgaattgcccatgttcagtccatagagctactttagctccaggtgtgtcccggccaccaatcacatcaagacatgtatcactggccttggacttaaagagtcctcggcagtagtaccagatctgagtatgctttccactatagggagaaatgcacacagatgttgccctggtgtctgctagacttccagtgactgtcagatattcaccctgggcacggttctttattctgatgtacactgcaggctgcttcataggacggagggaaccaattgttttccatctgctgaatgctgtccagtttgggatctcattaggcctgagtaggatttgtcttcccaagaaattggatccttcataagctatccatagtccactttttacccacacagactgggtgtagaagtgtaggtccttgttcagaacagagttcacagcctcttctagatgtaactctcttccctcacaatgctccagagcaaaaaggctgatggagggttcttcaaaaacatagtcaatgggcttgagagatttgactttagatgctgggcaaccgcaggaagtaaggtcagcatagaggccttcttctaacacacagtgattaacaaacatgtcttcttggtaatagaggagccagcaacctcgaagaactttaaaagaacatggcatgagtgaagtcaaatcagaagtttcttctgtaaatcccgggaattccggaccggtcc

SEQ ID NO: 451867 - DNA, 830 bp, Homo Sapiens
gggtctgtcggtttgcatgtggtgatagcccacttgtccgcctccccagtcagttgagacacaaggtatgccacacgctcgcctcacccggaaacgggaggccctggaagatcatgaatctgtccatctgcatcagggacccctgccaaccggcctgggtccccggaaaagggctcggtcagagaggttggaggtgtggtcatggggtcgagtcccgtttgaagtaattgaggagatgggcggggtgatctgcagagcccccgggatccgcagccctggtgcgtaacaaggtcagctctgccatcacgctctccagcatgttggtgagattggccttctccgcccgcagggtggaagcctcccgcctcagcgccgagttggtgaggcgcagggaggtcagggtgtcaataacgtcatccatctgggcattcggagacgctgccaaggctgggctttcagctttggacgtctgcggctgcaccatgctggccagaggtcagccacacgctgagatccgcgggtggaccaagagggtgtggtgaccaggtgggcaccctgtagaaatgggggcagtagtggggtgcacgacggcagggcgctgcgagacccccaagccgagggcccgacgagatggggcacgacggtgccaggccctagggacttcggcacccaggtcccacgcggctcctttactgcagacttcgcggactacggagccagacgggtggctggacctgctctgggccctggggtctcgcggttcctccgcggctctgtccgccgccggccgtgaccaagatggcccgcgtgggggacgcgccagccgatcc

SEQ ID NO: 451868 - DNA, 1054 bp, Homo Sapiens
  misc_feature (100)..(158): n is a, c, g, or t
gattgggccggggagggggcgtttgtggataactgcggggggggagaggatggcggagtatcaatcggtcaggagagtcggcggggggtcgggagtaacnnnnnnnnnnnnnnnnnnnnnnnnnnnnnnnnnnnnnnnnnnnnnnnnnnnnnnnnnnngggaggagttggccttcccgttgcggggatgggcttggccacgttccggggtgcaggagcccggggtgccggttcagtcaacgcggtggctggcatagaagttgcgcaagggcgccgaggttgcacagccggggggcgaggaccagcagcgccatgaggctggagtagagcacagattaccccagcaccgacagcgagccctcctcggggaccatctggataaagcaccaggtgccggggcagtactgcacggaacttcccgaagcccatgaaaggtagcgcgcagaaagccagggagaaggcgctcaccaccggggccaccagtgcgcccaggcgcagggtgatgtgccgtcggtagaagaaagggtgccctagggagagccagcactccagtgccatggccaggagttgcagtgtcgaggagagcccaaagaaggacatgaagaaggcgaaggcttggcacaacgagttgtccaatgcgggcgcaagcacccgcagactccggttctgagcgtaggcagccagcaccaccgggcttaggaggcacttgcccagcaagtcggtgaccgtcaggccacacaccagcatgtagaagaccgagggcagcgggcgcagtggacgccgcgagcaccaccccagccccgagcgcgccagcagccccagggccagcaggttgcccaggaggccggtgctgaagagcaccccgcccatcaccgccgagttgcctttttccacagaggtggtgttctggcagcggtagaacggcgacttcatggcgtgcgggagcagagggctggagtgaaggctgcggaagggcgagggccccggcgcccgggtgctaaggagcccccggcagctccgcgcgcggctcgggcgatcccgggaattccggaccc

SEQ ID NO: 451869 - DNA, 1036 bp, Homo Sapiens
gaacacattttctttttgggggttaacatataaggggtgagggggaatttccacaaaggaattatttgtggtgagataaaggagggggttttcaaccaaaggttcctcccctgaaattccaccaggggtcaaggtttcccccccaaataaaacagtgactgccagaaggcctgggccaaaggaggattaggttattcccaggagaaaagggaaaccttgagcccggagggtgttcagctggaggtgatgaagggcagcaggggctctgatttcctggacccatgtctgtatgagggtagcatctgcaatgttacagagaagttctatgagatgagcttgtcgaaaagcctttgcagtgtctctggggagcaatcgtcaagaggttgtccaagaggctgcacattgctgaaagaagagatggagtaacaaaaacacacagtttgggcaggggagcagaaagagatgaatcatgaggtggccgtggtgatgtactttcctggtgaccttgagccacaaactggtcatgggaggcttcaggtagaagtgttgttgactgcacaagtggctgaaattcagtactccccaatgaaggtgccaccgttgtttctgaggtggagagagaacttggatctcgatcctgacttgtcctagatggagccctccaaaacttgaatgagtcatctaaaccatttaaatcattgctttctgaatttctatcaaaagcagaaaaattcaaatcaaacatacaccgtcctaggtaacaatgctttaccatctgattcaaatgttcataaaaatggcagtgatataaaagagcctgaagggcaggttttccaatgagcgataggccagagtcctcatcatgaacacagggaccctgccaagtataatcctttataatttctgtaggcattggaattacaaggagattctgaagaataaatgccgcctcccggcgcaccatactacattctgactggtccagaagaatgttcaccacagttccccagagcccacatcccgggaattccggacc

SEQ ID NO: 451870 - DNA, 1034 bp, Homo Sapiens
  misc_feature (43)..(43): n is a, c, g, or t
gaccccggctcgatttagggactttctcatgacagtgacatgnggtgactctatttagtgtatgcttttccttcaatagtgtttccttcaatagcatatgtctttccttacgcaggcctggagcctggccaccctctgtctgtgctgtggagcttacccagtgaagcagcatgtaaaaggcagttcccatcccctgttgtggccagaggaagaagccgtttacagctcgtgcacacagtggaccaccagttcaggcgacctgcctgctccaaagccaccattgttgcctgctcgatcaagtcccgctcgatgaagctcctgaaatcctcgctgtacacgctcaggtctggcaactggaatgtgtagattggcatctccagggggaactgctcgttgttgcattcacttgccacgtgggaccgggccagggagacgatggctgagctggcgtgggaaatcccccgggaaagccgcttttcttgggcaatgtcgtcctgcctctgcaggcagggtcgctccaccttgtgcccgggctgtggctctcgctctggctgcttgggaccccgcccttcattgaacacatgtggcagattggctgtgtgcacctggcggagctgctcatagtcgctcagagcggctgtcaggtcccagtttttgccttccagcaggtctctggccagaccaggttctgcccccgtggaccgaacaaagtctgacaggactgcgtccatatcaagagtcataggatcatgtagaagtgctgcccaacactcagccgaggtggggtttggaagcacactagaaaccatccatctgatgtatatggtaccaattaggaaattgatttcttccttctctccatgcactggggcctcggccgggagagtctcttctttcgtcactgccacttttcagacacctgattctggaggtgtgtggcagtcaggcatgcaggccaacactgcgccgtccctgctggaaatggcccattgttgccccagtggaaggtgagaccacagcgcctgagaacactg

SEQ ID NO: 451871 - DNA, 1067 bp, Homo Sapiens
  misc_feature (131)..(131): n is a, c, g, or t
  misc_feature (285)..(285): n is a, c, g, or t
ggccgtttatcccttttcccgcagtatccaggggcaagggtttgattcagttccacccttttgattcaagccgttcggggttctggtcccctggtaaaggtcccacattggcctgtggccaagggtcccangaccagtgggcgtcaagagtggaaagctggggcccccaagatgtacttcttatcaccccaaaagccctgctaaagaccgcatgtccttctccatcaggcatgtaaatctcttcctcggagaagcggccaatgccgtggccgtgcatctcgcgtntcacaattcctttcgttatgtggcacactacccacctcagcaggttgctgaagtgaccaccaccactaagagagagcatcttccgggtctcattgagattgtccacccactggcaataagctaacgtccagtagaagtgctcctccaccatcttggtcaccgctctggagatggctctttcatgagggccaaggtttttgtttaaattcactccaagcttctcttccagaaagtcaattatgaattctgtgccagaaactttttcatgattatattcaatccaaggcattttcccttgagcagagagttttccaccaaaatagttctgatacggtaagtcagccatccttaaataagtttccatctttaaacagaaaggagataaacttggaacaccattgttaggtcttgcaaactgatgcaaaataatagcatctttagagtcaatctcttgctgtttcctaatgaccaggagttcgtggagcagatacgcagctgcggccagcaaagctcccccggtcaagtaaagggttttcttccaccagggatcggagcccagccctgccatgatcccaccgtaatcctgcaaagggaaagcgatgatgtccccataaaaggagaagggctcctcggacccggcccaccagccgaagaaggagatgctctggttccagctcagatccaccacgcacggcctggacgaagcaaagccaaccccccagtgcatgctgcgcggctggctccgggcgcccctcccagggcccgcgccgcccgcatgggaa

SEQ ID NO: 451872 - DNA, 475 bp, Homo Sapiens
  misc_feature (212)..(400): n is a, c, g, or t
tttttttaaatttagcctaagtttctgaagcagatggactgcctggagatatttccttctgtaaacaaattattatttgatgattcctcacccttggctctgatcacctcttgataagttgaccatcaaaatttgaggggattgaggtttggagagcacaaaggtacacttataccagtgattcttaattggtggtgacgttgtccttcctnnnnnnnnnnnnnnnnnnnnnnnnnnnnnnnnnnnnnnnnnnnnnnnnnnnnnnnnnnnnnnnnnnnnnnnnnnnnnnnnnnnnnnnnnnnnnnnnnnnnnnnnnnnnnnnnnnnnnnnnnnnnnnnnnnnnnnnnnnnnnnnnnnnnnnnnnnnnnnnnnnnnnnnnnnnnnnnnnnnnnnnnnnnnnatatacattaaatccccttatataatcttttctaccttagtactttaggagtttgcggtactctaaaactatgga

SEQ ID NO: 451873 - DNA, 729 bp, Homo Sapiens
cttgcggccgcggctgtggcagggatcgggaaggcagtcgttgggattggtgtcgcagagctcgccctcccagccgctggggcagaagcagcggaaggcgtccacctcatcgatgcatgtgcccccattgcggcagggctggcccaggcagtcgtcaatgttctcatggcagtaggtgccagtaaagccactgtcacagatgcaggaaaagttgccccctggctggctgacgcagcgtccatgggggccacacacgccggaggctgctgtgccaggcatcccaggccccgcgtctgacccgcagccatcgatcactctgcaggccccgccagggcacggctcgcggggcacggagcagttcttgccaccaaagtcatcagggcaggcgcagtaatagtcaccctccaggttatagcagcgagcgccgttccggcaggggcttggctcacaaaggtcgacatccacctcacagagaggcccggagaagccctgggggcagtggcagtggaagccgtcggccaggtcctcgcagaggccgccgctgtggcaggggctgctggcacactcgtctcgttccagctcgcaatgccggcctccgaagccccgtgggcacacacactggtacccgttcaccaggtccttgcaggtgcccccatgctgacactgcccgcgacagtcgttgacgttgatatggcagttgatgcccttccagcccgggatgcaatcacc

SEQ ID NO: 451874 - DNA, 856 bp, Homo Sapiens
  misc_feature (145)..(180): n is a, c, g, or t
gtggatgtagatgtagcgtttgattccacgatggtgatattggcagaggcactgtcatttcctaatttgctgatcactttgcacatatactctccagaatcagccagtgatgctttgttaatgcgaagttctgacttccctggcnnnnnnnnnnnnnnnnnnnnnnnnnnnnnnnnnnnncgattcaattcattcccattcttgaaccacttgaatctgagagaggagtattcagaactggtttcacaccgaaggactagtttggaacctgcagccgattcctggcttttcatctctttcaatcggggaggcaaggctgggctctggctgcccgccgcggactccggcttcttgccggagcctcgctccttcttcttgcccttccctttgcctctgccttctttgcgctcggacatctcgccggagacggagcgctctacgcggacggctctcggcgcaggcgagtttggtccaagggctcggatcgggtttgggaaaagtttgtccctcgagggggagagcgagcggccgcgctgaggcgctcgcgctgcgcgggggcgtctcccgttgcctgcagggagcgcggcgcggacgcggcgggcggtccggccacctggaacgggcgctcgccctggctctcggggctgctcctgtcgccccgggaagtcgtcgatgggtcccgccgctggcggctcgcgtcctggcctctgcccggcgccctcgcaacccgatcggggagaggttatcaccgtcctgctcacgctcccatcgtccggcagccgccgccgctcagctcctggcctccgcgcgagcccggagcctcgtgccgaattcgccacccaggcctcgctaccta

SEQ ID NO: 451875 - DNA, 687 bp, Homo Sapiens
attactttttggtgccgcgcggccaaaaaaaatgttataaaaagatttttaaggggcggaggggagccgcaaagaaattttatattaattatatgtggatagatatgtaagttatgaggtatgtgttattatgagaagttatgagttaatgttataatagtttttcataaaattaaatatttttattgttttatagtataattgcgagtgagacccacagagtgtgtttattctggcgttgatagcagcagcagtggggggaccggccagacgcagggtgtggcgaacagaaggggtggacacaggtgtgtgtgtgtctgaaaggacagagaggattggcccattgacattcacggcgagaacaagggtcgggacactgagtcttggacaaacagcaaagagacagagacagacagagggttttggggggcaggggtcccccagacatgcatggcccctcgcctcgagggggagccccagggaagaaaagacagacacagtggaggctgaatgacccccaccctggaagaaggagctgggccggcctcctctcatcctctcgcttccagggttaggaagcctagggccagggctgccccgcaccagcagctcggacgttatggcttcaaggagatgaattcacgggtccgggcaggaaaggatggggtcctgagggagcctggtccg

SEQ ID NO: 451876 - DNA, 838 bp, Homo Sapiens
atatgcagcagaaaagcacaaagaacttgtatttgttataatttctactgcatgtccagatacagattagaaaatactgatatgtattcgggaatcttgagacatttcagcctatgcactatgcggcacttgtactgataactgattatcacaattttattaaatgctcatcatttaacagatggcacagaaaataaatggcacactcagaatattaactcaagaacaattaataaaggcactatttacaaatatgtgttcacaattaaagacacccaaccagtgggttggggaagcacccagtagtagttaagtctgaagatcatggagagggaatggtgtcaactgaaaccgagagatctacagccatagatggggcttcccaaaggaagctgtatccttacgggaacacagaagctaccatggtccaggcaggaggaagggaacggtaataaataactttttctcctcccacctctggtatctcccactgttcaaacctatgaagaaaccccagtctctagaagacagcctcaggggggagcagagcagaaaatgggggaaaagggatcaaagaaatagggaatactcagcacacatgcagatccacaatacatacaatttctgtcatgtgcctgctacaaattcaagctaccccgagccctgaaggaataggcttctaactcagatgatgcagtctactcaactatatttaaaaattcacacttaagtgttatcgtcatcacactttacttctaaataaactccaaatacgttatcattactttggctttaagcagccaattcccttttaaaaagattttaaaaagagagaaat

SEQ ID NO: 451877 - DNA, 846 bp, Homo Sapiens
gggactcaggttattgtacatcacggctccctgggcaccctataaatagcacttttggccacatgcatttacagaaggtactcctgctggctccatttttacttcaaggcatcacaacatggatggccccagttgagagtgaattcccaagtcccaatgtcgaggtggccatatggtattctgcttcatagctgttctagggcattgcggtgatatctactaaccaaacataaccaaaagcccacaaactccagggattagagtgaagagcaaaggaagggagtaacacataaggttcagacagcaaaaggaacagacagtggaattttgtctcgtgacttagaactggcaccagtgagtgagtccgccaagagactattcctgtgatgcgcagatgattgtatccgaacctggtctgacgaggtcctgaccccaagtagctagatgggtacccctcaatatttgctggtttgcgctttgcggagagtttccaaaagaacaaggacatacttcatgaacctcttcattgcaactttactgtatttttcctaacatccccgtccgcccgttctcactgaggcagttcccctttccacctgtgggctcagataaataggtggggcacctggaagtgcagataggcagtgccaggtctatcaagccctatgaccccacactgggccaccttgctttcagtcttcctgctagcatgaaagggcttaggacacagaaaagctcctatctcgaaccaagccagattcccattcctgggtgttgggggacagcggaggaggaccaaaatcaatcacagaatatccaacactggtgtttgggaagctgaactcg

SEQ ID NO: 451878 - DNA, 1115 bp, Homo Sapiens
gaaagagccccgtgtgtgcccggccctcttcaacgcggggggagacacaagtggggtacctttttgggggaggtccccgggcccttgtgtttcttcttcccagtaagtgggtcggcgccctttcttcccgaaatggctgttaaaaattttctccttaatagcctggtttctcccacccaagcccattcagggggttttcggggggccgggggtcccaagtaaggggattacttctgtctcccctttttcctttaaggcgtttacttaccatggttaaggatattcgggaacctctctttcttgcatttacctttgggccttcggcagcatataagcaattagtctttccaaaaatttcagttcaaatgaatctttatacccctgcaggtcagacagcatgcccaggaggctccgcaacaggctccggtccacggcctcgccgctcctctcgcgctcgatcagcagtaggattccatcaatggttttactctgaaccattttatcactaataatatgggttctaaacagttctaatcccatatcccagatggagggcagcgtggagttctgcagcacataggtgcggtccaagaacaggaagatgcttctgatcatgatcatttgtctgcagtggtcctgccagcacgtgttaatcttctttaaaaataaaacactatctagtgagtcttctctaaacggaaggatctgtgcctggacgtggtcttcacaggcctgacgcagttgcttgtagagcattggggagactttgtgagaacagagattttccacagcctggtagagctcctcgaggttgtacctgatggaggtgctgctctgcacggcccgcaccgcctcgtgcagcttccgccacgtgtcctgcgtgtagttgtcgggcagccgaggtctgtctcggaagttcttgatgaccagcttcttggagccgcccgcgccccccggcttggcgggcgcggcggccagggccgcgggcttggtgaggccgttggtgcggcccacgagcgccgagaagctgcccttccgcggggcctcgtccgccatggctgggccggaaccgccgcgccctcgtgccgaattcgccacccaggcctcgctaccta

SEQ ID NO: 451879 - DNA, 990 bp, Homo Sapiens
  misc_feature (688)..(696): n is a, c, g, or t
ggaaaaaggcttccacataaccccaaaacggcagggaaataacttccaaggttaatccttccaaaaggtggcccaaataaagtttcccattttcttttttccagggatgactttgtttcatataaagtagccatccaatgtcgccttttaaagccctgcaccttcttttttcaccccgcacaccatgctttcttttggagcccaataaggaggaaaagattccattaaatttggttgaggatctgggaggtaattaggagagtggccaagctctggcgctaaagcttcatatctttcaagacaaaggccatatagaagagtgaggcaaagcaattgaggaagttgaaacaatgattttcctggatacaactttgcctgagggtaaccagggatcattttttcatctttagctctaagattttcaagttcatgtttgataatgaattgacattctgccattgtcaggaaatcatcattgttatcatcaaaacctttgaagttctgtctggttctgtatgtgaaggctctcatggtgttatcattgcactcttttaccaatcccactgcttctgcccctagtaacattctaatcttggaggcaccaacaagatataagttctgattttctagtgtttcttgttcatatttatttaaccatggtctaaacaacaactgggcacctccatcnnnnnnnnnagctataattctgtttttcagccattctttggtttcttctttgacatcctgagcaagttctatgaccaccaaaggtgtgaaagaactctcagaagtatccaaagctgataaggtcactttcatctttgacaaatcagcccgccgcagcgctccacgtcttcggaggcgggtccgagagccggcgagaaccggaggccgggcgaaagagtgctcggtagcggggggcgggccagcgccagtggggcggcgccgccgagcgctgggcgtggcgaacgcggcggggcctagatgcgg

SEQ ID NO: 451880 - DNA, 1262 bp, Homo Sapiens
gctaaagggggcaatagggtggtgtcccccttagtctccccagcttgtctcaaggggcccaaagggccagggaggattttcttaaacccccaaaaggttttggggcctatagggagggtaagggttttccccccgttggcattccaaggttggaaggacccggggggggcccccatttttttaagggagaaaacctttttaaaaagcaaaaagccaaagcccttaaaataggttaccttaagaagggcatgcctgtttcattacagacggtatgacccatctggagataaaaattgggagggctttcttatgtgggtccctgactgctccttagctttgagtttttctagcttcttctcatagcggctcataaagtaatcatctggtcaatctctgcatttttcaagttttccatgatcttttccagtctgagcactgatcgggctccttcaatctttcttgtactcaagtacaaggtgaactcctggaaatccaggagcttacaggtgtccacagagcagatattccggatatcactagttctatccaaatgaggaaaagacaccagtcctgacaacttctctaggtcctggaggctcacttggaattcagttaactggggctggaagccgatggcttcattgggtaccacaaaggcccctagcgccagtggttcggtagatactgagcttctgcgggccaggattaccttataaaggtgtgaggggactgccacgttgtcctcgccaatcacctggtaactaactattttctttccatcgcctctagtctgaggtaaggtcaaaggcccagataccacccaaacatcttcaaacctttctgtcagctctcgacagtacatttctattctgttcccaatatccaggaatatttatcaaaatcctgaggcacaatgttagaaaggtaaaaggtttcagccatggctttacttgaaaatttgttatttcctgctggagccatgtgtcctcgtgaccacccacttccaacataatcttcattgaaggcactgaaggttggagggatattgggatcaggcttaaatttacaatgctttctgtctgcatcaccatccggctgcttccctgtcaacgctccctcagcgccctgactccggaagaactgcagggccgcgagcccagctcccgcagcgcccactacagccccagccacgaagccgctcagaaaacgaacgggaaccccggaggcgggaagcgatactcttgatagccatcttgcccgag

SEQ ID NO: 451881 - DNA, 1882 bp, Homo Sapiens
  misc_feature (765)..(765): n is a, c, g, or t
ggctaacttttattcctagccagccttttcttacagctttaattcagatatttccagctctctaccaacacataaaaactggtttcaatatggatgacttgcaaaagttgggagtcatattgcacagtgctatttcagtcccaataagttcagatgcatccccttttattcttccatcttataccgaagcagttttgacaagtttacaggaagctgtacttacagctttagatgttctccaaaaggccatttgtgtaggaccagaaaacatgcagataatgtatccagctatatttgaccagttgttggcatttgtagaattttcctgtaaacctccacagtatggacagctggaaacaaagcacgttgcaagtgcaaaatataatcaggcggaatgggtagccttgaattatgtgccgtttgctgaaaggtctttagaagtagttgtggatttataccaaaaaacagcgtgtcacaaagcagtggtgaatgagaaagtgctccagaatattattaagactcttagggttcctctcagtttgaagtattcctgcccttctgaaagcacatggaaactagcagtatcctctctcctcagagttctttctattgggctacctgttgcccggcagcatgcttcttctggaaaatttgacagtatgtggccagaactagccaatacttttgaagattttctctttactaaaagcatacctccagataatctctctattcaagagtttcaaagaaatgaaaatattgatngtcgaggtagttcaacttatcagcaatgagatactaccttatgccaattttattcctaaggaatttgttggtcaaataatgacaatgcttaacaagggctcaatacattctcagtcatcttcatttacagaagcagagattgatattcgtttgagagaggaattttctaaaatgtgttttgaaacattactccagttttccttcagtaataaagtcacaacacctcaagaaggctacatctcacgaatggcactctcagtgcttttaaagaggtcccaagatgtactacatcgctatatagaggatgaaagattaagtggtaaatgccctcttccaaggcaacaagtaacagaaattatatttgttttaaaagcagtcagtactcttattgattcacttaagaaaactcagcctgagaatgttgatggaaatacctgggcacaagtaattgccttatacccaactttagtagaatgcatcacctgttcttcttcagaagtctgttctgcacttaaagaggcactagttccttttaaggatttcatgcagccaccagcatccagagttcaaaatggagaatcttgaccggctacaatatatttgaaagcaggaagatagtctaaaaaatgtttgctcctaattgagtcttctgtgagaaggacatttcttactgcagataattcttggcagctgttgttggcctcctttgaaattctacttacctgagttcagtaattcatattacaggcttgcacatcaacaaaggctcctgaatgaacagcagtgtaaggctttaatagaattaaactgatgggagggataattaacactacagtatacatgctatccatatctacagttggtgatttaaagtgagcttatgtacagtttgtggtgtatgtgttaatgatgtagctttttaaaaagaaagaagagatatttcaattcagtcagatttattagtctggtgtttttgcaccctttttcaagtacaaaatcgtactagaattttatggcaagatggtactgtaacattccatattatctataaccagcctttgttaacaaagggaactgatatacttgtgtgtataataaatggtacagttctgtaaaa

SEQ ID NO: 451882 - DNA, 1028 bp, Homo Sapiens
gggggagtcagggcagccggctcgacggattgccatggcgccgctgctggagtacgagcgacagctggtgctggaactgctcgacactgacgggctagtagtgtgcgcccgcgggctcggcgcggaccggctcccctaccactttctccagctgcactgccacccagcctgcctggtgctggtgctcaacacgcagccggccgaggaggagtattttatcaatcagctgaagatagaaggagttgaacacctccctcgccgtgtaacaaatgaaatcacaagcaacagtcgctatgaagtttacacacaaggtggtgttatatttgcgacaagtaggatacttgtggttgacttcttgactgatagaataccttcagatttaattactggcatcttggtgtatagagcccacagaataatcgagtcttgtcaagaagcattcatcttgcgcctctttcgccagaaaaacaaacgtggttttattaaagctttcacagacaatgctgttgcctttgatactggtttttgtcatgtggaaagagtgatgagaaatctttttgtgaggaaactgtatctgtggccaaggttccatgtagcagtaaactcatttttagaacagcacaaacctgaagttgtagaaatccatgtttctatgacacctaccatgcttgctatacagactgctatactggacattttaaatgcatgtctaagggaactaaaatgccataacccatcgcttgaagtggaagatttatctttagaaaatgctattggaaaaccttttgacaagacaatccgcattatctggatcctttgtggcaccagcttggagccaagactaaatccttagttcaggatttgaagatattacgaactttgctgcagtatctctctcagtatgattgtgtcacatttcttaatcttctggaatctctgagagcaacggaaaaagctttggtcagaattcaggttggctgtttcttgactccagcacctcgatgtttataatgctcgagccaagggtc

SEQ ID NO: 451883 - DNA, 1092 bp, Homo Sapiens
  misc_feature (234)..(234): n is a, c, g, or t
  misc_feature (329)..(329): n is a, c, g, or t
gtcttggaacaggcgcccttggcggttcttgaaagaacttccgccggcaggaactccacaggcggaatgtcggcggcaaccggcttttgccccggggacgacaaggttccagggggtgttcatttctttcccggtggtgcccccccaggggacccttcagatggggtgcagttcccccatgaagggggcccccggccagcatctccccgcttgatctcccacccgtattttgtncaggccttcagcttcttggggcaaggaagggtgcagccagggcctgggaacatctttcggtccgtaggaggaggagaggcagttggtgagtggcncagggggctgcccggtggtggtggcaacttcttggccaagggtgagatgtgaaggtccgaggggctgcgggcttccagtgagctgccaggacctgcgccgcccatcatcttggccagggcttttgggcttggccctggtgggttgggaggtccaccaggccgagactgggtccgtctcttcaggatctcccgcagcgtgtcgatgggcgagccattgacgtaccactcggtcacgcccatttgccgcagatgggagcgcgcgtggctcgagaggcccttgcggttctcgaagaactcaccacagaactcgcagcggatgtctcgtgctggctctgggcctgaggtgaggttcaagggcccctcatcctcagactgaggccactgtgcctttggggaggccggccgggggctcagggacagctgggggctcttgtcctcaggattcttaggggtaggggagcccgccagggccagtggtgtctttttgaggagtggagagctgggcgggtggcccaggcccttggccgagaagccgggaggcgacttgatggctttgttgacagcaggggcatccaagggcttggccaggctgagcaagccgggccggggggccccggcgaccacctccttcagtgagctggacttcttagccaggcctgggggcagcccaaggtgggcgtcaggcagacccttctgcttcaccaagctcgtagaggaggtcgatgggtgcgccgctgctttccgactctgccactcccagctg

SEQ ID NO: 451884 - DNA, 896 bp, Homo Sapiens
tctgtatcccaggtgtctgacctcctaacacaagagcaagcaaacctaactcaccagaaaaagaaactggagggacagatctcagcccggcaacaagcagaagaagcttcacaggagtcagaaaacgaactcaaggaaatgatagaaacccttgctcggaagctgaatgagaaatccaacagagcaaatggaacttcaccaccagaatctgaatctccaagaaacactgaagagagtagcaaattgttcagctccttgtccgcaagactggatctggcatggagaaaactgttacctattttcctcgggctcatttaactgggaaacagagccaagagaagtgcttgtctttggatgccaagttgctgaaaacttaatagcacagctgatctggacttcatccagcaagcaatttcctattccagttttccattctggatggggctgtctcggaggaaccccagctacccatggctctgggaggacggttctcctttgatgccccacttatttagagtccgaggcgctgtctcccagacatacccttcaggtacctgtgcatatatacaacgaggagctgtttatgcggaaaactgcattttagctgccttcagtatatgtcagaagaaggcaaacctaagagcacagtgaatttgaaggctctggaagaaaagaaaaaagtctttgagttttattctggaatttaagctattctttgtcacttgggtgccaaacatgagagcccagaaaactgtcatttagctggctgcagaactcctttgcagaaactggggttccaggtgcctggcacctttatgtcaacatttttgattctagctatctgtattatttcacctagttgccactcgcacgacatcctttatactaacactcag

SEQ ID NO: 451885 - DNA, 292 bp, Homo Sapiens
  misc_feature (142)..(154): n is a, c, g, or t
agagacattatctgtttaataaatatgattgtaaaagcaataaacaagagcaattatacattacactacatagtatttaacaaaaaatacatcaaaaaagtcattttaaaattagaagtagttccaatactataagaaaacnnnnnnnnnnnnnaattggcttcctataaaaataagtcggcaaatgagagatttcaatgctcagttggattcctggaaaacacagaacagctgccaagcaccccactgctctcaaagttgctgtttgggaacttctgaggaaaaaggcaag

SEQ ID NO: 451886 - DNA, 505 bp, Homo Sapiens
  misc_feature (26)..(26): n is a, c, g, or t
  misc_feature (76)..(76): n is a, c, g, or t
agtcctcccactgcctcatcagatcnccccattccaccaccccgggccccggtgcatgtgccagaatagatcccanctccaaggagtatgaacttcccctcctgatcagttgttaaatttgactgttgtctgtcctcattacagctggattagaaactgtgttcaaacaaggagattccttgtggatttagggaggcatcttttggcaaggtcaattcccaatgacatgttaatgcatcgattttagagccgagttgtcctcttgcaatctcccaagcacacataagaaatgttcccaggataggttgggactttgtaggaaatcatttctgagatcatccatggcattaatattttatattcagttgatattgttattgtagagatgactctagtggagtttagcagatgactcttcaagaaactcgctttctatcgatattgcatttacttaggggttttccagctttttagtacacaccagatgtattcacaaacattccct

SEQ ID NO: 451887 - DNA, 933 bp, Homo Sapiens
  misc_feature (909)..(909): n is a, c, g, or t
atcagaggctggcatgctggcaggaacatcccctcttagccccagtcttctcttttctataatgagacgaccccagcttgcctccctccctggcttctctgaccctcaaaggagatgccacgcaggacagactggagagagaagcctgggcaatactgcccgcctgtcatggcctggtggtggcccacacctatcttctcaccttggaggccacacccaactttccaaagaccctgagtcaagtcaggaccctactactctcccctgctgctttcctgacagcttactcttcctccacctgctgagcctgtgccagactccattgctcaaatcgttagggttgcttctataaaaatgggtcagtagcccttcctgttctctccagcccagcatacaggaggatcaaaggaggtgacggagcatcgtggcacggcagtctcaatgggtcataaacccaggccagctgggctctaagcctggcatcctgtcatgcttagtccttcagctgaagatcagaggaagcctctcccttgccctctccagctctaggggttttcaggaggcccaactgcaataatggagcactagtgcttttatgtgcaatggtgtcgtccatgcacgacagcagcaaacattctggggctgctttttattgttcccacggctgacagcgtggcagcggagactgtggaggcagtggagactgacttcttcctgctgacagctggatgtcacacatgaaggtctggcctagcgagtgatgggtctaggccctgaaactgatgtcctagcaataacctcttgatccctactcaccgagtgttgagcccaaggggggatttgtagaacaagcccccatgagaaacagctgttactctacacttttgattgcctatttctgatggcaanagatacatactctcttcaaagagc

SEQ ID NO: 451888 - DNA, 967 bp, Homo Sapiens
catttgctttgtcagcatctgggattttgttttcttctgaggtaagttcaggtgaagggggagactgtgaggtttgttgagcatcagtttgtacctggggctgtgttccagcttcactgttgtcttgctggacatttttatcagtgtctgggttttctggtggtctctgattcagacactccatgtcagcttcagaagacatttcattctcctcagttgggactttctccaccatagatgccgtagagatggtgaaaatgccatgggtgttgactcgcactttgacttttactctagatttttctccatctttctgtgcagaaacattctgaactacaaagcggcctatttttgcttctggatatggaactccttggggatcagaatagaaagcttctagctcaaaaggcccccttctcagaaaggtgagaactttggagaaaggagcagcatggtttcgactaaagacttcatgaacaccttcagtatcttctgaatcatggttccagatcagagatattggaaaaggaactgcatctgtgacggaaaattctctaacattaaatgccggggaaagtattgcacactgtaatgcacatcctctggctactgcttcatctgcattgagtgttgtgctaatatcttttccaaagaatttggcaattctttccttcacagctggaattcgtgtagcgcctccaacaatctcaactgcactcacatcttctactttgagatgagtttgttccaacagtgaataaaggggtacttctatcttttgcagaagttcagcacagagttcttcaaattgtgacctgttcatctttccggaaacatctttatcattcataaagcattcgatattcagtggaaggtctgtgctaatgttagagatacgtatctctaacattatctgtttatagaatgatctatgccattagttgaaaactagtcaagggcagataca

SEQ ID NO: 451889 - DNA, 965 bp, Homo Sapiens
gttataaatcctgaatatcactaccaattccacagaatccagggtcacataagtttatctcagaatatcaaaaggttcaatcagacatgttaacaccagaaattcaccaggttccagaagaaaagtaaagtcatcatggggctggggcatggtacgcctgcctgtggtctttggctactttggaggctgacgtgagagtatcacttgagccccaacaggtcgagctgccagtgagtccagattcacaccctgccctccagcctgggcgacaacagcgagaaccctgttggccagcatcgcagggagactgcccgtgacctccctctaaggttgggaagcaccggggcggctgctctcagtcactcttccatatcatcctggaagtcctgtgaggagcttgtgtgcacgagggcaacctcgcagcagcgacgcccaccacagaatgctgatggctcaatcccagcagaagtttatttagggcacagaaagctggaaacaagggcttgactggaggcagctctgcagcaggtggagatttggacagcgagggctgtcctggagcgaagtcccaaggatcctcacttccctctgtaggccacccttggtgtggacaacagctgcagacaggcagacaccggacgggggcacacacgaggtcttctggtctggcctctggtgatgtccatcacatctctttctgttggtgagagctagttacctgggcccccagggtgcaagccgagctggcatggcatgcagaccaactagtaggatcttcttgccagctcaggggacaatgcacacatggagaagtgcagttggataccaggcatctgggaaaatgcacatgctcactctttttcaaagaaatgcaggttccaaaccaacaccattagaaaatagacaccagccacacatcaagattagaaggtctatggtgagaccactgatggagcgtgaagctg

SEQ ID NO: 451890 - DNA, 1026 bp, Homo Sapiens
gggtaataacaacaataaatttttattaggcaatgtttaaaaagcatatcaatttagtacagtttatatgatttgatgcatttcttctgcccaatggtcatgcaatattatcccctggatgctgtacttattcttgttctaagcatccttttagagtagaatataaataatttagtctctttgaaattataatcttttggttctttaagtctgttctgaaaactggtaccaaaccaattccttaattagcattgaaaatactgaactaaatatattcatttcagtgcttaccaaagatgatgaaaataagtatatgtacaaaatattttagtatttatgtgcctgtaaatacaaaaggagcaataaaagtgatttcatttcagaaggtgaacattttgaaagaaataatattcatgtaaattctgaactaaaatagaatgaaataaaattctgaaataagataaaaatagaatgttagcattataggaaactatagagattatttgagctaatcttctcattttatgtatatggaagctgagaagtgacatatccatagtcatacagctaataaataatcaggatggaatcgcttctcggccttttggctaagatcaagtgtagtatctgttcttatcagcttaaataatcaggatggaaattcaattcttcttattctcagttgagctttttctaattaaatgtattacgaaatattttcaagagtcccttaagaaaatttccacatatttcaacatgtatcttgcaaaaagcctatgaacttcaatttgtattcatacttgtaaaattatgttcacacattatttcttgagtttgttaaccaatgctttccaaccaaaatggagctgcagtctaagaagtttgtaattgtggccaagatagtaattttttcctgccctcatagtggcctaagcacccaaattggccacctccaagtgagaagcttcatccatttacctctataccttacaaatattatcatttgccatgaaatggaaaggttgg

SEQ ID NO: 451891 - DNA, 1070 bp, Homo Sapiens
actccccggttagtatgaaaaattttttcccgaagcggccaaaagggggggttagggttagtgcccttccaggtcccaaggggcccaagagccttcctagtaaatattcattttggcccccgaaataattcaggggggttgctttaggtgattgaaaatgagccgggcttgctaactatggatattcagagaaccccactcctgggcttccactcgcgtggctaagtatagttccctggcagagttcaatggaacaaaagtttccaggcgtacacgacctcacggatggcagaacattctcggaggagcacctcagctgccacgactcagaggagctcagagagaggctggcactgacctggtcacctcccatctcccagtcttgagccgggtaaatctgtggacctctcagcaaacaagaggcattcttgccagacccaggagcaaggggctctgatgctagttttgtccttcttgaggggttgagttagtcacaaagccttggtttcttcatcagaaaacaatcacagtttcgggatggccctcatggtcacggctcagccctgggtccacggcagctcgtcgggatagccctcatggtcacagctcagccctgggtccatggcggctcgtcgggatggccctcgtggtcacagctcagccctgggtccacgccggctcgtgtagagggagcgatggcagtgcacgcagccccgcacacaccgaggtccactctccgcacagcccacgctcacacggaggaaagatggcagcactgtgagaacacggacctgggtcttggcaggaatgaggtgagccggccacttgaagaaagcccactgctggagttttggtgcagcacccaagaacagccaccctgatctgaagaggccaggaaagcatgttgcccctgcagttgtggagagcacagattctctccaaatgcatcaaccaaacgacataacgcagaggcacccaggagggtccagctatccacatctgccacaccagacctcgccgcgcccagaccccggatcgccgacgcggacgcatcccgagaattccggacc

SEQ ID NO: 451892 - DNA, 889 bp, Homo Sapiens
tgggaccgtgatggtgttcacaggttcaccagtcggaattccaactccgcatatgggtcttcaagtccttagcgtgcagccttggctgtcccttctcctgtcctgaaaggggacgatgactgtagccccgtgcacctgatgtccgcagaaccttgacctccattacaccaatactctcactgacatgaatagtatcacattcaaaagtgaagatgcctgcatggtcatcatccaagatggtaactgtggccacacaaggggaggctaggacagcccgaggcaagggaagactgttgaatattgctggaggcatcccctcctctggctgctcctcctctatgcggacattgctcaaccttacaaagaagtgttcatcctcctcaaaaatgtcgtcatcaattatgcccacggagaactccttctgggtctctcctggcttcagaaccaccgtgccctctgtgaactcatagtcagcccctgcattggcagaaccatcctctgttttgtagtccacatacatggtctttgacatgtctccccctttcctcaccactgtcaggagtacagccccacagttctccaggcactggtaagaacatgggtcaaagaagaccttggaaataaagtcctcaggctcatcggtgtgcacctcgctcatgctggaggccttcttggcttgttctgctgcatgtttcttcaggatattgcctgcaccagtcatcatacgagtggcttggatacggtagaaggcgcggctcttctgttggtgggaaagagcatagtaattggccatctccaccagctgatctaagtccttctctgggtgtttttgcttcagatccttgagaatccggatcatctctctgcgggactcatccacttccttccc

SEQ ID NO: 451893 - DNA, 673 bp, Homo Sapiens
gggggtgtgcacaaaatacactaaaataaaattgcttaaaactagtgataaagaaaaattctcggggcgggcaatgacgaaaacacagtttgcacacaggaacaaaaaatgccagcaaacattttattggaaacaaagaaaattagaagataatgaagcaacatctttaaagtactggaagataaacattgtcagctgggaattgtagactcagagaaattatctttcaagatgtaggtgaaataaagattttgttcaggcacttagaacctgaaagaaatcatcaccagtaaaacaacactataaaaaatgttaaagaaaatgtttcaggcagaagtaaaataatatcaaaaggaaatttggatctacatagaagaatgaaaagcactggaaatggtatcaacatggttaaatatataagatccttttatttctgtttgaattcaattgattgtttaaacaaggggtcagcaagctatagcttcatgggtggactgcctgtttatgtgaacaaatttttactgagacacattcatgctcatttgtttatgtattatcaatgggtgctatagaattacaaaagcagaattaagtagttgtaacagagcctaatggcacacaagcctaaaatatttagcttttaaggaaagcatgtccggttctggtggctcat

SEQ ID NO: 451894 - DNA, 1624 bp, Homo Sapiens
  misc_feature (325)..(325): n is a, c, g, or t
  misc_feature (999)..(1009): n is a, c, g, or t
  misc_feature (1542)..(1550): n is a, c, g, or t
tttattaagaaatatcatacatacaaaagcacataaacatacagattaaaaaaggaaatgcccacaggcttcagaaacagaccctcaccagttcttctgaagacccctgttgccctcatgatcacctctccctccatcaaaacggctaacattagattttgtcttaatcgtttccttttatcatgtatttgacagcctgtttttgactttcattgaaatggaaccatagtgatgtattcttctgtgacttgctttttttgatccttctattgttgagttttgtccatgttcacatacataggctgcagttcagtttcacttctgntggaattccactgttggaatataccacaggtatttatccaacacactgttggtggacacttgggatcttcccgggttttttcttcttttcttcctattacacacaaatgcttaaatccatcccctggtacgcatgtgtaagagtttctctagggtatgtatccgggaatgaatggctacgagagaggttatggcacacccacttataccaaattgtttcccgtttcccaaagttgttgtttctaaacattcttaaatctgttgacaaatgacctatttgggatggctgaggggaagaaatagatcagctacaaaactcttgaatttttaaaatagtaaattcaaaattctgatacaacaatgaaaaatacatttacttctctgctttggcttacttgcaactgtacttttctataactacaggttctacttcaaagtgctctcctttatctcaaaataaatgtttctaaatattaccaggtaaaaacagcaagactcagacatacgggtataccgtcatatattttgaaagatctatacatatatgtttatatttcctcccacctcccatctccccacaagaaacaacttggaagaataactgttaacagcagcaagctcctgcagaggaaacagagaataggagtagtagggagacatagatcactgaacacnnnnnnnnnnnaaccatgggcaacattacaattataatacaaattttcaaaagtagacctggggttctttcacaaacaactaaaaaatccctcaggaaatcaaacttgaaaaccaatcctgcatgaagtcccatcccacagaattgtatacataataacttcaagtgttttttgtttcatgcacaatatcagatgtttaaaaacatattcacatagcccatctgcaatgcatttttaaaaacagaatggatgagggctcagagaacttccaccataaaaattttcagttcttacaagtctgaaaactttaatcagaaggtggctgagctcaaccaatatgtggtccaagtgttctcagaccttagaaataaggttggttatttatcctctgtgacactaactatatttaaggaaccagaatgcctaaggagagggagtaaaaatatctgagctgagcaatatgactaggttattataagctcaagatcaagaaaaggatgtttcaacccatactgaaaaatgaatggactgtgtttgaaggggnnnnnnnnncgttttaacaaaaggagcatgatatgtattatctctacattccagaggagaggatgtcttgagcagcagactgg

SEQ ID NO: 451895 - DNA, 768 bp, Homo Sapiens
gttcatttcagagaaaagccggagccccctctccctcccagccccagaactaccagtgttccagggcacccctgccctcgagcagagttcttccacagcctccggcatcaactcccaggtttttccagagctggccctcacagggggcctcccaggtccaggatcccagctgagatttaaggaactcggcacagttccaaggggtcatcctgaaggcccatgttaccctatcactcactcacctactctaaacagaaaaagaaagactcaagtcctaactgtaccctgtggaaccggcaggccagcctgtctaaagggcacacaagagtcacccaacggagagggctccctcccagctctcctttaccctattctttggaggaacaccatgcgggtcccagtgattgcctaacctttatgctgctaccagaatgaggtgaaaggaagagacaaagacagaacctatgagttcccacactcgcaaacagctggcctgagcccaccaagacctcacacaccaactaagagggcactcagcaagaaatcagccaatacttttggctgtatcgtgcaaaaagacagggtttttacatcgtgcaaaacaggaaactgagttatgaacacgggccatctcaaccccccaaccaactccctttccacagagaagtggccacattgtcccttttaacaaacagaaggaaacctaagaaccaccagctgacccgccagcccagcgcccttccaggggagcccgaggcctcccgccag

SEQ ID NO: 451896 - DNA, 1076 bp, Homo Sapiens
gcattttcaacaacttgactcaatatttttaatatttcatcacaaaatccagagatgtacatataattctttacacttattttacagaatcaggcatagtttcttacaggcctaaatcctgaaaaggcaaagggaagattcagcataaatacaacaaagggagaataaagactggatttatattgccatttgggaccacggaaacatacacaaaggaaaatgtacatttgttttaggttttccagagttcatttggtttggcttgtttccacaatgagggataaagtactgaaatctgctatttgaaggaaagtaacctgacccctgtggtaacttctgtgtgcaggaaccattttaccctcgtcacaaggtggcacctggaagtggttagccccatttagttcctgtcctctcttttaactggaaccaaaccaaaccaaacaaatccagaatggggtcacctacaagcaatatagttagaaatattaaccctgatgaacagaaacaacactgcatctttagaaaatccaaaaccttttgttcatattcagaacgattaaattaaaccacccaagtagaacaaataattcacattcttagctgagttacaatcaagttctgatttcaggcagcttttaagatttagtctatttccccttcacgaattagcagaattagaaatttaggtctgcttaaatcacagttgaggttgaaatatcaccagctacaaagtcagacaacatggttagctgaaatactaccgatatcagacatgattgaattccaaagccatatactgatcaaggaacagattatcgtacaagttctaaacttgatcgaaacatactctctgaagtagaggcatatgttgtgccaagtgtacttggtagatcaatatcaaggctatacattttgtgaacaatctaatgttattacactttctgcatttttcccctaaacgatgaaccaatggtcacacttttcccctaatataacctaattttcacttattttaacacttccaaacaaatcaattacattactaacacaatcgtttagccccacatttatcatca

SEQ ID NO: 451897 - DNA, 569 bp, Homo Sapiens
ttttttttgtggcttcaggagggtttattcatgttggggagggagcaggtgagccacaggggcggttgcaagagccctgtgccagtcagggccgggctgcagccgcccacaggacagaccagagaaggagagattgtcggaacccagaaggagggagaggctggactcggccagctccaggcagctcacaaagaagccgggaaagtaaagacgaggccctcgctctcccttcctcctcgacctcctgctgggggcccccgctggccaaagccaaccaccaagtgaggggcacgggggtgctgtggctgtggtccatgccagccggactcctggggcccagggaggggtgaagccaggtggtcagtggagctggaggacagagaagacactgaggacaccgagtccatcggccaacacacctcgcaaggtggtggcactggcggcagtcacagcaacacaagaatgaacctccctgatgaccgtgtcagggcctggaatactctagggaaaatgaggaggaaaggactgaggaagaacaagaaatgagggaaaagaacaagaaagcaggc

SEQ ID NO: 451898 - DNA, 786 bp, Homo Sapiens
attcttcacttttgtacatggtgtttttgtttatagcttctgctggcactataggaacgggtatacaactatttactgatggtgcttccaattttgctgttacatgactcaaacatactgggttttatgagatctttttagtaaaatactaataaattattcattttcaaatattatctctaatagtgtgcataggatcttaatatggccacactttggttacataagtcatgattaagcagaatatacagtggccacatagtaggtataataacttgatactgcttttttgtaagataataagataaaaatacaattacataatattaattattggactaaaatgacatctttttaatatacattcatcatatagacttttttcataggcaagggtattatgcattttatagcccactgattattccattagacacaaaataaaatctttgaaacatgcaaaatgaaatacttttgagactagagtatcgttgctctatcagtcgtttgtttttactaaatagaagcaaaaaaagactatctgattgctttctatatctggtgtgcatgcttttatcttgtacagtagatcagtaaaatgaacacatcaatcatcactgagaaaggattctcaacaactgttgttgccttacttgcgtaacaatgtggtctgtttcagctcaccgaatatttatgctgtgttcttctggcggtgcattacaagtaccatatacaaggaaagtacggtgcaataaggtaggtaacatcagcgcatacatttggcct

SEQ ID NO: 451899 - DNA, 721 bp, Homo Sapiens
  misc_feature (20)..(20): n is a, c, g, or t
aaattgttttaagcgccccnatcggtagtaggactcttgcaagtgtactcgtttgctccatttaatcatttttgcaaggtggcttctgagtgcgcattagttggccagtataaccagtgagataaaacaaacctcaatgtgcgtgccaggttcactacactgtcagaatactgagttttagccctagcactgacatcattactttgggcctctattttcttttctcaaaagaattgggtgaattatcttaaagaatttcgagtccaacttttacagaaatgctaacatattgtccaagtaaaaggtatcccaagtaaacgtctttgacatggaacaaagtaatcaaatgacacatgtaacaaccactgacaaagggaactgccattatcaagtattctaataaagattattgatataccacatgcccaatcccagtctatgcatttctccaaaattcacttgtcatctgggcactaagacatccctgtacacaaagtgtgactctactgacgtttcatcaatttccacaatataaatatgctaaaaaaatttaacaaatgggggaaaagccaagacccaggataaaggattctaatccagtatttattccacactcatgatggttctgtacatcagaatacaagttgtaagaacaatctatcaagataatttgctgatagtcgttaaataatgcagcacagcattacttttaatactcctc

SEQ ID NO: 451900 - DNA, 1133 bp, Homo Sapiens
  misc_feature (258)..(258): n is a, c, g, or t
  misc_feature (359)..(359): n is a, c, g, or t
atcaattctttatttaggtaacaagttggttatgttcactgcattgtatgaaacatcacaatatcatactgggaagtactatcagtacagggttggatcagagtggacagtttgaacgataaaccattttgcattcttcattccctatcttttaacaaccccccaaacccagtaaagggacaaacagcttttcacatcatcatgtaaagcactttaacttacaaggctaaaatctaaagaataaataaaatatattgnggcaataattccttttagaccaaaaatcaggtgcacaataaatcaaattgatcaggaaagctgtctgtatttaaatgtgtggctctccagaaacagcttcnggaaaacgttacagaaaataccatggaatttccatttcacaaaggaccagatgatgactcatttttaactacacacaagggcaattacatcctgctgaaacacaatttaaacatacagggaaatgtttacaaagcatccacaagcatgtaaaccatgtacaaatggatacattcattactgtctcctaacccagaaacttctttcagataaatactttactcttcactgttcaagcattcaattgaatttaatacatgcaaaactcagaagaattcaaggttactgtaaataatagaattaatctaaataaatcttcgagtaccttatgtgacaatcactctgtaccgtgcccaatgttatactgatgaaaagttactgaacccatgaagatatctctgtagtatttccttagatctaaaatagataattttaaatgtatttatagtaatttcaatgtgatattctgagcttttaaaataacataaatgattaaaaataccaaattacacaaaactcgtatcttaaaagctgaaaaaattaaaactatagaaacccacatgtaaaacaaaaatcataatttacattataaaggcaaatctcatctttaaaaaatttccaacagtgagatgtcaaagcaaattataaatagccataaattaatccatttggtttcaaaagattttctagtgagagttgaaggatgcagtagatacatgcataaaatttgtaagggtttataatattattcccaaatacactttatcttgaagccc

SEQ ID NO: 451901 - DNA, 713 bp, Homo Sapiens
ttcattggaattgttctcagctctgaaatgcaccattgactggagcagtaataagcccaatggagacagggctgtaagtgtgttccttctgaatgttaacagctggaggtccatactatctccaaggatttgatggcctttaaaaactaaagaaaaaccaggttggtgggtaattttaggtttattgtatatagatttgcattgggcaagaacggaatgttagaaatctgtaatactgtatgctgatggtaaacttactgtaaggatctcatttgggtatctggaaggtgatagttctgtttctttgttatatacacagcatgttacagagatgtgatttttctccccattaaacagaactaaaagacagtatatttatttaaacgcaaagctttttccccttttatgtctcctcataaactccagagacagtctggaaggccctcttaaatttgtcaaagagcagtaaagtgtctcacgctcagtttttctagcagatcgtaatactctcagttgaccctgctgggatttgaacctgcagtttctattaagtttggtgtgtgaagtccaacaccttatcaactaggctttccctctgacatcttgaagcctccgtgtatatcctttggactctgcagcaaagtgcatcagttgttagtttactccgagcatggtattcttagattgaaaagaagtctctgaagatgtccaac

SEQ ID NO: 451902 - DNA, 712 bp, Homo Sapiens
cttgaataagcgttactttattctacatgcttttaggacaatttccagtggcattaagtgtttgtgtctctctgtatgagaggaaggtgtttattttttgttacaattttcactagttatagctaattcctaggacagtgggtccacagggcccttcacattgccattctggaagtgaaaatctaaaagatatttcaatgttagaaaatttaactgtgtactttactacaccaagaaaagctatacaattatatcaatatataccagaaaagactttgaggacaatcattctaccatttgtgataatcaattatgataccacaatgataaaaacagtgggttactaagcaaagttagataaatggaccaatttaacagaatgcagagccaagaaacatttccgtacattatatgtaaattggtaaaggtggccttatacatcaggaggaaaataataaactattttttaaaggtgctagggaaactagctatccatatgggattaataattcataagaatgtattcatgaccctagctagggaatggttcttaaataaacaagaagaagtggaaagactgaatttactatattttaaaacttccgtatgataaacatcacaaaatagatatgtgaatatgctaattctccatatttttatgtaagttaaaagactcacagaccaaagactaaaaatctcctcgttccgaatt

SEQ ID NO: 451903 - DNA, 711 bp, Homo Sapiens
gggcgaagcctgtccaagagatattttaatatttcaaacaacatatgggagtcattgtccaaaaacggtcagaaaggctttcaaggctaattacaaatggttaaatgtgtaaagaatatggttgtttaactcaactatcatgacaaccctatttatctcaatacttaatccaaaggttctgattggcaattatatgtctctgataacagaatggaaggcattccagagagtcagagggtcctgaaatagcttcttaacttgttagactggtctctgcttctcctcttgtcccattctaatccagtctccgtgtggaggcagaaagatcttcaaaagctcaataggatccagctagtctctagcttaaaccccttcagtggcttcccattgccctgaaagaaaaccagctcttctccaggttctgaccctgcttttttcccagtcttatctagtttggctctttattgtgctcccacacactggtcatgttggtcttttacttcctagaaagcagctacatagaggttttctcccaatagggcctttgcagcaggtgttccttctgacagtgctttgccctcagccttgcctgtgcacttgctccctcattagtcttcaccgtttcagctgaactgatgcctaggaaagcagctaaatcggttttaggtttctcacctctgccttattatacgtccacggaccctgtttata

SEQ ID NO: 451904 - DNA, 735 bp, Homo Sapiens
taaaactccatcttagtgaattttaaattatccagagatgtcaaactgccaaataaaaatatttcagtagtctttgcatcagcttaccttgtaccagaaacatttccaatttactatcaaattatagtaactgagcctgtgtgaagtatctcatcattttcgaaaggaacaccttgtgtgatgccagtgagcatttctaaaaagggtgtgaggtagaggtaaggtgagagaccatttcagaatgcactgttgctcaaaaaggtgatctggttctttcttcagagatttctacggggatagaaaatcgggagtctgccctcattaatctgtgactccacctcttgcatcaaatcaatatctatttgttgagcacttattgattaagaccttgcatatgtctgtccattttgatttgagatacaactttttgtgtgggttgaatgacaaatcactccaaacaaagctgggcacagagaatcagctaggagaccagttattcagggtccatttctcttggatgtaaaggagtcctgggtaaaatgtggctgtaacctaaaccaactagtccttgtgatttgtttctgccctctgtgtttcctgttgtcaaatgctaagtgtgtgttttgcagtcatgaactaaagcacaaaaagatgcatgagacattgtagtcatatgtctggtgtgacactttggagcaaaaaccttgcagtggtaaataaaaaatttccaacagg

SEQ ID NO: 451905 - DNA, 481 bp, Homo Sapiens
  misc_feature (88)..(107): n is a, c, g, or t
  misc_feature (192)..(224): n is a, c, g, or t
  misc_feature (298)..(351): n is a, c, g, or t
  misc_feature (370)..(370): n is a, c, g, or t
  misc_feature (415)..(415): n is a, c, g, or t
  misc_feature (439)..(439): n is a, c, g, or t
  misc_feature (467)..(467): n is a, c, g, or t
ccctctggtgactaccccaccaggccctgggtttcaagcacaaaactgggcggccaactgggcagacactgaactagctgcaggagcnnnnnnnnnnnnnnnnnnnnccatatcccagtggcacctggaacgccagcgagacagaactgttcactcccctggaaagggggcctgaagccaggagccaagtgnnnnnnnnnnnnnnnnnnnnnnnnnnnnnnnnncaggaaagtaagatccactggtttgaaattctcgcttccagcacacgcagcaatctgagatccacctgggaacnnnnnnnnnnnnnnnnnnnnnnnnnnnnnnnnnnnnnnnnnnnnnnnnnnnnnncggttttaccaccacagtntaagcaaagctgctggggaagttcaaactgggtgggagcccattngcagcttcagcaaggctgcccgtntttcagacttgcgagatttgctcctccntgggacagggcatt

SEQ ID NO: 451906 - DNA, 638 bp, Homo Sapiens
  misc_feature (462)..(521): n is a, c, g, or t
gaggtcaacataagcagagatttacttgaaaatgaaggtacacttcacagggtgggagtggcttgagcaagtggttcaagagcctggttaccgaattttttgggggttaaatatcctctagaggtttcccattggttacttgatgtacacccttgtaaatgaagtagtgcccacaatcagtctgattggttgagggaggggacctatcagaggctgaagcaagtttcaaagttacaccctatgcaaatctctgattgattgggaaaaggctgaagtgaagttacaaagttatactcctatgcaaatgaagacttggcccatgaccagcctcattggttgtggaaagggaccaatcagaggtactttcaatttttcatctaccatgcagaaaaaggttgggggtgggggttgcaaaggaagtagccaaacaaactctgactacaaacagaggtcccagtgggnnnnnnnnnnnnnnnnnnnnnnnnnnnnnnnnnnnnnnnnnnnnnnnnnnnnnnnnnnnnatctaagctggcccctcaatataagggcctcctcgtccaccgtccctagcccactagtcccaccgtctgcccttgtgctctgttccgttgccttccctcctgtatccctgggaattc

SEQ ID NO: 451907 - DNA, 1171 bp, Homo Sapiens
  misc_feature (282)..(282): n is a, c, g, or t
cttgttattatatccggcatgtttatttccccctcctgtcggtgcaattgttcacgattttgtactgagataactcgatattgtatttcagggcagcttataagatttgtctatttccccctccgacatttaccagaacttaagaactttttggtttcgtgcctttcaatctcacccttttgaggggtgaaacatgaaaggcctataaaggtccaggaaaaccatggtaaggtgcacattactcccattatcacgaaccaggtgatttgaagttgccaaagncccataattctggattctaataccagacttatccacttcaaagttctaaactaggaaaaaatactttattgagttaagaggcatatggtttttcaaatgtatttgtaatcaaatttcaggtataattttgtgacaatttattgtattacacttttgcattttcccctaaaacgtgaaaaaaatggtcatttttgttccatatataaaatagtattcgattatttaaaaatccatacaaatgatatttattactatttcttgtttaagccctcatgtatcttctctattgtatttttggattctgtaaacaaattactgtatcatgaccaatacttgctcaagatcaacattgaatccatggatttggtgtcactgagtgcaagccatgtgaggtctacatgtgctgggacataccattcaccaaacttctcagctgtttcacgactgtctctatcaacttctgtttgtctcgatcattcttcctgaactgagcaaatatattgttctttttgctagtatccttcatcttctccaaaagagtaagggctgtgtttggattcacccgaaggtacttagaagctggctgcccataatcagctaggtaagtagaccaatcccaaaccataaacaggtcaaggagttgtctgaggtcaatgaatgctagctgcagggtatccccctggaatcctggcacaggctcagagctggcaaacaattcacactgtatgacatctaagttaaactgctgaacagctcccatgcttatttgttttaactcactgtccagtagcatctgcattaaggactgttgacagatgctggcaggctgacatgcaagctgtctgagccactttccccgacatggctgcatgatcccatacttccggac

SEQ ID NO: 451908 - DNA, 822 bp, Homo Sapiens
tcaggccccatgagcggactggtcaggtcccaaatggtggcccatgtcaatcagggtcttccccattagagaagaccaagatttatgggctcttttgacgtaaaccagttcaacaattttggcaactctatcgttcaaatgaaactgactcattgtaaggcatgtaatgagtaggaaagcgcttatgtattttacatctgttccgggccacatggctgcaccactagtatgtcctgccctctggtttgtgatccatattggtgtcgcttcttcccaaaacttggaatcataaatattcatgtgatccaaggagaaagatttgttccgaataggatcaaacatatcatttgcaacaatcccatgattctctgcaaagaggccagttaccaaagtataatggttagggtaggtttttgtaataaaaacattagtaacttgcttcacgtgaacaccatatttcataatataatgaaaatggggcgttggaactttatataagtaatcccaacggaatccatcaaaagaaactagtagaaccttttgctggtctggttggagagaaaaggtggttgaaagactcagtgcagcaagtatgaaggacaccaagataaatttcgaagtcattttcaaagtacttgatcagttcagtgtaagataatcctcgcagcgatccgttcagtccgtattagtttggagcaacgggagggagggtctggaggagactccctcgggcgcgccgcgggtaacggcgggagggtgactggaggaacgcccccggaacgcgcaggagctcacctgcgctcaatctggagcggagcacct

SEQ ID NO: 451909 - DNA, 463 bp, Homo Sapiens
ctgagggatgcccagaagtcaatccccactggcaccatcctggccatcgccaccacctctgctgtctacatcagctccgttgttctgtttggggcctgcattgagggggtcgtcctgcgggacaagtttggcgaagctgtgaatggcaacctcgtggtgggcactctggcctggccatctccatgggtaatgtcatcggatccttcttctccacctgtggggctgggctgcagaggctcacgggggccccacgcctgctgcaggccatctcgagggatggcattgtgcccttcctgcaggtctttggccatggcaaggccaatggagagccgacctgggccctgctcctgactgcctgcatctgcgagattggcatcctcattgcatccctcgacgaggtggcccccatcctctctatgttcttcctgatgtgctacatgtttgtgaatctggcctgtgcagt

SEQ ID NO: 451910 - DNA, 1154 bp, Homo Sapiens
  misc_feature (450)..(546): n is a, c, g, or t
  misc_feature (568)..(576): n is a, c, g, or t
  misc_feature (826)..(837): n is a, c, g, or t
  misc_feature (1082)..(1082): n is a, c, g, or t
  misc_feature (1107)..(1108): n is a, c, g, or t
ttttaactactagagatatatcactaatacatacagatataaaagcagcatagaaagatacaggtttctcaccaactaggaataaagagactaaatgtgggcatatggttaaactacaatgcatcttcacatttgtccaacacatttacaagaaaaacaccattgggaaacctcacaggacagaagtgttttaacaccaagagaactactagtttttaattaaaaatccaaacagggtggggttgaaaaattttggaaaggggctggagctgaagccaccatttttaaaattatttttttcaatataaaatgaatgagctggaatagacccaatgtcttactctgtggaaccttgcaaaagtgaagaaacgttgaagggttatttagggcagctggctgatgtctaaactgccagaatgctaattaatctgcaggctgagtctcttactnnnnnnnnnnnnnnnnnnnnnnnnnnnnnnnnnnnnnnnnnnnnnnnnnnnnnnnnnnnnnnnnnnnnnnnnnnnnnnnnnnnnnnnnnnnnnnnnnggagccttttgtattatggcannnnnnnnncttgctgctgtattcatacatcccattgcaaatcatctttcatttttcattctgttgacctggatattattatttcttttcagaaacaggaaaaaaaccgaacatctgtgtctccttccaatctgctgcacatctgcgcgttttgtagcgggtcttcaaagttcagttagcaacccacggacgccattcatcttcttgttaaaatgtctactgctgtatccaatgctcatgcccttgagggttttcctcnnnnnnnnnnnnccattattgtatataaagaacattgtgacttttaatattagcatttttgctttcaacagcaattagcaatctcttggtttgctgtttggtaaagcatcggttaatgaggtcatctagtttaaaatcccagctacttgaaaataacagggaggaggtcaaatctatcatttcatgttatattctctgctctcttttcagttctctaaagaaaagatatctttgttatccacaataagtcattacgnccccgttactggccctctgtgtttnnctaccacctcaagatacagttaggttctctcttgctgaagtactga

SEQ ID NO: 451911 - DNA, 665 bp, Homo Sapiens
ggtgcagcacgaatcaactgccatagcgaatacctgtttgctctattaaatggctcctgtacaaatagggttggggtggacagcagggcttgaggatggggacagtgtggagatgtttgggcctgagttagaagaatttctgtattaactatttcaccccgtctgggaaccatgccttcaggattctctttttctcttgtcctggagaaacttgattctgctggttaaatctattgttttggaatcttttcatcctcattgctatcaggaagcccagttctgtaacaacatctcccaccatcagtccctgccttggcaatcaggcacctgccgattcctagcacctcccgtctctttaagttgtcctaacaccttcatcttgcaccctttgtagagatgatccaggcttctgtggttctaaagcagcttcagaaggcagcaggcagctcttaggagaagagagaaacggaaaatccgagtttgaaggaggtgggtcaagaacagcaaagaactgtagagcagagggttcttgaccatatcttgcatcctgagcagcctgccccttgatgacagatgtcccagattcgggcattcttttgtggctcatgggaaagcacggctaatccgtgcgagcccgcgcgctcgcccctcggctgcattcagcc

SEQ ID NO: 451912 - DNA, 1314 bp, Homo Sapiens
  misc_feature (99)..(110): n is a, c, g, or t
ggggagcttttattttaggaatgatgtcttttagtcatttaatagttgctgtttttattaactcttaactgtacccataaactggatactttcaacttnnnnnnnnnnnngagaaactaattatgtgccctaaggatcaccaggccttaggttctacctttatttttcttctactgttaaatagcaacctcattcctcaggctgctgatggaattggtaactgagtaatcaggccactgtgctcggggacataaaacctgtggccgctgccattgcagagtcccgtcatggatcagagttcgtccctgggaaacaacttgtgccgacggaaggagttcttcctttgctcccctcatacctcccttccttgcagatgggatccttgcagatgggatccttgcaagggcagagcagctcttagagttgtcaggcccttttctttcattctgcttattttcccataggcgagtactgctcagaacccaggctgtgagttttttgatgtggaaagctatttactaagcatgtcttgacgcagaggatggagggaaagaaagcctccaagagagtggtgattctacaaccatcatcaaattttgggttgaaaactcaaagctgctgatatgtatttagtaagcagattacagtaacatccctgtatttgcatggcccctgtatcagtcaatagcatttcagatttgtgtggtggtgtatagctttccttatttcatatcagggtgttttcatttgatcccaagtggtatgtcctgagacagaagaaatagccccattttacagaagaagaaacccaaaattgcaaggaatttgcctaaggtcattagaaagtgtctaaaataagacttgacccggactctctgatttcaagcccagcgattcttctaacaggccatattctttcacttttattatcttgacttacgcaacaaaggagataagccaggtacatgtcattaatcttcctatgtatgacaactgaggctccaggaggttaagtgccttgcctaagattacttgggtggtggtagaactggttttcaaaaccagatcatctgaatggaatctaagtctttcttctgtatcaccttgttaatgtgtcaggaactaccaccccaccttccaaaacacatacacactctcacttttaatgcggacccatcttagaataaactagttaaggactgactgctgaacatggtccagaaacttactgtcaaattttgcttttgagatgtgcttgtgttgtgtgaagtctttcattccagtatggatgagggactcccttagagatcatgg

SEQ ID NO: 451913 - DNA, 947 bp, Homo Sapiens
tagggcttccctggtctcgggttcctagttgtttattgatgtaattttatgtacatataatattgaatggtttttatgtccactttcccagctcgtttcaccagtttcgaggccttgtcgtatatacaacttcggtacattcgcgggaccagacagttaaagtcacttctaccaggaattaattcaatctaatctacttgtttaatcattgttccaggaatgtgcaaattctgcgattgttgtaaatacttaccttcggaatctgcacgtcaccaattgactctggattctcattttacacggtaggcaacattgtgttttgtaacacattggaatttatatgtacccttctttctcgcatatttggatggatcttttagaagtgaaacctttatgttctcctgttaggaatttaccgctctcgaccttgtatgtatgtcacttgcccacctcctgtcaccatggattgcaagagttcatagtctcagtccaatgacccggagtatcgtggcaagtgatggttcagggggtcctggagtgtgatgcactgtaagtccagatgtggtcacctacgacgtggtatccacagtaccccagggtctaataggctgcagccccagtagggagtctgtgacccaaggccatacaacatctgcacagcacctcatgcgcacagctgcaccccaagacattaggctgattttcaggagtctccacaggttataaattccttgacactcgacagggcgctgcagatgtcttgtcaactgtctggagtatcctctgggaggcctattcctaactttccctcctagcaccagagctttgttcacacccattaacactaaactgaattaaatgcacaacaaggaaacgcactttctttcatcggccctcactgagcacagacacgctgcacccaggcgtgtcctccaggccaagatgcc

SEQ ID NO: 451914 - DNA, 441 bp, Homo Sapiens
ttttccgtaggacatattaagatgtttattatttactaagagtaacatgtatacatttgcagtaatttgtacaatccaactacattacaattcacagtaacatacactagctctaacctgccttggatacaattaagtctcctcaacacactattttatcgccaaacttacattctggcttttataatcattttgcaacacctggtacagtatacacctatagctttgccatagaaatgcccctaaatgcccttcagagagcagaggtgaatactttctcatgaagaaacgccaacttttctaagcgagttcgtttcagtagtgggagccattcccagtaggataactctaccacacggtaagccaagccgagccagctgccgcctcttcatattgtgcagtccaaggagatccctggagccatagcaatgctggttcccc

SEQ ID NO: 451915 - DNA, 1825 bp, Homo Sapiens
  misc_feature (401)..(656): n is a, c, g, or t
  misc_feature (658)..(668): n is a, c, g, or t
  misc_feature (1235)..(1248): n is a, c, g, or t
  misc_feature (1344)..(1583): n is a, c, g, or t
  misc_feature (1600)..(1633): n is a, c, g, or t
  misc_feature (1754)..(1769): n is a, c, g, or t
agaagaagggatatttatcctccagattgcccgctggagaaaaatttttgctatcgttatgccgcagtagagtcctcaaatattttaatgatatctccgcggggagcgagcaagatattctgaaaagatattctcaggggagatattgtttttccttgtctgaggggagggcgccatttcccagtttagtattgttgattatgtgaggaggagaaaaagggattttttgcccccgcaaaggggataaggcgttccagggccaaaggaagtgtatggacaaaaaataacatcacggctttaaaagcaagaaaacccttcctttagggagaggcaaagaagtcattagaaggaagagaattaagcccggggccagaggtgggctcaaccgccctggagattcnnnnnnnnnnnnnnnnnnnnnnnnnnnnnnnnnnnnnnnnnnnnnnnnnnnnnnnnnnnnnnnnnnnnnnnnnnnnnnnnnnnnnnnnnnnnnnnnnnnnnnnnnnnnnnnnnnnnnnnnnnnnnnnnnnnnnnnnnnnnnnnnnnnnnnnnnnnnnnnnnnnnnnnnnnnnnnnnnnnnnnnnnnnnnnnnnnnnnnnnnnnnnnnnnnnnnnnnnnnnnnnnnnnnnnnnnnnnnnnnnnnnnnnnnnnnnnnncnnnnnnnnnnnggaaaagcacacgaagtatagggacatggggaataagttaaaaatcaaaaggactcactcattgctttctaacatcttttacttcttgaccttttgaaacatccaaaaattagtagtagtataatctatgtcacaatcataatataacagttaagaaaaaacataaaatgaaggcctaaaaagatctttgttactcatctagaattatttggtataacagtattttcccatggaggaagacttggatttcaggcattaaacaacgcagaaaaaaatctcaaggcatcacagggagagggagataacttttgactctggtttcccgtgtttcaggccaggaagagcaaggggagaaaaatatttgtccatgggaacaagtaatcatgctctaaaggacaatttcattcgaatccattcatttccttttcatgcaaaatttcaaagataaagcaacataaaatatggggccacataaaagggagaaggtcttcaaggagaatttgtgcctttaagtttttactggtacaacagtctttcagcctggaggtactcaaagacgaatcatgnnnnnnnnnnnnnnctttatttcaaacaggttcagtgatatatgtgtgtgctacagcaaaggctggttgtggcaaagtttcatttcaaactgtatgatgtgggctgggcnnnnnnnnnnnnnnnnnnnnnnnnnnnnnnnnnnnnnnnnnnnnnnnnnnnnnnnnnnnnnnnnnnnnnnnnnnnnnnnnnnnnnnnnnnnnnnnnnnnnnnnnnnnnnnnnnnnnnnnnnnnnnnnnnnnnnnnnnnnnnnnnnnnnnnnnnnnnnnnnnnnnnnnnnnnnnnnnnnnnnnnnnnnnnnnnnnnnnnnnnnnnnnnnnnnnnnnnnnnnnnnnnnnnnnnnnnnnnnnntgacagagccagactcnnnnnnnnnnnnnnnnnnnnnnnnnnnnnnnnnngaactgcatgatgtataattttgacattatgtgggaatgtttaacttctgccaaaatgtagattcaatccaacattatgccaatttttatattaattttagtccctaagttttcataaccnnnnnnnnnnnnnnnngagaataaccttaccgttacctactaaggtaacgaactgtgaaatcaattcccccc

SEQ ID NO: 451916 - DNA, 1582 bp, Homo Sapiens
tttcttcctctcccttctcccgttctcccctgtttcctggccttcatcccttgtcctgctttcggcgctttgccttgtcctgctccgtcttgtctctcggttctcggcggcctccgcggcgtctcggcgctggaattttagggcagctgtcaggccttcctggtcagttctggggcagtggccgtcaggcctcagcctggcacgggcccaggctctggatagagatttgcaggccctggcggcaggcgatggtcttcagctgacactcgttgccgtatgtgactccatctgacccacagaccttggtagcgttggcctctggacaggtgagcatcgggcagacacagtgggctgagccagactcctccacgcaccgcgcaccgaactcacagcgcatctccgcacaggtcgcaggcgcagaagcgtcagcttcacagcccgcggggcccagggcacggccgtctggacactgcccacacttgggtccagccaccccgggcttacacgagcacagccccgtcatctgctcacagtcatcccgcacggcgtccttggggatcacagctgacagggctgtacagccactccggccatcggtgacagatgccatcgaaagttccaagaagccaggcctcacagcggtcacacctgaggccccccacacctgggcggcaggagcactggcctgtggctgggtcacaggtgccgccgtaagagccatgggggttgcactggcaggcactggggcagccagccaggcccacgccccggggtggggtgatattttcctggcagcagccgtagggcgtttgggcacagtgtaaggggggccacaggcggcagcggggcgaaggttgggcctcggcaggctccctgggccgctacgtagagccctcgctgtgactcacacctggccttcttcagctcacactcggtgctgtaggtgaccccatctgagccgcacaccgggctgcctgggacactctggcagctgaagtcacagacacacggcccgtcctccgagtcctcgtcccagatgccaccgcgctgccggcacagctcctgctcacagtcaccgtcctccccagagccagagcctccggaaccgcactcggcctgctcgcacggccctgcccgggcctcctcgatctgtgtctgctggaggcaggcggcttcccgtagctcgcaggcactgccgtaggtgacaccgtcgctgccacacacggggccgggcggggggtgctcacaccggggacacacacactgccctgcggagcacacagccccaaaagcacacacggcatctccacaggtctcacagggtccagctgaggccacgtgcaggctgatctggtgtgtgcaggcgtgcacgtgcagcatgcactcgctggggtacgtgtgcccgtcggagccacacacgggctgggccaaagccacgcattcagaggggcacacgcagcgcccggtctcggcctcgcacagggctccaaagcggctctgtccgcagcggtcacagggtcatgtgcgcgccacagggatctcccgaccgagggtacagaccgatcccgggaattccggaccg

SEQ ID NO: 451917 - DNA, 1104 bp, Homo Sapiens
  misc_feature (178)..(178): n is a, c, g, or t
tggcgcgagctcggggtagacgcatgttcacgcgcgccttccccgtgttcgtggggcggtgatatggagtggtgggggcgggcgtaagagactggccgcgccgcgcggcgggtgagcttatggcggctttactgagttgccgcgggctcctgaataagcggggcggggtgcgggcatntccgcccgactgcggccggggttccgcgcccgggtcttgccgaccggccgaagccccggattttggcgattcccgccccgcggtccgttttgcgggcggcttcggttaggggtcacgcgcgggggccggggggtaatgcgcccgcgcggatttgggtcggacactggggcaaggggaccggtgggcgcccaccctgcggcgttccaaggagggcgcgcccagtttacggccaggagccattggggctgttttccggggaaaccgcccccggaaagtgaggggggtcattcccttccggcagggggcgggattcggctgaagcatagcatgaagggggtcctcctttgtacagctcctccattggtccgctgctcccgctcaaagcgggtgatgatgggtgcgctcatactctgtgggcatggaagcgcatcagcagctccaggaagtccaggcccagagcctgtcaggtcgtacgcctcaatggcttggcagatgcgctcggcccccaggttgcccttccgcagggtgatggccaagttcttggcccggttggcctcaatgagtgtcgccttgctgggggccttctgggctgccttactcttgagagcgctgaggtccaggctggggccttgggacttggtcttgaactgttcctcaaaatcactcatgtctagctcctgcagcaccttctcatcattgagctctgtgaagacagtgccggtgatctggctgggtttcaatgccacccagttcaagagtggcattcggaacttagtctggatgggcttcttggccttcactcctgggcccaattctgagtcgcgtcttcctagggcatcaggaggacctccgggaggcggcgcgtcggcggcgccggcggaggcaccggcccgtcagtgcccggaggtgtcgcggtggcggggtgg

SEQ ID NO: 451918 - DNA, 443 bp, Homo Sapiens
tatgtatttattcaaagaagttaatttggccttcgcatgaagttttagttttttaattttgttatcagcagcttttctctcttcctgtagagcttcatctttctgctgcagttgaacatccttctgtctaataatatcttttagctccaccaccaattgctctgcataagccaggcgctcctgaacatcttcttgtgtagtattattaaattccatgtcagattctggtgtaattcagggtctaggggagccctcatattctgatcagtgtcatcatctcctgataattcatgcaaaacaacatttgctaatcctgataatcggctcagcatttctagaagcgctgccgcctgaggctccagctgcccccctcccaattcaagccacgtcagctcgggaagcccgtacgcgacaccttccaccgccgcgccccgccagggact

SEQ ID NO: 451919 - DNA, 1035 bp, Homo Sapiens
ctcccggtccctcttttgccttgggtgtttctctcctgccgtcccgtccacacgcttcccgggttcctgcccgcccagggcattgccacagggaagtaccacgccgcggtgctcaccaacagcgctgagtgggaggcctgcctgtgtgaatggcgggcaggaatgtgtggggacctggtgcacccgctggtctactgccccgagctgcacttcagcgagttcacctcagctgtggcggacatgaagaactcagtggcggaccgagacaacagccccagctcctgtgctggcctcttcatcgcctcacacatcggcttcgactggcccggagtctgggtccacctggacattgctgcaccggtgcatgctggtgagcgagccacaggcttcggtgtggccctcctgctggcgctcttcggccgtgcctctgaggaccctctgctgaacctggtgtccccactgggctgtgaggtggatgtcgaggagggggacgtggggagggactccaagagacgcaggcttgtgttagcctcctgcctcggccctgacaaacggggatcttttacctcactttgcactgattaattttaagcaattgaaagattgcccttcatatgggtttggtttgtctttctggtcgtcagcgtggtggtggaaacagctgaagttttaggagacagcttagggtttggtgcgggccacggggaggggaccgggaagcgctggggcttgtttctgtttgttacttacaggactgagacatcttctgtaaactgctacccctggggccttctgcaccccggggtgaggcctcctgcctgcctggtgccctgtcccagccccaggtcccgtgcagggcacctgcgtggctgacagccaggctcttactccagccggggctgcgagcgcatccagccagcccagccctgtgaaagatggagctgacttgctgcaggggacctgatttatagggcagagaagtcacaactctggctctccgaattcacttgaggttcaattaataacgtcacccgc

SEQ ID NO: 451920 - DNA, 462 bp, Homo Sapiens
  misc_feature (340)..(340): n is a, c, g, or t
  misc_feature (344)..(344): n is a, c, g, or t
agtctgtgacaattttctccagaccccaccaagccccctaagctgcttctaagagaagaatggcttcactcctgtcaccactgggcacgggaaggagaagccaaactcatcttaagagttagttaatctttcaattgcttaaaatcagtcagtgcaaaatgaggtaaggaaccctgtgtcaccagctgggaagtagccctcacacgagcctccgtctcttggagtcacgccccatgttgtcgccttcctgggcatccacctcacagtccagcggggataccaggttcagcagcgggtcctcggagcacggccaaaaagagccagtaggagagccaccccnaaanctgtggctcgctcgccagcatgcactggagcagcgatgtccaggtggacccagaccccgggccagtcaaacccgatgtgtgaagcaatgaagaggccagcacaggagctggggctgtt

SEQ ID NO: 451921 - DNA, 1196 bp, Homo Sapiens
ctgatccttcatctaattaaacttcctgcagattttataaccaaagagaaaatgacagacatctgcaggtcttgtggtttctggcctggatatctaattctctgtttggagctggagagaagaagagaggccttcaccaatattgtgtatctgaatgatatgagcctgatggaaggggacaatggttggatcccagagaccgtggaggaatggaagcttctccttcatctcatacagagcaagagcacgaggccagccccccaggagtcactaaatgggagcctcagtgatgggccttcccccatcaatgtggagaatgtggcacttctgttagctaaggccatgggcccagatcgggcttggtcactgctacaggaatgtggtctggcccttgagttgtcagagaagtttaccagaacctgcgatatcctgaggattgctgagaaaaggcagagacacttgaattgcttccactttctggctattgtgaataacgctgctatgaatatgagtatacaaatatgtcttccagacactgctttcagttctttcgggtatatacctgaaagtggaattctggaatcatatgggccttgatacaaagcatgcttgaaaaatgcgatcggtttctctggtcccagcaggcctagtgggagaagattcagcaggatgtcatgacattttgagaaaaactaaatcatgctcctgaaccttctgaacgcatttgttattgaaggaaagacaccacccccaaatcctgccatcttaattggggctactttttgtcagtgtctgtaccccttggcatcggcatctggtgactctttatccatgacccttcgtggtttcttaaccaaagttgtactcagcatttcttaaccaaagttgaattttgaaaagagtcagtccttgtttgctggaattagaatgttaatgtcctagtattattccgaatcacagtattaactgcttgttgctagtggattagacagattcttttcttactgtggcttccatgttgggagcagaagcttttcatcctggtcacatgaagacagatggtattattgactggagttgaattatttttatatcttgtctggcacaatatggaaattactgaaataagatggtgtataatggaattaacacccaaaataagtagaacactgaagatttgaatttgatatttaagt

SEQ ID NO: 451922 - DNA, 717 bp, Homo Sapiens
ggtcattactgggtgtcttccacactttttggagagtaaatcagtaacccatttagttataggattcatccattctgatttctccgtagcagtggcagcataacctgcaagagatttagttggtgtcttgatttagccatccagttccttaagtctccctcatcgtttgatggaatcaatagtgacattttccaggggaataatatgcttgtttgttatattttttcttctggatgacaatattgccatatacaagaatatcattaagcaagaaaaaactgccttgctttgggctttttcctgcacaacttagtcaatactccttctccaataagaactcgtccaggtatagttaaaggttgaccagctgctccaaaacagttttccactatacttatacgtctagtatttgcttcactgtttgccaagcgatccaccatctttcactaatagccccgacggccgcggcggcggcgcgcggcgacagcgaaggcgaaggtccgatcctcctgtcgcggacgcagggcgcggactctgcccgttccccgccggggcctttccagggtgtgtgctgtctgcagccccggcggcatgccggcgcgatccagacgcggtgggcgggctggccgccagcgcagccgctcgcaggtgactcccccgcccctccagtcgaacccgacaacggctgcctgggctggcctctcacctgcgcccgct

SEQ ID NO: 451923 - DNA, 1001 bp, Homo Sapiens
agcggggactgcctgtcgctatgacccccgcagtaattcctgggcagagatagcacccatgaaaaactgccgggagcattttgtgctgggtgccatggaggaatacctctatgcagttgggggcagaaatgaactgcgccaggttctgcctacagttgagcgatattgccccaagaagaacaaatggacttttgttcagtcctttgacagatccctttcatgccatgctggatatgtggctgatggtcttctttggatatcaggtggagtaactaatacggcacaatatcagaacaggctaatggtgtatgaacctaaccagaataagtggataagccgtagccccatgctgcagagaagggtctaccattccatggctgctgtacaaaggaagctttatgttcttggaggcaatgacctagactacaataatgaccggatccttgtgcgccatatagattcttacaacatagacactgaccagtggacacgttgtaactttcaacctgctgactggccaaaatgaatctggagttgctgtccataatgggagcaatatatttagttggtggattttccatttgggacaaattgagccttctggcttgtatccagggtactggatgtaagcagagaaggcaaacgacagaaagtattctatggggcctacactcccttttgcttccaatggaatagcagcatgcttccttccagctccatattttacatgccctaacttcaaactctttcaaggtggccccatccaccggggattgggacccattctggaaaaggccaagccatcatgaacagggagggaaaacatagctctgactgttggatactgggcatgaaaagactcagtgctcccatgcttccttgtcttgctttataggtcttatattcggataaatttaagcaaaaaatgaacaattttctaaaatacgttattgaaaactcgtcacccttctcagtgtatgtcaacattcaatatgtatgac

SEQ ID NO: 451924 - DNA, 1377 bp, Homo Sapiens
gtggttttaaaagaagagtcaggtaatagtagcaagacacacagcaaacaatttcaaccagaaacacagggccttggggatttcagatcataaaaaatagccagtcaaaaccacaaacggattaaaagagaggagagaatttttaccaactgtgggagtggtggctgcgctcaaggaattggttgacgatattgaagaagtgctttcagcccgcgctaagggtgctattggaggagggctggaagaatgaatgggagggctaaaaggtctggacacatctccaactccaggttttcctggaggtagctttggccgggatggaggccggggaggaggtggaggtggagtggtacttctgcaaggaaccaaaggagtggctggtcgagcaggggatgatgcacctggtccaattgttaagggggatcctgttcggggtggggtagctggtacattttttggaggcagtggtggaggtgttccagtgggaaaaggccttgttaactttggcgactccatgcttggattaattggttggcctgaaccccatatctcaggctgatcttaaaggacgttctgtcttctggttcatcaaaagctgatttctagtggtgggccaaagagaggagcaagggccgtagtgtcatctggaggcttttttgcttataagttctggagttggtgtggaacgcctgggtcttgccacttcttcactggataagttccttttaattgcaccctggctgcgcctcggacttttcctcactggtgatggggaaagtgcgatgttgcctattgatgcctgtcaattcatctacagttgcagcattcttaagaatgtctttagattgcaatggtttaatcttgatattaaatttcttatgtgattcttcttcgttcttccgattcacttgaagaataaaagtgctttcctttggtagagccgggttcctcgggtctgatgctgtagccttcttcatccagctcaggtgagttatagtctttcccaatcaatttccgcataaaatccatttggtgccccattgcttttcttctgagacagagttaacgagagggctctgagccagaagaaagaggtgaggagaagctgagtcttctgggtcttttttttcccctgaattccatctctatctggtgaacctgtagaatcagtgtccttttctttcttccgtattccaaaggccttccttgtacgttttttcaatccttccatcatggtggcagaattgcattccttaatttccaaggagtctgaaaaaacacaggaggatacgattccaggtcccagctaagtcctcaccacgccgctgctgaggtctattccgtccgccgagtggggctctggaatcaaactccgct

SEQ ID NO: 451925 - DNA, 837 bp, Homo Sapiens
cgggccttggggacccgggcaagcaggggacgcactcgcgcggcagaggcgctccccggcaccgcctccggcagcccttgatccgccaggcgcagctttctcggccagagcccagactgtagttgtaggcgaagcgcagcgtatcgattattgcgtgacgcttggtctctgtcggggaacgaggtcagcacggctgcgcagtgcgtccaggccgacgttcaagttgtagcatctcggttgcagctcgcgatcgttggccttgacgcgccggctcctgcgccagcgacgtgcaccagcgcctcggagcggacccgcgtccggccagcggcgccgccgcctctcctgctcgtcgtcctgtgcccctggaacctcagatcgcccgggagatattgggctgcagccccttgcgggccggcgacgggcggccccgaagcggaggctgccatgttggagtctggcacagtcttcctcagtcaggtgaaggaagcctggataggtcactcgccgctgactgctggcgcagtcgaggtcggagatgcaggtctcaaggcgggctggcatcgttgcgctgtagcaggaccgacggacagatagaaaggcgctcagagcgctgcagcccggactgagggcagagaccgccagggcgcacattacgattcccaacagccatggcggtctagttacgtctgtgccagttgcgggtgcgagagcctggaagggctgccaggggacgtcacggagaacttggcactggcctcctcgcctcgcctgcaggggccacgcgcccggccggtctcactgagtgatgtcgccggccgatcagatcagctctgtgtg

SEQ ID NO: 451926 - DNA, 868 bp, Homo Sapiens
  misc_feature (87)..(87): n is a, c, g, or t
cgttccatctgttccctatggatttcactgtcacgacccagcctttcatcctcggccacccatccaacagccttcccagcacctccntcctcttcagtttggctcgctccataatctctagcttcacgatcacggcgtcaatcttggacactatgctgccgatggaatgctccatccggtccactcgtctcaccaggacttgaaactcttcgtaagaaacgccactagaaatgcttcccctccttctggagctatgtccgctatcttcatcgtcatcctcctcagagtcatccaggcttcgagggaaacttcggctgctcatgggacgtggtaaagaactgtgatccaaatccaggtcctccctctctttctccaagtcgtctctcatctgctgatgttcatgttcggtcagttcttggtctccatcttggtcgtactttgtgaatattgcctcaatctctgcatcagtatggcccttccctttgagatcttgtcgaagttcgtcaaagtttaacttgcctcctccttgccgcagactctctgaaatgtcatccacggtattttttttcagttttagtttgaccaagctttatggtagccctttctgataagatctgagagttccatttcagctttctgctgtgccaagtcagatttcacttcagagtaagtatcattgatgatagccaaaacatattcaaagaatgaagaacataaagacacaatgtagtgaaataattggtcccaaactcgattagcttcctcatctctgcaagttgatatcgcccaaatgatacggaattgagtgaagatacactcttggaaagtactgaagtcatcgacctgagtgccaagacaggtatgccac

SEQ ID NO: 451927 - DNA, 1406 bp, Homo Sapiens
tcccagatgttgtctaaccgtttatccattactctatccttagcccaaacgagaaggcaaatgttctttcatgaaggagctgagctactgaaggatctccgtcctccatgtagaatccatctcgggtttcatctctaccagtgctcatggaagcaattgctttcttcatccaaattcttcccctctagagacagctcctgcttcgggctgggaagactcttccgacttatcgtcatcctccagcttttcctcgtcatcctcttcggaacctttctctgaaatagatttggacccagtgtctgcgccgacctcaacacctttcagttcattgtttcacagacgctggcctctgcctcacattcctgcttgctctccttcccgctgccatcggtttcttcttcctcttctttgccctcacatttctccttggcagctgggttttcaggctcctccactttgccttcggcttgttccagtaccctctcatcttgaatatgagcagatgagatgcctggaggagtctgggacatatccaactgccacgtgggttcaagggaagatgtattacctgccccctctgttttgagcctaagtttttatgtgcatcccagaaggataactcagggtcacttgaggatgtgataatccgtccgactgaccccgtgtttagcagcaccaaccagcaagtctcggtcatgccgtccacactcccaccactttggcagatccaagcttggctggcagagcttaagcctctctcccagctgggggtgatggagaacctgctcgcggatcttccgtagcagctcaatgcggtacagagttcgagaggctcgctcctctgtgatcggctcaattatggaggagaggtcgggcggttcatcatctggcttgacgggcattcgacatactcgcctacacatggccacaaaacaactgaagtatttctccaaactctcatcagattttttgtcaagcctggcaaaggctctaaattggttccagtcaaattgctgtttcacagggtcaaaaataaccccaaaggtggataccacacggtaaaaatcagcctcttctcttcttgtccacttttgccgcttctcagatataatagcttccctttccgcttccagagctctcacttcctctcgaggccgccgtctgcgccggtcagtcttcattagggcctcttgcctcatctgttgccttttatagctgcgctgataggcagtaatgagccggcgcagacgtgtagtcagggttgaagtgttaggccagtaaagttggcctaactcagcattactctcactgtgcttgcctgtggcatgtatttccatggattcttccttatcctctgaaggagaatttgcaaattcatctatttcatctttgaaccgccacccagc

SEQ ID NO: 451928 - DNA, 1236 bp, Homo Sapiens
  misc_feature (202)..(231): n is a, c, g, or t
  misc_feature (240)..(487): n is a, c, g, or t
gggtaaatagctcaatatagcagatatttctgctgcccatccctctaagggtcagtataatctttaacttccttctttgcttctccttccctgaaactgaaaatagatactgaaagagtccaaagcctgaattccctgtaagtgcttcttctaacctaaagtttggctctggctgtaagaattattggcctcagctttatcnnnnnnnnnnnnnnnnnnnnnnnnnnnnnngagacagannnnnnnnnnnnnnnnnnnnnnnnnnnnnnnnnnnnnnnnnnnnnnnnnnnnnnnnnnnnnnnnnnnnnnnnnnnnnnnnnnnnnnnnnnnnnnnnnnnnnnnnnnnnnnnnnnnnnnnnnnnnnnnnnnnnnnnnnnnnnnnnnnnnnnnnnnnnnnnnnnnnnnnnnnnnnnnnnnnnnnnnnnnnnnnnnnnnnnnnnnnnnnnnnnnnnnnnnnnnnnnnnnnnnnnnnnnnnnnnnnnnnnnntgagccactgtgcctggctggcctcagctttaaataagtgataaacctgctgaagtcagagataccatcctttttcctggttcaactctctggttttctaggactctgctactacaaggttttttaaattttcaattaccatacattagtctatttctaataatcttccaataatgcaaacttttactcaggattttggtagaatatcaggaaaaccatttcctggtataatgattctctgtaatagagaaatcctatatatcatgtagggtgaagggtagtttttatgtaatagttcactttgagctgtctagcagctgtctagaagctttcatagacacagacaggtagagagaaagacagggtagatgtcttaaccattatccttgttctagggttttcagtcaactctatctcaaaggactgcttctagaggccagcaagagaatagacatttgttttctgtcttgtagaacagaaacaggatatgaagtatactttttgccctttaggtggattttttttttttctaacagttaaattatggcatatgccttgtagttattgtcatggggattgaacagtgacacaccctcaagatgtaaggaatttattcaactgatggtccaaaaggttttccaaatcttataaactgtaagtcattgagccttaaaattataataaagcttagagatccatctacctcttcttaccaggaaatggttttcccagtgtggagagaggggtac

SEQ ID NO: 451929 - DNA, 1523 bp, Homo Sapiens
  misc_feature (517)..(517): n is a, c, g, or t
  misc_feature (561)..(561): n is a, c, g, or t
  misc_feature (594)..(594): n is a, c, g, or t
  misc_feature (863)..(872): n is a, c, g, or t
  misc_feature (935)..(948): n is a, c, g, or t
  misc_feature (961)..(1049): n is a, c, g, or t
  misc_feature (1064)..(1075): n is a, c, g, or t
  misc_feature (1325)..(1325): n is a, c, g, or t
acttcattgtgcttttgcatctcttccaaagcacaaacctggtttctggtcagaggtagctgcggctgtaggttctcgatctcctgaagaatgccagaggaaatacatggaaaatcccagaggaaaaggatcccagaaacatgtcactaagaagaagccagccaattccaaaggccaaaatggcaagagaggtgatgctgatcagaaacaaactattaagataactgccaaagtgggaactcttaaaaggaagcaacagatgagggaatttctggaacagttgccaaaagatgaccttgatgattttttcagtacaacacctttacagcatcaaagaatactgttgccaagtttccaggacagtgaagatgatgatgatattctgccaaatatggacaaaaatccaacaactccatcatcagttatctttccattggtaaaaactcctcaatgtcagcatgtcagtcctggcatgctaggttctataaataggaatgactgtgataaatatgttttntcgtatgcaaaaatatcataaaagtaatgggtggtattgtctgngggcaacatcaagaaaaaattaagttgaaactngatttctcaacttcaacaccaagaaggaaaaaccccatttaacacagactttaggaagaaaactctgggatttggaaaaacttttccactaatggctgtgggaatcctttaaatgaaaaaagaaaaagattattattttttcaaaactctgattcctgcctaggaaaaatggaaaaaatttgattcccgggggatttttttcccctaaaagcccaaacgggggtttggattttttcaaccgggagaaaaaatggattttttcttttggnnnnnnnnnncttcccctattaaaaagggggggaacttttttttaaaaggtttcctattgatgttggtgttcnnnnnnnnnnnnnnccccccctttttnnnnnnnnnnnnnnnnnnnnnnnnnnnnnnnnnnnnnnnnnnnnnnnnnnnnnnnnnnnnnnnnnnnnnnnnnnnnnnnnnnnnnnnnnctcccccctacccgnnnnnnnnnnnntacattgggggacggcccccctgcgcggccccactgttccacccgtcccccctggcgatcgaaaccactgtacaccccttgcccattgtgaagacttatggccttccgcgccggtcggaaggcgtcggacgcatgccctatcacgcgcctcctcctctcacgtctcagacctgctgacacgcacccccaccgccatcatagccacacaggcaggcgtgactcacagtcgccatcctgcgccccgtcacgnccaccccaaccgtcaccccccgcccgccccaccatgcgcataccaccgactgaccggacgtacgtgcacccgacacgctatcgcgcgcgcctacgctacatccgcctctgcccccgcctttttcgcggcccccccttgtgtcgtgggcgccccccgtcccacccgagcccgcccgtcccgggtgatttgttcgacggc

SEQ ID NO: 451930 - DNA, 629 bp, Homo Sapiens
tatgtaaatagttctggtattgggtaaaggggtaatacgtttattgtatttcgacagctttatttagtgtagcaatgattagcggaatcgagatataccaagatagaataagtgaatttctaaataagcaatatttgacagtttaagtgccagacattaaaacacacacacgaacttacattagaaatcttcatatagtttacactccttatattcttaaaaggatatactatacagaaatattccttgattattccaatattccattataaatactaaatattgtacagtcccctagcgttgtgagatatatctgattacctacgctaaatagttctatactagtatgcttattattctttgcttataaagtgcttctttccctaaatttaagtatttgttaagatattttcctgattatagagttgtactactttctcatttgttccaatctaagaatctagataacctatttttgatagaattatgaataaggtaagaataaaaagaatctgaggaaaaaaagatctaagtgatggcttcagagctgttcaatgaatagaacaaatacgttagtatactgcttttgtaataactatttggacagctttgaggcctttcaaagtttc

SEQ ID NO: 451931 - DNA, 639 bp, Homo Sapiens
  misc_feature (349)..(448): n is a, c, g, or t
tctctagacgaggatggtgttgcctctgagttacaaaacagatagtatcacatacagaaaatagcacgcagtacttggcagaggccaaagttgccatctccagccttcccctgtcttcagacagccttttcaggggcatgtatagctcatctttgaagagtaaaggtccccacaccatcctcgtatcttcatcatttaatgtcagtgactctcaatactgatttttggggactgactttgttatcttgaaaccaaatttttattgcagcttatgcttcttttcgaaaggaaaaaaggtccacaggtgagcttcaaagggcaaactcccaagatgtgtaccttccagcannnnnnnnnnnnnnnnnnnnnnnnnnnnnnnnnnnnnnnnnnnnnnnnnnnnnnnnnnnnnnnnnnnnnnnnnnnnnnnnnnnnnnnnnnnnnnnnnnnngcttcgcggaatgacgcctcggcccctcacagaagcagaacctggtgggctgtcccgtccgggctccagagaggctccgccgcccgccgggatccagggctgagctctcccggggggaggtaaaacccgacaggggataacgggtcacagcacggtcctggcactaagtcacggacttgggcacgctgagt

SEQ ID NO: 451932 - DNA, 758 bp, Homo Sapiens
ctctgcttcctctttaaacataagttttaatttcaaaccatctcttagtgaatgcatatggccgtatgctgttaagagcacccaggtcacatcttaaatgcttgctgcttagaaatttcttctgccagataccttaaatcatctcaagttcaaagtttcacatgatctctaagagcaggggaaaaatgctgttagtctgttagcataaagcacagcaagagtgaccttagcgtccagttcccaataagttcatcatccatctgagagcatctcaacctggacttcattgccccatcactatcagcattttggtcaaaactattcaacacatttctaggaagttccaaagtttcccacctcttcctgtcttcttctgagctctccaaactgtaccaacctctgcccattacccagtttcaaagttgcttccacattttcaggtatctttacagcagtgacccaaactcctggtaccaattttctttattaggtcatatatacattataatgaactacgtgagactgggtaacttgataacagaaaagaggtttaacttgactcacagtttcacaaggcttaggaggcctcaggaaacttacaatcatggtggaaggccaaggggaagcaaggcacgatcttacatggtggaacggagtgcgggactgtcacacttttacaaccatcatatctcgtgagagctcactatcctgtgaaccagcaaggggggaaactgtctccaggaatcaaacctccccac

SEQ ID NO: 451933 - DNA, 1445 bp, Homo Sapiens
  misc_feature (434)..(444): n is a, c, g, or t
ccttttccccctctgggggaaaccgtggtttcttcctggaagggcccatttttggaaaaagtaacttaaggggaggttgcttgcctcccttttaaattccgggagaaagccctgggggcttagaagccccaatcccctaccttgagtgccgtttaggccccaccggacgccataggccctgggaaagaggaccccttctggtggctccaggtggcttcggaaaggatcagggggcctgggggcatctccttaccccctattcgggttcccccaaaaagtcataaaaacatcctaatttcttcagaaaggcactgtccacactgagagttgtctgcagcaagtgtgaaatttgagctcaaactggcttctgtagtctaattcaaagtgtattcaggcaacaaaaactgatttatccgtagtaggccttgtcgatnnnnnnnnnnngggaatagagatctatggacacctctctataccaaaaccaaaccaaatgaaactcctatgaaatacagctcaaaataaatgcctgcactttcaaaaagaattactggttgctttggattcatcatgccatactttccccatcagcacagaggtggactccagtaaccccagaatgtcatcgtgcctccctaccacctttggactagatattcaaataactgccccaactgctcacaaagttcagttagccaggggtgggcctaccaagctgcttaacaagagcaacgcagatgtttccctgactgtaaataatttcaaacgcagtcaaacttctgtctccttcccctgccctcagagtgccacctgttcttttgcaattacttgcttcaacttagcccttcgaaacccccacatgaccacggctcagggaccagctgaggtggagctgcacatgacccaagaagcgctcgcaggtggcagtttctatctgcaagctgctgcttccgcctggctcaggtaggccttgctggctctggcactgaaaccagtggctgtttttaatccagcacgtgtgtgtgtttttaaatctgtacacatcagccctgcttaatcacatccattagggactaaaaatgaacacatttctgtggctgctgaatgccccacttgcttgacatgtttaagcttttgtgttactgtgcaaacctgccacctggtatgtttgcaagatttatgcaaaatggagcacaaacctacagaacatgactgagttaccagactcctgaggaccagggcagcaggagctccatgtttgatctgcactggtcatttccaaggattaaaatcaaccctcagctgcccttcaaggccctccaaagcctagtctcagccctacttcccagacgggtctctgaagcctcctgcagagactagcttattccctcctgtccctacatgcatgccttgtactcctctgcactctcttgggtttttaatcatag

SEQ ID NO: 451934 - DNA, 1179 bp, Homo Sapiens
taggtcggtttaggtttattgccttaattgcttggttttgagttagtactgtagcaaatgctatcacactttgcattcccagatcacagtcacccagatctaatttgctctaatgatgaattaatttgcagcattgcagcaaaaaacattccacctttattttcaattttgtttccagtcattcttaggtatttcagagtccgattcttatgtagcactttagcaatcaattctccaccttcgggcccaatatcattaaacatgaggtttaagtaaatgagattaagttgtttctgaagcagtttcgcagcatagtatgcaccaacatcacatagaaggttatatccaacatccaaaccattaatatacagacaattctttaaaattttggaaagaatccaaaaatcttcacctgtaactctttctactggcactaagcgattgttaccagcaatgtttaatggtgattcctgctgctagcccctttttaatttcttcatccacttcttggagtatatgcaatataaaaggattaattttctgggatttttccatacacagattagaataatgtttctggagaccagattctggagattcgcgctggaccgccaggccgcgcccggagtactggcctgagtggaggcccaagccggggacctggccggcgcacgggcggcctcccgggagctccccatgctcctctcacccactggccgcggcggctgcgctgccatggcgaccgcgcgcgcacttacagtccgcctgcagctgtgaggcggctacacgagcctcggcgccagcctgcttcgagtcccgctggctgtgcctgcccgggccctgaggcctcactgctaaggcagtgaccgcctactctgtggaggtcctttgtcaccctgcctggttaaaggcagcctgagggagggcgtcctggctcctttgcagggaggagttcccgaggtttgaggggctccgctgctgagctagggctggggctacaaagaagattatgacaaagcccgctcctacaaagtgtgcaccggcctgccgggccagcgaagaagcagagtagcatcagcacatgataaaggcgttgtgctttgggagcataaagggttttgtgctcccaaagggcggggccaccagggagggcttcctgaaggaggtgacacctccgct

SEQ ID NO: 451935 - DNA, 754 bp, Homo Sapiens
tgtgtagtgcaactagccagcgatttcttgtcaacatgcggcctacatggactggtagactcttcctgttcactgtacagtataggtcggtttaaggtttattgccttattgcttggttttgagttagtactgtagcaaatgctatcacactttgcattcccagatcacagtcacccagatctaatgttctctaatgatgaattaattttgcagcattgcagcaaaaaacagttccaccttgtatttggtcaattttgtttccagtcattcttaggtatttcagagtcctattcttatgtagcacttttagcaatcaattctccaccttcgggcccaatatcattaaacatgaggtttaagtaaatgagattaagttgtttctgaagcagtttcgcagcatagtatgcaccaacatcacatagaaggttatatccaacatccaaaccattaatatacagacaattctttaaaattttggaaagaatccaaaaatcttcacctgtaactctttctaccggcactaagcgattgttaccagcaatgtttaatgtgattcctgctgctagcccctttttaatttcttcatccacttcttggagtatatgcaatataaaaggattaattttctgggatttttccatacacagattagaataatgtttctggagaccagattctggatattagtccgcctgcagctgtgaggcggctacacgagcctcggcgccagcctgcttcgagtcccgctccgct

SEQ ID NO: 451936 - DNA, 965 bp, Homo Sapiens
  misc_feature (739)..(747): n is a, c, g, or t
acggcagttgctggggctaacagaactggctgttgggagagagaggcgaggcaacgccgcccggccctgccattccattttactgcttaactcaacctggagtgtcaggacctattctcctgcattctcgctgcactatacgggggagccaagtcactctgtactcactggacagccaggctgggtggaatagggttctagagtggagcaggggctctgccctttatggcgactttctaaaagattagcatcagtgtcttttgacagtatagcatctggggtgggacgcggagaggaggctttgcttgctaaacggcttctttctccgccggtgatctggatttgtttcctcggccccctccccccgctcctttctttctcccctcccgcctttagcaaagtgacacaggcgacacctgctcgcttgtgttcgatgtaggacactcgcaccatcctcggtggtgacggtgccagggcactgctaccagggggacatcaggcagggttaccacttccttccagcccacagatgcctagaagggcacgcgggatgggctgcagatgggggactcttgacccgacaaagaactatacgaaggcagggaactagaggggctgcaagcctggccaaggagcatgcactgcctaccgtggcattcgaggtggaaaggcacgccaagtctacgaagagggacacccaagacggagggtaacacttaatactgggcagcaaccaacnnnnnnnnnaaacacaggggaggccagccatgggaaaacgaggagacgaaaacagcgcgggacaggtcatgagcgaagcggggacgaccaactacgaggactgaaggcgcaccacggaaagcgccatctcgagccccattccatattccagggagctcccacagaagtaagaacaccagagcagcaaacaaaccaccgaccacacacgtatgggccaagacagcacg

SEQ ID NO: 451937 - DNA, 1389 bp, Homo Sapiens
  misc_feature (49)..(121): n is a, c, g, or t
tggaatgttatgaatattattgtttctcaatgagtgattggctggattnnnnnnnnnnnnnnnnnnnnnnnnnnnnnnnnnnnnnnnnnnnnnnnnnnnnnnnnnnnnnnnnnnnnnnnnntcgatttatttaactgcttagtaaaaggagctttctgcagtgtcggctgggatcccacacagctgtggcagccagggctgcggcggcggctcggtcgcggcttgtgtccccgctgcccctgctgctgctggtctctgctccggacgcgctcagaaggtgccaccgccgccttctctggccggctggccgccgggagtgaacgcgcccccgcctcctgtctgctcttctgtccgtctgcacgtctgtcagtccgaccgtctgtgggtccgactagcagctcggcgcgggattctcgctttgctgtgctctgctctcaaagctgccactctcgcaggctgccagtctgtgcgctggtctgtccgtccgtccgaatccctccgtcccaccagcaatgcagcgtccctcttccggtcttctgtgcccacagtcctctcccactctgtgcccctggccgcttcgctcggtaagaggagggcgtgtggagggagggagcacgcgagtgttgctgtctatctttctgtgtgcctctccctgcctacttaatgctctcgctctctttgcgttctggtctccctctctcaggctgtctgactgctcccacctgtccgtagctctgccagtcccacccctaggccagccagcctcggtcgatccctcggtcccgttcctcccgcttggccgcctccgtcgtctgcccctccgccggtccgtgccctcccacgcggctggcactgccgccgggggcggcgcccggctcctccccgcagctccggatgcgtccggtccccgcccgggctgagggcaacgcgcgtgttgcacgtggctccacagctgctctggccggagaacccgggccccagacccgccacacccgggaggtggcggcagccggacgcctgccagtgtcgccgcctctgcgccactgggagcatccagaactggcccatccagagtgatggcacctgctgtgtgcgccggggcgccccgcggtaccactcattccctggggccgttctccgccagccctaagggcttgggagacaaagcgcattgagccacgcgcagcagcgtgagccatcattaatcagaaaagaaacttggcacgttgcccccttgccccggcccaaaccgcatcctgttccaaggaagcaggccatgttaatctctctttgtcccccgtggcccaagccttcaagagtacccgtcttcgggggcggcccctggacttcctgggggactcttgaacgaaagcctagttccattcctta

SEQ ID NO: 451938 - DNA, 978 bp, Homo Sapiens
gggtcacctaagttaggggaagtgcgcagcttccctcgcacaagcgtctttgcttggcgcgtacattctcgaagtccagctccttggcaggctccccttaggtcctggaaggacccaatgtgaaagccaaagcttggggtgcaatgaccctccaacgagtcccgcagcaaggagcctccagggttgtggatgtccccatcaaagcggtcccgcagggtcgatggtatcatgcacagttcaacagccaccgctggtgccatcgtgcagcttggctctgtgcacactgtgccagcgctggcggcagcaattggctggtagtcaaactcctggaagagctcgttgggggagggcctggaagtcctcaaggaacaactcatccacctcctggaagccccgcttgagggccctgtcctctagcacgcgcagggtccgggtatactcggggggaagcaggtggttgaaggagcacagccctggcccagcttcacgtagaggcccccgttgctgatggcccctgccaccagggcatcagccgcccgctggtgacacgcagacatcacctccaagtagcctgggctcttccacccctcgaaggacaacattggtgcaccaccagtagtcccagggagatctgcaggccgaccttcagagacctgccaaagcgccctatgccatccaccacgagccgcatcctcctcttctcccgtgcctctgccatgacatagcgggctccgaggagcaggggcgcccccactaccgcggtggagagcaccttcctccacaggggtgtggggctggagaaccttggaggaaggcccctgacgtttctcctgaagaacacagcaggggacggccagggcttctgccttctgtgcagcagagcagagtggaaatgagcagagctgcaccggtcgccacatctccgaccactgctccgctcttctccatcctaatctccaggccggtaccagcctgttt

SEQ ID NO: 451939 - DNA, 1136 bp, Homo Sapiens
aacatggtggggagtaaaaaggtgggccctaaaatttagggctaaaaaatggaccgggttggcggggaaggtgacatgccctgttcgtggagttccggggcccaggcccatgttccggcacaggttcagagagaaggttgcccacagccatgctgaactccagttcccgctgtcccgcgctttttctctctggtggcacatggggagcttggtctccagctcccagctctggactgctattcagctgatccagaggggacgtgacacaaaggtagcgcttcaccaaggagaaaagcagctttcgctgggatctgaggcagatgaatgccctcaaaggccatgcagtgttcttcagaggatgtggtttctgcaaacagctccagcaatgtatagcgactggtcaaaatccatggtgcctgctcgatgccatgcttgctggctcagtgatagaaggacgtgagcccgactcccagcatcgtggtctgccagagcctgcagcattttgcctgcactccggcggatctgaggctcaggattgcataacatgtgcatgagcaggtccagggctcctgtctccctgaagacaccagtgaggggcccgatgctggcgtaggcactgagcacgtggatggtgtgaagcacagcggccgtgaggcttggggtcccactttctgccagctgcctggccgccctgcgtaccagcgcctgaacatcagcctccatctctcccattgccacttcatccaggcctcctggatctcgaggaaagcttcctgaaaccccagctggttcgtgctgaagtcccttagatagtgcccgctcacctaacagcccagggcagttggcgtagacctcaggagccgacagccacatgaggatgtgctctgctttgccttcttccacacccactttgcccacttccccacacttcaggacactccatcggatcaggtattcaggatgcccgtcatgcccaggcctctgtcgaatgagttcttcaggatatgcctgcagccgaggccctaagggcaccatgaggtccccagcatgccgttcccccaccatcctgacctcctcccaccgcccggctcagccctcgctgggacccagcggccggatcccgggaattccggacc

SEQ ID NO: 451940 - DNA, 1445 bp, Homo Sapiens
  misc_feature (19)..(19): n is a, c, g, or t
ctatttattagaataggtntaagttcatatctaccatgcataatatttttaaaagtaattgtctttaaacctcatccttaacatacctcattcatcacaccaatagtatagaagcagatatatttttccttagaaacttctatctccttacaaataaaatagttatcataaaaaaactttagacctctatttggatatatgtttagctactataaactaggagctgagaaacatcacagcagtatataagctgaattataatcaagggaaaagccaacacatgatttctcatagtatatatctaatcacaccaacaggaaaataaaaactttctttggaactaatcagcaacacagaaggacttggggagaacaaagtagaagttaaaaaataaaatttaaagaaaggatacagcctttaaagcacccagtctgagttccccactgccaggatcttctgtacaggatcaaaggccagggctgagggttgatagggaaatccatggcgaacagtcttgcagagctgaaagtgcttcggacttggagcgtttccttggatctccggcttcccggttcccaggcggatgctgctgctgttgctgctgcgacgccgaggacgagccggcggtcaggccgtccagcaccttcctgatgttgaatttcctcatggtctcggaggggctcccccgcagcccgggaggggaggcacagggggtcccgggcgggggagaccacccggggccgaaggcagcttcgaccgcggaaacggaggagtgggagtgtgaggagaaatatgcaatgatgacatttccaagaagtgatggcatctggcgctaaggacaaagaatgggattttgccacgagggatcttattctcccacatgttctgtctgaaggagaaagttatctgaggccttatatgatgcaaaactttggactcaaagaaattaaatcacttgcccaaggttacatagctgcccctggcaaacaccattctactttccgtctctacgaatttgactactcgaagtacctcatgtgaaatgttggtgccaaatgaacttttctggttcttctgaatatgccactgttgctggagaaatgtcactgctagagaacagaagactattattccaaagggtatttgagactgactgaatcaggtctggaacattattgaaatgagacccacaaaagaagagatactgaggtggtgaccagatggatataaacgggctgtggacaaaagagaatgcatggccaaaaatggtggtgctctctgtccaaaaactgaggccctatgaccatgaatgaagccagagggcaggtaggaatagatcatttgctccagaagaagctggttgccatgtcttgaggacagtaaaccctctggggaggtccctgtggctaaggaacaagggctcctggcatagctctgagtgagtc

SEQ ID NO: 451941 - DNA, 1111 bp, Homo Sapiens
agaccctggggccgtttttttcctgggggtttgtttcttgtttttcccaggttcctccggggccaagggcccccctcaagttgggtttcccaggccccccgagaagaaaggccctgggcattttccattctgggccgaggggtttcttcaagcagcccgcttgggagatggtcctttttttggggccaagccaagtggtttgcggatttcaggttaggaattggatgctgccccgcgggcttctcccggggactcccgggggcagcagcggtggtttttccgatgtggtagtaggtgaagccacatggtcatgaggttctgggcaggccccagagtcatccatctgatgacactcggacagcaccagctgcaaaggactgcaccaggcggtagaagggttgcctctgagacacacttggagttgcagcgctgggcactcacgtagtcgagctaaccactcccggcctgtttccattttcactgctgcagtactctccaaacttggctttctcctcctgatccaagtcctcccctccagagaagatcttctccacgtagccacgcatgaagtccctgagtgccagggtctcttcatcctgggtagactcggtgctctggttggaggagaaggactcgttggaggaggaacggcggtcttggtcccaggacgggtgcgagggcgactcgcccatgtcattctcactgtccgcagactcagtggtctcactctctgatgcaccgtcccccagggagccatcgccgtcctgcagcacagggggtggtgcctccaggggagaagaggtgggtgcctcaggcccaaagtcgattagcgagcccacggggacctctggggtctccatggctcaggggagctgctggtgaggctgcctggaggggaggctgcctagaggggagcccagcagcctggtgtcccaggtgcgttagtaggagcccaccaagctcacaagttgccagtaactgccggctaccaagaatgagtccttcacagcagctcacctggccctacggcatctctcaccgcgggcggaccgggcagcgaaccggcgccgtcagactcggctgctgcggcgatcccgggaattccggaccg

SEQ ID NO: 451942 - DNA, 543 bp, Homo Sapiens
  misc_feature (430)..(430): n is a, c, g, or t
  misc_feature (453)..(453): n is a, c, g, or t
  misc_feature (467)..(467): n is a, c, g, or t
  misc_feature (474)..(474): n is a, c, g, or t
  misc_feature (498)..(498): n is a, c, g, or t
  misc_feature (504)..(504): n is a, c, g, or t
  misc_feature (529)..(529): n is a, c, g, or t
ttcggcacagggcgggagaagttgcagggaattatttgatagcacatactgatggctctaaagaagtcatcaccctcactggattctggtgatagtgactctgaggagttgccaacatttgcctttctgaagaaggaaccatcttcaacaaagaggagacagcctgaaagggaagagaagattgtagtggttgacatctcagattgtgaagcctcctgtcctccagcaccagagttattttcaccacctgtcccagaaatagctgaaactgtcacacaaacacagccagtcaggttgctaagcagtgaaagtgaagatgaagaagaatttattcctctggctcaaaggctttacatgttaagtttcttgacccacaagcaactgagccctgaggactctagctccccagtttaaaagtgttttgggttcntcaaaattaatggaaggtgcatnctgtggactggganaaagccntttccaaaggttccctggaagttncccttncctggataccccagagtggggtgcngcaggtaaccaggg

SEQ ID NO: 451943 - DNA, 813 bp, Homo Sapiens
  misc_feature (63)..(99): n is a, c, g, or t
aagtctgtggagatgtactagatcatatagggcgactcggggtgtcaacgcggtggcggccgnnnnnnnnnnnnnnnnnnnnnnnnnnnnnnnnnnnnnatcaggccaaatcggccgagctcgaattcgtcgagagcggagtttcccagcgtgcgcccggggagaccgggaacatggcgctgggagcgctgtagcagctgagaaggggctgaggcaccgccgcttcgctgacagccggccaccagaaatacactgtggtgaaatgcttccacctcttgctaaaatgaacactgagaaaaaatgaagaagactgacaagcaccagcgaaaagttgcagaatagaaatagccacactcctctggagtctttaattcatccacagccatcatataaaggttttggcatcatgtttgggaagaaaaagaaaaagattgaaatatctggcccgtccaactttgaacacagggttcatactgggtttgatccacaagagcagaagtttaccggccttccccagcagtggcacagcctgttagcagatacggccaacaggccaaagcctatggtggacccttcatgcatcacacccatccagctggctcctatgaagacaatcgttagaggaaacaaaccctgcaaggaaacctccatcaacggcctgctagaggattttgacaacatctcggtgactcgctccaactccctaaggaaagaaaggccagccaccccagatcagggagcctccaggcacggtccagggcacgcggaagaaaatggctacatcagcttctcccagatattccagcgaatccg

SEQ ID NO: 451944 - DNA, 1042 bp, Homo Sapiens
attgttgtttgtgtgttgtgtggtcgctgtaggttgacgtatcgttcactgtgctccgtgtttgtcgctgtcagacggttgtcttgggtggttcccttggggtgtattcatgtcctcgtagtagtcgccgtgcctgcgctgttgcgcctgtgcatgtcccgttgtctgttttcgcccgcatttttggcgttgattatgtgcaaggggatgtccatcacgtgtgcccttggggggttcggccttgcgtatcgatctgggtttgttgaagctcgctttgtgcgctgcttgctagggggcccccctctagggatgttggcccgtaccagtggcgtcaaagcaacgtggttccttgtgagaaggcctcaggtcgtctggtcttgggccagttccgtgtggtccccaaatgcgatgctctttgcaagtgggccaagtgcagtcctccctacctctagggtctccatcgcgcaccgatcgatatatgggagcaggcccttcccgggacccattggggtccctagcatgagggttcaggtcagctgctgaggtgcaagctgcatggggaggccttgcctggcaccgcctttccagctgcctccaagtccacccatctttggtggcctgactcctccctacttaaatgtttcctgaagaatgagaagaggtcgtttgccttcagcgatgctgggctcatccccccgcccagcgctgtggcccctgcagagggcagcagccggctggctccgttctttcaggtgcgtgtccatcagctgccggtcaatgaccctgtgcatgtcatcctcaaaggcaggaggggtgtacaactaaagctgttgatacgggaactgagaaaggccactagatcagaaaccaaaggagccagatagtaaaaagccctgaggaagcaaactgccaagcttccagctgctgcgagaggttcagtttctgctgaatggcatccagcaactggctgttcagagacatcatatccatccagcacttggcaagttccagctccacagcattcttctttgcaatggcatcc

SEQ ID NO: 451945 - DNA, 902 bp, Homo Sapiens
aggctgtaccgcccggaattagggatgatgtttgaaaaaagctaggagatgactttgaatgaatgcaaggttagtgagatcctaagctctcaaaatagcatattccctagagctcaagaaagctggtccaggaggttgaaaaagctatttgttgttaaattattttctggcccttcttaatatttaaaaatgtatttccccttgtggctttcaaccacctgctcaaaaaaagagacttgttacatgaaagttttcattaaagagctgaaaacaagaatttagagagccattcctagaaaatgtcctactgccctgcatttgacaaacaagcatcctttactaacaagagcaggaattcagaggcacaagaaaaagcattggcatgagccaaagagtctgtcttaatgttacttttgaaaatctgctgagcggccaccatatgcaggctgagagctgggcacaggcgaagccattggaagcacttcaggaacaagcacacagctgtgggacttgaacatgcaagtgtccaggtagtgtccagaagcttatctttccttctatgatggaatctgtacttatctatcctacttttttctctcttcctctcctcaccacattataccctgctcttacgcagtacacgtttaatggcccgttaatgtctcatgcctccaaacaacactgaatttgaaaacccccatatatacttttcagcagcctagttgagcaattttcccaaacaaaaggggcagcactcatctacactcgaatccaagtaagccagccaacgataggtcctaaatcgctagtaccagatagacccacctgactcctaaacccaagacgacacagacggcaccactgtcccagtagaccacagccaggaaccaaggccctaacgc

SEQ ID NO: 451946 - DNA, 809 bp, Homo Sapiens
tcgacagcatgccagaacttagcacccctgtgatcccctattgttatcctttactgcacatcacacacatcacacagattgtgtaggtcaccgtgataccgataagaaatgggcagtattcaatttttctgataagaggatttttcatcacaagtagagaagagtcagttcctaatcagcactgtctctgactgggactggctgttagttgcttgggagcaggagattgggaagcagtcacttgaactctcaggttttactggtctaggttttctcacctagaacaccagggatctgtggagcttccaaatcttgtaaacgtttatttcgtacattgcaaatattaaaacgtacattgctgtaagactgatggtacttactagtagataagatctattgcgtagtctttaacatccatcattttgtattatattattagcaaagctagtgtttcatctgctgtgaggtttagcaagactgtgaattgagctctagtgctgccagaaaaagagttatcaccactttctattttgagtcaatgataaaattatgttgtttctgtaagttaagaataagatgagaagctttgccaacagctccttggagtagtaaataataagggtgtgtgctctggtatcactacaaattgctaatagtatgtgtttttataacctgtattttgtaggtaatttttgacgggacagtttatggcagtttggcggaaattaatagagaaattaatgaagttaagttctagaaaattagatatgaatatggtgaaagtgtgaataaattatttatttgctgct

SEQ ID NO: 451947 - DNA, 903 bp, Homo Sapiens
  misc_feature (11)..(11): n is a, c, g, or t
gtgttctcggnagccagcatgggggcccctcggtgtcccaccagcccaggcttgggtggtaagtctctgggttccatgatgcagggtgaggagatgcataggggggccaagtagatgaccaggacaactccaaaaaataggagcagtagcagaatcttgggacctctttcggtggatccggtagaaggtatcagccacagggcaggccaggagggcaattccagcggctgctccaatatgaaggaatgggtctgtggcctgcagtgacacacgcaagctatgccactcctgctgccattggatgtccagtcccacaaggccagccgccacaagcagcataatgaggagcagcagcaccttgtggaggctgtgcagatgcaggggctgtctacaaagccgcaggagcagggccaggaccaatagcaaggatgcatatgtgaccagtagagagatgaccagcaggaatgccagggaccagtccatccagtgtccccagcggcggaagaggaattcattgaagttgtgcaggtcattgagaaggacgagcccgatgtacagccagctcagggaaaggaggaaggtgaggaagagcaggccaaaccagatacagtcgcacttgctggtttgcatcctctctctggggcatttcctccagtggcagctatacaggcagtggaggcagcgggcccagacggagcagcagccgggggactcggccatggtgaaggcctttgctcagcggcagctccgctccgctctcctctctgcactgcttcccagctcctctccgagtggtctgcctcctccctttttcagtcctcggttcagccctacgagtcaaacaggtggcactgttgccacctacaggaggctgtgtgggtcctctcccaaggatcccggtaa

SEQ ID NO: 451948 - DNA, 1008 bp, Homo Sapiens
cctcgccaatcatgtcatggcgggagaagcggtcaaagtcgaagacactgagatgcagcttgcggtcagccagctcctcatagggcacagggaagtggaagttctcatcaaaggtggggttcagggtcttgcggtgcacccgggtctgcagcttgcatttgcggtcaggcaggaggtagatcttgacataagggtcagagcttccacaaaagtccttggcagggaggtcaaaagccttcaggatacgcacaatcagggtctcggtctcgtaatcgtagcgtaggctgaagttgatcttcccgcagctcttggtggcctcagacttggcatcctccccatccaccgacttctgcttgtagagctcaggcttgatgcggccaatgctggtgggctgctctgctgctggtggaagctcattgccatagtctacactggagacatgcatctgccttggcaggtggcgcttgaaggacgtgtgcctggtggatgacgctggctctgtagtttgccgctgcagccgggtgtgacgcatgatgtgctccttgaccgacatctgcacctcagctggatatctgggacgtgtggctgatcttcacggccgcctccaggaagcccagggtgctggggtccttcagcttgtccgccatgttgcctctgaagctggggctctggagggcttccaaggggggattagcagaagagggactggaggcctccttgttcctccagggcatccagcacagctgcgcctgccgcgctggactccgctctggggcagcagctcgaagctccgacaagtctccacgtccagcccgagaggggcggccgggcccaggcacagcgaggcgaggaccgcgagcgcctcctggcaccgaggcccgccggccccccacactccgctcatgccctagacacccaggcttgccgagcagcagctcgaacccgcgccccgccgcactggggcggggcacgacggccccaagaaatcccgtaacccgggaggggtgc

SEQ ID NO: 451949 - DNA, 480 bp, Homo Sapiens
  misc_feature (423)..(423): n is a, c, g, or t
  misc_feature (440)..(440): n is a, c, g, or t
ccggctgcagcggcaaactacagagccagcgtcatccaccaggcacacgtccttcaagcgccacctgccaaggcagattgcatgtctccagtgtagactatggcaatgagcttccaccagcagcagagcagcccaccagcattggccgcatcaagcctgagctctacaagcagaagtcggtggatggggaggatgccaagtctgaggccaccaagagctgcgggaagatcaacttcagcctacgctacgattacgagaccgagaccctgattgtgcgtatcctgaaggcttttgacctccctgccaaggacttttgtgggaagctcttgacccttatgttcaagatcttacctccttgcctggaccggcaaatggcaagcttgcaggacccgggttgcaccgcaaggaccctggaaccccacntttggatggaggaattnccatttccttgtggccttttgagggagttgggttgaaccg

SEQ ID NO: 451950 - DNA, 843 bp, Homo Sapiens
ggccgtaacggtacaaggcgagggggggatagatgtgattagtcggccgtgcacgaagccttccactgcggtattcaggcccccatatagctccggaggctgaccaatgacgggtgttggtacggcacgtgctgaattgctaccgggcgatatttgtacgggggagaattccaaggcctgtattgtcggccctgttttccctaggaggcggtttaggacccgtgttctatgtcccttatgggccccccgaatccaaaggaatggttttgaaaagctttttgaggggccgagggcggccacacagattcatatattgaacgggagtgtttattgtttccttgtcaagatcagcaggaagcaatgacctctctttctcaagttcttctaaatatccagtactttctttgtttccatttacaaaccctcttcttggaaatgaacccataggaacaggactgcactctccagaacggcttgatacagatccttcccggcttccataagaacggagggacatttttgaccgcagttttactccagggaaattactgctatctaagttaagctctttaagacgctctaataaatcaatctgtccagaagaagccatagcttcatcttcaatacttccttgtagttgtttaagtacttccttcatattagatgcctcagtttccagttttgtaagatgattggaattatcttctagctcttgtcgaagatttgagttctccatcttcagtgcctcaacttgctttaacaactgatcatatgaagctgcagccatccttggctacccttggaccccatttccgagatccgtacttcccagaccgtaccagc

SEQ ID NO: 451951 - DNA, 420 bp, Homo Sapiens
  misc_feature (34)..(34): n is a, c, g, or t
  misc_feature (59)..(60): n is a, c, g, or t
aataaaaatggataaaacctacacattaaaagtncacagtccttgatacccttcatatnnagatgccctcagtttcccagttttggtaagatgattggaattatccttcctagctcttgtcgaagatttgagttctcccatcttcagtgcctcaacttgctttaacaactgatcatatgaagctgcagccatccttggctacccttggacctataaggttaaaaaggattttgaaattcactactaaaaaatttagtggctgcttgtttttaaagaaaggggtaaaggaaacaaaactcttaagactgtttaagaagaattgtgttaatatgctagtttttggtctcaaaacaatattgttcaagtagcagcatctaagaggatgaaacagtgagtcttagttcaagataaatgaattaa

SEQ ID NO: 451952 - DNA, 1430 bp, Homo Sapiens
  misc_feature (72)..(85): n is a, c, g, or t
  misc_feature (206)..(206): n is a, c, g, or t
  misc_feature (219)..(219): n is a, c, g, or t
cttggcttcccgggggggtccggaaaggtcgaagctcggggtaaggccccctgcccagaggaatggggtttnnnnnnnnnnnnnntaaaggaggcagttctccagtttcagctgagccatggccaaagcgggcaaatcagcatgggccgccgcctgggaccattcctcatgtacggtgtcgtacacccagacattcttggagaacncgttctcggagcncctgccccccgtcacatagaccttgcagccgatcgctgaggcgctgaactccttccgggggctgggcaggtcggccttggggatgatctccttggccttgtggtccacctggtagatcttgtcacacatgaaggtctggccccccaggatgagtagcgtgtggcccgccttgcgtggccgggcacaggggctggtgaccacgccatcattctgcaggatcctggtcttgcagcgcagggcctcatccatgataagcttggtgcgctcgtctgccatgaggagggcctcgctggagacggcctcctgcaggcagtcggacggcagcaaggccagacgcacgctgcggaggagctcgggcaagtggaccttccgtggctccaggtcgtgcttcacccactggaggatggcctcgaagaccacccgctcgtcctcggtctccagctcatcactcgagatgaggtccagcagtgtgtccttggacaggcgtgttgaaagtcctcgctcttgcctcacccgtctcaaaagtgcaccaggcacatgcgccaggagaactcatacagccggcggcactggtgggcgtccgagagcagcatcatgcccaggcagttggaggggaaaaggttcttctccaggaactcggcggcagcatcccgcacatcgtggaactgcagcatgtcgcctgcctccagcagtgactcagcgttctcctcgttgatggcgatgcgtgaggagtaggcaaagtccagcagcagctccagcacctccgggtgcaggttgtcctggaagttgacagtgtcatcccggctctcccgaaggccatggctgaacatggcctcaaaatagcggctagaggcaggccagcacggcacggtgacaggggaaggcacggtcgcccgcccagagtgtgacgtcggtgaacatgcagtgcttgcgaagcgtgttgaggtgggccagcacacagtccgggtgggaggccttgtggaagagggtgacgttcatggaccccgtgctgctccgcgacttgcgggtctcatggacactgaccgacatggtgcgccagtgccggagacgatccccgcagcacgccgccgcatcagagacaacgtcccggcagcccagcgcgagctcaacaggcaccgccgcaggctcccgtcggccggctctccacaggcaaaaacgctatcccataaattccgaggcgtacagcctga

SEQ ID NO: 451953 - DNA, 815 bp, Homo Sapiens
agcgggctcttccggacgcaattttgaggaggtcggagcggaaggacgtcgtggagattgcttgcgctggggtgccacacttaggctgagctgcaggttttcgcacagtcgcgagttaacctctgcttgctccagaggcctcgtcctaatccacctcggctgacggcgcgggatccctggctccgcgagcctcagcctcaccatgtgtgtcaggagctgtttccagtccccccgtctccagtgggtgtggagaacagccttcctgaaacacacccagcgcaggcaccaggggtcccaccgatggacacaccttggaggcagcacctacagagcggtgattttcgacatgggcggagttctcattccttctccagggagagtcgctgcagaatgggaggtacagaatcgtatcccttctggaactatattaaaggccttgatggaaggtggtgaaaatgggccctggatgagatttatgagagcagaaataacagcagagggttttttacgagaatttgggagactttgctctgaaatgttgaaagacctccgtgcctgtggactcatttttctctctgttgaccagtgagcgagtggcaaagcagttcccagtgatgactgaggccataactcaaattcgggcaaaaggtcttcagactgcagtcttgagcaataatttttatcttcccaaccagaaaagctttttggccgtggaccggaaccagttggtgtggttggggactccgcctggacggtctctgtaccgaccctggtctccacgtgggtgtcacgtgttgaccttagagcattatagc

SEQ ID NO: 451954 - DNA, 1393 bp, Homo Sapiens
  misc_feature (62)..(62): n is a, c, g, or t
agttaatgacccaggcagctgtagccaacatcagcaaaggggtcgccccaagggtaagaaanttccccagtcaaggaacagcaaagcacctctggctcttctggatgaaacacccaggttgtcgagccttgcttccccatagtcttcaagtcccacagcctgcaagatcccacactgtgaaattttgccacaggactgtgttccatggcaagtgtaatatggctcgtctgtggctgggctcccaagccctggcagggaagggtctttgtagatgagaccctgggcagtactccatcacatagaagggggtgccaatgacacttgaatcttcacagagatcaagaacgttagggacaggtactccagcatttgcaagggctttcataatcctgaactccctctctatggcatgggcagatggaaggagtgtccctgggggcttcttcctcagaactagatcacgattagccagcctgatgtagtaagttggatttgactgcccgtgatcaaactgaagtagttccaatgggcctgtggtctggatacccagtaagtcctttgaggtactttctgcaaggaaatctttcggaattttccatcgtctttttcacaggccgagtgtttggaacacctactctcaatgtaaaccccaagagagcttctaattcctttactgcagtctctgggtcattaaccttaatggtgtgaataccaagtctggcagcttcttttagatttgttccaaggtcatcaagaaagatggactcaggagggctgcaggccgagctgctccaagcacagcttgtagatcctagggtctggcttacagatcccttccatgcaggactccacaatcatttcagagcaaagtctccccaattctcgtaaaaaaccctctgctgttatttctgctctcataaatctcatccagggcccatttttcaccaccttccatcaaggcctttaatatagttccagaagggatacgattctgtacctcccattctgcagcgactctccctggagaaggaatgagaactccgcccatgtcgaaaatcaccgctctgtaggtgctgcctccaaggtgtgtccatcggtgggacccctggtgcctgcgctgggtgtgtttcaggaaggctgttctccacacccactggagacggggggactggaaacagctcctgacacacatggtgaggctgaggctcgcggagccagggatcccgcgccgtcagccgaggtggattaggacgaggcctctggagcaagcagaggttaactcgcgactgtgcgaaaacctgcagctcagcctaagtgtggcaccccagcgcaagcaatctccacgacgtccttccgctccgacctcccctcgtgccgaattcgccacccaggc

SEQ ID NO: 451955 - DNA, 863 bp, Homo Sapiens
tccccccaggacatcccttgaggaagagtagccgccccgtggaagcgcaggccagcttggtcgaacagcctgcgatgttcttaagtaggttggtcatcctgaagtgcatgggtgtaggagtacttgttggttactgcggttgttgcaggagcttcaccacgggcttggaggtgctggccaggagctgctgctcctcccggggagatgtcaccatggggatgaggcacagcggggacagcgtctcccttttttgctgcagcgccagctggcagtcctcaatcaggccctgcaccaggtagtagcgtgcttcgcccagcagctcccccagttctctcgtactctccggcagtggcacagacccatcccgcaggtaattgaggattgtaccaaagtgacggccgctccggtcaatcagcacccaacctccggcatcggtcagcacctccacgcggccgctgaacatggctttgagcatggtgtcctgtcccgtgagggtgcgcagcgtggtgtagtgcaacgagccgcccacgttcagcttcacgtatttgctgttcggggtcagcggcttgagaccgtaggcggcggggccaggctcgagacccgagggcttgggggcttccagggacggggccgcggcggcagccgggcccgaggcctccgccgacatgccgggtagcagcggcggacggcgatcccaggatctctccgcgccctgcggcctgctcccgaagaccctcggccggcccccagcccttgggccagaccgctcggcgcacacgcccactcaccgcagctactctgcaagaccggccctccgccccatctcgctcgcaccacccggaagccggcgccgggcagccgct

SEQ ID NO: 451956 - DNA, 987 bp, Homo Sapiens
ttcccttagtgacatgagggagctatttaggatttctaagcaagagagagaatagatcggggttgtgctgaaagataattactcaggtgcgagtgtaacagcaggactggctgcataggaacagtgggaagtagagagcagctatttaaccattgcaaaggtcctggcatgaggctggggtgggggtgctgcctgaggcggcagggatgcagaagatggcacctcaaattctctggggttatggccagccaaagccaggctctccaagccataccccatatctccttttttctgctctaataccctgcttgggcagctcttcccaggaacataggcatggggactccgaaggccctcaccttgcagcgccagctggcagtcctcaatcaggcccttgcaccaggtagtagcgtgctttcgcccagcagctcccccagttctctcgtactctccggcagtggcacagacccatcccgcaggtaattgaggattgtaccaaagtgacggccgctctggtcaatcagcacccaacctccggcatcggtcagcacctccacgcggccgccttgaacatggctttgagcatggtgtcctgtcccgtgagggtgcgcagcgtggtgtagtgcaacgagccgcccacgttcagcttcacgtatttgctgttcggggtcagcggcttgagaccgtaggcggctggggccaggctcgagacccgagggcttgggggcttccagggacggggccgcggcggcagccgggcccgaggcctccgccgacatgccgggtagcagcggcggacggcgatcccaggatctctccgcgccctgcggcctgctcccgaagaccctcggccggcccccagcccttgggccagaccgctcggcgcacacgcccactcaccgcagctactctgcaagaccggccctccgccccatctcgctcgcaccacccggaagccggcgccgggcagctgcgcagacgcccgct

SEQ ID NO: 451957 - DNA, 765 bp, Homo Sapiens
cccacactcacacacacagctgtgacatgaacactctctcgcgatcccgcacccagcttgaattcagcaagaatcgaaaacaggtgtgcctccgtgtccaacatctcgcgtatctacagcgatccttagagaacaattaaggccagttgacagtaaagaacaatcagtgtgtatttgaagtccatgctgagagagcatcaatcttctggcagctgcaagactgacctatcaaccgaggcatttcttcattccctgccatgtctcctcctcttgagatcgccatcaggcacagtcacttttctacaaacaggcaataggactcccgctgccaccctgcccagattttagtcctctactgctgataaagtgagcaaagatacgtggcacttcctgaacccaaatactcttctgagctgattctaaatccacacagaatcaacctacctcctattacctccttccaagctctgtgtcccattctctcatttcagtctcagctccagacatcagtgaattcaatgtgatacatcaggggacatcacaggacttccctacttgaaaatcaagcaatcgtgtccctgaaacactctgtctttattcatgctcagttaccgtaaagtagatgcaactctaagaacctatggatttttttattgccactaatagatcatgatttacagcaaaattttaaaaggtccaattttactcacataagaagaagaaaacattcagcaagaagcatttctttttgctttatctttccca

SEQ ID NO: 451958 - DNA, 1423 bp, Homo Sapiens
gccaagagaagatggcccccgctcggggcgggtttttactcccggggtagccgggtttccctggagaaagggttacagggcccaggaagcccgaaaaattacggccccccacgaagatttaggcaagggtgggtttctccagtgtttcccccccgtgaaaatttttcccgggatgtttctaagcagtgtgtcccggggccagcaattaagaggccgatggctttaagatgggtgctcctgtccgtctttaagaagaagggctctttcgggttaaatcccgggctttttcccaggcgcaaccctcctgggtttccccaaagctcctgcggccgttaattgttgggggaaggagaagtagtttgtccaaggggggggaatccattgggccatttattccaattcgcgttccgttttaaatgaacagccctccttgcggagcccttcgggttggacaaggtaaaaaattcccggagttatggaggaattagaagtaaagagcggagttggggattagtcaagagatttgggcatgctaggttgctcaaccttataatggggatagggcagcccaagatggtaatccaaatgagttaaccgccggggacggaataatatctcaagggggggcagtgtaaggtcaggggtggcctagactaagaaggggcaatcgtagtctatgggccaggctttcagcaattaaaaggctgagtatttctcttatagaagtcaaccgggaccattcagaataagaaacattggctactgcctcttattcatattggctagtagcctcccatatcattcagccagtagtcaggtggagacctcagtcagtgtttctggtatctttaatgccactcattatgatatatacttaatagcctgggctaagtacgtaagttaaattattccagtccattctgatcaagaatgctcaagagactagctttcccacaacagagatgtggagcaaaaagcatagtccttaccgacttacaccaatgagcatgccacagactccagccagctgtagcacatacagaatttgagtaaggaatactataacccctattttactcctatacctttgctaatgacacctctaaaatctgcagccatatatcaacaccatatttcaccatattgaatacactcacaagtcaaccatctaaaggtcaggctcctaatcaatagcgctactgtgattagacaaatcaacaatgttaagtgattaaaataagcttgctgttaacacaaacaactcatgaattggatataatatgcctctctctgccatctttcattatgcatttttaacaccagcaaaaaaagctcaaacactatctccaaacactcttactatgggaatataaatatggcaattaggacttagagcaatcatcaggtcaaaggagttttatca

SEQ ID NO: 451959 - DNA, 851 bp, Homo Sapiens
  misc_feature (382)..(382): n is a, c, g, or t
ttctctcatgtccttgtccaaacccattacccataattcgggataagtcacctgatactgccaagcatccttttactgccagccaaggaagaataaatccaatttatttgctcctggaatctcccttcttctcaaagcttatctgcttcatcaagaataaagaggcgtatactgcctgggttcaagtagtcagttctatgagttgcttaattctgccaggagatccacagcaatatgacactttttaagtctggttttgtcttgtgataactggggtccctccaataaagacatgacactctaagccttccatttttattccaatggctgtaataacagaatgtatctgtacagcaatttctcttgtaggagccaagatcanaatctgggtacttaagcttgttcaagaacaagagagtccaaagctatggtggagaacacacaggttttcccggtgccagatttagcttgaacaattaaatcgagcccgcagcgccccagcgggatggccttgagctgcaccggcgagggcctctcgaagccggccgcccgcagcccctccagcaccggccgcgaaagcagcagtgactcgaagtcggccggctccgccaacagcacatcccccgtgcgggtccgacgggctgctgagatcctgagcggtccgcaggatcctcacaggcccgggtgttggctctggggccgggacctgcacggccacatgctcagccggcatagcagtcgccactgctgctaaggctcccgaggcttcaaatgccgccgccatggtagccgcgccgtcagatctcgcggtccgctctcgacgaattcgagctcggccgatttggcctgat

SEQ ID NO: 451960 - DNA, 977 bp, Homo Sapiens
agcggggttctcctagcagcgcgggccggtcggaccgccaaggcagccggcgctggcgatgggaagcggcgtggccgccgacacaggcagtggcaaagtttcccagacgtacacatctggacgcgcggctgccggctacccgtgacccctctaggaagggttcagggatttttaatttggaaaaaaatccacctggtttcctttgtcaaggtctctccgggtggccagcggcaggagctgcaaacttgggcacggcggctacaccggcagcggaccgggctttggagaacctcgggactcaggtgctgaggtgcccagcggctccggacgtgctacggggtgcgagcgcgggggagttcggggcgcacgacaaggaagggcccccgggagctctatatggaggaaggagcccagaatggtgtgcaccaggaagaccaaaactttggtgtccacttgcgtgatcctgagcggcatgactaacatcatctgcctgctctacgtgggctgggtcaccaactacatcgccagcgtgtatgtgcgggggcaggagccggcgcccgacaagaagctggaggaagacaaaggggacactctgaagattattgagcggctggaccacctggagaatgtcatcaagcagcacattcaagaggctcctgccaagcctgaggaggcagaggccgagcccttcacagactcctctctgtttgcacactggggccaggagctcagccccgaaggccggctgcgtggccctgaagcaattccagtactacagggtacaacgcctaacgtcgagcgacgcgctgaccctggaacggccctgcctggacctcagaaccagaggggtgacgaaactctcatagctggacagctgcagaagtgacatcgaggacacgacgaaatgagcggtcaggcaggagggatacatcaacggcacggaaggggcccaagaaggcacgaaaccagggagacca

SEQ ID NO: 451961 - DNA, 1180 bp, Homo Sapiens
gctgggtggcgaattccgcacgaggtcgtggagaagcctgttctttgtaaacctctggcttttctatgttctctgtaatttccatcttagtctctgccccatgggggccacatgggacaagttatttttggcaaagcacctaattgctggcactgtcccaaagcatagcgtttgccttttggaaagaaacaatgctaggacatggacactttggtacactgtccttacccctgagtattagtccactcagttccttgttggagaatgttgagaaaaccctactggctggcttgtttctgccaaagcttggggagaggagagggggatgagaagatgttagcagcctgctaaacctcagacagatgaggactcagttctgtgcttgccccacaaaaacggatgctcacatcatcaggaaattgttcagctggaggatttataacttcgttgctttgcatgaagtttaaagttttcatggttgcccagggcttgtaccttagattcctgtaaggactttgcactgtttttgctgagaaaacaacgcttcaggacttaaggtctaagcgtcagagaagtgccgtattttcaaggtggaaagtctgttaagcttgctgttgtccaatcatccgtttttagagatggggaaactaaaactcaaaaagatgtgcctgaggtcatatggcattatcagaaccaacctctggccctcttgacctgtctagcattcgtttctttctgacctataggatgactctaattcagtctaaatcggctgccctcagattcttgagaacttaaaattgagcagaaattcccaaggccaacctagctctcagggaccaacctgcagaactcaagattgagcgaaatgtttaggccagttgagttttgcagaatgagtggtaagggaaaacagatctagcctgttatttaaaaccagggttcaaaagccctattgggagaggtagtattgtcctagcatttaaattctcatgaaatgtgcttggtctgtgatctcttggtcagatatctgcgttccaggcgatcctttgagtttgtgtaattcagctggccctggctcctggtccctgttactgagctgggcagtcgaaccgaagggcagatgagctcaagatcatgccttacgaagcatgtgctctaaggcacctcgcccatcctc

SEQ ID NO: 451962 - DNA, 1244 bp, Homo Sapiens
  misc_feature (327)..(364): n is a, c, g, or t
ggtggagaagggtcaaacctattttactgaggggatggggtgtcaaagaagtacttaggaccatgagatccaacatccttgctggactgggagctcccaggctctgcaggaggtgcaagaacagttaaatttcaacatgagtttgctcttcaaaccatagcacctccattggggtggggaggtgaggtcactctgtatcagtggttctcaacttcatgcagtggaactgcctagggagcttttgcagatccaaggctaggccacacccagacaatgatatcagaacctctgggctggggacacagacatcagtacttgggaagcttnnnnnnnnnnnnnnnnnnnnnnnnnnnnnnnnnnnnnnagtataacttgactcctaatgaagatgggtggaagcagaagcttgggttcaaatcctggcctttctgtgtagcccagtgaccatgggaaaatgcttaacttctgagtcacagtttcttctcgtctgtaccagtaggggcgaggaggataaaagccacctcacatgatggtccttggcgtctccagggatggccgcatccttgccttccagaacctttgagaggattcctgtcactgcgggaaagggcagcaacttccctgtgcttcggggtgggggtcggactcccttggcctgggctagctgggctgtggctgcaaggcaaaggatgccacagaagacagagggacagtgaaacattctctgccctccccaccgagagagccgatgcgctgggtgatgggagtccgtgggagtcaggctaagagcatcttgtaattatggaggcaatggagtaggaggcgaacctgaagccagtggctgcccccagagagcagtggtcacttgttacgcttggggcagggggcagggtagagccatgtcagtcatatgctccttggtggggagggccaggaaggaggttgaaaccaattcccccgaccgcccactcgcacgagtccaagctgatgtgggcgtgagcagtggagctatgcttgtgggagggtatggccttttccagcgcactctggctcccgcaatcccgaaggagacgcccatgtgggagatcctaaactacgatgacgacgggatggacacaggcgctttggtccaagagttcgcagtttaattgcaaggcgacgcgaaagtaaagtggcccgtggcattccgccctcacaagaaccatcgcagcctcgcgacgaaggttttaacgaccaaggccccg

SEQ ID NO: 451963 - DNA, 1589 bp, Homo Sapiens
  misc_feature (84)..(84): n is a, c, g, or t
  misc_feature (102)..(102): n is a, c, g, or t
  misc_feature (149)..(149): n is a, c, g, or t
  misc_feature (432)..(432): n is a, c, g, or t
  misc_feature (1555)..(1555): n is a, c, g, or t
agggggtttagtcttgggggctagtgagtaagttcagagggggattgtgggctctcaatgttttttcaatatgaggaaaggatnggttattaggaattaagngggaatgactcgaaccccaccgctggttgaggggaagcgtattgagnatgtgtagtcgccgaatatccgacatgagttgtgttatcgcgccggcctcctgttgtgggggtgtctccgccgggggcacgggaaggtatcgtaataaaaatcttggcggcggcgggggtagtgcacgtttgggttgaggaggtaaaggaagtttggcgagagccgctcgattgggtcgtaggaggtatatgttggtggggagaacgcaggttgcggacaaaaagaggggtggttacgggggaatgggggcacgccgctaaaagaggctgtggagatagaganccctagtgggggaggcgcttctatctccgtgccccggttgttctttatgggataggggtgtttgtaccaaaaatgggaaagatgtttgttgtgggggggaaaagtaagccgtctagaggaggattgcctctgcctttcaccaggggggtataaccaggcttgaccgtgtaaaaattggggaaggtcaaattttgccgtgtgttcaattaatagggagggagttgttccgaagcctcctttttcagggtttttgggtaattaaataaaacacatgtttaatttcccagaataagaaatggaaattaagacttaaaggaggggaaaagaactcatgtgacgtgtgataatgtgcagaaaaaagtataagagcagccaagaggtcttattggctattacaaaaggaaacagttttgttgtaaagaagggtagtcaacatcattcagaagaaacgcattcatatgaggatcagtgttgcactagaataattccagtacaacctagaagtttggtcagctgcaaacttggcacgctggcaggatgttatgctctctgaaggggaatgctggtgcacaaaaagaagccctgttgtcaactctgctgattgacctagccccatcgctagcttccttggaacggaggggcttctataatggaaagactcgtacgctttcaggttaaatagctaccaaagagataatctttgttgtggtgatccctccatttatattattgtaaaagaaattgcaactggaatgaagaaaagtacctggtcgtacaacatctcaggcatggatatgtatatgtgtggctgcaaacgagagtcacagctgagtcagggtgctcttctaaggccacatgccaaaccctttttagatctgaaggagatatccctggcgtcgttcttaggcaatgatgagtcatgagtatagcgtcttgcaatcagtagcatcttcgggaaatatcccatgcgacaccatccagcacgatctcatgtagcttcctacaaagatggtactccgtagccactctagaagtgctcggagcgagttcgcagcattcccagggaaattccccggagcccggttatctcaaattgatgagaaagttatacatgattggtgtngtgggtgcggctctggcggagtggtcgtgcgcca

SEQ ID NO: 451964 - DNA, 550 bp, Homo Sapiens
tactaaacaaagtgaatttattaagtaacaattcagctttcatttatcaacaatatgtaagtgctagattaaaatacctgatcaatatgagatgacaatggtgttctagtgaagacacagaaatccagtgatgaagccttatcatgagtaaatggatggtttccattagattttgtcaaatattgaatacagatatccattaatatctctgggctcgagggtcccaaataaaaaacactcgtaaagacagtcaagaggaaaaggaaaccatgagatatagagaatctggggtaaggcaagttcttgccatgcgcatcccctcttcttgcttcatcagcaaattatctgcatgtttttcagagtgtatgttacttgtgtattttgaacctttttcactaaataccatgctctgctatctaccaagtttccaatctgtgatggtctgttaggttacaataaatgtttcgatgacattaatgagctcatttgtgatcagtaaataggagcatgaactcagtgtaacatggagttgttctggcttctaggcatg

SEQ ID NO: 451965 - DNA, 1353 bp, Homo Sapiens
  misc_feature (52)..(88): n is a, c, g, or t
  misc_feature (207)..(235): n is a, c, g, or t
tatgaatattgaacctactatggggacctgggttaaccgcggtggcggccgnnnnnnnnnnnnnnnnnnnnnnnnnnnnnnnnnnnnnatcaggccaaatcggccgagctcgaattcgtcgagagcggtacattagaagctccaagaagttctctgtgaaaggattatacctatattccaagattattatgtacacaaaggtactgnnnnnnnnnnnnnnnnnnnnnnnnnnnnngcaagcagcttcagccaaattatatattgtaatagtttttgtgctaccttgtaatacagtttttaatactaataagaatttgtctcatttacaaaccaaaaatttaggaaggaaaacagtatccaaataaactgcctaagatcttgccactccaagtatgatcctcagatcagtagcattggcatcatctgaaagcgttttagacaggcagaatctctggtctcccctctctgcattccccacccagtgaatgaatgagaatctgcatttcttgagatcataagaatactgacatacagatgagataaaactcatgtgaatatcagttttaaggctggtggttcatttgttttggtcatattgagtcaggattgactaatgaactgtagaggttttgcattatgcaaatgctcttaatttcttgtattaggaattagacgctcccccccaagtcttaaataatgttttaatctgtatccttttattataagaagattagtaatattctacagataataacaacaactggtatagtatattttatttacattcttcattcttaggagaaaatgctgagaagcttctgcagttcaagcgttggttctggtcaatagtagagaagatgagcatgacagaacgacaagatcttgtttacttttggacatcaagcccatcactgccagccagtgaagaaggattccagcctatgccctcaatcccaataagaccaccagatgaccaacatctttctactgcaaatacttgcatttctcgactttacgtccccctctattcctctaaaacagattctcaaacagacattggttactcgccatttaagaccaaggaatttcggcataggtgtagagtttaaaacagtgtgtattgcctgtgtaatatttactagccaaattttggtaagactttttttccatttggtctaattaccagcttatgggaagataatggctgtcaataacccccctaggtggataccttaaaagagaatacaactgcggaacattccttgctgagattcataggttaaagggcttaggaggcccttgaacaatttgggcaatatggggtgaatagcacacacatttgtggttaaacaa

SEQ ID NO: 451966 - DNA, 2022 bp, Homo Sapiens
ctacttgacatttcttctgtaatttctttatttaaaaaagtaaatgtaacaagatacttaaaaaaggctagatacaaaagtagttaagctgctcacgaacatttaaaattttccaaaatgtatcttcaataatcatgatcttataaaacattttacagttatcagaaagtgcccaggctgagtttacataactgaaataccttagtacaaatgtctagttagaactgaagtgcagtaacctcttgagactgactgctcattgaaatagggatacaaagaaaaagttgattgtgataaaagtattgtgcattggccccatcatatgtacaaaaaaagtgccctcactcaaatgaggcaatttacatggcaaaatattagtgattatcatttaatatcctagagctcaatgcagtcaaaccgcaataaaagtggtttttataggtaaaagtgatttcatctcttaagatctggaatgtcgagaacttttttacaagttccatatacatggatacacagttgcagccaaccaccaaattaaacaccataaaaaaagttaaaatgaaaacacagaacatacttaattttttattttgaaattccctattccctctatacaagaacctttgctgaaacagtttccacaaaggcagcagtgaattttcagaacatttacattttttccccctcagcaaaaagataaatcacagtgtaaattatgttgttctgctgtcatctttggctggggttagacccagaagttggtgactagcaaaccaatatagccaaatgttgctagtgctccttaggcctttaagctataaactcagcaaggaatgtctgcattttatctctttaaggtaccaccaggggggtatgacagcattaacttccataaacttttatagacaaatggaaaaaaatctacaaaatttgctagtaatattacacagcaatacacactttttatactctacacaaaaccaaaattcttggtcttaatggcgagtaacaatttctgtttgagaatctgtttagaggaatagagtgggacgtaaagtcgagaaatgcaagtatttgcagtaggaagatgttggtcatctggtggtcttattgtgattgagggcataggctggaatccttcttcactggctggcagtgatgggcttgatgtccaaaagtaaacaagatcttgtcgttctgtcatgctcatcttctctactattgaccagaaccaacgcttgaactgcagaagcttctcagcattttctcctgattcatcattgaaagaggtaaaactgatcagcatttgcacattgacttcaccgcagccatttaccaaaagcctaaaatcttctgccgttaaatcttctaatgaattttttggaagcacatctagtagacctttcctcattgcatgtaagggctgttctgcaactaccaacattctgtgttctgcgtatttccgcacatactcatatacattctgtggagtgactggtatatttacaccattaggaatgagttcaacctgtcttcccccttcttttttacacaggtcaattgcaaatgccaaatccattgctgagaaaacagcatcagcatctgaactctgagacgcgaggattagttgccgcaaactctcatacattacaggatcaaaaaaagcaaaatcatgccaattgacttttctaccaagcaatactttaattacatgtctattcaatgtgataggacatagttcattctgtaacagacatagtccaagaatcctgccaatgtttctgaaacaattcaaccttgcttctgtgttcttgccaggccttggagtataaaatcctcttttcccaggttggtaaaacaaaggggcattgtcatcaccatcatctgtatcatctaaatccatatctactacacttcgactagagccatggcgctttcggttttcctgctgtaccttttctgaggagtctactaatccaagatccaggatactatcagctccattttcccgtccatgtgccc

SEQ ID NO: 451967 - DNA, 1065 bp, Homo Sapiens
ggagcaattctaacagtgcataaaagaggcaaccccaaaagtgtagcaggtactgaataacagatttgcagccttgggtatccacattaaaatttgaaatctaagtgaattacttcaagctgatttcttaggtcaaggagagattatggtccttaaatgcctgataaggtcacatacacaatttcaagtgcattatagtaaatccatgtgacagctcctacagctactaacctgcttctgccctcacggtagcgtgcacaatcttcatcgcatgtcctgggtggtggtaggagcagtagaaaccccctgggtcatgtcagatttagaaaatataagcaatggctcatacacgaattttaagttgtaacctacatgtgataagttgctttatcttccaaatgtaataaaaaccagaagttactttgaaataaattgaaggattagcagtggtgactgaggaataaaaattataatttaaaattgtccttaaggctggaattcttaacttattgaccttatatcctacatattataggactttgtaaatttaggctgatatggaaatgtatatttatatcaaatttaaatttttagaatgatggtgctactatattctaattgttaatttgataattgtaattgtaatttgttaatttgttctaataatgttttcatgacattattcatttgctgcttggcttgatggcataacaagtatgggttatttaccctgaaaaggaaacagtatcacccttccagaatctctatttacagctacagaagatgcaacacacctgtttctggaccacttccagatcagatgtgatgcatgctttagatcatttactttgatctaggaattactgtctggcatttcgtggtgtagggtaggtgtctccagcactgtataggtgtctggaattgagataagaatcaatttcaatacaaaatacattttttgcttaaagcacgcaaggattctatgaattcaggtaaattcacagggtggaaaacaggaactaatgttatatattcctgtagttatcttcataatgaagcagaaag

SEQ ID NO: 451968 - DNA, 764 bp, Homo Sapiens
aagctggtactgcccggaatttatgggatcgtgagggaagtggggagaagctgtcaccccaacttgagttcaaggaagactccttggaaggagaagaccaccaaattgagaatgaaaagtaacgctgtagctattcttgggatggggcagtggccccatgctctggtccctggcctcagcagactgtcccagctcataaccccaagtgccggctttcccatcccgtctcaggatctgcgacgtcgacgggcacccgggctttcttcagcgaatatctaaactctctcaagtttctccagagactttcatacatctacaaagatgacctcattctgtaacagcatggatttaacccgctcttcaatgtcactcccccacagaatgcactgttcatcgtcaccctatccactatcgtcagtcttactaaaagtcaaacatcaacattagtactaactctggcattgtagcgatatctccaagagaaaattgttttgaacttttctgggaaaagttcacatacgttttcttaaaacgctagtttttacaatctcgctaccatgtggctttcctgaaggattaaatttctaatgtccttcaactagagagaggtaaaaatttttctagaacatgaattgcccactcccctcattccttctcagaaactaactgaattccagtgggtgtgcctggcaaacccaaaagcagtttctgttcaggatgctggtcttacctgtgaaggcgttcatgaacgtggagagggaccg

SEQ ID NO: 451969 - DNA, 1079 bp, Homo Sapiens
  misc_feature (318)..(318): n is a, c, g, or t
  misc_feature (674)..(780): n is a, c, g, or t
gttttaagccgagcaaattttgccattagggaaatatgtttgtattggagaagtaaatgaggttttatttaactttatttaaaatatgtgctaatttataacttttcttcatgttatcttaataaagacttgataaagaaggaaatggatataaaatattgaacttgtaagtattttgacagagtacattacttcttctcattaaagtaggtagacgaacagaggttggcaaactatgttgggtcagctgctggttttgtaaataagattgtattagaacacagccactctcatctatttacaaattgtctatggccnattttagcactgcagaggcagagctgaattgcaataccatgtggcccagaagcctaaaatatttactatctgtacctttaaaaaaaagtgttacttagaaattttttgagtaagtatatgttcttaagaattatgtattaaacattgtttaatattttgttttgaattggcattttactaagagattcaatttctgaggctataaaaagaattttacataacaacaatcttgaagggaatctaagcaaagaaatctcatttcatcaattgagagacaagagtgtggcctcaagccaaacaacttggaatccaatcccatctccatcattactagttttgagatcttgaacaagttnnnnnnnnnnnnnnnnnnnnnnnnnnnnnnnnnnnnnnnnnnnnnnnnnnnnnnnnnnnnnnnnnnnnnnnnnnnnnnnnnnnnnnnnnnnnnnnnnnnnnnnnnnnggaacaatgtctgatacacaacaggaggtgctcactatatttagccattatcataatcatcatcatttaaatggaaacaaaatccctggtttctaataaattggtggatactccaataaataatagctgaatctgaatatgaacagtgatttattacagaacaattgggatgatttaaacttgaagggtttgcatatttagtgtaaggactgcacttgagttctgatgacatctttcccataagggaatactatttctttcatcttccctctcccaatgaccaccactggtctttctcg

SEQ ID NO: 451970 - DNA, 687 bp, Homo Sapiens
cccttttttggtttgtgtgtctgttttttctaggaagcagaaaatcaatcatgcctctttctctttcccagcgtggctggccaccaccaaatacaggtatttcttttttaagccgatgacacacagtattacaaagacagagataactgcctgggtcatgggaggaggggaggctttataaccaagtaaatttggagaaatactggattaaaaaagctaagcaagtttctttactgaagggcttcttagagccattaataagcttattaataagcttataggctccttcgttctctaagaggggaacatttcgtcatggaatccactcctcatagagcatctcggaggaccaagttttcactttgagaaacacttccagaaacccagcccgttatcatccctggctcaggaggggtggtcctgaagctgtggttcttggctacgctgctctggggacttgcagaatcccttctcctgcagagtatgttagttcgcatgcacccacatcgaaggatactataaggcccgactctataaaactcattattgtgagctcaattaggttttaggagatgaagtcctctgatgtctctcaactttcaatgccaggaaaagctggtcctctcttatgttttggggcactgaaaatcttataactgactctgacaggtttttgctttgccatcc

SEQ ID NO: 451971 - DNA, 958 bp, Homo Sapiens
ccaggtgcccatcagaagcgactgatccccatcaagtacaaggcaatgaagaaagagttccccagcatcctgaggttcatcactgtctgcgactacaccaacccctgcaccaaatcttggttctggactcgccttgccaaggccttgtccctgccctgaagactgttctgaggccctgggtgtgtgtgtatctgtctgcctgtccatgtacttctgccctgcctcctcctttcgttgtaggaggaatctgtgctctacttacctctcaattcctggagatgccaacttcacagacacgtctgcagcagctggacatcacatttcatgtcctgcatggagcgagtggctgtgagtggcatgtccacttgctggattatcagccaggacactatagaacaggaccagctgagactaagaaggaccagcggagccagctcagctctgagccattcacacatcttcaccctcagtttcctcacttgaggagtgggatggggagaacagagagtagctgtgtttgaatccctgtaggaaatggtgaagcatagctctgggtctcctgggggagaccaggcttggctgcgggagagctggctgtctgctggactacatgctggccactgctgtgaccacgacactgctggggcagcttcttccacagtgatgcctactgatgcttcagtgcctctgcacaccgcccattccacttcctccttccccacagggcaggtggggaagcagtttggcccagcccaaggagaccccaccttgagccttatttcctaatgggtccacctctcatctgcatctttcacacctcccagcttctgcccaaccttcagcagtgacaagtccccaagagactcgcctgagcagcttgggctgcttcttcatttccacctgtcaggatgcctgtggtcatgctctccagctccacctggcatgagcaagggatccg

SEQ ID NO: 451972 - DNA, 769 bp, Homo Sapiens
tttcaatgaattaacacatttgcattttattttaatgactaaaggcataaaacacaaactagtaaaattaacaaaaatattatataaaaaattagagaagtatgaacatagtcatataattttacttacaaaattgaaaagaaaaatacttaggattatagagtgatagcaatttttgggggcttttttccttgacagaaatattaaacaacaaatgtgagttaagattttatattcttataaacttcaaacctaacttttataagaacagactgatgcttaaattctagaattaaaaagctaaagctgatttttaatggtataattaaaacagaaacaactgaattattaagacgttgctcaaaaacacccatcagctgtctaacagattttgagacaatgtatcattctggtttggagaataccaaatgcatttttctaaatgtcacaaaaaagctgagcagagtttctccaaggactctccagcttcagaatgttaaccttggagacagatgaagctgtttgtgggaaaggagagtagaaatatgccacattaagaagctaaagagaatggtcaatataatatctggcgaatattaagaatgtaatatagaaaagatacattctataaataaattataaccaaaacaatcatgtacattagcaatttaaaatatttttctctgaaaatgaactatttgattactccttgccctttatcaaaatagtaactattttctcataaaagagtactagtgtagttttgcat

SEQ ID NO: 451973 - DNA, 1003 bp, Homo Sapiens
ccctgcgtctgggctctcccttggactcggttttttgacccggttcccggtatggggtcctcctttcgcttcctttggtccccgcgcccagttttcctcgttctttgcaccgccatttgcgctcttccctcaatgtgccttctcgggaccccttctctgtggttcaccccccgtgcgttttctactggcctcctgctgggtccctcgacgttttctgccctccactgttgtattccttcatcttctaccatccttacccttagcttttaactcccgtgtgaccatagtccctgtccagtcatggaccacagtgggcagcagttagaccatgcctgaggggaaatgagaatgccacctacagcccgtggaaagcttcacagctgtgctgaaagggaaattggttaagaaccttttgtccaagatgctgaacctgctgtcggtgccatacacctgtctctttctccttacagatactccctttgtggtgatattttgagtcggctcaagaaccaaatcttgaactttcaccctggttaaggttcgggtgccattctcaaagacagtctcataggaaagataatcctccaattcagaaaggctgggagttgggagttctttctggcattcgatgccacacactgtatttaccatcatcttagcatctgcctcaaatgcggggctggtgagatggaaagtcctttcactgacaatccggggtacctttctcaagtgccacataaaatcccattccatttctgatccatcaatgagggtccacccaggggtgaaaaatatcaaccaaagcagcatattttccattttgatcttctaattttgtcctgccaggcttgtttggtccccgagggcactgtcagctgagatcagagctcccgaggaggcgggcggggacgctgcagctgggcgcctctcagccagcctgagccggaggccgccccgccaaggccgggccacagcacccggagctcgccactgacactccgct

SEQ ID NO: 451974 - DNA, 1013 bp, Homo Sapiens
  misc_feature (268)..(320): n is a, c, g, or t
  misc_feature (988)..(988): n is a, c, g, or t
  misc_feature (1002)..(1002): n is a, c, g, or t
cacttttcctccatttgattaacagtgctgcacacacaatgattacgggaaagcgcaaataaatacggaaaggggtgcttagttttgactactggaagagcttgctgggtctcagcgcaactttgttgtttaattcctgagaaggtgatctctccatgcggtctctcacacaaggattcttggaaaagaggaagagagacaagcagaggggggaggacagtctttcactttaagaacggctgggctcaaagataaaaggaagggaaannnnnnnnnnnnnnnnnnnnnnnnnnnnnnnnnnnnnnnnnnnnnnnnnnnnnggaaaccaacgctgcagcacttccgaaaggcattgtgatccatttctgagtgtgcggcccgtttctccaccgaagttggctccagcttctagcagccgcattggatcccacagcttactgcgagactccggtgtacaatccggatctctgccccaagatgattgcggcccaggccaagctggtctaccatctgaataaatactacaacgaaaaatgccaagccaggaaagctgccattgccaaaactatccgggaagtctgcaaagtagtttccgacgtactgaaggaagtggaagtgcaggagccgcggttcatcagctctctcaacgagatggacaatcgctacgagggcctcgaggtcatcccccccaccgaatttgaagtggtgctttatctcaaccaaatgggggtgttcaacttcgtggacgatggctcactgcccggctgcgcggtgctgaagttgagcgacgggcgcaagaggagcatgtccctctgggtggaattcattaccgcctccggctaacctcttcggcgcgcaaaatccggtccaggttttcagacgctggtggctcaagcggtagacaaatgttagcttaccgggatgtggtaaagatggtggccagacaccagcgaagtgaaaattgagaatccgagataggtacgttgtncagatcaagtccgncttttaattct

SEQ ID NO: 451975 - DNA, 1054 bp, Homo Sapiens
tgatcgagccggtacctcgcgacgtgtatccttaagtgtcctcagggcgcgtttccgctcgcttctcctggagcttcctcggaatagattccaatgtggcttcaacactgggctttattgctttatccaccagctcttgcttcttctcatcttctttctcaagttgggaaccaaaactcttggggagtgtgttgcttcgctgccgcatcctgggagttaggtcctcttcagatatctttagttttgattctttaagttggtctccggaatttggcacaggtcatttgtccattttcagaacctctggattggctgctttgtcactgtgggaaggtctgtacttcttctcttcttcgaatctatcttcaaacttccggatcttctttttaaggctctgaatccttcgtgtgagctgggcaggtgtcaggtcctcttgctcatcatcataggaccccagagaggagcttcgccgcctcatgaaagaatgggagtttggtggggaaggaggcacttctgtgtcatccaggtattgcctgctctgcccataagcgtagaaccgaggagagagcatggggtcgctgtcttcgtccagcagctgacggatcaggcgcccagcctgcggcgagaggtgggcttcatcagagtcactgttctcccgctgccaggaggagaaagcagggataggctcttcccagttcttttcatcacacaatgcagtcaggtccgactggggcacttcggagacaaagctctcctcctggtcaccggcatcttgatttctctgctgtttggtgtcagataggctgggatgctcctggatcttcattgtggggctctgcaataacagcacaatgtccccaaatatctactgctcaccaaaaccccaagacgtctgcagcaattccactccttcaggataaaaccttccaagtcacagctgctaatgcatccagcacagaaataaaaatcatggcttgatgccccccggatcctagctggccacttgcatgcagaaagcaactgtccatctgtgctcctttaactttccccaggc

SEQ ID NO: 451976 - DNA, 1669 bp, Homo Sapiens
  misc_feature (373)..(423): n is a, c, g, or t
  misc_feature (489)..(501): n is a, c, g, or t
aaattttgggggttctccccttggagattttgtggggggccctccatattcaagagggctcttaaagatattctttctcgcctttcgcaaaaccgcgggggttttccccccgcgccgtatagggggcccccacggttcttttaaaagattcaaaacgccccggggggtgaaacagccccttagaaaagcccccctgagaacccggggaggaggcccccataaaaggcgttcaagaaaggccccccaagggttttcccccaatttttcccacccactctatgtgagggaattttgggagaaaacgtggggggcccctttgtttcccaccagggcccccagataaaaggtgttggggaccattttttctctttgnnnnnnnnnnnnnnnnnnnnnnnnnnnnnnnnnnnnnnnnnnnnnnnnnnnttttcagagccccaaaaaaagtgtggcccagagaggggggttgggacacgaccccaaggaaaaccnnnnnnnnnnnnnctcacccccctttttggggaaaaaaaggccttccaagaagacccgtgtaagaggacgggccagaaacaacccgggctttatggaatagaaaggtattccttttcccaggggcccggttggaagagcagccaggaacttctggaccattctcccggggaaccggaagctaccttctccaggggttgtttctcggctgagagcgagaggagttcacccctctccaggcccttttctctgctgagagctgaacacttgagggacgacctgcccgccgacacaggggagctgctcactgtgggtctccttctgagctgttctaacactaaataaagctcctcttcttcttcttcacccttcatttgtctgcatattctgtacacaggacaagaactcgggcaccgtgggccaagcgccacgagcaacaggtttccaggggaagttaacctccacatagatcactcataacactgacatgaccaaaacttcggatctgattatgtaatgcatccgactgtacaaactgtcagaaactagacgccacttttcatctttaacattttgaaatcctcatactctcacaagaaccacaatgaaacccaaaaggagaacacattcagtgattttaatgtgtaagaaagattacatgcttcatgggcagaaccacaggttaaaccttgcattttgttcatggttattacacaagtaattacacaagtccagtgtataaacactacctgaacacattgtaagttcttctaataataataaatattatatgaaaaaagttaaccagcattaattcaataattctcaaacagatattcatcgaaatgaggtaggtctaatgtgtcatttgctaaagcatttaatgctgaggaggaaaaaaactcatcgaaaatatcagtcttcatcggactctccaagttttaatgttctaacgcaggcattatttgtcagagagtctggctgaacttcacatggatttttcttggtggggctacaataattatggtcctgtctcagatgtgtgttctgggaaacatcattgaattcacttggtactggtggtgggatatgactatctcccattcccaaatacctaaagtcaccttccccattttctgacagctctgttgaaacaggtgtaggagacataattccgctaaaa

SEQ ID NO: 451977 - DNA, 996 bp, Homo Sapiens
  misc_feature (834)..(843): n is a, c, g, or t
agcggggggcccgcggcggtcgggggacaccagctgcgtcggagcgcccagaacgccccgcgctccgtccgagccccgctccacgcagacccgcgggctgggagggagccacgcacatcgccgcctgcggccgatctccgcggggcggtaaccgagcctgcctcggagccgccgaacgcccacgccatgcgaccctgactctatggccccgggggagcgcgcctggagcctgcctgcgccagcccacccccagcctggaaccctagcgtccctggggagcaatgctggggatgccccgtggcgtcccctggcacctggcccaggggccctgcttgtggcccccgctccctgccacggggcatgggaggcaggtagcccagctcgcagccaggacaccctgtggctgggcggaacccgccaaggaccgcgaagtcccagagacacaggcagctgaggagcgtgcccgtcccgtcccccgggctgcatccccgaggcagggcccttcggccccgggtggcgcagctacccggggccgccgacacacgtcggcacaaccggttacccttcgagccttcctggccacaggcgaatcgaccatcgccaaccccgaggaaccggccggaaagcgttccaatgcgcatacccggaatggcgaatggggtatcgcaacctgtcttccgagagtatttccccgcgtttcggaccatgatggccacttgaagcgtaaagtgagccgcttggatgtccccgggcaagcgacacaggcagggcgttggtaccaaaccacccccgcacgaacacaccgctcagaaagggcacaatccactgacaacnnnnnnnnnncccccgccatagcccccgcgcgaactacaccacgttaggcgcacgccccaggaggtgcaccgaacccaaccgaccgtgcagcgacaacgccacatagggcccccgggcgcagggggtccgtggcccccagcacggggatgctgcgccacctcc

SEQ ID NO: 451978 - DNA, 938 bp, Homo Sapiens
atgggggtcccccagcagtcccggaaagatcccgggaagaaggctggtcaaatccccagaactctccaggggaaatagggccccgggcgagtccccatctccagcaaagatgcagcccaggctccagatgtcccacagctgtggaataatatttgcagcccaggaggatttcaggagctcggtaccacagggtcaccacctcatgggtgtaagtacgaacagggactccaaaagctctggctagtccaaagtctgctagcttgatggccccctctgtgttaataagcagattctgaggtttaaggtctcggtggaggacccgatgagaatggcagaaagctaggccctggagcagctggaacagatagctcttgatgaggggaagaggaatgccagtgagagcagaggcatccatgaatttcttgagatcttggtgcagaaattcaaaaaccaggtagagtttattttctgtgtgaatgacatccagcagcttgacaatattaggatggttaagctccttaagcagagagatctctcggatggcagtactgggcacaccctcagtctcagtgtccaggcggattttcttaagcgccaccacctctcccgtcaacttgtttctggctttgtacacaactccgtacgtgccctctccgatcttttccaccttttggaagttctccatgaagcgccagcgagtcgggtcagcccggccctggagcgggggcctgggaaccctgcagaaggcggaccctggctctcgggggccgaggagggggaaacagggcccagtaccgtggccccgggtcgggatggaacgcagtatacctctcgctcttgtcaatttggccaacttgaaacaatgttgccgcctcccaccgagttcccgaccgccaccagaggccccgcccctgcctcgtgtgagaaacgccacccag

SEQ ID NO: 451979 - DNA, 795 bp, Homo Sapiens
agcggatgtgtaggagaaacccggcccccagaagattgtgggtgtagtggccacagccttacaggcaggcaggggtggttggtgtcaacaggggggccaacagggtaccagagccaagaccctcggcctcctcccccgccgccttcctgcagatctgcttggctttgaggaagagtggcagtactgcctcactgcataagggatgggatcagagaacagtgctttaaagagctatacactgagagaaccaccatttaccttaccctctggacttgctgtttatcccgctgtactgcaagatggcaaatttgcttcagtttttgtgtataagagagaaaatgaagacaaggttaataaagctgccaagcatttgaagacacttcgtcacccttgcttgctaagatttttatcttgtactgtggaagcggatggcattcatcttgtcactgagcgagtacagcccctggaagtggctttggaaacattgtcttctgcagcaggtctgtgctgggatctatgacatattgctggctcttatcttccttcatgacagaggacacctaacacacaataatgtctgtttatcatctgtgttgtgagtgacagatggacactggaagctaggaggaatggaaactgttttgtaaacgtttctcaggccacacccagagtttctgaggagtattcagtcaataagagacccagcatctatccctcctgaagagatgtctccagaattcacaatctctcccagagtgtcatggacatgccgggatgcctttcatctggaacatg

SEQ ID NO: 451980 - DNA, 697 bp, Homo Sapiens
ggaagtattgtaattccagtctgccccaactttaaaaaaaattcttattaatatgtcagtcattaattgctagtttgggctctcattatttcctgttttttaacaattttgtgataattttattattggcaaattaatacatcaacacttaaatcattgactataataataccttctggctacctctgtatcaaccaaattctgtaggtgcaaacatataccagggaattcttactggcaaaatgatcaatctggagtgtgcatccactgtgaatggagcaaattgccctatacccattgataacctagctttcttagtttgtagatgtaggaaacaaaatagtgacagagagagaagggggtccacagggcatggtatatttatcagcagtggaaaaaaagtgcatagatcatttagtccaagaacttaaaactaaatagagccataatttactttggagagtcattttaatttgtctttggtaccaaggagaagacggaaccaaaaacaaactctccaagtatattcacacattcaacaaaattttgcatgccttctatgtcgtaggcatttttagttcctggggatttggacatggctaagtcagagaaggccattgctcaccatgaacactgtataccagaaggagagtggggaggagacaaaaaacaaataagaccacttcagacaatcaaa

SEQ ID NO: 451981 - DNA, 1155 bp, Homo Sapiens
  misc_feature (47)..(74): n is a, c, g, or t
  misc_feature (440)..(440): n is a, c, g, or t
cacgttttagcagggcgtccggcgtcgacggcgcgaataggcgatannnnnnnnnnnnnnnnnnnnnnnnnnnncggtggtcttgcgggccgggggctcgatatacggcgacgggaggggactgcgacgcgttggggggtctctcattacggcggggaagagcgcgtgggccccgcgaaaggctccacgtgaaggggcgggcggggtcggtgtgatgcgtcgtggtgttaggcggcggggaaatagggggtagcggcggaaacgggtgggccacagcgaaaggtgcgcgtgtataccccctcgatgccagggggcggggccttcagccttccccgggactcccccggtcccaattctgggtccagcttcattttcggggccagggagttgcttttcctcagggtgctcccgcagaatctctggatggttcactcccgttncctgggcaaactcacagagtgtatagctccgtacagagttatggcgctgggccatgcccagagagctaccaccctggctgggcacactggtaaaaccttggcgccgggcaaagtagtatacagtcacctggtcaaagcgtacattcttcctcctgcacgctgtcttctgccgcttcaggatggattgtggtgtgtgaagctggcagtggtaggaggattgaggctgtcgcatctgtcagcactatcactgctggagatctcatcatctgagttggaaactgatgatgcccacatccacatcatcaaacttcctcttgagacccgagcccgtgaatgcatccattggtttcaaaggggtttccttggggagcccaccaagttggccccaaagcccctactcaccaccagctagccaggtacattaggattcggccccgccgcagctgcctcctcccgtgatggtctctgccgcccccagctgccgccgccgccctagcccggtgggaaggagggaggagcgagcgagtcccgggccccgcggcgacggtccggggagctcccagggcggcagggcggggagggagggcggtgggcagcccagccggcaggcagagagggccgggcgtctccggcaactcgggcgcccccggcagcagacgcccagaaccgccccggctccggctaacataggatccggccgcagcgcacacacgct

SEQ ID NO: 451982 - DNA, 582 bp, Homo Sapiens
  misc_feature (89)..(89): n is a, c, g, or t
tacatcattctccactccattccgaactcaatcctcatctgcaatcctgcaggcttccaagccgcccatcggtctcccgcgagctgccnccgcagtccgggccagcgtcctcggtgcccctcgctcccacgcctcttcccgactcggttccttcccaacggcacccgacctccccgccccccgaccgctcccgtccgagcctctcatttctgacccctccatccgcacggctctgggcttgaccactcctccacggccgcccgagggccgatcccgagaaaggacgaggcggcaccctccgccccgcacccctaggcccattaccggccccgccgcagctgcctcctcccgtgatggtctctgccgcccccgctgccgccgccgccctagcccggtgggaaggagggaggagcgagcgagtcccgggccccgcggcgacggccggggagctcccagggcggcagggcggggagggagggcggtgggcagcccagccggcaggcagagagggccgggcgtctccggcaactcgggcgcccccggcagcagacgcccagaaccgccccggctccggctaacaat

SEQ ID NO: 451983 - DNA, 1042 bp, Homo Sapiens
  misc_feature (772)..(838): n is a, c, g, or t
tgagctcggctaccggtcacgattctttgcataaccttctttaccacagagagcccttagctatgctgatcagaccgtaagcgtttatgagaaacttagtttctcctgtggctgaggaggggccagctttttcttcttttgcctgctgttttctctcccaatctatgatatgatatgacctggtttggggctgtctttggtgtttagaatatttgttttctgtcccaggatatttcttataagaacctaacttcaagagtagtgtgcgagtactgatctgaatttaaattaaaattggcttatattaggcagtcacagacaggaaaaataagagctatgcaaagaaagggggatttaaagtagtaggttctatcatctcaattcatttttttccatgaaatcccttcttccaagattcattccctctctcagacatgtgctagcatgggtattatcattgagaaagcacagctacagcaaagccacctgaatagcaatttgtgattggaagcattcttgagggatccctaatctagagtaatttatttgtgtaaggatcccaaatgtgttgcacctttcatgatacatttcttctctgaagagggtacgtggggtgtgtgtatttaaatccatcctatgtattactgattgtcctgtgtagaagagatgggcaattattctgtctctttctccaagtttgagccacatctcagccacattgttaggacagtgtacagaggaacctatctttcctttcttttgttttaacagnnnnnnnnnnnnnnnnnnnnnnnnnnnnnnnnnnnnnnnnnnnnnnnnnnnnnnnnnnnnnnnnnnngagtagctgagactacgaggccatcttattgctttaaatcatacatctcaggcagagaacttttccctcaaacagtctctttagaatcagtccagtcattcctaaaagcatccaaatgcgtagtcattccaccattgaaaaatacgactgtgtcactggaaagaaacagtagcaatttccataaggatgtgccttcaattcagg

SEQ ID NO: 451984 - DNA, 877 bp, Homo Sapiens
tcgtggcgtaccagcgtgtggtattgaggaggcgatgcttgtggccggtggtgttcccgtgtcgtctgcgtcgttgggcgcgcctagtctgggagaggcaggggtggagtcgctgcccgagtctctgtggcttgaggagtcgcgtgccgctggcaggcagggccgtcatccgaggcccagagacagcgtatcgcggccttggcgtccgcgcggcggctctcgccgtaccgggagtccggagcagcagccagatggcttggtcccggggtggcacgaacgttctcgccagcgcgcccgctccttggaggctgtcgccggagggatcagcgagctaccgcccgccgggccggaccgcgcagagacggaacgcgctccgcccgggtaaccaagcatttgtccagcacaacgagagttagtcgccaataaacagtctgaacgccggtactggaaaccaagtgcccaccgcacgcctctaaacgggcggggccgtggggctgtcgggggtgagtatggtgggataagatgctgggcctgggaaggagccaggggtaggggtggatgcagggaggcgccccaccaagcgctccccgagttcagaggcgcttaagttaccaagggattagggctgatctcaggagaggtaaacgaccatccttggaacacggagcccttcttccgtgcccggtatctgcgcgtgccattgggtagtccagcacaaccctccccagctccggatgccctgggatacccggacccaggagagagcgcgtcagcggggcgcagctactttgcactcgccgattctgacacaacagatagttaattggggccttcgaaatcaaggactaaggtgagcagaggagtcccccagccactg

SEQ ID NO: 451985 - DNA, 756 bp, Homo Sapiens
tttatagtaattttctgctttcacactggatggaggcagtggcttcaccacagaatcaggaaggacacatgttggtggagagtcaaagtgaacctagagagtgattgatcctaatccacattgtgtagccagataataggaagattggctggaaaatgcattcataaaaaccatcactctgcaaatagcaatctttgggctcagatatgggatgaatagatggaatatcagaacagtaaaggctgctcctatgatacctcaattgcaaagtgctttccgcaagtgactggattgtactggttgaccatctgcaagtcattttagttaagtacccatcagtttcacatgagatattgatattgacatcaatcacatataattcagcatagcgatgatggcattcatgttcattgcagcagtacactgcatcataggtaaactttcctcgaggtttggtttcattcagattgaaaaaagtaactttgctaacatgatcactcacaacatcatactggctttgaggaattttctcagctaaattcatccaccaaacaatctcttttgagggaacaatcttgttttccttcttatagatgcagtgaaaagaaacattagacccaacacttgtcagaattttaggtggaaagtatatgacatcttgtgtggtaaagacacgaggagtactccagtcactccagattcctgggccatccagtctcttgcccctcacctgaacctcatacgaagacccaggaa

SEQ ID NO: 451986 - DNA, 1807 bp, Homo Sapiens
gtttttttaaccaattatcttaaaaaactccttattttagttcaaaaggttccaattggtggggtttcaattccaccattgttataaaaaatgtattcctttccttcccgcagctttttcaaaaatatatttcttcgaagaaattccataacacccaaccaagtagagatccacagggataataaatgctatgtctaaaatgacttaactgaaacaattccagagtgccatcaacagagatcacgcaaaaggaaacatggcactttcaacgttctcttctggaagaacaggtaggtcttcaaagcttgagagttcaaacaggggccatttaaacaggtagattatcaatggctaatgtattcaatggagtcctataggcaaagatatttagtgattaagtggtctacatacaccttacggctttttcttccaaatatcaaatataagaaagcctatttttaaaagtctcttaggtattttccacagtttcggaattatctgtaggaagctctgacttacttgtatagagtttaatatatgtgtccaccattaaatccaggtcgtgttttatatcaaaatttatgttaagcaaagccaagttacttgacctttggtctgtcaaagtgttcctcaaatatgctttaagacgctttcgtccattttcataccgctcattctcaaccttcatcacaggaagaatacacaggaccttcagcaatgcatacacattaggaaaaaacttgatgtcaggcaggtggagggcttcatagatggtggacggaagctctatatctttccccctgtgtttccatttgattctccaacaatgaagctcagctgacagcgtgtcaggattgggtaagtcacttctatacatgtcagcatggtgttcctccgacgtattgaatttgagttgtcccatgactgagggtaccagagataagcatttaagagctttgaggtgctgttctgagaatatatctttaagttcctgaataatgtgctccactgttgggacacttagggtttctttatagtaactctcagaggttagctgagattccaagttacctggtgagctctgcggaatttcccagggagtttcatttgaatatcaagtttggttgccaaatttgtggcttcctcaaaccaaaatttcatgattaacttcaatatttttccatcatttcgttgagtgaatgccagtactgcagtcaagctaccggccgcaaagaagacatcagaggtttgcccctggaggtttttcccaaaggctcttgtaaaagataggacatttttaagaacaacaatagtaacaatgaaatcaaaatctgacactgcactgcagagtacaaatgctcggccagctatatagttattccatctaatatttgtgtcactatttataccatctaaacataaaacaagtgcttgcaggagttccactaaaatttcaaaagcatcatgcctgcctgtccactgagaatggcagatttccttcagttctttacccctttctttactgttctgaaaaagaacagaaattacgttgtcaagttctaaaagcagttgtggtgatcgatggaaaaaagaacaaacttcctcaattgttcctaatgcaacagatactcccataacaggtactgattttgccaaccacatatttaaggcacaggaagagcagagtgtgtagatagcttggggatatttctctaaaagtctagaagcaacaactttcattttggaagaaaatccactagagacaatgtaagcctggccacgacaatactccatatttaatcccccc

SEQ ID NO: 451987 - DNA, 1210 bp, Homo Sapiens
gccgcccacaatgtttttttctttcttcctgtgttttggttttcccggcaataaattcagtagctttatttttaaatttcaattaggtttcctgggatgaacaaagaaacaagtgtgacattttgtgtggaatctgaaaaccaccttagcatggctttacatcggatgcatcagttttccaaaaagccagagaactgtgttccttgaagcatttggggacttcgatagtgccatctatacactgagcatcctctgtatagctacacttcttttccttatttttgcagaagaaagaaactttatcaccatgtagcattccattcttaaatttttcctgaatctttactctctctccttggtacaccacagtggcttttttcacaggtactttacaagatgctttacaacttggcatggcagaccagtttcccagtttggtacattctatttcttccgggccatccagagaatatccatcatggcagccaaatgtggctttatccttgtaataaagtgttggttttgcaggatagttcacaaatccattgtctggtcttgatgggaatgggcattttactttccctgcattctggtaatttagtccaatttccatgtgtcgtgcaggtaattgtatcatttccaaacatcgcatgttgtggcaaacattcaaaaactgctgtgtcccgatagagggaattgtttccagctgatggcttataaacacgaagtgttgcaaacgtaggtatggatggtggagggcagatgatgggagcacagacaggaagctccgggctccattttccttcctcagtgcacttggcagaatcagcgccattcagataaaacccagtgttacaagaaaaactgatcgtgttgggatattcaaaagtcgtatagcgtacggctccattttctaagattccagcaaaaggacatactctgggtgtacatttcagagtgttgatgggccacagtcctgtgagagggcagataaactttctcatccctcctcgggacacatagcccggcttgcaggaatacgtaatctcttctcctggctcatagaatgtttttaacgggaccactgtggaaaatggtaaatcatctggcttgggacaggtccgtcctgcaatagcaacatggcagagaaaactcgagaacaagatgagcactggagaaatcattgtggatgagtcacactggcactccc

SEQ ID NO: 451988 - DNA, 822 bp, Homo Sapiens
ctagataagatggtattggagatggggtcctaaaagaggtatttattaaaatggagaccattagggtgggccctggtcccatgggactggtgtccttatatgaagaagagatgaagacacagacacagcgagaagctggcgtctgccaggcaggagagaggtctcgggataaaccagccctgtggcaccgagatcttggactccagcctccgggaccgcgagggagtagacgcgctgtccgagccccttgccggcagtactctgctgtggaggccctggccctgagctggagtactttgccgtggaggacctggcctctgaggcggtatccagtttgctgcagaagcttctggctgagtcctggccacctgcctgacagctgacctgcttctggggagccaggcctccctgcttctctgcccacacagcctcaccagggagcaccttctggaaatgcttacacagggacaatgacagttccccaaggctcttgagcctcacagagcccgggcctgtgccctggctgcatttcaccctggggtactgctatcaagcccactttacagaggggaggctgaggtgtgacagccaaggtcccacagccagtgagaccctcagcctggctcagagtcaggagctttggacccgagagggaccctgtgctctgctcctcattggtgggatctgctgacaggaaggggccatgtggcctggtggcctgcacctgccagctctcggccactcccatttgctccttccccagccattcctgagaagccactgtgcgcaggtatggggccaccacagtgagcccaggctgcc

SEQ ID NO: 451989 - DNA, 1270 bp, Homo Sapiens
agcgggggcggtgcatgcgctcgcatcatggcggctgagtgggcttctcgtttctggctttgggctacgctgctgattcctgcggccgcggtctacgaagaccaagtgggcaagtttgattggagacagcaatatgttgggaaggtcaagtttgcctccttggaattttcccctggatccaagaagttggttgtagccacagagaagaatgtgattgcagcattaaattcccgaactggggagatcttgtggcgccatgttgacaagggcacggcagaaggggctgtggatgccatgctgctgcacggacaggatgtgatcactgtgtccaatggaggccgaatcatgcgttcctgggagactaacatcgggggcctgaactgggagataaccctggacagtggcagtttccaggcacttgggctggttggcctgcaggagtctgtaaggtacatcgcagtcctgaagaagactacacttgccctccatcacctctccagtgggcacctcaagtgggtggaacatctcccagaaagtgacagcatccactaccagatggtgtattcttacggctctggggtggtgtgggccctcggagttgttcccttcagccatgtgaacattgtcaagtttaatgtggaagatggagagattgttcagcaggttagggtttcaactccgtggctgcagcacctgtctggagcctgtggtgtggtggatgaaggctgtcctggctgtgtcctgaccggagctcaacgttccctccaaactttggctctggagacggaatgggagttgagacagatcccactgcagtctctcgacttagaatttggaagtggattccaaccccgggtcctgcctacccagcccaacccagtggacgcttcccgggcccagttcttcctgcacttgtccccaagccactatgctctgctgcagtaccattatggaacgctgagtttgcttaaaaacttcccacagactgccctagtgagctttgccaccactggggagaagacggtggctgcagtcatggcctgtcggaatgaagtgcagaaaactagcagttctgaagatgggtcaatggggagcttttcggagaagtctagttcaaaggactctctggcttgcttcaatcagacctacaccattaacctatacctcgtggagacaggtcggcggctgctggacaccacgataacatttagcctggaacagagcggcactcggcctgagcggctgtatatccaggtgttcttgaagaagg

SEQ ID NO: 451990 - DNA, 1376 bp, Homo Sapiens
  misc_feature (867)..(927): n is a, c, g, or t
tgccctcctcgccgccgctcttccgcccccatactttccaggtccgagggctgcgtggcgaattccgcacaacggcccactgcctgatggccagatggcctgtaggaagagctaccagggcttccagacctgtggaacgaagaggatggggaaaaggcagagggcactgagtgtccctttacaaactaacccactgaatattccgcgtgatctagaacagtgtggtagctttcacagcacaggaccgttcatcgggggcctaaacgtttccctcagctctgtcaccaactcacttctctcggcttcgttgtctgtaaattggatgaaaagagctctaatgtctttcaggctcttagaagccatatatttggacaagcccagcaagatgggtgtccttccaggcctcttcccctttcctccatctctggcaacagttcttggggtttggcaattgtttggattttttttctttctgcagttgtgtgtatgtgtgtttgtgtgaagaaaaacagactctgtccaggtagaaatggtgaggagggggaagagaattacatttccagggtcagaaacttggcaacagttttcctagagtgactcagacacaccacagtaacaactctcgctgcaattttattttaatttgagaaataaagatttcctccaagccacatgaggactctggcacccacccacaaagcaagacctgtatttataagccgagggctcagggagcctaactgcgggacccgtcagggcccccgttgaaccccatcccacgtatcccaaacacatccaacttaccaaccgcatgggacacattcagatgatcatactcgaaagaacaattacatagaaccatccatnnnnnnnnnnnnnnnnnnnnnnnnnnnnnnnnnnnnnnnnnnnnnnnnnnnnnnnnnnnnnaaacacctaaaatccctattagcctcgctcacgtcgcacagattatcatgtcccaggtattctccaagccccaggctgggaaaggtatctcatcaaaaatagagtgtgccaaatagtattaatcagtgggtgacactacagagcaagcagcattggtcaaaacactctaatcttcatgcattctgtatctaggttaaatcgcacacaaaagcacacgacacaacaaatagggacccccgggtcgtccgagatcttgcctgttcgggcctacgtcgtgacgaggggtccccggccaaccaatccgaggcacggcctgtacggggccacgacgtacgaagacgctgggtgtgccatggtacaccaatcacttacgcgggcgtgctacgaatcgtcgaggacgatacccaaacatccagacccgcgggtgtggtccagaatcataaccacaa

SEQ ID NO: 451991 - DNA, 674 bp, Homo Sapiens
  misc_feature (296)..(314): n is a, c, g, or t
atactgaaagcttttattataaaatgagccattatgtcctctgccttattttgaagccattcactttttattactgtaacttttgcaatgcctcattttccctccagctatcctctagtccagttaactcagcaagcacaagtttatgatggatcatttaaggagctggaaaattttaatggttagccgtggcagttatgatgtgtaagactctaactgctttaagtaaaaggacaaagttcaaaatataactccatcgtttataagtgctttaattaaaaccaatcttattatgnnnnnnnnnnnnnnnnnnncttgcattgatggatggtagctatttgcaatttcttgttttggctggatgcattgaaggattaaaaatttaatatttaaggtgtgccttaaactgcaaggttccctgattttattctcatctaggaatttttgctgctttaggtagctgacaacatgcagatccatactctatctcttaagattttcttttggaactgattccaggtgaaattttcttagggaagatgtggctagaagctgggtatgcaaagcatgtctatagcaaggaaagccagatgagtgagggtcaaaaatctagttataaaatttaagggagacactaggtttaaataaacatattctccaaccttagtgattaa

SEQ ID NO: 451992 - DNA, 475 bp, Homo Sapiens
  misc_feature (46)..(63): n is a, c, g, or t
  misc_feature (436)..(436): n is a, c, g, or t
  misc_feature (453)..(453): n is a, c, g, or t
ttttttttctttataagtgctttaattaaaaccaatcttattatgnnnnnnnnnnnnnnnnnnccttgcattgatggatggtagctatttgcaatttcttgttttggctggatgcattgaaggattaaaaatttaatatttaaggtgtgccttaaactgcaaggttccctgattttattctcatctaggaatttttgctgctttaggtagctgacaacatgcagatccatactctatctcttaagattttcttttgggaactgattccaggggtgaaattttcttaggggaaggatgtgggctaggaggctggggtatggcaaaggcatgttctataggcaagggaaaggccaggatggaggtgagggggtcaaaaatctaggtttttaaaattttagggggagacactagggggttttaaataaaccatattctnccaacccttagggtggnttaatttttttcccctttttga

SEQ ID NO: 451993 - DNA, 991 bp, Homo Sapiens
  misc_feature (313)..(917): n is a, c, g, or t
agcggggctatctcgggacgccagctcaggtcggctgcgcagagggctggactcagcggcggagctggctgctggcctcagttctgcctctgtccaggtccttgtgacccgcccgctctcctaagggagcgtgtcctggccccctcccgcagcggctcggaaaaaaggcagcaccgcgtcgttgacggcgcgggctctggactcgctgcttggtaaaaaccttcctcttcctccagtgcgggacgcactctctggtatctcttttgacctcccggaggctttcctttgtcggtcgcggcgccactgtactatnnnnnnnnnnnnnnnnnnnnnnnnnnnnnnnnnnnnnnnnnnnnnnnnnnnnnnnnnnnnnnnnnnnnnnnnnnnnnnnnnnnnnnnnnnnnnnnnnnnnnnnnnnnnnnnnnnnnnnnnnnnnnnnnnnnnnnnnnnnnnnnnnnnnnnnnnnnnnnnnnnnnnnnnnnnnnnnnnnnnnnnnnnnnnnnnnnnnnnnnnnnnnnnnnnnnnnnnnnnnnnnnnnnnnnnnnnnnnnnnnnnnnnnnnnnnnnnnnnnnnnnnnnnnnnnnnnnnnnnnnnnnnnnnnnnnnnnnnnnnnnnnnnnnnnnnnnnnnnnnnnnnnnnnnnnnnnnnnnnnnnnnnnnnnnnnnnnnnnnnnnnnnnnnnnnnnnnnnnnnnnnnnnnnnnnnnnnnnnnnnnnnnnnnnnnnnnnnnnnnnnnnnnnnnnnnnnnnnnnnnnnnnnnnnnnnnnnnnnnnnnnnnnnnnnnnnnnnnnnnnnnnnnnnnnnnnnnnnnnnnnnnnnnnnnnnnnnnnnnnnnnnnnnnnnnnnnnnnnnnnnnnnnnnnnnnnnnnnnnnnnnnnnnnnnnnnnnnnnnnnnnnnnnnnnnnnnnnnnnnnnnnnacggaaccctccgctcgtataaaaccggttatacccgcctctattttttgttcacccgacaaagccttcccgtg

SEQ ID NO: 451994 - DNA, 827 bp, Homo Sapiens
  misc_feature (458)..(498): n is a, c, g, or t
ggctcggtgtctatcgtgttgccttgttgtcttcgtccagtcgatctgatgtcctgagaagtttctgttttgtttggttgttagtgactgtgagaaattcaacttttggatcttgtttcaccctcacttgcaacatactcctgtgatggatcatttgcggtccagtttctccccagtacatttcgtttcagtgcaaacccactgtttctcatctccgctattagctccgaggggtgcatcgatggccctgagccatcagtgggaaccgaacttgcattgattccagaaagaccaaacaaaggacattctcgatctgtgttgacatgaccccatttgtgacatttaatgcacctcacatttcgaacctgaataccaaagggctgatctctgatgttcatgtcatctttggcatatttttctcgtggggctcctttctgccattcaaatttgtattcggnnnnnnnnnnnnnnnnnnnnnnnnnnnnnnnnnnnnnnnnngctcctggtggggcttcatacatgaaattaaggccattctttacacgttcatctcccataagcaatctattatcatatgattcttgttctttaagatattgctgcatcaattcttcttgtttcttcttatcatatgatattttctgttctgccatccatacttttttgatattggatttggaggcaggatgaaagtctttcttgcacatgaagttggcgaaggatttccccatcttggaactggaactagggaaagcaggggctagatctgttagcaacgtaaacaaactcagccgcctaaccggaactgcgtttccagcagcaagccc

SEQ ID NO: 451995 - DNA, 1049 bp, Homo Sapiens
  misc_feature (293)..(301): n is a, c, g, or t
tttagttcactgctaaacaaattaaagcacacttttcaggacttgctgggtcaccttttcctgaggaatgatacagaagagtgttttttcataaactggaccataattcttcatgtttaccatggagagttttacagaaatttggctgcactctgagagtgcttactcacagtttatttgctttttttaaaaaggagattattctaaaatataaacttatttgcatatcatggaggagcatccactatcagtatttctgtgctttataaactatattagagggactgggtttnnnnnnnnngatatagggtagaaataagagctatacttacaagagtcaatagatcactgacttctctttaactgtcctgagctacatcacgcccacaaatctgtctttcataccactctatctgccattcattcttgttaaatgaggcattgttttctttatttaagattgagttatgactttaaatgtttatgagctagtttatgcctcggaagacataaggtttcccattccaatttgaatctttctatttctttagcatcatattgctcttcttcttttagactggttgtcatagtttctgcaaagggcaagttcattgtgctaccctcccaattcccccattatggagtaaccagtattattcagtgagctatggggtagtgtttcactccttgcttcaatatggttttttcctattctatttttacttatttctttaatcccaaatgtgatagtagcttcagtatgtttccgtcacccaaaaaccatttggctggcagacattatctagaacacttattattctgcagttatctgagacaccaaacttaccatcctttattttacaatatttttgatcgaccaaataaatgtcctaataatctaactctatttatatctaccttttcccttccagctgaagtcttcaaagtttagcattattttgacacttttaattttcactttaacacggattagaaaacatattggggctagccactaaccttatgacggcaacatcttatctaatccc

SEQ ID NO: 451996 - DNA, 885 bp, Homo Sapiens
  misc_feature (367)..(497): n is a, c, g, or t
  misc_feature (540)..(652): n is a, c, g, or t
  misc_feature (661)..(714): n is a, c, g, or t
atacctcccttagtagactaaagaacaacttggataaaaccagcaagaaatggattatatcgagggaaattgtcatgcccatccaagaccatgataaggaatgaggaagtaacataatggaaggattctgtctcttctcattggggactgactctaagcacctctgattagatgtcattctatgtctgggatgatctcaggactatggtattgtcctcttgtgctatcaattttaactcacaaatggatgtcgatgtcatttattctcttattctacagaccttcattggctacatgggtagtatgggcaagagataggtggtcctgacggaggagtgggaagagccagtgctctggagtgggattnnnnnnnnnnnnnnnnnnnnnnnnnnnnnnnnnnnnnnnnnnnnnnnnnnnnnnnnnnnnnnnnnnnnnnnnnnnnnnnnnnnnnnnnnnnnnnnnnnnnnnnnnnnnnnnnnnnnnnnnnnnnnnnnnnnttaattaaatgagataatatatttaaaaatataattcccctannnnnnnnnnnnnnnnnnnnnnnnnnnnnnnnnnnnnnnnnnnnnnnnnnnnnnnnnnnnnnnnnnnnnnnnnnnnnnnnnnnnnnnnnnnnnnnnnnnnnnnnnnnnnnnnnatctatgcnnnnnnnnnnnnnnnnnnnnnnnnnnnnnnnnnnnnnnnnnnnnnnnnnnnnnnatctgtgcgtatttaatacatatgtgtacataagctgtgcatatataatacatatgtatacactaaggtggacgtatataatacatatgtatacataagcgagggtaaagaaatagatttgtatacatagtcggggtaaagaatacgaatgtagcgaaacgggtaagaata

SEQ ID NO: 451997 - DNA, 829 bp, Homo Sapiens
ctcccttttacacacccctcccccatgttatgtcctatccccaactcctgatgatgctataaataagtaagtaagaagaaaaaggtatggctaaaagcatatcagtttggtgactaaggaagttgttactgtaaatacagacacagggatgcaagtaaggcaagtttcttgcctgatattaacaaaatgatcctcagtccacagtaatctataacttgtggcatgggctttgctcattaatcagtgactgatttggaagggagattgcgggaaaaatgaacagcaaatatccccactaacaccccctttgcgttccctcccctgtagaactgagatccggagcgaccatgccatgctagattgttcttcctggattctgtagtcgcccaaactcaggcttaaggtggacttggctggaaccttccctcttcaaatctgagcctgcaggagtctgcaagtggcaattaggagactattacaagccattagattgatcaatgtaccttaaacaatgcgaatgaattatatgactgatttatatggggaagaaaaagaaagcagtgggggaggacgatttcatctcctttacatccacacgctgttctggagaagaaccgggcccagcctctagttcgtcatagcttagaaccacccgagcgatttatctagaaaacttttcaagcaaagacaaggtcctctcggcttgtccggtgggtggcgaggtgcacgttttctgcccctctctccgcttcactaagaaagagatatttgtttaacggagtgttggagagctgcgtggcctcctaattacgtcaagaacacagaacca

SEQ ID NO: 451998 - DNA, 1015 bp, Homo Sapiens
  misc_feature (373)..(397): n is a, c, g, or t
  misc_feature (549)..(549): n is a, c, g, or t
cctaaacccacattttctcttttaatattttatgattgccatcaaagaagaagaaaaagaaggaacagacaaaggtttgaaaatgataagcctgttaagacaccaaaaactcctgtcccgtgaagctgcttgacatcctgtggagtagcataatcctctcaaaatgaggaagagctgcctgcaaagctttctcaagtccctatttggctacctacttctctacattatgccccatttaaactaggagctgtcttagaaatgacttcaaactgcttcactattgcttacagtttaggaggagtctcagatccagaaggagccaagaattcaagtttggtcctcaaatgactgtaaatagactaaagaacaaggnnnnnnnnnnnnnnnnnnnnnnnnnctaagaataaagctgttcgttgtatcatgagttagtgtttcttccccaaactgaagactgtgttggaagtgcaatttctggtgagtcagtccacaatacaatgccctgtgtggagtggtattcatacaggaaatctgtgtgcacgaggcatngtgtgttgaaagtgtatgtttatagtactgcctgagccatctcatgaccccagcgtccaaaaccgatgctgtagaacagaacatatctgtacacaaatagtgtgtgcaaatagcatttgtacatagaaaagtctcattgtggcagattgagcataaattattcaactgacggtgcaaaaacattacttgcaaagaaaagtctatagtatttttcctacactccaccctgggagatgatatttctatcaaatgaatatcagtgcattttaaatgtaatatgaaaacgatgctggcatttggtgaagaataccacttggttcgcagagggccaactttcactagctttgatttaactgtgtgacacggggtttgcatttgctgtcagcacaggataacagttctggactttcattctccattccagttatggactccagataacactggcctcttagaagcagaagtg

SEQ ID NO: 451999 - DNA, 569 bp, Homo Sapiens
tttgactgtgttcccctcatgctgtttggttttctccgcctcctctttcccgtgctagtcatcttgtattcccctgtcgtctcattctcagtatgtgccattctcgtttccacaattagtagtctgtacactcgtgatcgctgtgctccgctggcggtccccgggtcgtccaggaggcgctgcgggcccccgtgcgcgctgcccgcatccccgcccgcgccggccgagtagagcttgccgttgctgaggcgcatctcgcggaccgcgcgcagtgacagcacgggcccggctcgggccgcccgggcgtcggcgccggcgggaacgcgacgtcttgcggcaagaaacggcgtggcgcagctcctgcagcatctcctggcacaccgacacctcctcggactcagctgacctccgtgtggaccatatgaattccatgaccgccacgaagacagcaatgatgaggccacagatgagcacgataaaaatgccaccaatgttctccatgcccaaacctttagctcgatggtcctcctccttggggcaccggcccccctcccaccacttccgccgct

SEQ ID NO: 452000 - DNA, 737 bp, Homo Sapiens
gccccatccctgcaccctactctgtggcccgcgcttgccccacacttgctgggacctgaaggccagatcggccttgcgggtatggcagaggtggcagccttcagtgcctaccatgagctcgatcctctaggtcacttccaatgaaaagagccctgagagagaatgctaggagtgttctgcatcagagacaagctccatcgagtacccagcgcggtgattctaaagctgggctcctagggcccctggattcagggccaccctggggtgtcagagaggggctgagggggcaggatgtgggcgtcctcccactgcccccagttagagtaggtctgctgcacttactgggtttctgggaatatttcgtgttttgaagggcttcactcacaaagtctgaaactcactccgggcctgcctctgaggcccatggtaagagaagagctgtgtgccccgaagagcccctcaggggtacatggtccccccaaacacagttctcagggtaaaagcaggtagcattcatctggggtagatgaaagatctaaatgtgaaggcaaaaataaccaagcttccataagacagaggagagtatcttcatgatcttggagcaggaaatgcttcttaaactccaaaggcactaaccataagagtcagcattgggaaagcgaactccattacagttaggactttccatcatcaaaagacatcattaagaaagtgaactggctaggcgcggcggctca

SEQ ID NO: 452001 - DNA, 478 bp, Homo Sapiens
  misc_feature (25)..(25): n is a, c, g, or t
gtacaccgggccacacaaataaganggttccaaaaattataaataataatcccccaaacctagaaattgatccaatgttccatccagccagtgaaaatggttaataaactgtgtccatactcatgcagtgaatcagtaaccagcgatgaatgagcccccgttgcatgcaacatggatacatttcgcagacacaaagttgaatgaaagaaaccagagatataagaattatgtcctatgattccattaatataaagttcaaacaccaggcaaaatcgaactagaatggttagggatgcacctcaaggtaataaaagtataaataaatgcaaggaagtgatttcaagtgaactcagcagaagctctggtgggagggaggctgtcgttggaaaggtacgggttgtgtactcaaatcctgcaatattccgtttttcgagtgggaagtatacagatcttcatttatgagtcattaagctattac

SEQ ID NO: 452002 - DNA, 558 bp, Homo Sapiens
  misc_feature (20)..(20): n is a, c, g, or t
  misc_feature (47)..(47): n is a, c, g, or t
  misc_feature (82)..(82): n is a, c, g, or t
gtggcctttttggcaacccnaaccctggctttggaaaaattctgggnaatgtgccaaacccctcttgcaaatgtccgtcccnattgaaccctcaatgaaatgaagttgcgaggcagttaccgtcagcctcctatggataaatattcgaggcccagagagggtaagagacctgcctgcgacccctcagcacttctgtttctctctggggtcttgagggtacaataaagacccctaaggcttcctcttctcgcaggaggtccaggcgcagctgtgggggagggtgcccttggtgtcttctgtccctgcagccagtctgctttctactcggcagctcctctctccctcctgggatgagatgtgcacgcgatgatgggattctcagtcttcctgggttgggggggtggggatccaggccaggagaagagagctgtgccccgctggctcgcagctggacgccctccagatgtggtcaggggagggtcgtcatcctccagatgtgggaagcttcgggagcctgggagctgtactctgcccgcgccggttagcgagctgggtttg

SEQ ID NO: 452003 - DNA, 172 bp, Homo Sapiens
ggttcatgcggacggcgcggatatctgtggggaaggtcagctcacatatggtcgagttccgcttcgtgttgagaatgtgcagcctcttttcgctgcccgcgggcgagcgcacgaccacagctaccaggctggtcgagaagagcatgctcacgaggcatgtcggacccagctc

SEQ ID NO: 452004 - DNA, 918 bp, Homo Sapiens
aaaaaaattaaatcaatcttaaagctctaacttctaaagtaactggcccagtctccagtaatcttggcatctgggcttctatgcagtggtcactaattttcaggaccaaggccacacaaaatgtcaggcctagggagaaaattcatctgtgcccactgctctccaaagtgcgaggcaaggaatggcagtgtaaagttctgttaatagcagtaaaatgaaaatatttgtgtttgtgtataaccttcccctcagctaatttgaaagcctccaaaataaggattcccattccccgagtattctggttaatcaagatttcaatttctgggttgctcaagggactcgttcagtcagacttcagttctcattccgacagggtgtctttcagttcgtttgtttgattgaggttttttggtggcctagatgcatgtttattcagattttggtacacctctgccgtcttctttggctgagtattctgcacccacagaccatgctgccagcctctatcttaatagctgcttctgtggatatggctggggagcgaagtaaaatcctcttttgattagcacccagcatgggctgggtggctaggtggttggaatgacagtggactgcacgcttggtgcatcgtgcatcgtgaccatcctggaagcactgcgggtgtcgccaagccctttcctaagacctgcttcccggccagtgtcagtggccctctctctctctgctatgggcatgactttctcttcgctggctttacttttccactgggtggttccactttggctcctgctgcttctgtgccctgttaaggctcgggtatcttccaccaagtttccggagtgttcacctatgttgcttctaaggtatttcctgacttaccaggcttttggacccacattggcctgttttccctcttcc

SEQ ID NO: 452005 - DNA, 745 bp, Homo Sapiens
cataacccactggtcttcatggcatttctgtgaatatatagtgtaaacctgtgtcaccagaatggtgcagacatgctgattgaattagaatgagttcagccttgattggtagactattggtatcccagagtctgatcattcactacagcttactatatactgttccataatgccagtgagcacttgtacccaggttacctttttcctcccattaatgtggacctgttgtggtctcctgtttctcttaagctatcccagatgagaggtgattatttcttgaatgaatgagattccctttttgtttccctctgccatagaatcctcttatgttccttactggaagcaacatggaggaggcagaaatgatggcaagatataaacatttttcccgccatgtggccaccataagcagcttacaacatgttctacctaggagtcacttactttcaggccagcaggggtgtttttctgtgatgtgtctctttctcttaaaagcacctctgattaagtttagcacaatcaggataatctccattttgataaacacaaagtctacggatgagtaacctaatttcataagtgatttcccaccacagtcacacattttttttacactcaagaggaaagtatgacacagcacgtgtgcaacagactggtaatccagggtattatcttagaatgttgcctacccacctaaataaatgtttaaaatcatcttttgctgggcacggtggctcatgattct

SEQ ID NO: 452006 - DNA, 616 bp, Homo Sapiens
cgaaacaaaacacaaaaacctttctcagtcccagcatatgtggagcagcctcattcttcatagctgtgtgtcattccgttgcgtgatggggtcacagagcacagacctggtgcccttttcctttttaatatgtggaaacccctccatgctttccaaagcctacaagtacagcagccccaagtttagggtgagcagcagtggtcagagctctttactattacttttgggcaaacgcaagccaggctggcaaccaccactgccgccgaggggagatacaagcaggccagttcacactctggacgtttagtttctttctacatctagaaggtggcctctgctatccacttaaagcagcccaaggaactgtcagaaagcgaaagtgatgacatgaaccgcgagtagggcacctccctgtgccgtcgtctgctttccttcctccctcccagcctccctgtgccgtcctctgctttcctccctcccagcacggaaaagccgtggggccgatggactttggcctcacatccacagatggggcctgtgggaattctactgatttactctctggcctagtcaagcaagccacccacggcctggccaaggtcggcctcaccgcctg

SEQ ID NO: 452007 - DNA, 1038 bp, Homo Sapiens
  misc_feature (179)..(188): n is a, c, g, or t
accacagcatacactgacgaatctccacgcagtagacaggtttgtcttcactagctcattgtttatcaagtcatatttagggtcccacaccctcttttcctgtaatttattgcagaatacaccacttgacttggacagctttctgccccctctttcactaaggaaggcaaatgaagtgnnnnnnnnnntgccattttcaatccttcctttctccccttgttaatagtttaagtgaattttgaccttatcttaatggaaaacggttaactccaaacacaaaagactctactggaaagtgtaggtgaaaaaacttgtaactgtattgaaaataaataccattaaactgtgatcagttaaaatttaaaagacaaatcagcacaaaagggcgctaaaagggaaaacactttttattaatcttaaaagttgggggttttttccagttaggtattagataaatttttattttaaaaaatgaaagtctcactaccataaaattatggttcagcatcagattagcattgcactcagtagtctttaaggttttaggaaatatgctttatattgtcttttcaaacacctgtgattgtttcattttccatgtttttgcaagataaatggtgacttataatgggcatatttatttgcctgtatttcatttcccccaatgaatgtcacaaggagatgggcacggagctgcttcgggtgcaatcacgctgctcgttcctgaggtatggggaaactggcctttagtgaagctttccagagtagggcaaatagccactggtaagggaggcaatggaattgtccaggatactattacccaagtaggtaaggtcagcaagctgacgtcccgagaaatgtgtctaccgttctctgactctttataggttcataacgatgatccgttccactggaacctttacactttgttttatgtcacatatctggcttggaatgccgaaatagttacaggtctatgcacaacacactatttatatggcacccggcgaaattccacatattatacagggccgcaca

SEQ ID NO: 452008 - DNA, 757 bp, Homo Sapiens
aggagcaacgtggtcatagctagatagtggccagcttggagattgaccaagcagcccaaagaaacccaagaaaggcaaatagatggtggataaccagaaacaagtcaaatggtccggaagatcaagttggacaggtggactgcaacattttcaaagcaaaagaatcccgttgctgtcgtgatgtgaaaccagcaccagttctgctggccacgcgccttgtcggcatgcagcacagggtcccccagcagagcccacaggcctgcggctgtgctctgaacaccaaagactgcacgcgtggccgccaggtcccagaagaccttctctctggccaccaaagaacggtaagtggcattcagggaagaggacagcttgtggcagaccacaaagacgcccaagtagaagacaaagccagcgaccatcagcgtggagcggatcccccaggatgcatagtccaggtcaaaaatgctctctgatgtgcccccatcgctcgcaggattcattgtccacagctatattccaaaggagtcctggggccaacacgggccgggccctacactgtgtcttgtctaaggaaatgaagtcagtgcagcggtccctgggattgtcacgtatccatcttcaatctgggttcccggccctcacccgggctacctgagcgctcacctaggctgccactcagccgggctccccgcgcttggcgccgccccgcccctgcaggactcccggcagtcactgacctcattgccgccatcccata

SEQ ID NO: 452009 - DNA, 650 bp, Homo Sapiens
  misc_feature (284)..(306): n is a, c, g, or t
cccaatatttcccaatccttggttgctttaaacggatgtagaacccaggaataagttctggtgtcctattgcatagtaggatgagtatagttaacaataacatattatatatttgaaaatagccagaagagtagattttgaattttctccctacagaaaaatcattatgcaaattaccctgatttgatcattacacattgagtacatgtattaaaacatcacattctaccccatatatatgtacagttattatgtgtccataaaaatttaatgtcaatgtctgnnnnnnnnnnnnnnnnnnnnnnnttttaaagctgtaattatctccatctggtaggaatatatacaatctgaaataaaaaatatatttgtaattgttaggacaaaatagattatacgttaagtctgcaaattataaattataaaattctcacagaacctgaaaaattattgatactgttaaatatttaaaaagctgtccttggagagaaagaaacctatcagatttacatcaacaagtgttttatttcagcctattaccatttgctacagactgcatgtttgtgttccctcaaaagttcatacgataggccgggcgcggtggctcatgcctgtaatcccagcactttgggaatacaggcataagcccc

SEQ ID NO: 452010 - DNA, 631 bp, Homo Sapiens
  misc_feature (526)..(526): n is a, c, g, or t
  misc_feature (553)..(553): n is a, c, g, or t
  misc_feature (599)..(599): n is a, c, g, or t
  misc_feature (619)..(619): n is a, c, g, or t
ttcaaatacttgatggatacatgtggctagtgggctaacataagggatagcacagatataaaacatttgctcgtcatataaagttctattggatagtgctggtctgtagcttataggatggtatcttagtctgcttcagctgctaaaacagaataccataaattaggtagcttaaacagtagatattttgaccaggcgtggtggcttatgcctgtgttcccaaagtgctgggattacaggcatgagccaccgcgccgggcctatcatatgaattttgagggaacacaaacatgcagtctgtagcagatggtaataggctgacatattacacttgttgatgtaaatctgataggttcttctctccaaggacagctttttaaatatttaacagtatcaataatttttcaggtctgtgagaattttataatttataatttgcagcttaatgtataactattttgtcctaccaattcaaatatatttttattccagattgtatatatcctccagatggagataattccantttgaaattttattttccatttattcnacattgcattaattttatggcacatatactgtcaatatatgggggngaatggagtttaatccatgncccatgtgaatg

SEQ ID NO: 452011 - DNA, 1301 bp, Homo Sapiens
  misc_feature (135)..(135): n is a, c, g, or t
  misc_feature (822)..(834): n is a, c, g, or t
  misc_feature (836)..(955): n is a, c, g, or t
  misc_feature (1240)..(1240): n is a, c, g, or t
cagacacggcataccaagttcattacaggtgtgtggcaaacttaaagagggaacgggaaaaacgcacgaagatccgagaacaaacaggtggttaagcaaacgccagggagcaaatacatacgagatggaatctanatacaatcgtatacacgtcgcgggtcacggtggcgtgggcgagttggcaaggagaactcgcgtcgatatagaaacgggctgtgcgtcgcggaccgggtgatagagacacggtgcggcggcgatgtgtatataataatacagctggtcgaaatgggcggacccggtaccgaacacacagatgctgcgaactcttaaatagagcgcctacgtcgtggggggggtaaaaattagggtgagatagaggattgggggcgtggcgggcaaaggacacgcgggcaacggcgcggacccagtcgctaacgtcggcgccagagcgcgagccaaacgcgactgggcgcggggataggggaaggccagtggtattgttcgggatgtctgccctcgtgtaattagcgtcaaccgccacagtggcccgaaacacggggggggcgtcgtggggcctggaagaggaacggcgataccactcgtgcaccggcggggaaacaacacctcgttgtcggtttcactggaggctgggctctgcagtggccagcatgtctgggatgggccctgaggggtttctcctcctgggtggaaggaagaggcggagagaccccttcggggctctgggtcaacccagtcggcccccatcgtaaggaatcaccagcaggagaggataggggaatacgtaagggtggactaagctcnnnnnnnnnnnnnannnnnnnnnnnnnnnnnnnnnnnnnnnnnnnnnnnnnnnnnnnnnnnnnnnnnnnnnnnnnnnnnnnnnnnnnnnnnnnnnnnnnnnnnnnnnnnnnnnnnnnnnnnnnnnnnnnnnnnnattgagctccttatgcatacgggagaaacatctgctctcctcaactaggataggtgggagccccagtatgcacacaagcgtggcctagagggagtgggcggggccaaggctacggaggcggggctatgggcaggcatggactgggaagatgctagaggagctagacatggattgtctgaggaccgagaccggccggcctcgagcagtgtggacaatcttggaggtgctgggggcccggatgtaagaagtttaggggcggagtcctctcatctgatgtattccggntccgttccctcggagtagagggcgtgtgttgctcatagtagaattgtacgacgagagctgc

SEQ ID NO: 452012 - DNA, 677 bp, Homo Sapiens
  misc_feature (169)..(169): n is a, c, g, or t
tttttcccagaagtactgtccaatttgtttttttaagcgctgagcattgggaccacttaattgccacaaatgaatttcacatcttctggtgtgtactgtgtgcaaccttaaaatatatattagtaaaaatctttcattttatatcccttgtgttcctatatacctattnataaatacgtcctatcttccttctccccctggacatcataatttacttccgtcttaaggactctaagaggtctgccgtatgtgcttcaccttgacacagagcaccgggcgctgcagcctccatcagtaccgaccctgcagccctggcacccggacagcaccgcataaaccaaagtgtcgtaaggctcaatcgggaggggaaggaggaacctggggggagggggatctgacctaccttttatagataaggattctttaataacaacgatgatgatggaattacagcctgtttgacctttggcttttcaacttttaggtcagatttggctctctgctattctcctaaatgctttccctgtgtttaataaaatgtgataagtatagcagctgagtctgcttaaaaaatcatccaaagcagaccgactctcctacagctcggagctgtatatcttattgccagtaccacaacagttctgcccgaatatatcatcagcggcctactttctccc

SEQ ID NO: 452013 - DNA, 951 bp, Homo Sapiens
cttgatcattggcaatttttccacccccagataacaaaaaacaactccagtccacgtgatcacgagaaacgtggctgtcagattccctgctccacgttccatctccagaccaaagcttgctactgagaatggcaggctcaaaaaactctagtcaccaaactgctggctgtcatcgggggtcaatggggtcgttataatcctcaggggttacaggagggttgagttatttgctgcctacaattgaatttcccaccccaaggtagggatcgctggttcgtgaaagcaaaatgaaatcatggagcagaagtccaggagagttcaatacgatttctaaatcctgacatatcttgttctactaaagccagcaattccgcaacaggagtttctagagcctggagatgaaacgttctcccagaggcgacctgctggtagagacctacaggggactctggagcctaggagcatgcgagtgggccttcccaacaggagtgaggtaaacaggagacaggagcagctcaacagcaggatcaagcctgagtgatggtggccaagctatgctgcccagatgtctggaatcatttaaaataaaggggcatttgctgacaccacagaaaatgccaggacttgcagtcactcttcacattgcccttcagcccccgtgagtatcctgggcccttcccaaaacggcccaggggccagaagcttccttccactttggggcaccctcattctcttgtgttcaggtggttctcaaggtgctcctgtcagtgggcctggcctgcaatcccctataaagcagaaaagcaaattctcgccaggatgagcaggcccgcccttccgacaggaacgactggctcagctctttctcatttgtcccaagagtgagtctggctcctgagtctccccgttttccctacaaaggccaggttccagccaaaccagctccatggc

SEQ ID NO: 452014 - DNA, 947 bp, Homo Sapiens
agcctttccggcgggtggtgtagggtaaatgtttgattcggaacaagtgtctggggacgatgttcccgctgggtgtatacagcttctccccctctttgcccaagagactgcgcagggccaggttgcccgacagaagcttctcatagaactccactccaccacaggcataggctgcagagagggaggccgtgcggcggtccagccaggactcccacgggcatgagtgagagaatcttgggagaaggcgtaggccacaaagcctgcccactgctgccaccaagctgaaggcagcccgtaaattcatggggcctgcatggagccccagggtgtacttggcacccacgcccagtgcccaggtccctgccaggcaagctggggccagcagggcgtgcacggcagtggtactgctttccaggtacaccacttccctggccaaggcgaacttctgggcttcacgggacaaggtcagggaagctctcagccgggcgcctgctgggctccgccagtccactgtatgcccatgtatgaccacgggatggttagtgttgatcactaggtctcccaagaaactggcagggatgcccaccacagccccagcagggagtcttgggaagcctgcactcacaggctggaaggtgaaggtggtgaagggcttgtagcaatggcctgaaggaacacctatgtcctgtagcacctcttggaagaggctctgcagctgtggagggagcggagctggctggccctgaggccagtactggtagaggccattggaccacgggatccgggaagaggtggtacgagactggaactcccgacaggcctgcacagggacccaccaagaggcctgtcctgtgtctctgcacaaatgctgcggtccgccaacaggggacctgccatgagtgtagtcactgcggacaatctccgccgccgctcggaacgcctacccc

SEQ ID NO: 452015 - DNA, 834 bp, Homo Sapiens
tgtaccccagccaacttttgcaagtagcaccctttggactgagtgtagcatccaggcacagcccacctaaggaacagcaggcaatacttccctgtctctcagggctcaaattgagacatcattcacttcacacacccattttataggtggagaaattcaggtctaatcaacacttctttattgaagagaccacccctgtgtatagactttggagtggccctgggggagataagtgtgggtgggagagaagatcccaactaccaaaagtttgctccatgtcacaacctgccctaggcctccaggccaatgtgaacagacaggcacaaggttgagcaggatggatggtaaatgccaagctgggtgcagtgacaggggcagtggcagtcttggtcgacctcccataagaaggagtcacaaggagacattgaagggtgggaggatttgaagaagggaaaaaaagaggttgtcctgaggctggagagctgagcacagtgtggtgttgacagggtctggcctaactggatgtcaacagtgaagtagaggggcatcatgggatgtcaggctggaaagggcagtgcaggtcccacacaacaggcaaaagctctagctttggcctggaggctgcagggagctcctgcagttctaaactgggggtgggtagaactcttgtccccaggtatgtccatggctagtctccccagggcctggatggtgggggcaaacccctctttggctccttcctgcatagccacccttagaattgcctctgcttctcaggtctttgagactggtacagactcatccaaaaagccatcttcttctccttgagcttca

SEQ ID NO: 452016 - DNA, 652 bp, Homo Sapiens
  misc_feature (133)..(403): n is a, c, g, or t
tggggcccccagctgttttacgggccacttatcccgatgccccctcggctttctggagtttccgcaacgccccactccaacaggaaagtccttcttgtctgtccttcttagtattgtttataagagacaaggnnnnnnnnnnnnnnnnnnnnnnnnnnnnnnnnnnnnnnnnnnnnnnnnnnnnnnnnnnnnnnnnnnnnnnnnnnnnnnnnnnnnnnnnnnnnnnnnnnnnnnnnnnnnnnnnnnnnnnnnnnnnnnnnnnnnnnnnnnnnnnnnnnnnnnnnnnnnnnnnnnnnnnnnnnnnnnnnnnnnnnnnnnnnnnnnnnnnnnnnnnnnnnnnnnnnnnnnnnnnnnnnnnnnnnnnnnnnnnnnnnnnnnnnnnnnnnnnnnnnnnnnnnnnnnntgaagaaatccttgcacgtaaccccccagtggttatgcttataagaactagtcagtgaactaagacaattatgctgaaactcaggaaacctattaaaacaggggacagtcatttaacatctcggggtctgaattcctaaagttctacaattggatcaagttaaaacaccaaaaggctatatacttgacctatattatctcaccaacagataaaaattgagttctggccgggtgcggtggcccacacgct

SEQ ID NO: 452017 - DNA, 717 bp, Homo Sapiens
cattattattgaataatcttgtatactgtacatgtgcacttaaatgtaatagcaccaacattcattatattatgaaggggatactttataagaattataaattattttacatgattaaataattttggcagagtaagtccgcaggacttaaataaccagtcagccttagtatctacatctggaccaggaagcctttgtgttacagacacagattccctgtgaagttctccagggtgtaaagagggccccagggaggtgctgactgtatgtgagggctgcttttcagctcaggcgagcttgcaagcaacagggcagtttgggtattgtcacaggcacaggaagggagcagtgggcagccattgattacatcaaaccaggatggtttcttctttttaaagaaacttttgttgagtgtttacccacccccatccacacaaatatgctctctaggaaatgtgaaagtataagcttcagaaaaatgtttttctcatcctttaatttctggttttatgatcaaatgttccgaagacactgcttctttttgctcaaaatagttgacattgtcattgcttctagtttttcagctcctactatgcttactatgtccatgggtgccattgacgtctttggctatttatcatctctgggtggcgcaggccaaggacgcccatggacagcgcgacctcctcccattccacacacgcgcccacgaccccc

SEQ ID NO: 452018 - DNA, 1333 bp, Homo Sapiens
  misc_feature (431)..(442): n is a, c, g, or t
  misc_feature (639)..(739): n is a, c, g, or t
gccagtcaagagctaggtttaatcccagtatcagcatgattaagaagtgtattgaagttctggatagacaaacaatacatagaacgcagccaggcgtcggcagatgaatacagctacgtcgcgtgatgtcgctctcctccagcgtggtgtgagaagatcattgccatcaccatttggtgtgttcctgtgggaaaaagcaggactgtgcctccataatttggtcatttggcagcccctgttttctgctgtttacaacatcaccagtgccacgtcatgagcgtcaaagaaaatgcctagagatatttcaagctcatgtcattatgacatttcttaaaactttattaaaagaatgagtgaagtattgctgaaaagtggaaattcggttgggtaccatgctttttctccccttcacgtttgcagttgatgtgtcnnnnnnnnnnnnaatgtatcttaaaggacataaaatttaaaaacttaaatattgtaatatgacagataacctaataatggtatctacattaaaatgacaaacatgatactgctgcttgtcaacatacaaaaaaacataaagaaatagaatgccttttaatgtggatggacgtatcaggttgaccacaaaatatatggactcaaagcagnnnnnnnnnnnnnnnnnnnnnnnnnnnnnnnnnnnnnnnnnnnnnnnnnnnnnnnnnnnnnnnnnnnnnnnnnnnnnnnnnnnnnnnnnnnnnnnnnnnnnctgagagagaaggaggggcgcggcgacataaaatgcgacaccatagtagacgtgggcccacaccggaactataacgcgacaaacacgagtgtatcatgaacactaatagggtgctaccgaacagagtgaattgaaaattaagccagcaccagtatgtgatgctgagctacaacgacagaggcttgagaggataaagatatgagtgaaagaatagcacaacctcagagcgaaagtaaacacaatcaagagccacatgatatgaggcgagagaacaacaaaaacagagaacagaagatagaaccaaatacgaactgagagataacattaccattgaccgtctagccagggacccacaatataacaagagtatagtgagcttagcattgacgctaatcgaggagcgctacagacaccacagaggcacagtgcaattaacacgaaactgcggataagaaacagaaaagaaatataagcctctgacaccaacggcagcagtatccatcgaggcaagaccacagcaaacgaggagagaggatacaaaacgcaaaagaataacagtctgcagataagatccaatacatgtcacggcattcc

SEQ ID NO: 452019 - DNA, 537 bp, Homo Sapiens
  misc_feature (11)..(11): n is a, c, g, or t
  misc_feature (158)..(158): n is a, c, g, or t
  misc_feature (431)..(432): n is a, c, g, or t
  misc_feature (441)..(441): n is a, c, g, or t
  misc_feature (443)..(443): n is a, c, g, or t
  misc_feature (465)..(465): n is a, c, g, or t
  misc_feature (503)..(503): n is a, c, g, or t
  misc_feature (527)..(527): n is a, c, g, or t
atcacagggtnatcaaaagccattctcagttgcccagcactggtaaagacccccaactccatcctgcactatcagcaagagggagccattgtagacagtggaagaggcttctgggactgctgctgggccatgactccaataataagaggccaaggctnacaggtgggggcaggggagctccaggatggagttagggacagccaggacttctttaatgatttgcgggcggctctgaggccgaaggctcctgctcatggggccactggcacatgcccactctgggttcccccgctccatgtcctgcttccaggagttcaggttgggggcagacaggaggcaacaggttcgggacttagggttccaggcacagtgggggttccgggcaagacacagtccacacagctcttatagacactacagttggctcgggnnaccctccananacctccttagaagcctacaaanactgcaccctgggtgggggccagctgcaggttgcgaanaggtttcagggttcagggaacagntgaatttctt

SEQ ID NO: 452020 - DNA, 786 bp, Homo Sapiens
  misc_feature (390)..(390): n is a, c, g, or t
agcaggcagggaactggccgcggcgagcgggactggccattggagtgctccgctgcggagggaggggaccccgactcgagctgcggtttccgaggccctctccagccaaggaaaagctacacaaaaagcctggatcactcatcgaaccacccctgaagccagtgaaggctctctcgcctcgccctctagcgttcgtctggagtagcgccaccccggcttcctggggacacagggttggcaccatggggcccaccagcgtcccgctggtcaaggcccaccgcagctcggtctctgactacgtcaactatgatatcatcgtccggcattacaactacacgggaaagctgaatatcagcgcggacaaggagaacagcattaaactgacctcgngtggtgttcattctcatctgctgctttatcatcctggagaacatctttgtcttgctgaccatttggaaaaccaagaaattccaccgacccatgtactattttattggcaatctggccctctcagacctgttggcaggagtagcctacacagctaacctgctcttgtctggggccaccacctacaagctcactcccgcccagtggtttctgcgggaagggagtatgttagtggccctgtccagcctccgtgttcagtctcctcgccatcgccattgagcgctatatcacaatgctgacaatgaaactccacaacatggagcaataacttatccgctcttccatgctaatcacgggcctgctggggtcatcatcccctcatcctgggtggcctgccta

SEQ ID NO: 452021 - DNA, 1048 bp, Homo Sapiens
  misc_feature (134)..(134): n is a, c, g, or t
gccaagggggatcttttttcagaagcttggcggcttgtccctttggaaaatgttttttgcgggaacggttcagggcgggcggcttccggagtccctgacccaaggaaggtagatttctgcagttccagaattgnccgatggagagccagaaggcagagtgaaagaccgttggtgcagaagaggatatagtgcttgtggtagagccggcagcacggtgggagcagctggacggcgcactgatgcagttccagccccatgatagggcaggccacccaggatgagggagatgacccagcaggcgctgattagcaggaagaggcggaagttattgctcccgttgtggagtttcattttcagcattgtgatatagcgctcaatggcgatggcgaggagactgaacacggaggctgacagggccacaaacatactcccttcccgcagaaaccactgggcgggagtgagcttgtaggtggtggccccagacaagagcaggttagctgtgtaggctactcctgccaacaggtctgagagggccagattgccaataaaatagtacatgggtcggtggaatttcttggttttccaaatggtcagcaagacaaagatgttctccaggatgataaagcagcagatgagaatgaacaccaccgaggtcagtttaatgctgttctccttgtccgcgctgatattcagctttcccgtgtagttgtaatgccggacgatgatatcatagttgacgtagtcagagaccgagctgcggtgggccttgaccagcgggacgctggtgggccccatggtgccaaccctgtgtccccaggaagccggggtggcgctactccagacgaacgctagagggcgaggcgagagagccttcactggcttcaggggtggttcgatgagtgatccaggctttttgtgtagcttttccttggctggagagggcctcggaaaccgcagcctcgctcaagcagggcgaagttgcgttcggagagcccgggatctgtacggctcgcttcgcatcttgctgctgcccccgaccgactccgct

SEQ ID NO: 452022 - DNA, 1026 bp, Homo Sapiens
tcaagggcatccacgcggggtaaaggaccccgcaggcgtgatttcaagggggctttaaaaattttcggagaatcccggggaagtgtcagttaggtgggggaaaacggtatttggttcaatagagccaaacttcccaatgaggtttaagaaaaaaatatcctttttaacagaacctcaaagccaaggcggacctattttagaccatttttgcagaaagatgctggccgggaaaataaattttaaaacaaaaagactttttagttaaaatttgacaggggattagtcagagggttttctccatttttcagagaatttaggtggagaataggtaacttctagtgttttatctctgaaatctttttttcgtaataattaaagctctattaaagtatcccagacatataggtgtcattcagaactgaatggtaatttattaataaaccaacacatgaatatgttcaaccaaaagaaagaaaagaggatagaataagattaatacagtttccctttttataatgagaaaaaaagcacacatttaaagtttcaggcaatttaacgtcaggttttgggaacactttctggcgtttggtccacgacatccaactacaaattaaaaataaattactatgttgccaatttacattttaaaacaagtccatgaataaaaagaaagcgactttcataaacggggactttccccctcccttcaacataggataaaataatatcttacaggtgagaggcaaggaagaaggcaagagaggggagacgggaggaggggaaagcaggtctctgaaaagcaagaagaaacttacgtgttatctggagtaacactgtcctttaataaaccaagattttgctgtctctgtataaaacagtttacgggtttgtttatttagacaaggcaaagtggaggtggctctgaattaatcggttaagaaaatagagttttcttcgtgctggtgctggtgagctgaatttttggagggatattctgttcgctggtgtggtgaatattctcagggg

SEQ ID NO: 452023 - DNA, 1320 bp, Homo Sapiens
cccaggtggggccccccatagggaatttgaacaggaaccctggaaaacaccccaatgttcttagaactcccagaacccagctgggttctggggggtttggagctgggggtttggaaaagaaggccctggagagcctaacattctggaattctgtagtaatcagggttgaagggtcatgaagactcagctagacatcactgggggagcgggatcggaaggggatcttggaagaggaacagcagcagcagacagcccacagcactttctgcacatcctggttgcggaaggcgtagatgatagggttgatcatggagttgtaggtggcagggagcaaggtaagataggtgtagagaggtggagagtgggcatcacccagcaggcagtagacagtgaagggcaaccagcaggcggcaaaggctccaagcaccacggccagtgtggcaatgcccttgcggggtggcgcacattagtgggaggcaggcagcaggttgccgctgaggggccatctgctgggcatggcggcagaggatgcggcagatttgggcgtagagctgcagcatgatgccaaaccccatgaagaaggccatggcccagaactaccagatggttcttggagagtggataaaccacgccacatgtggtcaggccatccaggcagttccaggccagcacaggcagcagccccaggcccagggcacctccccacactaaggccagcatcacataggtccgtgtcactgttgtctctgaatagtaggtgagggcattgtacagagaaaggtagcggtcgacagtgatggccagtagactgccgatgctggcggtaaaggccattgccagcacgccaaccagcaccaggctcatctccgctgagccgatgcagaagacagcagcaaagtgcaggaccaggcccaggcctgccagcaggtctgccacggccaggctgcccaccagcaggaacatgggggcacggaaggcaggagtgcccacgatgatggccaccactagcgcattctcgcaggacaccagggtgcctgagatgcagagcaccacatcccaggccttaggcgagggcagtggtgcggctggacctgtgggcccctctgctgggcccacgctgcttacattcacgttgcctgagccagctgagagccaggccagagggctgcctgcaccccacatcatggtaccgctcaggaccaggcgcggccgggccgcggggaggctccgctcgggtcctggcggcgcagggcgtgcgtgaccccgagctagcccccgcggccgcggcctcgtgccgaattcgccacccaggcctcgcgc

SEQ ID NO: 452024 - DNA, 789 bp, Homo Sapiens
tatagggtagaaagcatttattaccagagccaaccatcttttctcttttcgtgatcccatgaggtgctgtaagggccagaaggtgtatgaaatgaagttgtatagaaacgaaaatgcctctctttaatcttacatgattttccataacagtgttgccactggagtctgtgaagtagccaaaggttaagagtacagaatcaagtggccatttctgtaatgcagtgtattttggtggctcaaatttggaatcattcttgaacacaatatccccgaaatgtcaacatagatcacatgcaggtagactacaatgcacaatactgatctgaggtctctctggggccagtcttctgtattttatctttctccttttgcaagttaagattcacatgaagagtttttgtaaagctgggataagttaaaaccagtctgaaatggaagagtctgtcaccacaggaagtttggtgcgatctgagttatagacatagtatctgttcaagaacaggtctctttcttttgtagttacttataaatcatcagaaaccaagggtgggttttggcagttgtaccattagaatgcattgttcctattataatagtgatgtcacctgccattgcttcctagaatgtgatactgttcattccagagtttcctggtgttatttgttgtatggtacacaagagggcagaataactgtcacacaggcagggcctgccaacggttctgctacatctccttcgagttctgtccaggttcctttctctggacaatagcatattgtagatgacttg

SEQ ID NO: 452025 - DNA, 862 bp, Homo Sapiens
ttcgccttcgctgactggtctggatggtgtggatcagtgcggttcttgtcctgtgagacgcatgtcaagactgtttgtaatattggagcttattattcatgtgtcaagtcctatgacgtgtacattgtatgcaattaatgtcttgtaggggatacaggattaagtgctcacgccttaatgatgttaagttgtatatgacttcattcgtgaaccagaatggtgttagagcagccagattctgcacgtttatcttgttagatcagatgttggcgaactttggttctgtaaaggacaagatagtaaatattgttaggctttgtgggccatcctagtctttgctcagcgagctagctcaactctgaccagctgaagtacaagagcaggccacagatgatagtacataaatgaatgagcatggctgtgtttcaaaggaaattttagtgttagcggaaacagacagtggggcagatgttggccaacccttgatttagatgaaagtatttggttaaaaaatggaccaatagaattgttagaccatttttgccttgctaccaatacgagacatttatttaaagatttcaatgttgctgtagctaaaacagcattctttaggggcaattgctaattgttgttaaaggataagtaatattaatccttatggatacagaataatcttactgctagtaagaattcaaaaagttatcacagaaatgccaggaaacataatttcattttcaaatgttgcacagcagatttcacatacaatattagcgagggagtgaaattccaatacagtgactcaaaacttctcagtttaggcaactctatgttttattttaacttttacatagagagttttaat

SEQ ID NO: 452026 - DNA, 761 bp, Homo Sapiens
  misc_feature (742)..(742): n is a, c, g, or t
gtgacacggagacaaagagataggggagtggcagagacagacaaaggggggagacagcaagagacagctgagggcaggaaagaaaggagaggcaggtgggaggtaaagaggagggagagacgcccacacccagcatcccagcccagccctggagaggggcagggggccgctggggctgcaggatggagactgggggcactttaggtccctagccctggcctggctcctcccccactccatgtgcaccgcgagaacacgcattccagggctcctaatcttgtatctttctatgtcttgtctgcgggtgggcccagacgccagggaagtttgcctgcctaggtataaacagtgaggggtaaacaaagcctgctggctctggggccagcagctacccccaccccaagccccagatcttcaccctgcccctcccctggtttgaaccctcccatggctccctgtcacccctgggggaaaaccaagttcattcccaggccttcacgtagtttctctgtctctgtctggtgaactcctactcatcctgcaagaccccagctgtgtgccccatttctccatatagtcttcctcaggcaggtcctaggtccctctctctgaccccagccctattcttctggcatgggagggtcagggtcatggctatgctcaccccacagtctgggagatttgggtactgggctgagaccccagcatcactgctcgagggccaggccaagggatccatacntccgggccgacagcctgca

SEQ ID NO: 452027 - DNA, 910 bp, Homo Sapiens
gggcttccaaaccaattaagggctgaaaaaaaagttttccttggaaggggttaagtcttcccttgcttttccaagggttaaaaaggcttttgggttcttaaggtgggccttcccaaaaaaggaattggttccaccccaagggaccttaggttttcttctcctggttttaagttccacctgttttttccttttggtattggccttttatctctttaggctcccaataatgatagccaccctggaaggcctttgagaaattctcccctgttgaacagaaaaaaaagtgcctataattctaggtctcaacattttccttattgtgccacaccagagggaccagataaatatcttcctcttgtaagctcttcgatgagagaaaagcttctctttttccagaagagccagtaattcttcttcaatatcacaatggctctgtggccaaggggatgggataaactgattgacacaagccaaacagggtccactcatgaagatggtggtggtgccaaaccacatagctgagaaaggatagcttcccaaagaatacccgggtaactgttcccagagagaaggggaagagatgatggaaaccaataaaagatgaccacgtctaaaaatgttgttttataaaactcctgatttcaagtagaattagttaattctataattctttactttcctgtgtagacgctacatgttcctcgtgtttgttttatctttggtcctggacctagggagggcatttctggctctgatgccaatactggattatgtgaaaacttttcaactattgactggatgaagctatctaacagagcattaaccaccaccagaaagtgaccatttctccctcccttggcagtggcctcacagcttatcagaatgtagactatcatggtagtgagggatg

SEQ ID NO: 452028 - DNA, 883 bp, Homo Sapiens
tggtccaagaggagtccatggagcatccagcctgagacctggttatacatgaccccatgacaacggccaggattgttttccagtgcacttcgaacaggaggcaacccccccacagctgtgtttgtagactgtttccaggatttgacaaccatgaatcttttgacttttaatttgttctactacaaccatcacagagggaaaaagaagctggaactggtctaggaagtagttgacatgtgatatggagagatggggatcacccaggaactcttgttccaaatcaagcagtgcttggcgataaggctgcaaaacagaatccagccctgtgcagaaggcccgcaggtagattccatgtaacccaccttggccctgttgagatggatggtgatcctgctgttgcacatggcccgtgtactgttcaatgaactcagtgaagcgaatatagtctgtgccgagccggcagagtcgattcaggacactggtctcactggggtggaggaaagggaagtcctgcgatacctgcaggccactccgcttgttccagggtgaaaatggacccagggtacccgctcagagccaagagcagttcgtggatcattcccacggcggacctcgagtccctggttatgtcaccccctcctccagcgcacctccaggcgaccacgaggggagtgcttccccttccacacgcgcaccggcccctgggtcgggcggtttgtgccgaatcaacccaccgagacaatcgctgcggcggagcggacgggaagctgggaaggggtcgcgggggagtcccggaagttcggcagctcaacggggtccaccagctactcccgcccgggctctgcggagactgagtcgcggtcgctgccctcgcgcatgcccc

SEQ ID NO: 452029 - DNA, 1049 bp, Homo Sapiens
  misc_feature (90)..(98): n is a, c, g, or t
ccccaaaatttaaaattttttaaggggggggccaaatttaaccctgttgccccttggtaaaaaattttccttcccctttccagggatttnnnnnnnnntttcgggggaattaactgcctttttattccccagtcacattatgctttccccgggccctagaatcccaaggccccatttggggaacatagctgagaattagaaaatatcaaagaagaagtttccacagtacatattcaaatgtcaagtactctgaatgaatgatattttcataaaagcaggcaaatgtggaaaagattgtttcaactatattgaagtctttcattatgtctataccatgaacaaataaggagtagttaatttgttctttacatatcaacaagaacaaccaaaatacttgcaattgtgatataaggaacaatacaaaatgaaaactgtacatgaaatataattttactgcagaatatatcaaatggattgtaactgaaaaatcacagtactctggggtgatatctagcttaactcaaaaacacattttaaatttactttttattttctaaaacagcactcggctgcaacaacaacaacaaaaaagcaagtaagctgatactaccataacaattacttccaactaaacacatagaacacattaatttccagaaatttaacttttccttatattccccaaatggcacatacaaaatacaaagggcaaatttcttaagacatacagtcttaggaaagaaactaataaacattacgcaaatatgtggaactacaacagcttatgctttcagtcatattaatttttaagttgatatgacacctgtgattagcttaatggcggagtagatatgggaatgagcaatggtatagatgaaaggagactgcccacaggtttataactgctgaagctgatggtacatgaggattcgttgtattattcgatgttaaatttttccataacaggaagtttaaaattattttaaatataaagttgaattactaaagccaatttttatttaatcaaaatatcccgggaattccggacc

SEQ ID NO: 452030 - DNA, 984 bp, Homo Sapiens
ggggagttcagacctagatctttccagttaatcacacaacaaacttagctcatcgcaataaaaagcagctcagagccgactggctcttttaggcactgactccgaacaggattctttcacccaggcatctcctccagagggatccgccagcccgtccagcagcaccatgtgggtgaccaaactcctgccagccctgctgctgcagcatgtcctcctgcatctcctcctgctccccatcgccatcccctatgcagagggacaaaggaaaagaagaaatacaattcatgaattcaagaaatcagcaaagactaccctaatcaaaatagatccagcactgaagataaaaaccaaaaaagtgaatactgcagaccaatgtgctaatagatgtactaggaataaaggacttccattcacttgcaaggcttttgtttttgataaagcaagaaatacaatgccctctggttccccttccatagcatggtcaagtggagtgaaaaaagaatttggccatgaatttgaccctctatgaaaaccaagactaccttagaaactgcatcattgggtaaaggacgcagctacaagggaacagtatctatcacctaagagtggcatcacatgtccagcccttggagttccatgataccacacgaacacagctttttgccttcgagctatcggggtaaagacctacaggaaaactactgtcgaaatcctcgaggggaacgaagggggaccctggtgtttcacaagcaatccagaggtacgctacgaagtctgtgacattcctcagtgttcagaaggtaaataaacctgaatgcccatgtgggccattctattccccctatgtgtagaactgtaactcacattacaggttaacagcaacgaatcaatcataaccaatatgttgtccatgcaaatggcaatacaaataattatttaaccatttttatacaatgtttttaaaactgttggattatcaccaga

SEQ ID NO: 452031 - DNA, 691 bp, Homo Sapiens
  misc_feature (670)..(670): n is a, c, g, or t
gttatttagtaagctctatatatgagaaatttctattcaaattttttgctatatattatcatcagattttatcctatagagctgtttgtgtaccttatgtattcttgtatattaattccttataggcagtttccagatattttctcccattttatgtgttgtctcttcactttgttgattgtttcacttcctgtttagaagctcgttaactgatgtgattccatttgttcatttttgcgttggctgcctgtgcttgtggggtattactcaagacatctttgttcagtttaatttcctggagagtttcaccaatgttttttttagtagtttcatagtttgatgtcttagatttgtctctaatccgttttgatttaattttttttagatggcaagagatagaggtctagttttattcctctgaatatggatattcagtttttgtaacacaatttgttgaagagactcccccattatattgaggcaggaaaatagagtctggaggcagaaaacataagaccacttcacacttcacctttccatagggcatgggccataaataactttgtaactttatttcatcctctccatttacatagggcatactagggggtatttaaactcccaaaaattctgtaatggggcctttgagcccctacgcttgggctttttnccacactgtggagtgtatttt

SEQ ID NO: 452032 - DNA, 690 bp, Homo Sapiens
taatatagtggccatcagacctcgtcatatcccaaagtaaccaccttcctttgcataaattgttttgaaagcatgaataattcttgtatagctgtgttcccctttcacctggaatgctaggcggaccctaaccatgtcaagagggtaagtacagataactgctgtcatacctgccatggatccagccattaatctgtgcacatgacctgaaattcccagcttcgtagtaattaacgttttataatgctcaaatgccataaactggattgcaccatagggaaagattcgaatcatcattgcaccatttcctttatacaatccaaggaatccttctttttgaggaacagcacgcaatgcagaaaatactcctaaatgcttgtaatggtgattgtgagcttgtaataaaacctttactcgatccaatggagcaactgttgttttggcacagcatccagcaatacctccggccagaaaggagcgcagccagtagaagtctctgcgggttgtgggccctcgggcccctgccgcctgcggcattgcgggagggggatcggccgccgccagggctgccgcggccgtcgccgccgccatcaggaccagggtcgcgtcaggagcctaggttgccaacttacagaacaccggacgggaccatagccggaacaggcggtgacaggaggctgaccgccccgc

SEQ ID NO: 452033 - DNA, 668 bp, Homo Sapiens
gaaaaaaatgtatctgaacaaatgactaatgaagacaaatcattggttgtccatctgtgagagaccaaaacaggagtattttttcagttcatagtaatgtacccttagcccatgattttacaaataaagaaaagaacttagagacagataataaaataaaacaaaccagcagttcagatagccattccttaaataataaaatattaaatagagaggtggtcaactatgtacagaaaaggagttcacaaatttctaatgaaaatgattgtaatttacagagttgttctttaagatcatcagagaatagcattaatctttctattgccatggatttgtattctccaccctttgtctatttgtctgttctaatggccagcaaaccaaaggaagttacaacagtgaaagtgaaagcatttattgtaaccttaactggaaatctctcaagttctggtggtatttggagtataactgcaaaggtgtctgatggtactgcatatctaggatgtaggactttgtgggatggcaatacttactagcttgatagggttctcagtaccagaaatgaaacagtcaaaacaaggatcctcttcaataccaaaagttcctggaagggttgcagaaatgtcaaacgagatctaatagatctgtgctgtctaatgactatttca

SEQ ID NO: 452034 - DNA, 1133 bp, Homo Sapiens
  misc_feature (376)..(384): n is a, c, g, or t
  misc_feature (799)..(815): n is a, c, g, or t
  misc_feature (1086)..(1086): n is a, c, g, or t
  misc_feature (1103)..(1103): n is a, c, g, or t
ttaaagaagaaattgagtaatggcaaagagtattgactttcctttgacgaaggtgtatgttgtggaaggatctaaacgctcttcccacagcaatgcttatttttatggcttcttcaagaacaagcgaatagttttgtttgacactctactagaagagtactctgtactaaacaaagacatccaggaggattctggcatggaaccccgcaatgaggaagaagggaacagtgaagaaataaaagctaaagttaaaaataagaaacaaggatgtaaaaatgaggaggtactcgctgtactaggccatgaactggggcactggaagttgggacatacagtcaaaaatatcattattagccagatgaattctttcctgtgnnnnnnnnnatttgctgtattaattggtcgaaaggagctttttgctgcatttggtttttatgatagccaacccactcttattggactattgatcatcttccagtttattttttcaccttacaatgaggttctttctttttgcctaacagtcctaagccgcagatttgagtttcaagctgatgcatttgccaagaaacttgggaaggctaaagacttatattctgctttaatcaaacttaacaaagataacttgggattccctgtttctgactggttgttctcaatgtggcattattctcatcctccactgctagagagacttcaagctttgaaaactatgaagcaacactgagatgtccaggatctgtgactgaagacatttctgattatttctgtcctggcagcatgttccagctcttgatgnnnnnnnnnnnnnnnnnagaagaaaaattaagtacagaaaagcccagatttaaatacatttaatatgtcattttaaaaatgattttaataattcatttcttaaaacactgaatgaattttgaagcttaatgtttttaaaggcatagttttatctttgacatctaatttaccatcaagttgtaaaattatttgggaaaaatacaggaactcgttttatttgtatacttatatggggaatctggcatgtgagggtgtttgaggggcatatgtttggaaagaggggagccntcaccacagggattccnttctgtggagggtggggaacagtgggtccc

SEQ ID NO: 452035 - DNA, 1074 bp, Homo Sapiens
  misc_feature (244)..(259): n is a, c, g, or t
tggtagttggattgtttcttctgctaagaatgtgctcacagaagggatatcaacttagcagctgacttttttagccatggtaatagaaataatgagagaggtaaatgaagtccaaagattccccctgccactaaactgttttacattagcttcactctccaactccctgttgaacccattctctaaagttgctgatatgtagtatatttgatgcagacgagaccaggcatagccatggcagccnnnnnnnnnnnnnnnngcggataatcaatccatgaataatcaaaagttggatgagatttcataggcacagacttgagaaaacttaaaacagctggaagaggtagatgtacatggaaagaaacccacaaagcagtaagattacctagaaattggctatattattttcaggtgggtctaatatgtttagtattcagattacaaatcagaattcaaaacggacacttgtttgcttgtattactcctgactagaagaaaacaagaattaatgtctgttcaaaactgtctgtagtttgaaaacctatttgcatttgtgaataacaataaactgattaagagggcaagatcaacaggcattatacaagcccagaattatcaggattttttaagtgtttttataaccacgaaaacatgctttcctacagtccccaaagaggttctttactagaatacaactgatcaagtataaattactagcatccacagaaactttgctaaaagtgtaaaaacaatctcgtagctttttttcccccttccactgtgtccgatattttgtgaagatgcttccatgaaatgtgtagggtaacaatcactagagaagaaaacaatactgctttccacaactctaacttctaaaggctaacctagcacagggatcttcagcataagtaactgaaatctatacaagagtcatctaactacagccccttactagaaatggaacatagctaggataccctaattaggcgacaaagaccagctttgtcaataaggacatgtttggcccttctaggctagccttaagtttttcatcaagcataagaattttcagtg

SEQ ID NO: 452036 - DNA, 733 bp, Homo Sapiens
cttttccacagggctctagaagaaacataaagccgccacacaatactggaggaggtagaggtggccatctagcatctcaatagcaaagaagtccacctttatcatctgtgggtgcttggcatctttctgatgtcttggcttgccatggctaaataagatgaggccatttggctctgtggtacggaaatcaaatgatatggagccagttttctttgcattccatttaggcaaagagatgaaagactctggggtttcaaaggtgattgggtctaaagttgcaacattctcacatttaaatgccaccactccatggatcttcatcttaggatctccttgcttggcaagtcgagataattccagcctcacatcattatttttatatacaacctctttgagacagcccataaagttgttactgactggtgaccctggaaggtcggctgtgctgggactgcctccaacatagaaaaagtcatcagaccccagcatggtataatcttcttgcgtgtagcccgttgtggtaagaatcccatccactgatattgtcaccatagcgtgtccaatgcctgagtgctgacgcagattcctggtgactttcacatcatgccaggcattatcattaaactttccattcacaggctccactagtgcttcaaaggcgcctgatcccaaacttaatgaccagagagacagctccatttttcagggcaagattgacataatcagccgattt

SEQ ID NO: 452037 - DNA, 777 bp, Homo Sapiens
  misc_feature (333)..(333): n is a, c, g, or t
  misc_feature (408)..(408): n is a, c, g, or t
  misc_feature (413)..(425): n is a, c, g, or t
ggctttgaacacaatctggccttcagatgcagttgagacattacagtaatcatcaaaataatcccatctccaccatgcttattttgcaaaagcagtatagggccttcctctcatccctccatagtggttggaaacagcaatcaaattatagcagcgaggccctgcgcttggattaatcagaaattccaatacagccaagtcattgataggaaaatcaactaagttatctaacttgtttctcaaggatctactgtaagaaaaatcacttgagatgcaacagctactggaggcagggatcatacatccaatttcttagtggtggcttcttgacgnattggataccaggaatctttatcacttagttttcttgtgttgaaaagggtctgaggcagtcttttaatttcgcanaaagnnnnnnnnnnnnncaaggaagtttatatgtctatggtttccatatttttcaaaatcttctggtgggcattttaactcaggatcccaatccaaggccagaatagatctttcatctagcccaagctgcccatcatcgaatcaaacatgtcgggtatcatttctgatgtagctgatatcaggacttgcttaacggttaaactgggagctgatatcaggactgcgtgttaaacgggaatctaaactaccatttttggtggccctggtgagatgctgaccttggcaaatttcatcaacacatcatcccttttccaagtcatggtctcctccagctaaatctttggaatggacggtatttccctgagggag

SEQ ID NO: 452038 - DNA, 941 bp, Homo Sapiens
  misc_feature (382)..(382): n is a, c, g, or t
  misc_feature (399)..(399): n is a, c, g, or t
  misc_feature (407)..(407): n is a, c, g, or t
  misc_feature (420)..(420): n is a, c, g, or t
aggctcggtcggtggggaccattttatcacattagactggggcagaactctgcccgggatttaggaatattttcagaacagattttagatattatttctatccatatattgaaaagaataccattgtcaatcttatttttttaaaagtactcagtgtagaaattgctagcccttaattcttttccagcttttcatattaatgtatgcagagtctcaccaagctcaaagacactggttgggggtggagggtgccacagggaaagctgtagaaggcaagaagactcgagaatcccccagagttatttttctccataaagaccatcagagtgcttaactgagctgttggagactgtgaggcatttaggaaaaaaatagcccactncacatccattccttgtnaagtcttnaagttccattttncattttacgtgggagggaaaaaatttgaaaaagctattagtatttattaatggattttactgaggacatttcttagaaatatgcacttctatactagcaagctctgtctctaaaatgcaagttggcctttgcttgccacatttctgcattaaacttctatattagcttcaaaggcttttaaactcaatgcgaacattctacgggatgttcttagatgcctttaaaaagggggcagatctaattttatttgaaccctcactttccaacttcaccatgacccagtactagagattagggcacttcaaagcattgaaaaaaatctactgatacttactttcttagacaagtagttcttagttaaccaccaatggaactgggttcattctgaatcctggaggagcttcctcgtgccacccagtgtttctgggccctctgtgtgagcagccaggtatgagctgttttagaagcagcgtgttgccttcatctctcccgtttccccaaaagaacaaggataaaggtga

SEQ ID NO: 452039 - DNA, 1806 bp, Homo Sapiens
  misc_feature (974)..(983): n is a, c, g, or t
  misc_feature (1744)..(1744): n is a, c, g, or t
ggcgtcgaggtacaggtgtgaacagtgcagatccggcagcagggtctggcttgcgccaggggcatgcaagtgtcgtcaggctcgagtggttccgaaggtggatcaggcaagaaattcaggtattaatttctggtgcacaagttcgcataagcctagaggacctaaaatcctttacaaactattcaggaggctattctgcagaccatcctgttattaaggtcttctggagagttgtggaagggttcactgatgaagaaaagcgcaaactgctgaagtttgtaacaagctgctctcgaccccctctcttggggtttaaggagttgtatcccgcattttgtattcacaacggaggctccgaccttgagcggctccccacagccagcacctgcatgaacctgctgaagctccccgagttctatgacgagacacttttgcgaagtaaacttctctatgcgattgaatgtgccgctggctttgagctgagctgaagctgatgctggggtcagacccctacagagaaccagtgcttccttcgtcagcagcgcctccccagacccacgaggatactcacactgcacgcctgaggctctcctaagctccttctttcattctgccattcctccctcccttccttttttaaatgatttttattacggtgtggtcacttatttagatggacattgcttttcaaataacttaaaataacacgttatgtgccatgtggctactttagtaatattgccaagaagagcacagtttttacactagtggcatctcagtgaaattaaccaaagatgaagctttggctttgctggtgagatcagagccctcctgagcaggcagcgccactccagggttcagacagggctgcacaggcggcagagatacagggtctgagggctgagacgccatggggccgctgctgcttatgtggttggattgtttacaagcctcattattaaaactgaaggcannnnnnnnnnctgctgcctttcccaaaggtggttaggtttggaacaagagatgatgatggtaatatttctatttgtgctttttaagccatttccccaaagtgggactagcatgcttgttttcagtataccgtggcctgcctcatgatggtttggagatactgtctgtggatgtgaggtggggacttcattcattgtcctatttctatctccactttgtgcctggagagctttcaggggaggtggaggaggagggtctgccaagctactgcaacatctgtcacccactatacccagttacttgggggaggacagacactgtggtgtcattaaagttgtttgaaccaaagtggcggctgcatctttgtcccgatgctagccgtgccggtcttcccatcattcgctcgccctcctttcccctgggctgcgcccacttgtcttcctggatatttgggggtgactcgccatgcttggcaccctctgcttcctggtgctgctctgactcgaagacgggacagtccctggtgcacatccagggaagaggagcgtcggtagttcttgcagtaggcactttatcaggacctgacctgttgctgggtgattttagtctctacaaacagaaagcgtttcaaagcgtcagctgtgggagcagagtgaccctttgctgatgctggggggaggggatctaaatcctcatttatctcttctatgtctagtattttactgtcactggaggctctgtgggctgtcatagttaattgaccataattagncatatactttttaaagtgggaaagctgaatgacactttaagacaatgacttatcaaacaaag

SEQ ID NO: 452040 - DNA, 891 bp, Homo Sapiens
  misc_feature (508)..(572): n is a, c, g, or t
gagaggtctaagaggacaagcctgtctgcaatacccttggctgaaattgctaatgtgcaggcaataccgagttctccacctccaaaccacagtaattttattgactgtttgattctcatgatttgcccagctctttgaatttgtatctgaaacaccttcagtgatttttgcaatataggcgtagcaagtctacctgccgtgcctcatcagatgatgatagagaatacatgggaagttcctcttgaaacttggcaatcatgttcttttaattaatccaacaatgacagatttaggatggctccagttttggagatagggcaaatatagttctgccttgagcatccacatgttttccgactaagattcccatatttgcagttggcttcaagaagcaaatagggggagcgaaagggtgagaatccaaaatccagaaacgaattggtatgttatatgtattacctatagtcccagttactggggaggctgagatgggcagatgacttgagcnnnnnnnnnnnnnnnnnnnnnnnnnnnnnnnnnnnnnnnnnnnnnnnnnnnnnnnnnnnnnnnnnagacacataggtgtccatggaatatttgaaatgtgggaaaaatacatttacattccgtagttcttccacagttaggtccctgaacttgtacttgccaagcagccgtctcaggccctcgcagtcgaactccatctccaggccggtcccgagctaggtcccaggactccagcccccggaccttcttccggacatgctgcaggacggaagcacgctgaggaccaaacttcccggcggtccaaggccccgccccttcccagactggaaattccaccacgcattcaacgccccgggctcagaccgcggctgcgcccggaatccg

SEQ ID NO: 452041 - DNA, 1337 bp, Homo Sapiens
  misc_feature (1198)..(1290): n is a, c, g, or t
gtgagtctcggcttactgcacagtgtgctgaggaaaggatggctgaacttatgatgatttgggaaagaaacaaatctgtgagcccaacagtcaatccaatgtctactgctatgcagaatgaacgcaacctgtcacataataggcgtgtgccaaaaattggtccttacccagattattcttcctcctcatacattgaagactccatccatcatactgacagcatcgtgaagaatatttcctctgagcattctatgtccagcacacctttgactatagggaaaaaaaccgaaattcaattaactatgaacgacagcaagcacaagctcgaatccccagccctgaaacaagtgtcaccagcctctccaccaacacaacaaccacaaacaccacaggactcacgccaagtactggcatgactactatatctgagatgccatacccagatgaaacaaatctgcataccacaaatgttgcacagtcaattgggccaacccctgtctgcttacagctgacagaagaagacttggaaaccaacaagctagacccaaaagaagttgataagaacctcaaggaaagctctgatgagaatctcatggagcactctcttaaacagttcagtggcccagacccactgagcagtactagttctagcttgctttacccactcataaaacttgcagtagaagcaactggacagcaggacttcacacagactgcaaatggccaagcatgtttgattcctgatgttctgcctactcagatctatcctctccccaagcagcagaaccttcccaagagacctactagtttgcctttgaacaccaaaaattcaacaaaagagccccggctaaaatttggcagcaagcacaaatcaaacttgaaacaagtcgaaactggagttgccaagatgaatacaactcaatgcagcagaacctcatgtggtgacagatcacccatgaatggctgtggccgcgtcacaaaccacagtgtcacctcccatgctgccacaaaccaatatgccaatgcggaccgcactactctgcgccaacaacccaacatacgtgaccacactacgccccacgacaccgtcgcacaaaaagccaaatagcccacgacacccggctgcacacctcactccaccacttgaccacacgagccctacgacacaccagccaccgccggccacacacaacgcgcnnnnnnnnnnnnnnnnnnnnnnnnnnnnnnnnnnnnnnnnnnnnnnnnnnnnnnnnnnnnnnnnnnnnnnnnnnnnnnnnnnnnnnnnnnnnnggcccacacacgccactcgcgcaccacgccccacccccccgcacccc

SEQ ID NO: 452042 - DNA, 861 bp, Homo Sapiens
gggggacctgccacccacatgtaataacatcagcaataagggagtcttggccacttgccaacagctgcttcgaagttttccgactcactcagggtagccggatcagccagctgacgggaatgtgtctccgaaacagggcagcgatagcattctcccaccaccagcctttatctcgttcatcaccagaaactgtaaacttgtgtgggctctggccagtccataatcctacatagccaataaaagtagttcctgtgaatgcaatctgcccatgtctttaagaattgcacatccactgtcagcttgcgtaagacattcccaaaaggataatccaattccgaccatggtaaatgtggcctctggagtcttgagccacaatactggtgcagaacctggattggggaagagaaaacccggggctacacgtagagggaaagtttagtgttgaatcggagaatctgctttccctctcgaagcctacgatgtgcagctcagatttacccagagaggcaaagaggaagcgctggaggtttctaggcaagcaggcaccgccctgtttttatcacacggaaaatatgtctcctcccgctagtctgtgtcgggggcccccgcaagccccgcgttactccgcgccggcttggggcactcacacggaggactcgtaggccaggttgaccagaaggcagtccgccaggctgaggttcatgaagtcacacatgccgcggatctcgccggtgaagggcttggggcaggaagcgttccagctccaggaccacttttccgattaacacgtgcacccacttggggactctgtccctagaaacaaaaagcacaagggcgtctgacccgctcagaggtcggcgg

SEQ ID NO: 452043 - DNA, 502 bp, Homo Sapiens
cgagcgctggctgctgccgccctgatgccgctgggccggggaagcactggccgttcgctcccgggccggctccgccaggcgctcgcaggcatgcagcccgggagcaggaggcgctccccgggccgctgctgagcctggccggggcggcggggaccagctgccagcggagcccctcccaccttgcccctggggcagacgatgcggcggccccgacacctcctcgtcgttctctcctagatgactaacgcctagcggcgagcctccgtgtggccgtaatggtgattcatgcagccagcaaggtgatgaggctagtggtaaacaacggacagaagcatggcactgcgacatgcggtaagtggcacgatgacgggcgccaagagaccaggtaaaaagcaccataagaggactttcctgcgcccgggagacaccttcggccacataaacccctctacatacgtggccacgcacgaaccacacgtaaaggagacgacaaacgatcccc

SEQ ID NO: 452044 - DNA, 695 bp, Homo Sapiens
ccagggactgtagctacccgtgacactggatcatgcgctggccctgagtatgtcactccttgccgaaagaggcacgtgatgtctagcgacaggcagctttgagctctctcaaggaaattaggcgcacctgtgtcacctctgcaaggccagtcgcagccaactccgagctggtgaagccgggtggggcccagtgcctgccttcaggctacagcatctcctccttcctgcagatgttgcaccctgatgtgcaaggagctgcccgagcccaacctgctcccggggcagctgtcccacggggcagtgggcgtcagggagggccgcgtgcagtggatctccatggctttcgagtcgaccacgtacaagggcaaatcctccttccagacctactcggactacctgcgctgggagagcttcctccagcagcagctgcaggccttgcccgagggctcagtcctgcgccggggcttccagacctgcgagcactggaagcagatattcatggaaatcgtaggggtgcagagcgccctgtgcggcctggtgctatccctgctcatctgcgtggccgcggtggccgtgttcaccacccacatcctgctcctgctgcccgtgctcctcagcatcttgggtacgtgggcgaggggctggcaggcaccctgctggtagggacgggaacagacagtctccccggtggccca

SEQ ID NO: 452045 - DNA, 1118 bp, Homo Sapiens
tgggccccttgcgcacgggattttagtccccttgctcgaggccccgagccagcacaccaagccagggccggtcccacactcatggcaccagggtcttgaggtaaagaattccggtcccgagagtaaagagctgggccccctgaatgccccgcaggggccgtttcccccggtcagccttttaagaggatggaccacgcccctgttggggcgccaccgatgctggcccgaacttggccaaatgggccgatgaagcaagaagaagacgcgtccacctgtggccgatgaccctggttgagcgcacctggagacgatggcccacggccacggtgccgcacggcctccagcgtacgccactggcgctgcgttcgggccgtcctcggccctgtggggggcagttctctccagccagcaggtagcccctcgaccaggtgtacgcagtaatccacggaggagccaacgaggatggacagggagatggcttccccagcccccatctcccagccgctccagtacatgatggtcaccaccaggcacacgatgcccaagatgctgaggagcacgggcagcaggagcaggatgtgggtggtgaacacggccaccgcggccacgcagatgagcagggatagcaccaggccgcacagggcgctctgcacccctacgatttccatgaatatctgcttccagtgctcgcaggtctggaagccccggcgcaggactgagccctcgggcaaggcctgcagctgctgctggaggaagctctcccagcgcaggtagtccgagtaggtctggaaggaggatttgcccttgtacgtggtcgactcgaaagccatggagatccactgcacgcggccctccctgacgcccactgccccgtgggacagctgccccgggagcaggttgggctcgggcagctccttgcactcagggtgcaacatctgcaggaaggaggagatgctgtagcctgaaggcaggcactgggccccacccggcttcaccagctcggagttggctgcgatggccttgcagaggtgacacaggtgccccatttccttgaagaggtcaaagctgctgtcgtacctcgtgccgaattcgccacccaggcctcgctacattagccc

SEQ ID NO: 452046 - DNA, 899 bp, Homo Sapiens
agcgggggctcccggggctgaggtggagccgcgggacgccggcagggttgtggcgcagcagtctccttcctgcgcgcgcgcctgaagtcggcgtgggcgtttgaggaagctgggatacagcatttaatgaaaaatttatgcttaagaagtaaaaatggcaggcttcctagataattttcgttggccagaatgtgaatgtattgactggagtgagagaagaaatgctgtggcatctgttgtcgcaggtatattgttttttacaggctggtggataatgattgatgcagctgtggtgtatcctaagccagaacagttgaaccatgcctttcacacatgtggtgtattttccacattggctttcttcatgataaatgctgtatccaatgctcaggtgagaggtgatagctatgaaagcggctgtttaggaagaacaggtgctcgagtttggcttttcattggtttcatgttgatgtttgggtcacttattgcttccatgtggattctttttggtgcatatgttacccaaaatactgatgtttatccgggactagctgtgttttttcaaaatgcacttatattttttagcactctgatctacaaatttggaagaaccgaagagctatggacctgagatcacttcttaagtcacattttccttttgttatattctgtttgtagataggttgtatctctcagtacacattggcaaatggagtagattgtacattaaatgtttgtttctttacattttatgttctgagtttgaaatagttttatgaaatttctttaatttttcattgcatagactgttaataatgtatataatacaagactatatgcattgggataatgagtattagggtgttagttcctgagattaggaagttggatttactcca

SEQ ID NO: 452047 - DNA, 1031 bp, Homo Sapiens
  misc_feature (293)..(323): n is a, c, g, or t
cggatcacctcgtccttggtgaagccccgcaggtggcggttcagctcgcgcacggacatggacacgagctggtcgtcggagaagcggtcctccacgctgccgttgccgcccgccgccgtcgccgaggccgtcgcgtgcggcccgggcccggggtggctagtgggcagctgttgcgccgggctagcggcgctggacggcggcggcgacgcttggtgatgatggtgatggtgcgggtgagcgtgcgggcccagctcgtcgtgggccacgccggcgcccgggtacgcgtggtgcgnnnnnnnnnnnnnnnnnnnnnnnnnnnnnnnagcgccgcgaaagctgtcgaagctttgcagcggctgtggcactgggtgcgagccgatgagcgcttccaccgcgtcctcgggcgtcaggttgagcgcctcggggttcatctgctggtagttgctcgccatccagtacagatcctcgaggtgtgtcttctgttcggtcgggctgaagctgggcgacgagggcacggagctacacggaagttctgagcggtgtggaggacaccgagccggctggctgcagggttgtgcagggcctgcccggacgctccgcgcgccccagtggctccttcttcacgtcgaacttgagcaggtcgaagtcgttgacatactccatggccagcgggcctggtgggcagctctggccccatgctcagctccgcggccatcgctgaagcgaggcgcagccgccgctgccgcccgggaaactttgcggccggccggagcgcgccgagccaagcgcgggggggaagagcggagaagagctggggaggcggggagcgagggcgcagcgggccggggccgccggccaagcctttgtctggggacgacggcggcgcgccggagagtcccgaggctgcctgcaccgccccagagctctgggctgtgcctgcgcagggaccgggccgggtagagtcgggcggggtggagaggcaagcggagcgcgcggtggggctgaggggaggcgtggggcgagtgcccgtt

SEQ ID NO: 452048 - DNA, 871 bp, Homo Sapiens
ctggtaggtcagaggaagtgtcatatcatggggagccagggccttcaaggcccgcagcgttaaacccgggtctgtgggagaatttagtggcgcgcgagtgtagagggaatgccttgtggaaaccctctcggcacttcattttcggcaagtatctcctcgtcaagtacaagtagcctttcgcggttcttggtggcactcatggttttggcccaagcaatggctgcaccacttgtgtccaagggacaagtgtcctgggctctccgtggggagcttggcccaggagccgctggggaggtgaggagatcttccttgcagagcccagtgccagccctcactgaccacggacaccttcagctctctgctgcgggggcggccaccccttcccctcccaggattcacagctgcgaagggaagagggtggaaggagaaagtccagacacgggatcccccgtttatcttcactcccgagtcctcgcccccttaccgcctgggcatctccaacaagcagcgaagtctcccccgggcggagctctgggtacaacgtggcgcaggaagggcactgggcagctcaggggtcatgctgcgcagggcggggatcgcccctcgctgctgggagctgccaggccgtccccgccccgcgccgctccgggacccccgagttggaatcgcggggccccggcggcgccgtcctgacgcaagagcgcctctgcctggcagggcccaggccggcactcgagggggcgcacgcagagcctgccctaggctgagcactcgagctggaaaacgccgccggcgtccgcgagcttggacaggggccctggacggcgggcgcaggagccaggcgaggcaggctccggctgcagacgccggg

SEQ ID NO: 452049 - DNA, 714 bp, Homo Sapiens
  misc_feature (597)..(597): n is a, c, g, or t
gtgatctgcttgcttcttttaccacaggtgatttttaagtaacttgggtttaatttacagagatgaaacatgacagtctgagtaaaatacccagtgatgtagaagtgtgcctgtttattatgtagatacagacatccagcaaaaacaggagaatcacatgctttaaagaacactttctcttaggtttccttgagatatgttcctccagtgcaagcaagataatggtttacagaatttgctttacacaaaacttgtcaagaactcatctgttaaaagcaaggaataactagtttatattttccaataatgttcaaggttttctccttaatatgtttgaaattattgattttggcatttttctaagcaatttatgtaattttatttgaagaaaatgttttgtataatgtttttcccagcctaaacagggagagtcctaacagtgttgtgcttgtatgattctgagactttatttgcgtaagtgatactactatactttatttttgacccatgcctttttaagctgtttcatattgaaaggtggaatattgtaaaaattttgtcaaagatgtactgtagtgctatttggaagtacctgtnagcaaaacagttggccctctgtatccatgtactctgcatctgtggattaaaccaatttgcagatcaaaaatattagaacaaaataaacaattataccaaataaaaatacagttataa

SEQ ID NO: 452050 - DNA, 1142 bp, Homo Sapiens
gatgttctttgtccggttcatttcaaaagagcgaatagaattcaaccttttggataaacataagcctgatttctcactcaattttgaagatatttctccaacgagaattgctatcgtgttcccctctgaactttcaaaatctaagtttttgggcatagcttgtggaacaacagtcccaaaatcctgtctttggggaagaaaaacattctgatttcttttcattttcacttctacttatatcatcttctgaagaatctttattagaaacatttgaagaatcacaaaatcatcaaacaccaattttctgagatggtttgagtgctttttggaacctcctgcttggaccacagagctctctctattttctggagtactgagctgaaggcaactaagggacaaaggagtacaaggagctggaagatcataaagttcttcatctttgtagggtacacagtcacttggtttattcccccattctctttccaaataagtatccatacttgtatctgtcacatctaacattacttctacctgttcttgatataggtctttgttcttagaacagttaaggtctgctttgctggtactttcctgccttgcagaactggtgtcacacagtctgctgctggaaggcttcgctaggtgagaagaactggaggtggatgagccaggctgctttctggcactatcgccttgattctttgacaccacatcctcctcactgcctttgctccctttgccatctgcagaaagtgctgtctggcaaatggaattcatagcttctttctcttcacttgaattttttagctgtgcaacttgagattctagttcctctatatacttatcacttcgttccagggctttcttgaggcgattggtttcacgctcatactgttctactttggactgaagagcagcaactgcaaaccttcccaaacctacaaagaatggaaagatagttaatcttataactcaagcttttttcttttcaaggtttgagagtgcaaactgtcccaggctattctaatttcacctaacagtgacatttcagaccactcaatgagtagggcaaatgccagatgtatattttcaaaaaatggtttccccacttacataataataaacatatgataataatagac

SEQ ID NO: 452051 - DNA, 1901 bp, Homo Sapiens
  misc_feature (41)..(41): n is a, c, g, or t
  misc_feature (49)..(49): n is a, c, g, or t
  misc_feature (57)..(57): n is a, c, g, or t
  misc_feature (301)..(301): n is a, c, g, or t
  misc_feature (310)..(310): n is a, c, g, or t
  misc_feature (321)..(321): n is a, c, g, or t
  misc_feature (323)..(323): n is a, c, g, or t
cttttttttaaaccattaaacccaattcttttctcttaaanttgtaagnaaaatggnaaaatctgtttttaaatcatgcaaaggatttaaataagcatttttctatctgctctaagaaactgtttcttatcttacaattttaaatattcataacactcaaactacttttttgtggccatttatgtttttgacactagattggtatggtattatttagccaagatgtattataatgctaaattatgtataaaatatgatttctggaatttgtccatcttctattgaagtgccattattattnccagggganctaaaaaagananaaacagtccttgcttgcagcaggtgtcctcatgcactactttccttcaatccttttgtgcccatagtgggaatctggacctttgagtgttgcacatgctgtgtagcacacattgggcaggatctctatgggttccttgaacatgaccctgaatgtgttagctgtcccatcacaactaaagccggtatcattctgtcccagggtttgctttttctcatattcaatgatctgtatattcacttgataatctgtagggccatgaatagatccatacaagccaaatccaactatagagatccttctattaactgtgaatctgaattcgatcactcgtcccactgtaaccccagcggctttctacttgctggaatctattgatgcagcattcctttccccctgagacagcatcttgttcggtcaatgtattcaactcgggtttaggttgacagtaaaatgaagaaagaggtttaccacttcacgatctgacaaaattccagattgagctggacctgctgcaaattcctcaattgtcatcagtgggaaccggattaaggaaagtgcttttcctagaactttttgtttattcccaaaagtcacaggtaattgttgtctctgacattctgcttctgcccagcgtacaacagctccaaaaagtcgactttctcgaatactgagtgtgtctctctctaaaactgcacagagtgtatctatatcaatatcagtaaacccttctgcacttattgcatccattgtgcttttgtctattgtatctagacaaagactagcaagctgaggttcatcaaataatcgagcctgagtaagtaacataaaggcattatctgccctaagatgtttggtgagaaattctacacagtgtgcttccaaggctgggactgcgtatttcttggcagtataaagagtggtcataactgtttctggaccaatttgaacttcatctgaatatagaaatctcagcagcgccaggaaggctgcgggctccacgtccggcagctcgatctcggccgacgtggtggccatgccgccgttgaacatggcgtcaaagacggcgctgccggccgccagcacgaagcggtgggcggggatgcgctgcgggcccccagcggcggcggcgccgcgacccttgcccagtacgaagcgcacatcgctcagcagctccgagttgaagaggaaggcgaagcgctccttcagcgacgccttggtcgcctgccagttgtagagaggttcccgctgcagggggagcaggggccccagagaggacggtgagggcggcggcggcggccccgcggggcccggctccgcctcagcccccgacgcctgctccccagctgcggcaggcccgagtgaggccatcctccagctgcgcggttgcccacgttatggacaaaactccgccgccatcgcccaggccgcctccggaggccggcgctgcctccctgccttccgggaaaggcgcttccgggggcctcgcgcctccgcaggcccctccctgaccgcgcgcgcccccgcacgcccgggttgccgctgtgcgcggccgcgggaggtgtaacaggactccgct

SEQ ID NO: 452052 - DNA, 790 bp, Homo Sapiens
  misc_feature (21)..(21): n is a, c, g, or t
aacgggaagccacgacgcatnaatgaaagccacaggaaagaagcccgtaaaacgcaggcaggcaggggcctgggggtggttttgaagcccagacacgtgttttccatgtggtcctctcatgcctgaaaggccttttgcccttacgtttacacagttattcctgcttttgaagaacttaaagtacctgaaaatgtcttcactttacgaaagaactctgccaagggttctctaaatatctagctttgtggatagttttaaatataattcattttacagactgtgatataaacatttgcacaaagcgaagccatatttctgttaatttttgtaatagagtagaaacatacaaacactgcatctaccagacagacagtctcagcccatttgctgacatctagattaattatgcattaaaagaaaagaaaaacgaggtgagacagccaaaaggactgttggacaccaaggaggttgcaagatctttctcttcaaaaagagaactgaaactattgttaagcccagaaagatgaagatgtacttagaagccctccaccttgagggtcttccttcaaatgtgacttcagggatgaagtgtaaggctcttcctctgctccaacctggcacctcactgcaggcatcttacaggatttgccagaggatcatggagcccgtcctttacaggcccggggctcagagctgtccccggacagttgtgcaggaaagcagacagcagtgcccaggctccagctagacatgagcccggcatatcagaaacagagatcaacgttcccta

SEQ ID NO: 452053 - DNA, 1273 bp, Homo Sapiens
  misc_feature (154)..(154): n is a, c, g, or t
  misc_feature (193)..(193): n is a, c, g, or t
  misc_feature (203)..(203): n is a, c, g, or t
  misc_feature (498)..(498): n is a, c, g, or t
  misc_feature (595)..(605): n is a, c, g, or t
tggtgggccctgcttagactggctcaggaatactggaaccctggttatccacatcccattctaacaagttttccactgaatgttttcctgacatttataaatgaggggtgcctgcccatgttaatgctgattaaaaaacccaaagtacccaaantctatctccttcattgctggtgtatggaccccagaccanccatcacaanaatatttccttggcctaaaagatcactggattaacaaggagttttaacagaggaacaggagtgctgtactgagaggctttcgaagggaaacacaggtaccgccatttccgatgagtttctgaaaatgctagaaaaatgacagactgccaaagacagctgtcatgctgttctccatgataacggcactaatattaaaaaaaataagaacttttaatgattgtaatgtatacagtttgggctgtttggcaaacccctgcagatgtgcattaatgatgctttatttaaaaacaaaaanccaaaaacagtccatgttgaaattgatcagtgtaagttaaatggtggtttttaggctggacccatgatttaagctgtacccatccagctcaaaccgnnnnnnnnnnntcatttgactgttaaagcaattgttcagagtcttgaagaagaaaccaggcaggaaaatgccaataatgatgattggcgaaatcaagatcgaagacagagaaactgtttatcaagccggccgacaaagcaatcttgcatggagactactagtctggagtttctgggatgaaattgtacaggaatctcagtccacagtttcctcaatcgcttcggagacggagctgtcactgaatctgacagagccctgcactgccccgttccgccgaccctttctgtaatccagtcttcactgtagcctgaggaactgtttcaacctgtttggacagtgaaatacgagcattgacaaagaatgtgtgtttcccggttagattattaacagagggaaaagatactttcatcaatctaagcaatgatgagtgattaatgtatctgaaatctgaactcagtcccatcttttgggtaaagttctctgtctcaagatcagggagggtttaaatcctagctgcctgtgctgaatatcaagtgacaacacacagccacatgctctctagcaaagacttttcccaccattcccttggtatatgaagagcacaagaatactgtcctccctgtctggaaggcaggagaggggttgtttctgcaaccggccccaatgtgcgtataacccc

SEQ ID NO: 452054 - DNA, 506 bp, Homo Sapiens
  misc_feature (278)..(278): n is a, c, g, or t
aagtgtttgctcttcagaatgctacaggggatgggaaatttatcgatcaatttgtttattcaacaaagggaattggtaacaaaacagaaataagtgtcagggggcaagacaggcttataatttctacaccaaaccagagaaatgaaaagccaacgcagagtgtatcatctcctgaagcaacatcctggttcctacaggcctcagtagaaaagaagcaacagagaagatcaattagaactcgttctgaatcagagaaatccacttgaggttgtgccaanagaagaagatcaaaaaaggagcaggttgaaacagttcctcaggctacagtgaaagactggattaccagaaagggtcggcggaccgggggagtgcagggctctgtcagattcagtgaccagctccgtctccgcagcgattgaggaaactgtggactgagattcctgtacaatttcatcccagaaactccagacttgtagtctccatgcaagatttctctgtgcggcggc

SEQ ID NO: 452055 - DNA, 969 bp, Homo Sapiens
  misc_feature (173)..(173): n is a, c, g, or t
gtggtgcccgaaattggaacggggagggcacacatggcatgtcccccaacaacgcgggaccaacaaggcacttcaagggtttcgcgaatttgaacattgcgcctatggaaattttgggggaaactttccttgtgaaaagaacaaacaaagagggtggggtaataaggatggcncccttacggcgaaacaagcccttaggtgaaaaatgggaattctgaagtctggaatagaagtttgctccagttgagagcggggaaagatggacatgattaaggagggggaagcagcagcggctccgctacggcgggcgctaggaccgcgccgacgccgccggacccgcagcgcccgcgcggtctccttcagggcaattagagcttcgccggccgagccaggcagggcgctgtcagccttaatgtgagcgctgactggcagcgctcagcccgcgctcagcccgcaggaagcacgaccagtgaacccatattgctttgacagttgcactcatctagaaataatgcaaaacgctatttagatgtatatatcacgaccctgggctctgggaagaaaacaatctaatgaggggctgggagtccgctcgacacaagcagtgaggaggcgtgcgggtgggtgcgccagggcggcctcccccgtcgcgctcgctcctcttacagctcttcgtgcttgatgcggtgggagcggcgcgtcacagccggcttcagggagctggtcttggcctctgaggcttcggtaaagaatttgaaaatagacggaaagctcttccaggaagttagctcgtgacggtcggtgccccctggctcagaggaactcagacttcgctatccgcggcgtctaggcgtctccggcctcagtccccatccctctcccaacgcggggacgcggcccggatctgtcccggggtcgtccgatgcgcggctggccgcccgaggcctccgcctctccgggccatccgct

SEQ ID NO: 452056 - DNA, 658 bp, Homo Sapiens
gtcattacctcaaagatgtatggcaaaagttcttacatattcccaaccaagttcctgttgttttgtccttctttttaatttttattttatctatgttaggtatataaatagtttaagaggctaccttactcaaggtttatgataaaaacagcgataagaagtatgagttatttgaaggttaaaatgcatctgaataatgctgtatttatgtggataatgaagtaagagagttgagtgatgaatctgcaaaagcccctaagcttatttttatccatttattcaaatcatttgtcttcaaagtctgagtttttccttgaaatgcctttatggttaactgaatgcacttattgaatgtatgttgttcgaaaatctttcatggaacatcttctcattaatactcagatttacaactgagctttgtaaacatgtaggataaacctggaggcacatgtcaggcaggcagctgtgtctaacattggggtgcttattaagattaataccacaacctagattttctccagatttggacacgtacacatcctcctaggcctacccaaccatcatttagtcatctgagcgaaacctgtatctcaaaggaatgtacagctataggcaatccatcgacgataaagctaatcgtgttccccacagctttaat

SEQ ID NO: 452057 - DNA, 1500 bp, Homo Sapiens
  misc_feature (436)..(436): n is a, c, g, or t
cttgcttttccaaccatccgcgcaattagaatcctcacagaggctaacgcggggagcgggcggaatacaaattggcggggggctatctacacgttggggcatggcgcgtgtatagcgcgggacggttggggagggcgcagtttaagggggcctcaaaaggctctaggcctaaaaggaattcttctggcttacagtgtgaaatcttgcgggaatccaggactacccccatgccagggcaacaaaccccaagtttgaaaaagaaaatttaaagtggccttaggaagagttgcaaagtccagtggaccaaatgtgggtacctccttaagggagggcttctgagccccgatgaaaaaggcttatataaaagggtcatgaccagctctgccagtgatgaacatgtgtcaagtcgttctgctgtccccaactcccgggaccncaggtggctctgaattagcttcagctaataaagaacaaagacggggggcagaaaggctccccaaacttgtgcaaatccagtgagaaaacactttgcacatcatctgtctcagctgttctgcaggtgaggcacactcagaactgcaccaccccaggcaagcagtttgccaggactcgggggcctccagggtttccatctcggggcctccgcctggcaccagcgagtgggcctgggctcagggggagccctgtccttcttctccttttgcaaagacttgctcttcccacagcgcctggtccacctgatcgtcggtgagcacgacaggcttgtacttctcatcgaagagccgctcgttggtctcggaatgcagctgctggggcccgaccacccgcaaatgcgccggcaggtgcaggaattcgtcgtcgttgatgtcgcagtcgcgcatccaggcccccagcacccaccagcgacccacgaagcccacgtccaggacccggccggggaagtcggtccagcggggctgcaggtagcggcaacgcgcctggtagaggctggcctgggcgtcgaagggcgcctcgtacaccagcgagcagagccccaggttgacgtagcgcaggcggccacggccccgcagccagagcagcctctgcacgaaggcttcggactcgcggttgcgggtggccggcgccagcagcaggagggtccccgacgcctccagcagcgcctcctcgaaggcaccctcgctgggcgccagcgtgaagcaggccgccgcgccgcccagcagacccacatacacagcggcgcgccccggccgggccctagcctccgccgaagcgtccctgcaggcctcggcgtagtcccggagcagcgcgcgggcccaggaccccagccgcgcccacactcccggcttcgccactaccgcgtcgcccgcctctgcgcggcgccgggaccaaaatctcctcagagccgccgcggccatcctcttccgtcttgggggtccttgctccgggaagaaactcctgatacccgacgttaagagcccgggagtctcttctgcgcaagcg

SEQ ID NO: 452058 - DNA, 849 bp, Homo Sapiens
cgggtgtccacagggctatgttaggataaaaaccagactctgtggcaccacttgacagatcttcctcatgactggataaggcctccggtaacgatattttggcatagcaacagccagcaccaagataaccaggccacaggaaggcagctgctggcaagaagaaaagccaggacccggtcataccaggcctggtcagagctgtagaagaaatgagccaaagcactgccatattggtaaacgctcacgccaacatagtccacaaagtagaaggtgtagtgggagagctctgacttggactgcagcaggtgggccagaaggctgcaggtgaggtaagtgattgacgacaggatgaagaggagcagaggcagggagtgggtagacgcccatggcaaggcctcagcctcggcaaaggcccagaatcgcaagaggacggccagggctgccagtaaatgggtccagacgttgaccacctcgttgtgtttctgaaagaggctgaagaagtagtagcgccactcgtgccccgtggggcggtagccggtgcggatgtaaggctcccggaagagctggggcacatccgtttctgggacagtgcaaggcatcttgggaagcccatcctccaggatcttgggcaggcggcgcagctgctgcccgctgaccgacagggtgctcaggcgctccaagatggcggtcgtcatggcagcggcccgcatgcactccgtgccgcgccctcaggacagggtatgcaaccggcaggggcggcggccgagcccgtgcgcgtggcccagcccggcccagcccgcgctcccgcctcggggtcccggccacgagcttcccgcgggtggctccgct

SEQ ID NO: 452059 - DNA, 1300 bp, Homo Sapiens
  misc_feature (84)..(96): n is a, c, g, or t
  misc_feature (824)..(824): n is a, c, g, or t
  misc_feature (957)..(966): n is a, c, g, or t
  misc_feature (1086)..(1120): n is a, c, g, or t
atgtgaggagtgatgctttgagttatttgcatcgacttcatctttagggaggaacctcctctgaagcacatcacttgcctatcnnnnnnnnnnnnngtacagtataaggagcacatgacaactctcttcacacaatggtaagctgttgtgtttacatcaatttcaaatcacccataatcaaaaaccacattctcccattaacttgtgaagataataaatttgctttgataacttctttcaagaaaagataatttttctcccaaagcacaccaataaatatttatattaaaaaccacagttaatttaatcaggcacagaagaaaaaatcatttttacattagtctttgtagataagaaaaatttgatttacagtgcatattccaatcccaatctgggtttgtcctcaaattttgagaaatagcataaagaactattttgccaactgtgcgtcacaattctatgattgacgtgagttgcaggcacttggcgttccaacagaggcacggcaactgcagccatcacagccacagagcttgcccacaacatgggaagcgtccccaatctcccccacacacgtggatttcccagagtttcaaacacagtgtttacattcctgcgcagcaagaccatgttagccaataacagacctacactgactttccgctggaaagtatttgcagaagtcatgaaatggtgtatgtttttactatcccagcaagcacttctctagggaaaaggacagttacgactatttacctgaggaaacttagaatttgtcaacttagctgttatacctaaaaattatgaacttgtcctctgtattnatggaacaaagaaaaccctcccacaacttcacccatttccaaggttcctaatacaagctggaatttttgtttgaacaccaattgaaacatgtccccctttcaagacttgataagtaaacttcttgttctattnnnnnnnnnngtagatgattgacagaaggctagatggatgtagactgagagaagacagacatagaggacaggtgaatagatacggatgattgataggtataagtgattgacacagattatagatttagcnnnnnnnnnnnnnnnnnnnnnnnnnnnnnnnnnnnaacagatgacagatcaagtaaacctgttctattaaaaaacatgcagacactgataacactgcagtgtgttctgccatcaggcacactcagttattccacaggaacaaacggaaggaacatccacatgcatgaaacagcacaggagtgcatgccgagcaactcaggaaagggtttttgtct

SEQ ID NO: 452060 - DNA, 784 bp, Homo Sapiens
  misc_feature (120)..(154): n is a, c, g, or t
  misc_feature (320)..(320): n is a, c, g, or t
  misc_feature (333)..(333): n is a, c, g, or t
  misc_feature (402)..(402): n is a, c, g, or t
gtagatgattgacagaaggctagatggatgcagactgagagaagacagacatagaggacaggtgaatagatacggatgattgataggtataagtgattgacacagattatagatttagcnnnnnnnnnnnnnnnnnnnnnnnnnnnnnnnnnnnaacagatgacagatcaagtaaacctgttctattaaaaaacatgcagacactgataacactgcagtgtgttctgccatcaggcacactcagttattccacaggaacaaacggaaggaacatccacatgcatgaaacagcacaggagtgcatgccgagcaactcgggnaaagggtttttgntcttgtttttaccgtgaggggaatgccacagtgtaaactggaggttttattttacttttaaacaaaaanagaaaaatatacctgtgttcgctttcaaaccacttttatctaagagatatctgcaggacttgctgataagagccaaccttccagggacgcataactggcacctgatactgtgcaggatcacattgtcaaggacagtaagcagacagaaaaagaacgcgagagatgctctcaaaccggtcgtcgattattcttgtggaaaaaacacagcttcttacagatctaacaccaatcacaataggcatctcgctttgcaagaacaaacatatgagcctaataaaaaagaggcacttcagtattttatgcacagtcttaactctctataatgagcaagacaatgtttcctaaatgaaattatcaactgactaaaattgatccatacttc

SEQ ID NO: 452061 - DNA, 1107 bp, Homo Sapiens
  misc_feature (213)..(213): n is a, c, g, or t
  misc_feature (400)..(408): n is a, c, g, or t
cctaggtgtgtgaagagaggtaggggtaggacgtaagcacgcgtagtggtaagagaggcgagcgacgcgttacagtaagcgagcgtgacgataggaaatggcggccggaagtggaggtggacgcgcgggtcagcgaatttggcgaaccgttggacgaggggccgtgtgttaacggaggtcggaggagtaaaattagcgcggaaaggttccagngggcaggggcggagggcgtcgaatatcgttctggagcaggtggttctagttggcgcgtggggcgagcggttagggcacgggaaaacgggtcgggcaaagctccggggggggagggcacagattggaaagagatggccggaggtggaggcgcggtttagcgggcggggttgtaggcacaaggaggttnnnnnnnnntgggtgcttttaacgcgcgggggacgggcgaatggggtacgttttcgaggattgcggccagaatagtctccggtgcgaggtggtccgcgcggtgtgtgaccgatacaggcgctgagccaccagggggggatccgccgggatcataggccaccattgcggggctcctcgccagccggccacagatcggtgaaagcaccgactcagtgctcctgagtgggtggacgggcatgtccagggcgcagggagtgttgagttgagcatcaggatggaagctccctacccggtgagatcaggatcgcgcgtccccagccctccgtctgggagcttgaaagactggtggtgggagggggaggaagggggaggaggggtcgtggggtgtgccactgagctctagaagtcagtgccacttcagggttccatggtcagggtgccagtctgaagcctagaaggaccctgtcaggggatgcaagccggcaggacaaggggcagcgttgacagccccagtctcctctgggtgctcaaggctcatccgtctgcaaagttagtgaccagctttttagactctcaggggtagcgtggcatggctgtacaggctccagggcagataagaggggtacacattgtgggggtgtagggcccaggtggaagtggtgggcttggccaggtactggggccagccacactcacacacacaccctc

SEQ ID NO: 452062 - DNA, 925 bp, Homo Sapiens
  misc_feature (31)..(31): n is a, c, g, or t
  misc_feature (40)..(40): n is a, c, g, or t
  misc_feature (49)..(49): n is a, c, g, or t
  misc_feature (65)..(65): n is a, c, g, or t
  misc_feature (83)..(83): n is a, c, g, or t
  misc_feature (387)..(500): n is a, c, g, or t
agccaggaaccctctccatccatcctttgcnaatccaccnaaggagccncacttcaggagcaccntcttgcaagctgccgaancagtgaatgagcctcaggtaacaaaggcttttcaagacaagccaataaagcataaagccatcttcccaattctggagtaaagtctcgtttctccaaaccaattactcagatattccaagacactagttactgttgcctgattcattctgctaacaatactaagcaagggaggaaaaccaatttgtacataatctattccaggactttcatttgtggctggtccaacagccccgtcagcacataactgtttcacccagacaaaatttgcttccagccttgcttcatcttcagattttggcttagnnnnnnnnnnnnnnnnnnnnnnnnnnnnnnnnnnnnnnnnnnnnnnnnnnnnnnnnnnnnnnnnnnnnnnnnnnnnnnnnnnnnnnnnnnnnnnnnnnnnnnnnnnnnnnnnnnattgtcacattactatccaactgttgtgatttccagtgacttctatgtttgttcacattctgtcgaacagttgaaaactgtgccacttgttgctgttgccattgaagtgttggggaataaccttcaggggcgggttggcatcctgaaagagaaatattcacactttgcttccttttcaacttctttgggtcaatttgagctaccacaacatctggacattgagctgcttcgatctggacccgcctcaggtattcctgaggcgtcctcgggggtaccgagggatcgaaaccttccgtcaagtcgcaaggctctaccggcaatagccgaggcatcaactcttccactgcggactccgctggtacccacgccatggttttcaaaccagccagttccgctcggcgcatgcgcccattctaggtcacagc

SEQ ID NO: 452063 - DNA, 822 bp, Homo Sapiens
catattctgagtatcaatctgattgcacaggtaaagatgtgaaccgttcacatagtgttgaagatgtgttgaaatctgtacttgaattggcattgttttcctcagagttaggctgcccttcatgagaaatatctttctatccctgagagatcagctacatcaagatggctcatcagctaaatcacgttggtcaaaatacctgctaaccaagcagattaataaattcaaagcaggaaccctctcatcatctttgctatccactaagagcctcacttcagagcaccttcttgcaagctgccgaatcagtgaatgagcctcaggtaacaaaggcttttcaagacaagccaataaagcataaagccatcttccctgattcattctgctaacaatactaagcaagggaggaaaaccaatcattgtcacattactatccaactgttgtgatttccagtgacttctatgtttgttcacattctgtcgaacagttgaaaactgtgccaattgttgctgttgccattgaagtgttggggaataaccttcaggggcgggttggcatcctgaaagagaaatattcacactttgcttccttttcaacttctttgggtcaatttgagctaccacaacatctggacattgagctgcttcgatctggacccgcctcaggtattcctgaggcgtcctcgggggtaccgagggatcgaaaccttccgtcaagtcgcaaggctctaccggcaatagccgaggcatcaactcttccactgctgactccgctggtacccacgccatggttttcaaaccagccagttccgctcggcgcccgct

SEQ ID NO: 452064 - DNA, 1078 bp, Homo Sapiens
ctgtgggcaacctgactgatgccgtcttggcaattgaggtccagaagatgatagttccgcgacgcaagcagtacctactttttttcttcatctatgcattgactctcagattaccatgcagagcttcacgttatcatccacgttaagtagtgctaggtaggaccttagagatgttcatgagaaactatttgttatgactttcctttgtatctttccttttaatttaaactttaatgataatgtacttttaatatggattctattcacatttgttttaaaaaccttgtaaatatgaatgtttaagacaacttactgcaagggtaattcaagtttacatgatttttaaatttgcaatgatgttttttttattctgtgtattgaaaaaaattttctgttaccaaattttacaacttctaataagactactataactttatgtaaactgatgaagatgtgctgattaacatattctgtgatatggtttacaacttttaatcataattgtccatgattttggaatgctgttatttatcagtaaatgtaaaatatttgaggcatttagccatacacacactagaactttttaaaactttgtcctatagtgtaattataaactgatgactattatcttcatacattgagtcttcatgcatcaatgaaatgaaaaatataggattatttatttactttttgtaactaagtgggaaataagaaaaaaagttagaaagtacttaaggggaaaatcgttcttactaagtcatgtattttcaacttgtcttccctggtatatcataaataccgacatattacataccccatgtaaaattttgcttaaactctctagcacttggcatgtagaatatgtaccataggtatcaggttaaaacactaaagtctgccagaaacttttgacagtagcaagaaaattgttgaagaaaaaataaattatttactgagggtagttatgttaaagttttgcgaacttaaagggctgactttagttccttcatggtaatggcttgagtaacatcatctttgggattttttaaatactggtccagtctaggagaacctggca

SEQ ID NO: 452065 - DNA, 829 bp, Homo Sapiens
  misc_feature (552)..(576): n is a, c, g, or t
tactgtagcagtttcccaagtaaaatataaagatgattcactggggtaggtgaagaaaatactggaatttctatttatattcatctcatttagaaaagaaaagctgtcctaatatgtagtatatggattgagagcagcatgtatcagtctatagagttgttgtcctacaatattttattaacagattgcaggaatctaaaaggttggagaatagtgctctagggcagtgaacatcaagttctcatattttccaaaacatctttaatttacatgtgcaaggaggtgaaggaatagtaaattctcaaatactaatacattttcattcacttcaatgttataagatacaacttattcagggaagacggcagctcactgtgattaagcagtgtctggatgctgcacatccctgtatcactgggaatgattatttctaaaggcccagaattcccagaccactgttgccataactttccaaagagcttcagttttgctgctcttgttccaggtgtataatacttaacacattgggctgtccaacttctgtaatagcannnnnnnnnnnnnnnnnnnnnnnnncactttctctgaaactacctcatagctctttcctcaatacagatggatttggcagcatttcagatggaacaacatctgagcagatacttcaagatttgggcattatgcaagtcattttcagccaagtaattttcctcacatctggaaggctcatttgtgatttaattttctgacattatataatttaaaaaacttaaaaaacttgacaggcagccaccaccttatctaaatatcttctaccagaatatctgag

SEQ ID NO: 452066 - DNA, 1067 bp, Homo Sapiens
  misc_feature (16)..(16): n is a, c, g, or t
  misc_feature (166)..(166): n is a, c, g, or t
  misc_feature (404)..(429): n is a, c, g, or t
  misc_feature (833)..(858): n is a, c, g, or t
ataaaacagaatgccnggaaatcctaaaaaggttgggagaaatagtgcctcctagggccagtgaaaacatccaagttcctccatattttccccaaaaacatcctttaatttaacatgtgccaaggaggtgaaaggaaatagtaaattctcaaaatactaataacanttttcattcacttcaatgttataagatacaacttattcagggaagacggcagctcactgtgaattaagcagtgtcctggatgctgcacatccctgtatcactgggaatgattatttctaaaggcccagaattcccagaccactgttgccataactttccaaagagcttcagttttgctgctcttgttccaggtgtataatacttaacacattgggctgtccaacttctgtaatagcannnnnnnnnnnnnnnnnnnnnnnnnncactttctctgaaactacctcatagctctttcctcaatacagatggatttggcagcatttcagatggaacaaacatctgagcagatacttcaagatttgggcattatgcaaagtcattttcagccaagtaattttcctcacaatctggaaggctcatttgtgatttaattttctgacattatataatttaagaaattaaaaaacttgacaggcagccacaaccttatctaaatatcttctaccagaatatctgagattaagtcctggatatgacatttaaattttgtcctgatttctaccccaatgtttaaatccaagatattaacattttcataaaactaagtttatgatgatggaaaaaactgcactggtgataaaagaagtgtggcttttagaatatcacnnnnnnnnnnnnnnnnnnnnnnnnnnctgattgaaatctacacattgataaaacttttgctactattttggcagatactatatatgaaaataaatggacataaataaggtaatgggatagctttggatgaaaaatgtgtaggttatgtgggctagtcaaaacagatgcaggtgtggctgtaataagcaaagctgctccaagggaagtacagatggcaatcaaatgtacagccgct

SEQ ID NO: 452067 - DNA, 787 bp, Homo Sapiens; identical to SEQ ID NO: 138929
  misc_feature (121)..(145): n is a, c, g, or t
  misc_feature (325)..(341): n is a, c, g, or t
  misc_feature (626)..(626): n is a, c, g, or t
  misc_feature (774)..(774): n is a, c, g, or t

SEQ ID NO: 452068 - DNA, 853 bp, Homo Sapiens
  misc_feature (398)..(502): n is a, c, g, or t
  misc_feature (583)..(629): n is a, c, g, or t
aacaatggtaatatgcaaataacataactgaataatctttttgaatggaagttcttgatctcgatactaagcagattttccttagcatgtctacaggaatttagtgtcaggtcagagttatggtttcaaaaaaattaggatttctgtaaacaaaaggcctgcacttaaaccttaaaatttattgactgacatgagtggtataactagtgtatatatcaagagttaacatttgttaaattggtgtgcaagaagcctgattcaaagtagctcacatggtaacatttattgtaatactttgagatatttagtaataaatattacaaatgtataagtcttctaagacccaaaatgtataccttaagaaacattttggctaggcatggtggctcacacccatnnnnnnnnnnnnnnnnnnnnnnnnnnnnnnnnnnnnnnnnnnnnnnnnnnnnnnnnnnnnnnnnnnnnnnnnnnnnnnnnnnnnnnnnnnnnnnnnnnnnnnnnntaaagttggctgggcatggacatgcacacctgtagtcccggctattcaagaggctaaagcaggaggatttcttgagttcannnnnnnnnnnnnnnnnnnnnnnnnnnnnnnnnnnnnnnnnnnnnnntgaggtcagagagtgagaccctttagggacttttttgaacagcagaaatcatatctccatttttaattgtggtacttttatggaagcttctccaacttcttttgatatgtctactccaagaggacattttggttcatagcggatgccttctatgtcatgtaaaatgcccaagccagcacgtagtctttcaataccattccatgcaatcataatgccattatcag

SEQ ID NO: 452069 - DNA, 572 bp, Homo Sapiens
tgtgaggctcaagtcatcccacagggcttctaaaggaaaagagggtccaaaaatccagatggctagagcttctctgggcttgcatgaggagcaacctcacattgattaagatgtgagcttttatgctgtcctgtgatcaaataacccacctcaccatgctatcttacttctgcgtttccaatttaccataatactcccaaaataaccccttttataaggggtcattttaattgtctgagttccctcttaataacagggaagaaacaaaattttaaccacttcttaccaatgcatgaatgactaatattgtctcaaatgtgttatctctttagttcacccaattcaaagccatgtttggagatttctgtatccagaagcagagtctgaaagaaataagtctcccataatggaaactgaagaacaaggacaaatttttgagagtgataatttggaaaaagaatgtattttagcactccacacaatataacacaggcatgcttgtcagcatgcttcatttttaaacgtaactctgatagaagatgtttctgattgtgactcattattgttggatg

SEQ ID NO: 452070 - DNA, 1007 bp, Homo Sapiens
  misc_feature (20)..(20): n is a, c, g, or t
  misc_feature (140)..(140): n is a, c, g, or t
attccctaatcggaccgggnagttcataaatgctctctacccttaaccataatgtagcatgaatgtccatacaaggccactggttaatactgccccaagtaacaaaacaatgaatgtcaggatgtgtcccctacacaatngacaataagcaacaatgaccaaacagaaaagaaacttaaaattggatactttataaatttaagtgtaatctatcaattgcaaattatttttaaaaatcgtaaatttctacaaagcacaatattaaaagcttgcaaattattttaaaatatcctagccaaaagggcataccttacagagcctagaagaatggctcattaggtaacccatttatcccttctacaaacaccctataaattccagaaaacataaacaagaaataaaccttacttctctgaccctcaatatccttaagttgaaattaaacaaacaaaataatcattaagtgcttccagttattaaaaatgaaacagtgctaatattggtgcccaagaaagtgccaagtgattaacaccaatatatggcattcccacccctgaactttaggcattcttgaatgattccattggctagaactctgggccagccacaggaaacccccacacatcctccccgaccccatccagaagatcccaggcctatgtgagcatgactcacaatccttggaagggaaaagaaccagaaggagcctttatgagatgggaaacaaggcaaagttgagaagatcattcagcccaagacactccactctgaggttttggctaatactaatgacatacagtttaaaaggataaattaggccacaataccagcattcctccactactgtattcaatccatggtcgaatctctgtactttagaaatactgcttccagtataaacctcctctttgagaaacttacaaactaataaagattttacacaaaagccaacataaatgtagaaattttaagaaaggacatccttatttgctcaataatacatgacc

SEQ ID NO: 452071 - DNA, 585 bp, Homo Sapiens
agcgggctgctgctgacgtgcctggtgccggccgcgctgctgggcctgcgctactactacagccgcaaggtgatccgcgcctacctggagtgcgcgctgcacacggacatggcggacatcgagcagtactacatgaagccgcccggctcctgcttctgggtggccgtgctggatggcaacgtggtgggcattgtggctgcacgggcccacgaggaggacaacacggtggagctgctgcggatgtctgtggactcacgtttccgaggcaagggcatcgccaaggcgctgggccggaaggtgctggagttcgccgtggtgcacaactactccgcggtggtgctgggcacgacggccgtcaaggtggccgcccacaagctctacgagtcgctgggcttcagacacatgggcgccagtgaccactacgtgctgccgggcatgaccctctcgctggctgagcgcctcttcttccaggtccgctaccaccgctaccgcctgcagctgcgcgaggagtgaccgccgccgctcgcccgaggacacccgtggagcggtacgggttgcccggctgccgccgccggggcgggctgg

SEQ ID NO: 452072 - DNA, 878 bp, Homo Sapiens
  misc_feature (473)..(608): n is a, c, g, or t
  misc_feature (621)..(666): n is a, c, g, or t
  misc_feature (668)..(748): n is a, c, g, or t
accttggccttccagatagctgggacaggtgagtaccactgtttagatttcatgatgataccataccacatcagttacaaagagactggaaataataaaggctttgagtttgttttgttatttcctacaaatattataattaagatagaaacttattcaaactactcaaaaatgtaaattttatgtattttcttgaaatcatgaatttttaatttccaaatacaaatattgttgctctaaataatgtgagttttgtgactcttcaaaattaaaagaatgtaacctacaatataatgtattttcttgtctatgagagaccaaacgagcttaggtagcgtaatgctaaaaaattgatttaaggaaataatctatttttatgccatctttctccgaaactcttaaaaagccaaatcttctctaggtcatggttggtaaggacaggtcattaacaaagtcagggattcagggctgannnnnnnnnnnnnnnnnnnnnnnnnnnnnnnnnnnnnnnnnnnnnnnnnnnnnnnnnnnnnnnnnnnnnnnnnnnnnnnnnnnnnnnnnnnnnnnnnnnnnnnnnnnnnnnnnnnnnnnnnnnnnnnnnnnnnnnncatggtggtgggnnnnnnnnnnnnnnnnnnnnnnnnnnnnnnnnnnnnnnnnnnnnnngnnnnnnnnnnnnnnnnnnnnnnnnnnnnnnnnnnnnnnnnnnnnnnnnnnnnnnnnnnnnnnnnnnnnnnnnnnnnnnnnnagctcctttcattatttataattcaaatctttgttgtacttcatctgcatcattccagaaattgcatggaagaagtagcagcaggagaaggtgcatttctcacatgaagaatgcgatttccaatatcccc

SEQ ID NO: 452073 - DNA, 1713 bp, Homo Sapiens
  misc_feature (19)..(19): n is a, c, g, or t
  misc_feature (25)..(25): n is a, c, g, or t
  misc_feature (43)..(43): n is a, c, g, or t
  misc_feature (52)..(52): n is a, c, g, or t
  misc_feature (92)..(92): n is a, c, g, or t
caagaaatgaaccccgctncggaanaaaatggtcgtttaaggnacccatccnagactccccttcctttgtcccaccatcacctctggctgtnaggatgtgggtcccccatgctgactaccaccagacgccatcaagcaaaaggggtgctggaatgtgacgttggcatggtcgacatccatgggacaccgttgcccttggcccagggtgactgaggaccctggagcaggctgacgtgttctgggaggcagctggctgtcccaggggctgtgcctagaactgcatcctcaccgagctgggccacacgggggtcatggggaagcctcctgccacagccagtgcagtgggagccctggcaggtggttggcctgtggggcccgggctgaggaagtggcccaaggagcaggagccccagtatgccacaccatggctccccagcgccacaggccaagaagggcacggggatggggcagggaaggagaaaggagggagaggcaggagaagctgcctgagcaaagggctcccctgttcaactggctgttgtggcatcgaagggacacaggtgctgtccctcggcagagactgctctggggaggaaggggtggtggaatggggctgcaatgtgggtcataagggccccctctgtccacccgcacagggaacacacatctgcaagtccaggccttcgcccaggggtccggcgaggcttgcgctcaggagacagaaccactttcatgcttgatggctcctagaattgacacaaatcccaacctggccgcctgtgtgtcaccagagcacggcgagctgaaaggcccagcgtatgtcggggctcactcaggctcccatccagcccagctggggctggcatgtctagtcccaaagccaggccccgtgggtcccccaacgttccacaccctcactgagccacccaaccctgctagaaaggccctagctcccagcctggcccagcatatcatcacgggacacaccccaacagtctagcatctgcaggctccagcgggacaagcccatagaactcagacgggtacaggctctccaggacccggcatagcggcttagcacgtgagcatcacgatgctggtcacaaagagcccagtgcccattcacgtgagaccggtgcccaggcacagccaaaccagcgtgcctaggcagacagggagcaagcccgagccacggtgtcctgaagaaacctgctcgaggcgaggggagaggggacgcttgttttgttacgaaggtgacggggaagcagaccggcttaattcatgcacaaacgactcagcttggtttctgtaaagtactgagcagctctgtcctgctgggagtctggtcatgtgtggtaaacaagcagcacccccaagcacacagtgtgcgcccccatttcccgcttgctgccagggccctgtgatgcggggagggccgatcactgccacaaggggccactgggcctcagctgcagagagaccatggccccaggctggcccaggtggccagcgccaagtgagggtgcccaggccgagggtggagcagcgcaaggcttgcccgccgccgggagaggggacgccgtcccaggctgctgcccactcgtgttgagtacatgagaggaagacacactcagaacagagaccccgatacaaccaaacacaaagacaaagcgcgtgacacagcctcgtgccgattcaacaccgcaggcctta

SEQ ID NO: 452074 - DNA, 1071 bp, Homo Sapiens
agggagtttttgtttttgtgggtgaaaagaagtgtggtgcaggtgtgttatatgtggaaaattttttggggggtgcgacaagcgctgtgccaaggagagtgaaaatcggtgagggggggaggtttaaagaatgagttgtgtcaatgtgtgttaattggtggggtttttgaatgtatgaaaaaggaaggtcccagggttgttaaggaagtttgttttgcaggtttcgatttgaaaccattgtgggtgtaaaggggccgctgtgtgtatgtttttcccgtggtggcgaaaggtggataagaggttaatggtctacccccaaacttttggagtggtccaaaggggggatccattttcccagccataaaaaggggttttgcttcctttctttgagcgattttttcattccaagtaattcattcaggaggcataattcatttagagataggatagccaaatgtcttctcgattctgcaaggtcaaagtcaaagcctaattgcaagtatcgtaagcatagaattgttacttttttggcttactggacatttggggtgcacattatcagaatacaccatgttatcatgtttgaataaatagcctattttaaaacaaagcaacaaggtaaaaggtaattcgtagtaactatattgatagttttttcaatgtaattgcttattgtgtgtgttacaatttatagtaaatcagcttgtgaagtaaacacttgtttattcatgtgtgtgcggctaccatcctcagtaggtttcaacataattaactaactgtaagtgtgcgtagtaaaatgaattagtattaaattctttaaataatcattaacttgagaattaattggcacaatttaccaatttattattcaatgaataactgacaaggaggaacctacccattaaaaaaatacaattgtgattaacattggagagcaaataagtttatgtcatataatttgaaaggatcattggtatattaatccagttaagtttggtaaagagaagataatggaatacatagtaccgtcattgaaaactgtagaccttgagaaaatcacttcccttcttt

SEQ ID NO: 452075 - DNA, 974 bp, Homo Sapiens
  misc_feature (888)..(924): n is a, c, g, or t
gtggagctttgctgttcggcacaggaaatgggtaaattgtacccgtatgtgttgttcgtgggcctgtccagtcctctcttgccattctcccctcggcccggtcgacgatctgaagttgtttagggtccgcagttctgccggccaccgatcccagtgttacttcccattcccaggatgttagagggcaggcaatgtaggcaggacaggacagttagggctcctccggaaattagacctttggaaatcaatgcagagtttctattacatttctggacattcagagagctagaggatgagaaagactcttggttgaatatgatgaaaaatcatctagatgaaaaatcgtctagaaagtcatttcctctcaaaccgaattctcagtgacagctaggtggaagagagcttaaaagtgattttataaaccacgctgtgaaaacctactgacgatcagtcccctgtccaaacacttttcctcccactcctttgggaacatacagggatggtgcattttaattacattaaaaccagcaagaaactcttgttttattctgatgtaaatcagtcacctaatgctgagaaggactgaagtggctcatatggtcgttctgtgttttgtagaatacgtaggggactcctgaaatgtgtgggatgtaggtaggggcgggagcgactctcacgtcagggttacagccacatttaggaacctcttcggaaaagctgagaaatcactgttttgccaaaagccttctgtactgtgatggggctttgtggtgagaggaacctctgagaagcctcgtgcggcttgagtttagagtcacgccctgcccagcgacattctcccgcgcacccgctctcgacgaattcgagctcggccgatttggcctgatnnnnnnnnnnnnnnnnnnnnnnnnnnnnnnnnnnnnncgccgccaccgcgtgactccgagtcgccctatagtgagtctatacattcg

SEQ ID NO: 452076 - DNA, 928 bp, Homo Sapiens
  misc_feature (73)..(73): n is a, c, g, or t
  misc_feature (81)..(81): n is a, c, g, or t
  misc_feature (92)..(92): n is a, c, g, or t
  misc_feature (835)..(867): n is a, c, g, or t
aggccctgggcccttcatggggcttgactccctggggtttctcctctgggcattggctgggctggctgcaggnaggtgggntggaggctgcnagactcttgggttgcagggagttgtccagggccttggccttcttattaatggaccgagggctggagctgctcctctttctcttgccatctccatcctccaagtgctgcacgctggcatccaggttaagctgcctctcatacggggacaggacagagcttggttggaatcgtcgaaccacataacccaacctcttcaggtggctgaagacctggtactgcaggaaggtcacagtgtggtcggtcagcagcagctggtaagcttcctggatagacagtggcaggtcttggtggaagaggtggatggagccacactccagatgatacaaggcctcttccgggtgaaggcgctgccggccctgctctgagaagcccatggtctgccagaatttgcccgcgggagacttcaactccacgaagccctcttctggcctccactcggcagccaccaagctgcccaggcgctccacgcgctgctctgccagcagctgccagagctcttcccggcaccggcgcagccgctcggcctgagctgccgagccgtcgggcagaaagtccttggggccatgcgagcgctggggcagcttctgcgaccgcgagcgggcggcgaagagctcccgggcgctgagcacgcgccccgcgggaacctccacggccgcgggctcgggctcgggctccatcccgccgccgcctgccgctgcccgcccgctctcgacgaattcgagctcggccgatttggcctgatnnnnnnnnnnnnnnnnnnnnnnnnnnnnnnnnnatgcgccgccaccgcaaggagaaaaaaacaggcccccggcagagtttccgcctcccattta

SEQ ID NO: 452077 - DNA, 987 bp, Homo Sapiens
  misc_feature (455)..(469): n is a, c, g, or t
  misc_feature (570)..(582): n is a, c, g, or t
  misc_feature (896)..(896): n is a, c, g, or t
  misc_feature (910)..(910): n is a, c, g, or t
  misc_feature (950)..(950): n is a, c, g, or t
ctagatgaagttattaggaatatgccacctcgggatgtaacaaattaagttaccataaggccccccatgtatggaccaattaatgagatcctccaaagtatttaaaggaccccctgttgtaaatgaagtatggaccacttcgtgatttgcagcattatccatggtccatggaaaaaaatgtttccaaattagcccggcactcaggaaattaggtccggttagcttcaccaccaagaccaatgtgacccatagctgtcgctttgtgaacgttttaaatatattttttatatatatatcgtagagttggtaaccactgctaagatttttacgcaccagaatatccccttcccccttattcagctacttggcccccagtctcctcataaaagttttcaaaaaaattgtaccagaaatagtttaaaaccccgaccccgtcttcaccggtaatgaaatgnnnnnnnnnnnnnnncattttgtaattttcaacactatgaatttagacagcagctgtgattatctgttagtttaaatcaccagaaatcattttgacacaacacagaaacatttatnnnnnnnnnnnnncagctgtctagctgttctttgtagctgataggtgcattcctttgattgttcgatagctagagtagagcttccaaaattaatctgtaaatttctccatcggccttcttcacctcctaaacctacttaaatccttcaagtaagctcactattaaaatttgtgggcatttaacttctttttgttattattccaccacggtttggggcccaactcatggaaatcaaagggtcctagagggaatctacttcaacacagtggatattccaagggacagccgagtttactatattaggcattggcacaggtaaaacaattntatatggacatttncgggtttcctttttcccctcccttttggtttctttaaaangttggggtggaccttggaagggtttttccggtcccac

SEQ ID NO: 452078 - DNA, 616 bp, Homo Sapiens
ttttttttaacaagtgactagtgtttaatctcagaaacatttgcattcagagtacgttcccttagaattttctcctctccactccatgaggagtgggcatgtgctttattatatcaacaagactaagaagccgcacccgagtggtcccactcaaaaaagagatttctgtttctacctcaaaatgcagaaaccactacagattaaaagagaaacacacacagacactttgagaaactcgcccttcctcatcttcaaagtgtggggtatgcattccagatctctcagcctgatggacagcttgggaagtgggaagggaccaatgtccagcaagtggactttgccccatgtccattgtggccttgtgtcttcctagccaactcagaactcctcacatccagcccccagactaccgctcatgggctcaggcaaaggtgggagtagccagggtttggcacttgggagacactcaaaaatattttttggacaacaagtgaatgtgagccctgaaactttctagagagtctctgtcccattgggttcaagccagtaaaaagccagagaagtgtctttctgtcccaacataagcagagatggatgagtcctttgtgcagaagtt

SEQ ID NO: 452079 - DNA, 661 bp, Homo Sapiens
gaagagcatacagctgtgttacaactgccggagctcattcactgtcaactgattttgggatttccctccaccagatcgatatctagtttgcctttttgccattaagcaactgctgcgcacagaggcacacttctctgcatcctgtgtgactaggcgaaggtgtcgcaaaagatcattgtctgggaatttcttcatttcagattcttccattaaagccttgaagctgacaaggcttttcttcttgttgatctttgcctccaaagcttcattcacattcaaggcccattcgttgtaagattctgctcgaagcttcaatgcattcatcatagggtagagatcatccagcgtgtacctataccgcaatcttatatcttataaggaggacaggaacacaattctttctacatgatgcaggcaaacaagaaggccaggtttacaagaacaggagatggcagacatgaagcatgtagttttgcattttacacacactgacgttcatcatctggccacagctcgaaatccattctttccgaatcaatcactcccattttacggacagtttctcttaaagctttctcatcctcaatcataatggccatgtctttctgacagttgaagccactacacatctaatacatcagccttggaagccatcttgcag

SEQ ID NO: 452080 - DNA, 1186 bp, Homo Sapiens
  misc_feature (747)..(755): n is a, c, g, or t
gtagccatagcatctgcaaaaaaagaaatgctaaaataatcattagcgttttcaaaattaggaaatcaaagtagctgggtcactctcttacatgtgtatgagccagttaattctgctggacagatcatacttacgctgctgattgactcttctgagcagtaacacatctcctgaattaattaggtaggtcccgtttgggtgctttaagtgggatcagtcttagatgagtgccagtatgtgattgaatttcatacgcacaaatgccatgattcaagttctctctccagtttttcttatagatcaacacacagtacatgtggtcagttacttggttgaatttctgcttagctgtggtaagagacagagaaagggagtgaggtgggaccagggggaattatcagaaagacatgagtgaacctattgggccaggtagcttccaagtatgttctattgtattgtctgttttgattctgatagtttagaactctttctgatagtttagaactcttacccagtggttacatgactgatcaagggcaactccatctggaaattaattgcttgggtaaaatgtccctgagtttcaacttgtcttttatctctggatattctcttatgagattattatgcatgtttctgtcacatgggcattatttacacacttgataaatgaaaggtatttctctgtccgttcaaggaaataaaatgtaagttcttgttttattaaatgaatgaagcctttggttnnnnnnnnngtaatgtaatatgtttctgttcaaacttgagctaatgacatttaaggaattaaagacattgatctagttcttagtatgaaaagtgtacatgtagatatagttatataattgtgtatatacatatctacacacatggttggttttatattgctttttcatcaatattttgactgaaacctttacaataaattttattttaattatgtaaccactaatatttgagagaaggaagcaaatgttatatgtccttctgttaaaagaaaacaaaaattcagtcctccgccaaaccggttcccacacactcatactctgcacatctaggctacattaaaatggactgacagaattatttaaaaggcactatgaaggtagaacactaccttaatattttatcctagtcagaagctgattaaacactgaacttgaaggga

SEQ ID NO: 452081 - DNA, 686 bp, Homo Sapiens
  misc_feature (139)..(139): n is a, c, g, or t
atggcgatggtggcctcaagccccatcttgctgacggtggagaagatgtagagcgtggggccgcgacagcagcatcaggccgcaggtggaggcccttttctcagtcggtctgagatcacacctgccaggatcccaccanagattccgcccacgtcaaacagggtggagagctcccccgcctttttggcatcaaggtgatccacattcgtgatgtacaggggcagccagaagaggaaagtatagctgaccagcttggcaaacagcagacacagtgagaactctatcacgcctggaattttcaaggcccctgtgaagctgatggcgccgtgccactcccaccgtcgcccggggagaaatgacgaacgtggtatcgggtggaatggagcccattcccatcatgagagcagcaggcactgcatctctgggtccagaggcttgttcttttcgctcttcaagatttgcttctggagtctcaatctgtttgtaccattctcatagccttttgagtgcgtcaccagtgtggaggagcacctgacgtcgttcggatgttcaatgaggaagagaaagcacactatccccatggctgccacgatggctccaggcacgacgaaggacaggccccagcatgtggacacccagtagccagcgatcaatgaccccaagatgttgccccggaggtgtgggag

SEQ ID NO: 452082 - DNA, 1089 bp, Homo Sapiens
attcgccgtactaagttggtttctgttagtcttaacagtctgttttcttttaaaagcatgtagggcttcattgccatgttctgtgggtgtttggcagtgttaccgatgggtgaagattcttgtcacagaatcagcaataccatagtttttctacatgtgctcagctggtgtggtgtggacaggtaggggtggggaaagaagaggctctgcgttctgggtggctttttctatctcctccccctacccggtttccctccactgttttcctacctactacggcaagcccaaagtgtcttcccggtgagacccagcgcagtcccccggctcttacccagtgaccccgaccccgatgactgagccttctgctgaggtccttgctgtggatgcacaatcattcctcacaagacaactatgatgagctacccgtatgacttctactactactccgtcgcaggtatccagcacgagtacaactgtgctgactgagacgggttccatggcatgctccccatcttccctagaggctgctgcgcatctggagcctgcggctccggcatcagaagaactttacctctcaaatgcgtgaaagcgctgcacttacagttcagaccgtacttccttgttaagtacatataaagtcaccgggcgggcaagggcaccatcagggacatcacagagtgggacgaacacaggaccacactcaagggcccacacatacagacgcccgcaagatcgcatggaatcatctgaatctcgcatccgcagcgaaacgtgtcagtggaccatgaagccctgaagagcactggaggaaacaagtagcacgatcacacagaaagagaccgggatacccatgaacggcacagaacgcatgaccaacgagactgaaaaggctgtataacgaggggacgatacgcggacaagaacaacagcagaaagtcacgtggaagaagcacgggcaacctgggagacacgcagacgagtactggagaacgagagtgatcacgagccaccccacgagagaaagagcgtactacgtgactcaagaggacacggagcacataactaaaagcagagacactaccttcacgg

SEQ ID NO: 452083 - DNA, 717 bp, Homo Sapiens
tacacttggttttaataaattactcagttgagtttttctttaaccacagaaacccaaatcatattgccctttcagatttagtcttcatggggttggattatgtcttatattttctctgtcagagttatttcatatatggattttacttgaaggaaatttatagtttactctaaattgatttgttcttggaacttttttacctgctgtgaattgatacctagttataaaaagctagcatttgcctagatcataactatgtatggtatctagttagaaaaaaacaagcaaaaagctattatgagtttccaagagggacaattaatgcattttcataccaaatgcgaatatttaggtgatcacgtgcatcttttcttgtatggatggaaaaatcaagaattgtacactgtttaatgagttctccatattcctttaggagatatttgctttgcaattacatgttacaattagaataattacaattaaaataatattacatgttacaattagattaatagtgatgagagggaaaaaagacacccttctgtttttttctctcaagccagtctaaaaacttgaagagccatttaaaattaaatgtcactatacttgtattataaatcaatacataagtttaaaccgtgttatatactcagtgcaaccagaaaaacccatatggaggttcaaccacgtgatgtatttggaaatgatcctaaatat

SEQ ID NO: 452084 - DNA, 780 bp, Homo Sapiens
ggggttagtctgccgtcgtcccaagtcccgcgatgcgtcttggtgatttcctctttgcgctccttatggatctctagcttctccgaccttctctgggatctttactggctgcattgcaggccccacgtcggaccttcggcatgtcttgcgtgccctgtggacctttgacgtcggcgtcagggccgggagcttcctgtcctctgtgtcagcactcccctccccaagggtggctgtgtgggtcggctggcggtctggggaaaagcgcttggagtcctgcctttgccagcccctccaggaagggtttttgcagcatggccaggcagcgaagaggccagagtgctggtagtcctcaagggctgtgcctgtagggccggcttatttaagatgtatccgttgctgccgatgacagaagtctgcacagaagttcgtcggcagtgacgtggtttttgcttcgccgcttctgagtctctttctgaaaccccattttccgctatccgagttagtgtgttggtgccatcctgggggttgacccttgcgctgtcctgagtgtgctttgcagcatttgcatgactgctggcatcgctgttttcacaagacccattggtctcaccgtccgcagccatgtgggcctctcctgcctgtttctctgctgagccttcatcggcagccataggtgtctcttctcccagcagctcggttttcacacagcaatcctgctgaggctcccccctcgccggaactgcctcggcatcggcggcggccatggcccgggcccgcagc

SEQ ID NO: 452085 - DNA, 1200 bp, Homo Sapiens
tgaaataagatgggttacagtggtagcccaagtgactgatcacgctgctgaagaagttaagtcatgacattacttcaatatttcccgaattctggacattgcgagaaccagcacaggtaacgcttaatgaaaaagtgccaagaaaccgactccccacggatcccagaattgtttctacctcagtctgcaggatggcagccctctgctccttagcagtcaaggactccttcaacacttcaatgtgctgtttactatctgagaactggtttgtgagtgtttctagctttgtctgcagggcgagtagttctgtgtcctgttctggacagctcctgtttcacctggccaatctcagcctgaagaccagccgctttctttgttcagctcctcccattgagcctctttcgaacttagttcctccgttcagttgttctaccttattgtttcataaatttagaatggctccgatacacttccatgttgcttcagtttcttcttccctttcctcagtactcaaagcaccattcgatttcagcatctgaatttcctcttccaggtctcgaagcccacgctccatagaggaaatttttgaatccttcatctcaataacagtttgcagagcttttgttttggcagaatcaggagcattctcaaaccttcgatgcatctcctctctcaacatactgttctctttttccttctgctccaaaaggctttctaggtgatgaacgtgcatctctgcctctgccagtcgtcttgttctctcatggtcttcctcggtagccttggcagaaagtcctttgctctgcaacatttccagaagcttcttaatggattcatcccgagcatttagggtctgcttttgagtctcaatacgcagctccatttcctccaatgtctttcgaagaagatacagctctttggcctgccgctcatgatcagcatgaagcctctgaaagttctcctctgtcagatctgctacacaaggttcgccagtcctgctgctactatcctgctgaaacagctgattcagctccctctggatccgcaattcatcctggagagcctggattgttatctgcatgtgctggttttcctcctgtacaactctgtactgttccttccaaatggtgattttggaagcttcatcttttctcagggctcgttccttcttcagctctgggctccagaagtccaggtatg

SEQ ID NO: 452086 - DNA, 1057 bp, Homo Sapiens
  misc_feature (398)..(415): n is a, c, g, or t
  misc_feature (595)..(696): n is a, c, g, or t
  misc_feature (723)..(893): n is a, c, g, or t
  misc_feature (895)..(935): n is a, c, g, or t
tcagtttgtttttttgcaattttacaaacaaagtaacaagctgctggctataaatattaggatattctacaatttaaaaaatctaatattcatgattgttacataggggcaatcacaatgaaaacaacggtaatgtaaaccatatcctctatgataaaggaaaggatttctacacctagacttatgtccagaatggtaaaagacctactactgatcagtcaatattgacccaatgatgagaaaatagttgttttccattcaaagactaacacatttagtctactccagaggccaaggaagagagaatcgcttgagcccaagactgcagggcattatgactttgtctgtgaaaagccactgctctctagcctgggcaacatagcaagatcctgtctctnnnnnnnnnnnnnnnnnntgtagtcacagagttgctagtaattatttaaaaaaacaaagccctgtttttttctcaaaaccaaggtgtgctaatactaaatatagggccacaaaaatcgaagcaataaagtttgaagcttactaaatatagagaaagagacattcttaataggtagagagccaaggcttttttacatgnnnnnnnnnnnnnnnnnnnnnnnnnnnnnnnnnnnnnnnnnnnnnnnnnnnnnnnnnnnnnnnnnnnnnnnnnnnnnnnnnnnnnnnnnnnnnnnnnnnnnnaccatcctggctaacacgatgaaaccnnnnnnnnnnnnnnnnnnnnnnnnnnnnnnnnnnnnnnnnnnnnnnnnnnnnnnnnnnnnnnnnnnnnnnnnnnnnnnnnnnnnnnnnnnnnnnnnnnnnnnnnnnnnnnnnnnnnnnnnnnnnnnnnnnnnnnnnnnnnnnnnnnnnnnnnnnnnnnnnnnnnnnnnnnncnnnnnnnnnnnnnnnnnnnnnnnnnnnnnnnnnnnnnnnnncttaatccaattttaaattctattcccaaaagcacacttcatgtgcctcttcttcttttcttgtttcctcagtatggaaaggagtgaacttactgtgaggcatctgaaatatttattaaagc

SEQ ID NO: 452087 - DNA, 1198 bp, Homo Sapiens
  misc_feature (49)..(85): n is a, c, g, or t
  misc_feature (132)..(311): n is a, c, g, or t
  misc_feature (665)..(675): n is a, c, g, or t
atgtatacgactcactatagggcgactgggttcatcgcggtggcggcgnnnnnnnnnnnnnnnnnnnnnnnnnnnnnnnnnnnnnatcaggccaaatcggccgagctcgaattcgtcgagagcggcgctcgnnnnnnnnnnnnnnnnnnnnnnnnnnnnnnnnnnnnnnnnnnnnnnnnnnnnnnnnnnnnnnnnnnnnnnnnnnnnnnnnnnnnnnnnnnnnnnnnnnnnnnnnnnnnnnnnnnnnnnnnnnnnnnnnnnnnnnnnnnnnnnnnnnnnnnnnnnnnnnnnnnnnnnnnnnnnnnnnnnnngaaagtaccaactattttattatttattacttcattatattaatttaaatattgaagtgtcagctatcatttaggaaaaaactaagtcaaatctctatctcacacccaatacacacccatagtaaatccaggtagattaacagatttaaattttttaacaaacttgtaaaatactagaggaaaatgtaagttaattaaaaaaataataatcttggattgcaatagacctgccgagcatggtcatcaaagccagaaaacaaagtttgattgatttgtctctacataacaacaagtaggaaagtacatttacaatacatattccaggaaggtttcatatgcttagcttttaagaannnnnnnnnnnaaaatacccaacatgacatgctgttagcatccatagagatccccattcccagggtggtgtacctatattgccagtgcttcagatgttgggtactaatgacttatcttcacccttttccagaggattgtcctgggctgatgagagtcactttacctgaagatacctgggaagtttggtctcctctgaggttggcccatggccagtgactgatgcaggacattacagcctggcccactggcctcggtggtacaatttatgctcctgagcaccccatgggattacgctgtgtgtggatttctcctgaaaccacatatttgcctcttctgccctgttctgttttttctcattcccttatagaggactctcagtaagtcacttacacaagaatcctaatttgaaatgctgcttccaggagacctgacttagaacaattggacaaataaaagttgatttttttaaatgtccagtaacatgaagatgctgaactttcctagtcattcagggggaaatcaccacaaatata

SEQ ID NO: 452088 - DNA, 2036 bp, Homo Sapiens
  misc_feature (30)..(30): n is a, c, g, or t
  misc_feature (97)..(97): n is a, c, g, or t
  misc_feature (226)..(226): n is a, c, g, or t
gttgacgcagatagagtagtttgttagtantgacgtggcgagagatgacgtagatatctctatctatcagtcacttgtcgatacttcatcgctctcngtatctggtagtggtcgcgttgattgctttactctccttcgcgagttgaccgcccagccaagcgatcttcggtgtagccatcgacggtaggtgtgtgtccgcattgtctcttgtgtcgcagatacgtgnatctagatatgaggtgtcgagtcgatataccatatgtactctgcctggtgtgttagtaacgatgactatatcatatttgtactgattctctcgagtcatgctctgattctcgcgcgggcgtgtcgacgtatgacgtgtggaggagccgttttgtcttatatcagatcggtcttggaacagactatattcaatgttacggcgtcgttgggaaagtcgcttcaatagtggagcgagggtgttatgctcagcgttttatcgtcttagatgctacggtagctgatcattgcaaagcgtggtagtaatttaatgcaagaggtaaagtagaatcgtggagagggccacaatgagctctcttcgactgctgttggatataggcacaatatgaccgagcgcaaagtgtcgacggctttggacgcagctgggaggtgagagagagatgtcggttggtgatggtaggtaagaattggcaggaagggtattaagagggtacgccgcgcaatatcagaagcggagatgacgacgaggccgggaaaggcggttcgggattaactagacagcggtcacctccaatttcggggctccgcgcgctaaggtttagtgggcgtaggggttgcctcaggaagggcacggtgtaaaaagcgtgcggaagccggaggcaggcagggatgaagtatgaatcgcgtgcaacgatagcttggtttagggatagtcgcgagggcgggtatcaaaggcgtagcactgtgtcgaagggtagaccggaaggctccttgggcggtgactatattggtgtcatagtgaacgatgttcaggacattcatcatgggcgtggtgtccccatcgagggccatgatccgcttcatggcctcccgggcctgggccatgcgcgtgttggtgggcgggttccgttctgacaccagctgggtggaccccaggtacctggccccaaatatgacaccgtccaggaggtcttcatggtcacagggaccaggcacctcctggggggcagggtaggaagccagggtctcggggctctgggcaccagcgggtggctcttcaggtgtgactagaggcaccgtctccagccagggttccggggaactgcttgagctcctgctgccctcctgctcagcagaggccccctccacccattctggggagtcagaatcctcatctgggtcctcagggggctgcaacagtcggggggcaggctctagaggctcttcaggaccagtctgggaaggcgggcattcctcgcagtgcaagaggcccagcaggtcatcccggccagcttcggcagacaggagcccgtgggcatcagcaatctcctgggaggccaggccatggcctgtggcaatgtgtaggggacagggggctccacctggggatgggcccaccagatcgcctggcagagcttcaaactgctgcaccagctcctgaaggcttgactcatcaagttccatccgactgaggctgccggggcctcctggcatagggtcccactggctgtcaggggtgaggtcctccgaaggcacaagaatgtccctgggcccctccaagtccatggctggaggccccgaaggggatcgggaaattgtggggaagtccatgcctggactccaggcttaggccggcatcttcaggcagttcccaaatcgaggccgcctcagccccgcgcagcctccaggaccccgctccccacggacggccccgacgtagcccgggccgcgtccccagaaggcgcagctcggggattcccggtcccagcgcccgctcctctatccgccctcgtgccgaattcgccacccaggcc

SEQ ID NO: 452089 - DNA, 857 bp, Homo Sapiens
  misc_feature (11)..(11): n is a, c, g, or t
  misc_feature (63)..(63): n is a, c, g, or t
ctctgctccanttgcagctgtgggaaagtgtgcagagcatcctgcagggctgggcttagcganagccgcttcaggactttcttcttgtgctcattcagcaggccgtctatcttccgcatggggggcaggtacagctcgtcatgcgtgtcctccagggcctggatcatgtctgggtcaagtgctgtgctcaccaacatctccacgtagctccggtacatctcccgcatcgccctggttttgagcagacgcccaggtactgcccgctcgtcctcgctgggggctccaggggaggactccgagtccgaggagctgcctggtgggccccgcctgctgtagcgttgccgcctgcctccttcagccatttcttcctcttcttagggggcggttcagccttcaccttggtaggccgggctttgggcagccgggatgtggcaggttgtcccgtggcgaagactccgctctggccgtgtctgccgtcccgctggtggcccgctcaccccgcaatggccgctctccacgtgtcaccttctccttctccttttccttctcaacaggccgcaggagggagggcttctcgggggcagggggctcaggcatggccgtctcaggagtctgctgctgggggcttctcagatgtcgtcttttcaggggtctcaggcttgggaggtggtgctggggccttagggggaggtgcagagctacccccagcagatacggggttcttggcctgcccagagcgtctgactggcactgggggccgatgccagggtttccgagcacagaccctcacgtagtccttcttattgacattttccaggaactttacatagaggcgctggtaccgattttttgcatcc

SEQ ID NO: 452090 - DNA, 1179 bp, Homo Sapiens
ggtccgaatcccgggatcacccgcgaggccccacactttctgcgccagctgggagtgcgcgccctgcagagccagtgggtgggcggttctagctcttcccaccctcactgcgggcctctgctgtcacacgcccggggtggcgaaacggtcgccacctgagtctccattctgctgcagtggcccctgcgttaaagctctctcgtggtgcggctgccgaggctgcggtagctcctgcgcccccgtgctggtggcgcagcctctgcttgctgccgacctggcggaagggtgcgggagcgcacgctacgggcagcgtcggtctgcgtccttcctcctcctattccgacccccgcatcccacgcccccgcctcgctctacgcctcctccctggctgcaggcagaccgcttcacacagccgcagtgccctgtgtgtggacagcctgtgggagactcgcacgcccacactcaccccgcctggctgcacccctgcccagcatgtcggcgctcgagtggtacgcccacaagtctctaggcgatggtatcttctggattcaagaacgtttctacgagtcgggcaaccgtgccaacatctggctggtgcgcggctccgagcaggacgtggtgatcgatacaggcctggggctgcgcagcctcccggagtacctgtactccttcggcctcttgcaggaccgagagggcaaagaggacgcggtcgcgcccggccattgcttgccgtggccacccacgtgcacttcgaccactccggcggcctctaccagttcgaccgcgtggcagtgcaccacgccgaggccgaggcgctggctcgcggggacaactttgagaccgtgacctggctttccgatagcgaggtggtgcgggcgcccagccccggctggagggccagacagttccgggtacaggcggtgcagcccaccctcatcctgcaggatggggatgtgatcaaccttggtgacagacagctcactgttatgcacatgccaggtcactccaggggcagtattggcttacatgacaaagaccgaaagattctcttcagtggagacgtcgtgtattgatggatcactgattgactggctcccatacagcaggataagtgactatgttggaactttgtgaacgtctaataaaataagtgggacagaggtctgggtaagagaaccg

SEQ ID NO: 452091 - DNA, 1187 bp, Homo Sapiens
ctggaccggtccggaattctccggatctcaatcacctctcctctcacactgctacctcaggtggacaacaaggcattaccttaaccaaagagagcaagccttcaggaaacatattgacggtgcctgaaacaagcaggcacactggagagacacctaacagcactgccagtgtcgagggacttcctaatcatgtccatcagatgacggcagatgctgtttgcagtcctagccatggagattctaagtcaccaggtttactaagttcagacaatcctcagctctctgccttgttgatgggaaaagccaagtaacaatgtgggtactggaacctgtgacaaagtcaataacatccacccagctgttcatacaaagactgataactctgttgcctcttcaccatcttcagccatttcaacagcaacaccttctccaaaatccactgagcagacaagcacaaacagtgttaccagccttaacagccctcacagtgggctacacacaattaatggagaagggatggaagaatctcagagccccatgaaaacagatctgcttctggttaaccacaaacctagtccacagatcataccatcaatgtctgtgtccatataccccagctcagcagaagttctgaaggcatgcaggaatctaggtaaaaatggcttatctaacagtagcattttgttggataaatgtccacctccaagaccaccatcttcaccatacccctcccattgccaaaggaccaagttgaatccagcctacacctagtatttacttggaaaataaacgtgatgcttacgtttcctaccattacatcaatatacgtacaaatccgaacaaccctgttacagtaatacgtggcttgctggagctctaagtaagagctgggacttttctcctactaaaaccttaggaggaagctaacattgaaccatatgctacgactgaccgactcacgtagtagcaacagcatattaaaaactgggactccccctgaacacacgaagaacgacatcatgcattgctatcactgatctaatacacccacatacatacaaagccaaaaagatgtccaagctacacctagcccgcctaatctccagagaattctctttctgatacgaagtagagagtagatagtccataatatacacgactcccatactcatcctagctgataagaa

SEQ ID NO: 452092 - DNA, 831 bp, Homo Sapiens
agaaggggtggaccctggccccgcatagctctcgctgccaccgctgctgccactatcgctgtcactgtcgctgctgcctctgtccagctgaaatgaccgtggggaggcctgagggagcccccggaggcgcggaggggagccgtcagatatttccccccgagtccttcgcagacacagaggcaggagaggagctgtccggggatgggctggttttgcccagggccagcaaacttgacgagttcctcagcccagaggaggagatagattctacttctgactcaactgggagcatttaccagaacttacaggaactgaagcagaaagggagatggtgtctgttggagtctctctttcagtctgacccagagagtgatgaaaacctctctgaagatgaggaggacctggagagtttcttccaagacaaggacagggggatggtgcaggtccagtgcccgcaggctctgaggtgtggctccacaaggcgctgcagctccctgaacaaccttccctccaacattcccaggcctcagacccagccaccctcaggctcccggcctccctcccagcacagaagcgtcagctcctgggcatcatccattactgtccctcggccattccgcatgacgctgcgcgaggcccggaagaaggccgagtggctgggctcacctgcctcctttgagcaggagaggcagcgggcccagaggcagggtgaggaagaggccgagtgccacaggcagttccgggcacagcctgtgcctgcacatgtctacctgcccctctaccaagagatcatggagcgcagcgaaggcccgaaggcaggcagggatccaa

SEQ ID NO: 452093 - DNA, 875 bp, Homo Sapiens
gttacattttggaaaagtggttgtcttcccaactgccccgacacttgaagtggtgctctcaggggctggtcaaccagcataagccttttgcagagggccttgttggagggcacctgatgcagggcctgtactggcccccaggccccatcttatggaggtcagcattcaaagctgcccacaacaagaggtgccagcatctctgcagaccctctagagaccaagcctcagtggggaggctggtccccctgtgctacagtcaggaggcccaagctgcatttggggccaggacctttctcaccctcgggtccccggcttgtccctgccacagaacaggtttgccacctcggcctctatgtgttctgtttcatgtggtcacatccttggaccctgcaccagacatctggggcttaacagctccccttggtcaccctcccggctgcctccgcgtcttgtctgtagaatgggaacagggacaggctgtcctgggctgcagttgggctggacaagttgacatgtaccaagttctgagaactacctggcgcccggacacctgaccccgctgtccttgcggctcagtcacaccctgcactgaagtggctggcagtgctcgctctccaccacctggctggaggtctgagagcaccaatgagaacacaaacagtacgttgcgctgaatgaaggctacattcctcggactgaatgggggcctcagaagaaaaagaaaagtcccggccgggcgcggtggctcatgcctgtaatcctagcacgttgggaaggccgaggcgggcggatcacgaggtcaggagatcgagaccatcctggcctaacatggtgaaatcctgtctctactacaatacaaaaattaaccaagcgca

SEQ ID NO: 452094 - DNA, 1520 bp, Homo Sapiens
  misc_feature (63)..(84): n is a, c, g, or t
  misc_feature (181)..(193): n is a, c, g, or t
  misc_feature (843)..(843): n is a, c, g, or t
gacacgtgatagtttgcgctacgtattaggttgttgtgtggattggtgtctctctgattgcannnnnnnnnnnnnnnnnnnnnntgttgtatggtcgtggggatagtggggtcggtgcgtggtttggaggcacggcggggctcggttttgtgtgttgagtcggaagggggcgtgttgggtnnnnnnnnnnnnnagtagatatgcggtgcagtaaatcgggagggggcatcgagtgtctgggcgctttggatgaaggcgattgtggctggcgtaaggggagcattgtgatagagggttaatgtcgggagcttaggttgtcttgttgttgggggggtgtagcgtgggtagaagcatgggtacaattgttggtccctgaaaaatgtagcaatcgctttaaaagaagcttgtgtggcaggagcgcgtgatttatgggtagtaacagactttttttcttctagtaagaaatcccggaatgacttggatgaaactgaatgcagagaagatgcccatgcattcactggtttgggggcttttgaaggagtgaataaaactgtttccatgctattcattcctgaattgttttccttggtagtcaatgcaatcatttttcgttgcttctgagaaagtttaactccatgagaaactgttttgcctaaatgtgactttggtgtagctccacatttttgtctactttcttctatttccatgatagttctgagatccacaacaggagggctgacaggactgaaagaaccagcaacccaactggcagagctggtagtatcaattctgttactgggaataggctgtggagcagatattttaagtattggtgacttttcnccatggttttaaatcttccctagaatacacaggagatgtaccattaacatacggtttgactttcgcctcaatcttatctgaatgaaatcctgttgtgaaatcaggggactgtaaatctctaggactacccactcctgcatagcttccttcagagtctgatgtcaacagttctggaagagattccacagaattggtcttaccagactttaataatcctgtagatgatggactctgaataatatctgaaaggttataacctccagaactatctgaacgtttacgtggcttctttttagcttttgtttttgctttcttgaacatagtttccgaatgattttgttccatatttatttcttctttcaagaagatatctccatcttctacttccaaatagctaatatctggtccatcttgatatggtgtaatgactcttctatccattgctggaatcattttccggtaaaactcagaaagatccttcaaaacaccatcgcttaaaacatcaagagaccttgcttcaagtaaagctgccatattcaatcctataaactgtaaacaagacagtttcaactgttttgcacctatacattgctgcaaattccagtagcatagcagcattcttcagggtaagtttttcagttaatatcctaacatccgggccggacagctggcctttt

SEQ ID NO: 452095 - DNA, 1343 bp, Homo Sapiens
atagtaaagaccgggggggaccggcaccgactgttttccttcccacgaaagggtatctggcggcgggcttgctgcaagttttgccccggcaaccagggccacgaggcccaaacgcagacagtttgatggcctgcggggcgttcgcaccaggcggttgttggagggccctcggcggccagcaaggtccacccgcaggcgggccctggccggcctcgtactcgccaagcagccgcacgttgccccgagggcccacgtggaccgtgtgctccccacgcgcctggcccgactcggggccaggttccgggggtgcccggcgggtcaggcggcgccggctcccggggctggcgtccggggtgctgtcgtccgcagacagggagccgtggcggcccacggagtgccggagctggctcaccttggcctggctgtcctgggcgaaacctttgagcagagacacggagcgggacagcagaggggacccgaagggggaggactcggccgaggaccctgtgtcgctctccccgccactgaagtagcggccggggctcatgagggccccgccagcctccctggggcccccatcacccccgttggccttggcagctgcccggcggcgcccggcccctggggagcccacctgggccagagccccgtgctcactgtggaacatgagactccttgcgccatcgtgtggggtctctcggccagcatggcgaagcccgtaggacgtctgggcctttggcatccgagggcaggtacatggcaccctgggcctgggggtcggcgtcagttggcctcctgcggacagccagtcctcggcactctcgatctggatcacgtggccgggtggctgccttcagcaggctcttgctctcggctgcctagcttggcaggcagccgggggctccgtgggctctgtcggggggccgcagagtccaggttctgttccgacgtggaggggcccagcgcggcctgtccctcgccctccgcggggcccgagggcagcttgggggggatgaaaaagtcggggatcttgtcgggcgtcaacacattgctgtacaggggccccttggaggccttgtcccccgcctcactccccacgccccgggcagcaccgttttccccagacccccgaagccgctccaagaaccacatgttggtttttctcatgggggcggcaggcaagaggcccggacaggggctgcagcgtctgcccggggtgatggcccgaggccggaggtctgttcgcagacacgcaggggtctcggcgcgcaggctccccccctggcgacgggggaagcggccggagcttcgatgcggcagcgcggcgcgcagcgcagatccca

SEQ ID NO: 452096 - DNA, 962 bp, Homo Sapiens
  misc_feature (21)..(21): n is a, c, g, or t
  misc_feature (29)..(29): n is a, c, g, or t
  misc_feature (42)..(42): n is a, c, g, or t
  misc_feature (56)..(56): n is a, c, g, or t
  misc_feature (68)..(68): n is a, c, g, or t
  misc_feature (85)..(85): n is a, c, g, or t
  misc_feature (115)..(115): n is a, c, g, or t
  misc_feature (224)..(224): n is a, c, g, or t
  misc_feature (725)..(762): n is a, c, g, or t
  misc_feature (830)..(866): n is a, c, g, or t
cccgtttgggtggaccggganaccacaancccccacaaaaantggatgttttccangacaaatccaangtttggacccccataanggataataaaagatttttaaaaaacctgcntactgaataaaataagggaccgagtgccttaaacaaaaaggaaaagacacatgtcttccttcaatctgattagctaagctgagcaggtacttcatcggccaaaccctcncgcagctgctatgggaacacagagccgtatttgactccacggggcatagccccaccataggctagctttcttctttttttggcagggccctgagatgggaagcaactcttcctatacatattcaaagggccacgagctacagaacgggacttgtatttttgtttctccctactgattctttgtgtgtgcatgtctctaatttaccaagctgtaaatacactccactttggggacccatctctgtactgccatttcatgaaggctaacacgtacaagtcaaaagtttttcaaaacagtggtctcctaagaatgctcttgcatgcacctgtgcaacctgacgggggaaataggccacacagaccgtctgggtcttctgtgggacatcacatcctcctacaaatgagaatctcatgtaagaaaatcccatgtctttgtttaccacaagtaattaagaagaaaagcctcttttgttggggaggaaacagaggtgatatgactaannnnnnnnnnnnnnnnnnnnnnnnnnnnnnnnnnnnnncgtacagagcacaatgaaaagcacaaccttgctaaaagctctttcaaagtgaaacaccaataaaagcnnnnnnnnnnnnnnnnnnnnnnnnnnnnnnnnnnnnngatctcacagcgtatatacattattctgttttacaagtctcttagatatagttcaggctggcatacatcccaactcccgggccgaccgcctgcttt

SEQ ID NO: 452097 - DNA, 880 bp, Homo Sapiens
  misc_feature (15)..(15): n is a, c, g, or t
  misc_feature (77)..(77): n is a, c, g, or t
tccagacccctccancccagtaacagctttccattgagcacatggagctgttgtgggagttaccttggggtaatggnaggctgggatgtctactgactcccagaggaatccacaagagattggtctcagaaaagagcacagagttcaatggctcctcagaagccccgagacctccagcaataagggctcccccttgccaagtgcaggcactgtgagaatgccgggcttcaggtacttctccctccactgggatcctgacccaagccattgtccctacatggaggaaatgccagtcacttagtacaggttccaccacgcttcgacccccatacacaaacaaatattcctgattctgacaggacacttctgttgttgaatgccgccaacaacacaaagtggaatcatccttttggccagcctttgttattgtcactttcaggtcctcagtgttattatcctcactcttaaaaaaatgaagctggagaacccccaaggctggacttactggggacagtctccctcccagaaccagaacccgactctctgagagtcttgtcatggtgtgataaaggcgtccatcccactgaactccagtcccacaactgcctatttggctgcctttccattcagagtcacatctcttgagagcaagtgaaactggctcactcggcagtgccgcccctcctgctctccaatcctcctgcactgagaataacgtctgggctcaagaagacagaggcgtggccatatctcttcaggtttgggacctggccctcgctactgactacgctggcagggaatactccctgaaggcgaagcaggatttacgcgaggaaatgcctctgaggatgatcccatacactccgggcctgtaccagcc

SEQ ID NO: 452098 - DNA, 1144 bp, Homo Sapiens
gttaatataacggcgaaggcgggtctcaggggcggcgggttgggcgacacgcgctttaggcgggcaaggtggcgctccgccctatcgggcatagtgtacagacaggtgaatggagttcggggatggaggttttgggcgcgggttttttcgttggcggcgcggggttcagcgctttgttgtatcgcgtgtgccgagtaacgtgtttggggggcgtttatttggtctcaccggggaccccggcctcgcgttggcccttttcggccccgctcgcgctttgggggttgggggaccctccagaaaaacctgcgttggtaaaataagtttaagacacttcctctaatgttcaattcccctgggccccccgggccgggtcaaggaggctgcccatttggctcatttggtggcccctctgggggttggcaagggcaccttttggtcgcccccccttttgttgatgctgttgagcccctctatgagggtgcagaggccagggcccgccacacctgcatttttgctgagctgctttactgatttatttatttttcttcctctgtgtggttgatttttatgaactgcatttttaggactatgttcaccccaatgagaactcgctgaattcgaactaacacacattttccaacgcagaccatggaaggagtaggagaaaaggacagcatcgaaccaccctggcaggaactgacaggccctcagtgatttcttgcttcccaggaagacaccgtgccagtttggcaaagagtgttagactccacaggagaggaacagtctatgctggtactttaggccagagaccatgaccagcgaactgggagaagacagagaaaaattatctgtgcgggtgagaggcctccacaacaatctggtagagccgctgggacctcgggcgacggcgacggcgacagcgacagagaggccctgggaatctgaaggttgagcctgcctcctccctggcgcaggctttgcagagggcgcaccagccagcccggctgaacgggcccgggtccccgggtgggcacagagcagtcagtctcctggcgcgatctccttctggcagtcagctgtcagtcgccttctgggagatcgggatgagcgggtctggctctgtgtcgccgggccttcatccgga

SEQ ID NO: 452099 - DNA, 547 bp, Homo Sapiens
  misc_feature (17)..(17): n is a, c, g, or t
  misc_feature (54)..(54): n is a, c, g, or t
  misc_feature (62)..(62): n is a, c, g, or t
  misc_feature (70)..(70): n is a, c, g, or t
  misc_feature (100)..(100): n is a, c, g, or t
  misc_feature (113)..(113): n is a, c, g, or t
  misc_feature (119)..(119): n is a, c, g, or t
caaaggttggcaaacantaccctccccaattggccaaaaaacccaaggaaactnaatggggncaacccanggttcaactcgctgtaacttgccttggttnaaatgaaatcccnaccggnaaaacctttttttgcaagaaatgtcttacaaaagaacaaaaaattggaacacttcctccccatactggagactcacccacaccggcagttctctggcaaaaacacactcaatcttaatggaagacatggtcgcaggggagatctgtgcgggtgagaggcctccacaacaatctggtagagccgctgggacctcgggcgacggcgacggcgacagcgacagagaggccctgggaatctgaaggttgagcctgcctcctccctggcgcaggctttgcagagggcgcacccagccagcccggctgaacgggccgggtccccgggtgggcacagagcagtcagtctcctggcgcgatctccttctggcagtcagctgtcagtcgccttctgggagatcgggatgagcgggtctggctctgttgctcgccggg

SEQ ID NO: 452100 - DNA, 616 bp, Homo Sapiens
  misc_feature (461)..(469): n is a, c, g, or t
aaatcctcccaagtatttggacatatatgaaatgtttcaaaacctgacagataaacactgagatatgcttcattcaataaacagaagtctgcatttataaaacagaaagctgccttttttccccaaagaaatctgtcaccaaaatggaaaagggtctcaactttacaccaaacatttagcaataaaacccttttgactaaccaaatgggaatagcttttatagctctttacagttttataattaacaaaaatatagttttttttaaaaccctcaaattagggcaccctaatcaaggcaaaaaacttaagaaatggcttactgttagcacaacacttgtacagtactacaaaatgcactgtcactaacaaagacattagcggcatgctgaagtgtcaccttaaaccaaatatacaataactgaaatgctaaaggcatttacatggagtggacagggaagggnnnnnnnnngctctaggttcaatattaaaacagataatttgggggggcttgatatccacattgtttaacagaagcaggcaccacaagtggctgcctccaaattgtagtccatagagaggccttcctttgcagagaatttatataaaagtaacagcc

SEQ ID NO: 452101 - DNA, 885 bp, Homo Sapiens
aaggggatcgacggaaagcggaaccaacaagatgggggggaaacaggtttctgccaggtcgaggaaagagtccacggtctctttgggacaaggaggagccccggagtcctccagcacccaggtcgctgggacttaaagggtcttgcgcaccgggatcctggctttgatgatgaacgccaaggtccacggcgagcagccgatggcactcagttgtggttgaggccatagtaggtcagacagtcgatgccgcccagacgcccgaggcaggctgggcatcgagcgagggcgggcgccctgacaccaaggctgcaggaccaccagcggcaggatgatcatgcgcagcatgcggagcagcatctcgccggggaaggccaggtaggtgacctgcgtgcggctcaggctgagcccgcgcaacgccgcgcccaggcccgcgcccgccagcaccccggacacggtgagcagcaccagcgcttggcgccgcaggaagcccgcgcaacgccgtgcgcgtcccgccgcggtccccggagctccgggcccggccgcaggccccgcctgagcgctgtcaaggtagccgttggtctcgttgctcttctccatggcgctacacgccgctccgagctagaggtggcaggggacgtgggctctggcaaaagacggggttcccaatgaatgggtcggtcggccagttgtgctccgcaggttctgggaagccgccccgggggtctccgggcctggcgcaggagcaggtgcgagaaaggcgaggagaggcgcagagtgcgggtcggagccgcgggcggagaggatcgcgcccagcctccctggagcagccgccggctggagatgatgcaaacgggagccgcgaacgcggacgcagacggggccgct

SEQ ID NO: 452102 - DNA, 1096 bp, Homo Sapiens
  misc_feature (47)..(83): n is a, c, g, or t
gatgtatagatcatatagggcgaatggagctcaccgcggggcggcgnnnnnnnnnnnnnnnnnnnnnnnnnnnnnnnnnnnnnatcaggccaaatcggccgagctcgaattcgtcgagagcggtctcggccgagattgcggcgatgtcgcagggacgactccctgggggccgaccccggcagggccgaccccggcgggaaccacgcccgaatcggagcactacatatgtccttagaggaaagcataaaatggcttggagaagttatggctgaaataggaccaacacattcgcaaaagagtgaggactggaatatctttgatgtaaaacaagccaatgctatcattgattacttaaaaatcagcttatttcaacactacaagctatacgagtttatgttctactctgccagggaagaaattgtgataggaactgagcaagtgatagaggttgtcaagtctgcatgtggccctttcccaaatcctctggaagaaggaatctcatttgatatttattcaacattcatagagccccccacaatattggatacggaaatgaagaggttggatcaagaacaaggccctgaggagtctcagccagaaactgacacctcagacatggatcctttagttggtttcaccattgaagatgtaacaatcagtgctggatcaagtcacagatgacattttaatcggcattcagaccgagataaacgaaaaactgcaaatacaggaagaggcctttaatgcacgaatagaacacattgaaaaaggcctaaggacttggtacaaggagagtgatgctaaacttcacagaaacaaacaaaaccagccagaataacagactctctggagcgtcgtgtctccatcaacttagttgtgaaaggaaaaccaagccccactttttcattttcctaagtaattagaaaagtattggtcccaattttgctatctcccatcccataacagcctctgaatttattgcaccaagtgtaatgagaacattttgtatacaagagtttgaaaaattatatataaaaatacaattacttttatgatagtcctttgacgttttgactaataaatcctattcatctcc

SEQ ID NO: 452103 - DNA, 1337 bp, Homo Sapiens
  misc_feature (190)..(190): n is a, c, g, or t
ttctgggggccattgcaggggggaaaactttggggcgcccccaggggggaggaggggcccttccgaactggggcccccggtcccaagaaggttctccctggtgcaccgtacctggacggttttcggaagacccccgcggtttcccgcagcacccgagtccacccgtctccatggctgcgagaagcccccncgggcgcgatgcccatagatgcaccacgggctagggatggtgacgagcgagtgcacgaaggtaagcccagtaggtgaagaagggccgggggtcgtccaggtcctcgatctggcgcttgacgaagctgtcgatgcgcttgcggtaggtgcggttggtgagccgtcccaccatgcccagcccatacggccgcttctcccgggcgaagagcttgcgcaccggcaccgcgatacgctggccccgtcgcggccccgcggtgctcaccacctcctgtcggagccgcaccttgggctgcggggctgcggcgccctccttctgcttccgccagcctcgctccaagggcagcatcaggtggctgcgctcaagctcgctgcggtccagggccccgccggtgaggtccgcctgctccggtgccttctcccagtcctttagcgctgcctccgatggggactcgaaaacttcatccgggtatgtggacagctcttcatggaggataccttcccgggcaaagaaggatgtgtccagctcatcggggaaatcagttgtgtcctcctccagaaagctagctggagtgaagcttcgacgctgtgcccggcgaaaggtgccatccctaacggagcggcctttcatcagcgctgcggccgcccggaagctcatcttggccaccgactctcgcttgcgccgccgcgggagccggtggaaacctgagcgggagctggagaaggagcagagggaggcagcacccggcgtgacgggagtgtgtggggcactcaggccttccgcagtgtcatctgccacacggaaggcacggccacgggccagggggtctatgatcttctgcatgcccagctggcatggccccacgtagagtgggggtggcgtctcggtgctggtcagcgacacgttgtcctggctgggcaggtccagctcccggaggacctggggcttcagcttcccgtagcgctggctgcagtgacggatgctcttgcgctgccatttctgggtgctgtcactgtccttgctcactccaaaccagtcggcggtccccctgcggatggtctgtgtgatggacgtctggcgttgcagcaccggccgccggagctcatggtggggtgaagagatgtgggctgtactcggctggcatactcac

SEQ ID NO: 452104 - DNA, 189 bp, Homo Sapiens
tcttcatggaggataccttcccgggcaaagaaggatgtgtccagctcatcggggaaatcaggttgtgtcctcctaccagaaagctagctggagtgaagcttcgacgctgtgcccggcgaaaggtgccatccctaacggagcgccttcatcagcgctgcgccgcccgaagctcaacttgggaccgagctc

SEQ ID NO: 452105 - DNA, 1222 bp, Homo Sapiens
ctttcttcatcttcttccatctggctaggcaacgcatcaagtatagacgtatatatttgtaaaatatacttgtcgtccatgacactttttaatctttttgtttctgtgagtcatttgtatatctcttgtcttctgtttgtgtgtacagagtttataacgtgagactttcttctgcgaggcaattgggtccccgcctgaagtccagcctcctgcctcatggcgtttcctttagacactatgccgatgccatggcaactctggcctttcggttttttagatatgtctcttcatgtggagggcaagatggtcagacctggaaaaacacctgtcgcagtggttgcatttgaagggctttgcacctgtgtgtttcctgtagtgcctcgtgagctcatcgcttcgtgcaaacgccactcacatcccttcccatgagcacttataaggcttcttcacctgtgtgagtcctctggtgggcctttaagtgggagctttttgtataaactttccggcacccgttaaactgacagcgggtgaaccctcttcttgttttcgggacatgcttcagcccctagccctcgttggtcactgtcgctctgtccactcttaacggccgccgcagccgtcacggctgctgcagctgttgcgacccctcccacctttacggagctgagagcagccttcttggccaccagtttcaacgtcaccgtgccatccacggcagagagagtttgtgaggttttgaccagatggcggctgagctcaggggacgatgggggcgttaatgaggtcactgcgttgagctgggcctggttgacggctgtgtagctgtctagagaagagctggccggctggaggctgaggcaggtctcagatagcaacttgtcccgagagagcaagatgtccactgccgagctcttctcacagatggccgcttccacggggagcagcagggggtctaagcgacggaagctttcctcaatgcacgggggaggggaagcgtggaggaaacagtccaagtcctcaccaaaggtctctgagatcctccggggctccgtctgtaggtagcgttccaattcaaggcatgtctgctgccaggtctcctccagggatggtaaagctgagaagtagccggtgtcgtggacaagttgtagctcctggaatatactataactagccaacacgtccatgctgctgctgccgggcaaaacgggatccaaggaattcc

SEQ ID NO: 452106 - DNA, 912 bp, Homo Sapiens
  misc_feature (704)..(704): n is a, c, g, or t
  misc_feature (714)..(714): n is a, c, g, or t
  misc_feature (830)..(830): n is a, c, g, or t
gcgaaagaaatgtccgcctgaagagacccacaagttctattcggggggaccgacagcccgccccgggaggaaggggcggccaggcccgaaagccgcctccccctcccagacccgagagctcgtgcggggcaaagtgaaccgagccgctgggcggtgcaaggggaagcccaagcccgttctcccggccaaagtgaactttaatcggggtggttggatgcggagacggggcggcaggacctgctagaagtggccgaagatgaatccccagcaacaacgcatggccgctatagggaccgacaaggagctgagcgacctactggacttcagtgcgatgttttccccacctgttaatagtgggaaaactagaccaactacactgggaagcagtcaattcagtggatcaggtattgatgaaagaggaggtacaacatcttggggaacaagtggtcaaccaagtccttcctatgattcatctagaggttttacagacagccctcattacagtgatcacttgaatgacagtcgattaggagcccatgaaggcttgtccccaacacctttcatgaactcaaatctgatgggaaaaacatcagagagaggctcattttccctgttcagcagagatactggattaccaggctgtcaatctattctcctgagacaagatctggggcttgggagcccagcacagctatcttcttcangaaaacctgngacagcatactattcattctctgctacaagttccaggaggagaccactccatgactctgcagcgcttgatcccttgcaagcaaaaaaagtcagaaaggtgcctcctggtttgcctntcttctggatatgcaccatcccccaaattcagatgatttcaaacgtgaaatctcctaggtaatcatcttcctaagcacccaa

SEQ ID NO: 452107 - DNA, 823 bp, Homo Sapiens; identical to SEQ ID NO: 310449
  misc_feature (55)..(55): n is a, c, g, or t

SEQ ID NO: 452108 - DNA, 1092 bp, Homo Sapiens
  misc_feature (711)..(711): n is a, c, g, or t
  misc_feature (725)..(725): n is a, c, g, or t
  misc_feature (785)..(785): n is a, c, g, or t
  misc_feature (846)..(846): n is a, c, g, or t
ttgcaagctcattcaaatgcatttatttttgtatcccaagcccctgaaacatgaaaaaatatttactaaaggaatgttgattaccagctacgactttccctaagacattatgttcctactaagattcgtaaacctataataaaaccacaatgcaactagaaattatactttaaaaagagagaaaatatatcctacaaaacttcactgttacaagatttgattggtagaaaagcagtaaaattatcagtgagaaacttcttccctttttagggaaaaacagtgaaactattaatacctcacaaattcctgtaagaattcataaaggtgtttgataaactgtggagcaatattaatgagaaggtactattattatgacgtaacaataaatcgacatggcttaaaattaagtcaagcatacctgcatcaccaaacatcagcaaggcagcagcaattgctccatccatagtgcttgttgattcaatcaacttaagtaaatcattgtcacttctttgtggaaaaagttccttcaaagtctgaagtttagcatctttaaggtcttccaattccgaatggtcttccggttctgaaatatcatcatttctacgtgccatggtaggaaggccttgggactcttcatcttcagatggctcagaaactataatcactgtatctttgttgaatgttttctcttgaactgtattggagcaattnggggaaacgacatnttcactatcagaagacaaatcaatatactgtattcctctttgatttttgaaatatgatanacttgcttttctttcattatctggagtttctggaacactagaatcttctgttttttcagtnatatctgaatcaggagtgtttgccctgctaacttccccttcagcattctcctcttcagcactaagagaaattggtgaagaagggccaggctgggaaggttgaggggttgcttcgggcgcttcctcaatcttattccttttctcaaagcgaaaacggtccaggttgaaaagattcatattggtagaaagcaccaccttgcagggatgggggctttaaatgaactatgatcttgtagcctcagtgcta

SEQ ID NO: 452109 - DNA, 1040 bp, Homo Sapiens
  misc_feature (562)..(602): n is a, c, g, or t
ttggggcccgctcttttctccgggggggtcccggcgcccaaagtttcctccatttttttgaccgtcccaggggggagaaaaaattggtgtgctatgaagcccaatcccatccccctctacaccctgttggtacaatcctgtattcccctgttgggcccttgttccttcgttcctcttccctccctcagggaatactgtctaccttaacgtcgatcaatcctcatcctcatcctttttcttcctatacatccacatcatcttcatctgcttctccttcttcttgttggtcctcttctacttctccttcatcagaatattgcccttcctggggaacagaattccgatcaggagaaatgggctcaaagtaatcttctctatgaggagcatcctcttccttgtcaccagacactggcagaggcacaggatcatcttcatcatcatcaggtggagggggtcctggaggagttcttggtccccttggctgtggtcttggagggcttccattaaactgatcttctttctccccatcagcatgttttggattccttttcaaacttggttnnnnnnnnnnnnnnnnnnnnnnnnnnnnnnnnnnnnnnnnngagtctctgtcatgacttatcactctatccactgatccatatattgccagtgtcagacagttataccagcctcttagcaccagaccatcagtattcacctttgagttaggtctaaagatgatggaagtattctcatcatattccaggcttcccaacctatcgaaaacaggggcacttggtttgcttacattgttgaagaataagtctaattgaaatgtatggggagatgtctctccatatgctctgttgtctggcagactgctatgggctcttactcctgggggtatgactcggacttcattgatataaaccacacatggaaaacgaaccacatctatatgagaactttgctcagcgctcgggtgtttaaaagtatctaaaaataacagctccatcgccgagtccaccgccatgtttgccgcggatcccgggaattcc

SEQ ID NO: 452110 - DNA, 387 bp, Homo Sapiens
gggtcaggctggggacagagggtgtcatgcctgagaggcaggaaggtcacctgctcaagaagaggaagtggcctctgaagggctggcacaagagatactttgtgctcgaggacgggatcctacattatgcaacaacccggcaagacgtgagcccgggcagtggcttggggttgtgggaggagtctggccccagtatgccctgggcaggcatggggtatctggaatcgaccagagcagggtctgaatcccaggtccaccacttgctgaatgtgtgatctcgggcaagttacatccctgggccatagcttcctcacctctaatgggagagcaccatcccccaggtgcagagctgtcatggtaagggaggtcatacgtacaagatccacg

SEQ ID NO: 452111 - DNA, 1080 bp, Homo Sapiens
  misc_feature (1019)..(1028): n is a, c, g, or t
agcggtcccttccccgcgtcctccgcccgccctcggaagaccgagacagcggaggggttgctggtgagctgcgctgagcccaggagccgaggagtcgggagcgcagcgcagcccgagcccgagcccgagcggccccgcgtcccgagcgcatcggagcggccgagccgcccggcgcagcgcctgtcccgggcagcgcagccccggccgcaggatctcacccaaggtggcagaaggaggccttctggagctgacccacccccgacgaccatcagggtgaggcaactccaaggtcctactctctttctgtgcctgttacccaccccgtcctcctagggtgcccttgagccgcaaaactgctgtccacgtggaccgggggtgacatcgcacgtccatctgccaggacccctgcgtccaaattccgagacatggcgaccaacggcagcaaggtggccgacgggcagatctccaccgaggtcagcgaggcccctgtggccaatgacaagcccaaaaccttggtggtcaaggtgcagaagaaggcggcagacctccccgaccgggacacgtggaagcggccgcttcgacttcctcatgtcctgtgtgggctatgccatcggcctgggcaacgtctggaggttcccctctctctgcgggaaaaaatggtgggggtaagtgctggcccggggaccctcctggctgggtctggaccctgcaaaaaggatcctgcttaggcatttttctgggcgcaactggtaggagaaaagccccccctaaagactccagaggggagcacccgggccccattttccttgcgttccttggccccctttaatcaaaaagatttccctgaaaggggccaatttgtcccctctggtgtaactggattccccaacgaacactcccatccctatttcccccttgggcaaaaaaatgggggactcgtatttcccaccaataatggggccttttccccttggcgggcccccgccggtttttgcccctgttgtggccccccccggccnnnnnnnnnnacgcccgggcgttttccttaccccattcacccctcggttaattggggcggct

SEQ ID NO: 452112 - DNA, 1782 bp, Homo Sapiens
  misc_feature (41)..(41): n is a, c, g, or t
  misc_feature (183)..(192): n is a, c, g, or t
  misc_feature (646)..(646): n is a, c, g, or t
  misc_feature (1228)..(1244): n is a, c, g, or t
  misc_feature (1395)..(1513): n is a, c, g, or t
gggacgggtggtatggggataaagacgtggggggagtagtngcgtgtggcgtatcatcggttacaggtggaggagtcaaggtagattgccttctggggtttagacggcaggcgaattatttatatgatgaggagcgattcgtcgcaaaacgggcggtcggcgcgggggcggttattacggcannnnnnnnnntgggctctggtaatggaaaggcagcgtgacatatggttgatgacgcattataaatatcgtggaggtcgtcgggttatcacggaggggacaatttggccgatttgggggggatataggagtagtcgttgggtgtaatgcttttttaagaggtggtgtgattattgggggctgcggagataagtgtaagcggggattattgaggacgcgagcgctagcgcagaagggataggggatgtgttatagtggtcagagagtgggaagttatcggagatgagatggcgtaaggatggggggagatggaatatgggagggtggttgatagggtgagggatactggcggggagaatagacaaaaagaggtgcgagtggaaaaggcgattatggtaaagcgcgacaaaggagggagtcggattaacactgacgtagtaaatagaggggcgagagcggggttagngaaatgtggtgcaaaaggatggcgcgggtagaatgtgtattagcaggagcgcgggttctatatgattatttcgcgggcggtggagggatagaggcgtatcgtcgaaggggtaaaatgaagcggggcaagtagattgatatgttgatgggataaagggagaggcgaatgggtacgggagagtcgaaatataaagggcgggaagaggaaagatgggagatgtggaggataaaggataacggggcggtagggcgcggagggggaattgtaagcggatttgggaaagaggacacaggggaagaagggagggaaacgcgggcaaatgggtacgaaggagggtggtattgtagggtgattggcgagacggggctatggtatcggtttattgggtgtgtaatatgggaaggggtagaaagaaggaaggatttcaggtgtgctgaggcggtggataggggtaataacgtgcgtgtgtgcgattgtagcttggcgtggcggcacaattggtaaggagaaatcggcggggggagtggaatgggaaaatcggaggggtagggacaaaaggcgggaggaaggggaagacagtannnnnnnnnnnnnnnnntagaaaaaagagtggtaggtcgcgtggaggttaggggtggagtagaatgaaggctgttgggagggtggttagtgtcggaagggcggtgtagtgttagagggtgagtaagtaggtgggatggagggcgcgattaaagtgtgtcgggggtaannnnnnnnnnnnnnnnnnnnnnnnnnnnnnnnnnnnnnnnnnnnnnnnnnnnnnnnnnnnnnnnnnnnnnnnnnnnnnnnnnnnnnnnnnnnnnnnnnnnnnnnnnnnnnnnnnnnnnntttagacgggcgagggcagaggatggggggccaccccaagaagttcagctacaccctggcagggcccacccggccatggttgggtagagggagacctcccgctgcctgcgcgccagggagggtgcaggggctgggcgcgtgctcccgggtcacgactccgggaggtggaggtctccccggtgctgagtacatcccgggaattccggactcggtgccatcatgattattttttgttgtccggcgggtgggggaaagggaaaagagagaaa

SEQ ID NO: 452113 - DNA, 1087 bp, Homo Sapiens
gtgtgggtgtgtgcgcatttgggttaaagtgtgttatatttttgatatattttcggcggaaatggtggttttattggctatggcgtgagtcgtggtggtagcagtggcataggtaaatgagactatagggggtctttttagtcattagggagtagtggggcgcagataaccggggaagattttaagtcggaaagtggcgagtcctaaagggggtggttgatatgttattttattaccaaaccaggcttaggtaagaacttgaccacctggggcaaaaatttttccagcagtaagggcacagggccagtatttattaacacaaacaatgaaccattgaaacactcaacgcaaatgcaggaaaataaccagatggctattaccacttaacatgcttgacttttgtagtcactaaaaaacaaaatccgaccccatccctaaaaccaattctacttacattgtaattcaaacagatctagatttttcataaatatttaactttaaaaaaatagggctagattcaaaacttaatttttcactattatacaacatgaccagatctataaaattatgtaattgtaaagactgactcaaaaattttcttttaggagagaaaaagacacttactcaaagcttctctcaatgccacaatcatttcttctgggtatacatttctatcttcccagattttaaagattcgttctacagacttagagacagattgatccttcactagagcagctgcttcaggaagtacatcagcaaatgattcacggaatatgattgcatttttccttttacagttctgtatgacatcattggcaaggtaaaagagattcaaacggtggggatatgcagatctccggagccacttcatccaatgatagacgatagtactgtggtgttttttgttctctatacaccaagacgacaagccttgaatggactccatggtgttggttaccgactggaattttcgatccaacgaggactccagagcccctgccgaagaggccgacgaggaggaggccttactgctgcctccgccgccgccggccgccatcttcccgatcccgggaattccggacgc

SEQ ID NO: 452114 - DNA, 905 bp, Homo Sapiens
aggaggggccgaattacccgtggtttattttgtccccctcgccgatccaaagagacccctttgggcaagtttcccgtgggcaaatgttgggtttcacaatctttttggtgggggtgggaagagccaatttggtccaccattaggcggggcaaggattacctgggtttactgggatgaggaagggtagaaaataggctacttccttctcaagcatctttcttggttaccaacctcccttatctgcccttattattctgactccatccaaagatatctctgctacctggagagacttctctttcaaggtccaaagtttcagaggaacttagctgggtctcaggacaaacagtgatttcttctgcagaactctctggcataaggactaagcttctcttactggtcaaagcagcaacactttgtgaagcaggtacagagtttccctcttcagaagtttcttcaacaatcccttgggaagaattcaggctttcagcaatggctttcctcaagagctcctcttcttcctcctcctggctgttcacctccctagcttcctgctcactcattttgagagccagagcaaactgttcttcttctgtcatctgtgcgatttttcttttggccaaacactttgctctattcgactgttttgtcttcgttttctgcaacccattttcctcctttggttcctctccatcactatcggatatcacaatgaatgcatcctcaagtctacgcttcctcttcacactgacagaactggtagtttccacatccttcttctccaggttccgagattcggagacttctttaacttttttctttctccgtggcatccttttgttcgctggcgcaggccgctctgtagaccttctccgggttgccgggggtcgcgagccgccacacgt

SEQ ID NO: 452115 - DNA, 822 bp, Homo Sapiens
ccgagttcagcactccacgcagatggctaccgctccctcctgagcgctcgctcctctcgctcctctcccctcacccgccgccttccctgctgggtccctctccccggtctccacctctcctccctctcctggaagggaaaagtctgccaagctggggactgccacgaccaaaccaacaaaggccgaccgaaggcggagaacttgaaaagaacttgttttgttccaatattccaatggagacagttggaaaacctgtacttcagagaaaagaagttttccgtggaagttcatgacccacgcagggcttcagtgacaaggaggacgtttgggcacagcggcattgcagtgcacacgtggtatgcatgtccggcattgatcaagtccatctgggctatggccataagccaacaccagttctatctggacagaaagcagagtaagtccaaaatccatgcagcacgcagcctgagtgagatcgccatcgacctgaccgagacggggacgctgaacacctcaaaactggcccaaatggggtagcaagggggaagaatcttcagcgggcagcaagcgggcacccctgctgtctttcagggtctccagaaataaaaaagctccgaagccggcccaaaaaagaaattggggggctggccttgaaatccccgcgcagcaaaacttctgggcgggaaacccccgccccctcaaggactgggatggacacccgaaataaatttttgttctcccccccacacatctccccctaccaggggcaccattgtacgccaccgttaaaaataattcctcctcccgctctccacgcgccac

SEQ ID NO: 452116 - DNA, 1653 bp, Homo Sapiens
  misc_feature (411)..(411): n is a, c, g, or t
  misc_feature (1160)..(1187): n is a, c, g, or t
tcaaaaatgtctatgaaaatgaaaacccacacttttctgtacagataacattatttgatgtgacttttatattttactacacagaaacaaactgcagccctcagaggccctgcttccttgtcatgttttgcctgagcatgtgcaaagtctttcctttgcttaaagctgaaaaactacctttatgcattgttagctgacaagaaagatcaagcacaattagatgttgtaacttttcactgtacaagcattgcaatgattgtgagcttcagtgaatttatctttgtgaaaggtaaaaattggtctggaaagaatcaggagtagccataaattaaatcatgcaaaggaggatccatgcatcctaacaagttttctgctgcatctgcttccttcctgggctccacaatgttaaangcaatattttagaaaagggtacaattggaagcttttaaagcctgagtggtgagattttataactcacaacttagatctcttttaatgtgtaagccatattctatatgcatatttattatgcatcattgtaatttaagatatatttggatgtaggctgtataaatgcttttaattgttctgtgaatagatccttagctttagtttcacctgaatcttgtgcaaaacacagctaaataattgaattgtattatagacattatgaggtaattgatcttttaaatgtaaggagtaagattgatctataataatgtgctggggaaaacatttatagatatgtacatcatggttactttttgtcctttcaaatggactttttatttctatttatggagagactgtaactactgcttttaatgtctttttaaagcaagctatttaccagcttgaaaatatcatgcatttaaaatagaaactatctggggagtctaattactattgttcctatttgagccagttgtctttcagtaaagctatagaatctctcaaagaagtaaatagaaatactacttcttaaatgtcataggaagcatatccactttgtttctattagtactttaagatctataagaccttattactaaaaagtagaggaatataaagaattcatcaatttctgtatatgggctttaacctaattttccaggttatgcgacttataaagcactgtgaccaaacttccagagacagtnnnnnnnnnnnnnnnnnnnnnnnnnnnnggttttcccccttcaaaagtttttggcaggcctacgggggtacttttttcccaaatctcctcctctttcatatcgtggctattacctcccctccttttacctattaattttccctttataaagcccttcgaactattgtatattcgccctcccgtttggtttccccctcctcgggttaaagaaccaggctacctaacgtggagcccacataatctctgagtttacaaaacagttcccacaacgtgtggcaaggctccacccgtggggccaagtgtttcccttatctgtgaccaagaaccattcttaccgtggtggggcaagagccccatttcttgtcacagaaagacagcgggtcactgagaaacagcgattacagcgcctgattgtggccccccgcggaaatgtggtcccgtgacctctgggccaactttcataaacctctcagtttccccccaaggtttatatt

SEQ ID NO: 452117 - DNA, 461 bp, Homo Sapiens
  misc_feature (27)..(27): n is a, c, g, or t
gggggaaaccattttatgggatatgtncatccatgggttactttttgtcccttttccaaatgggactttttaatttcctattttatgggagagactgtaaactactgctttttaatgtcctttttaaaagcaagcctatttacccagccttgaaaatatcatgcatttaaaatagaatcctatcctggggagtctaattacctattgttccctatttgagcccagttgtctttcagtaaagcctatagaatctctcaaagaagtaaatagaaatactacttcttaaatgtcataggaagcatatcccactttgtttctattagtactttaagatctataagaccttattactaaaaagtagaggaatataaagaattcatcaatttctgtatatgggctttaacctaattttccaggttatgcgacttataaagcactgtgaccaaacttccagagacagt

SEQ ID NO: 452118 - DNA, 2102 bp, Homo Sapiens
catcggaacccaatggagcccaggccccttacctcgtcccagcttttcccctcccagccgcgacctcacccggaagagaatacgcagcccccggaactgcaccggaaggcctgcatgggccgcccttgtccgagggcttgcagccttacccagctttcccttttccttacttggatacttttatgaccgttttcctgcctgaccccgctgtctgtcctctgttgtcgccatcgtttttgccatgtccattcctgggggcgacagcctcttctgcgatatcaccctcaatgtcgtcagcaatgagtccaactctggacccacccccttcagtcaccagccaaaggagagaggaggaaaagtgggaggcacaaagcgaggggcacccgttcattacttcgagaagcagctcacccttgccgttaaacttacttcaggaagagatgcccagaccctctgaatctccagatcagatgagaaggaacacgtgcccacaaactgagtatcagtgtgttacaggcaacaatggcagtgagagcagtcctgctactactggtgcactgtccacggggtcacctcccagggagaatccatcccatcctactgccagcgctctgtccacaggatcgcctcccatgaagaatccatcccatcctactgccagcacactgtccatgggattgcctcccagcaggactccatcccatcctactgccactgttctgtccacggggtcacctcccagcgaatccccatccagaactggttcagcagcatcaggaagcagcgacagcagtatataccttactagtagtgtttattcttctaaaatctcccaaaatgggcagcaatctcaggacgtacagaaaaaagaaacatttcctaatgtcgccgaagagcccatctggagaatgatacggcagacacctgagcgcattctcatgacataccaggtacctgagagggttaaagaagttgtactaaaagaagacctggaaaagctagaaagtatgaggcagcagcagccccagttttctcatgggcaaaaggaggagctggctaaagtggtataattggattcaaagccagactgtccctcaagaaatcgacattcaagcctgtgtcacttgttgaaatgaagattcagctgatggtgcggccacatcctgtggtcaggttctgggtagaagacagctgtttgagtgactgtgaaggatgaaccttcatacccttttcaagacgtgttaacacggacagacctttttttagtccctggacttttaaatgaccatgaagttatcattgaatgttaagattttttcttcttgattttttaatacacgtaatctttttgaagcagacattgtatacagaatcttacttctctttgttcctgatatattaaaatggccagttaggctctttttgtagttgaattgtcttctaaagagattggatggcctctaaagaggtatgtgtatctttatttcagatgtcacccagagtaaattataattagaagtatagctagaatgagccccaaaccttagcctcatttattttgttctgttacataagtcattttccccttagagtgcttgaagaaatgccacctacaggttgtgtacttttcataatggtttccatgaatgtagtacgttcatacaggcttcattcaacctggcgttcccctccataattaagatgaaacattccggttttctcacaacacattagcacatactgtccattagcatatctgggataaccaggttttgggggttgagttttggccttcatccttgtagatccctttcctattgatttcccaccttccagtgaaattctgaaagtcttatcttaaaaatcgatccgcttaccatgggcctattcttgtaagtttcagttagcatttgcatgtgtaatattaaaatgaaagagcttcttacccagtgctgttgcccttttgagtatttttgtttttaaaataatgattgtaaaatgttttacaagtaatgtaaaagctagtatcattcttacatacttctgtgtttaaattttcattctttacaaaacagttaactctttcttttcaatcaatttat

SEQ ID NO: 452119 - DNA, 737 bp, Homo Sapiens
gggctgtagggccagatggtagctggaggaacgggcaggtaccagcgggggcacagaaggtcctggctcttgcccactgggtgagtggctggcacagcttccacatgctggctggtgaagagagtggagagaaggctggagaggtgttctcatagctggagcccacagacatggcgccggggctggttgggggagacagcaggtagcgcccaccattagccatcggtgacagtggagaggttgcggcaggcttcttgccagcagctccaggctcctctagcaccagtgagtccatgatctcttgcaggtccttctcaatagagctcaccagggaactgtggctggcacaggcagagggtccccgtgttgcagtctgtggggtgtggttcccatttaccagactttgtgattctgcaggaacagggctgtaggggggcccaggggctcggccccctgctggaatcatgcttttcatccacttggcttcagccgggtggttaaagcgaaggaaggtggactgacccaggcacaacatgcagccgccgaaaccggacctccggaccgctcgcccccgctagctcgggccctccaggtcccgggcccgcccggagcctttgagggggcgggccgacctcccgagctgccggctctaggctcggagcgagcagcgaggcagcgagcagccgccaatgcccggggaggggcgggccggccaccatcccgggaattccggaccg

SEQ ID NO: 452120 - DNA, 426 bp, Homo Sapiens
  misc_feature (18)..(18): n is a, c, g, or t
  misc_feature (402)..(402): n is a, c, g, or t
  misc_feature (413)..(413): n is a, c, g, or t
cttcctttttggggtccnggaagaaatctccctcctcccccctttggactttaaataactctggactttggatctcccttggggctttttcctcctttttcctatttccctttccccaaaactgaactacttaagcagtgtattgggtaataaactgtttttcctttcatctttcctgagttcattttctttagaactctcttttggctttattaatgaattgacttttgcttcctgcagtaatttagctttcagttctggcatgaatccactttcaaaacaattttatggagtaaatccaaatcagaactactaggaagatagggatttccagtggccatctcaatgatcatacagcccaaagcccagatatccacaggtctggctgaaactcacattccnagcggcaggcncacgcctcgtgcc

SEQ ID NO: 452121 - DNA, 1095 bp, Homo Sapiens
  misc_feature (738)..(738): n is a, c, g, or t
  misc_feature (882)..(958): n is a, c, g, or t
tggaccggtccggaattcccgggattgaaatttcaagaaggtgttacttttgtagaatggttttataatatgacaagaaattttaatatagtgtctaccctaaagggatggcttatttgcatctaccttttactgcatgtttttcacaaggcagtttattcatatattgacatattttggtagtagctgagaacctaagacttgaaattatacattgtgtagtattttttaagctaagcaatgcaattttggtcagatcttatttgtgtgaagataggctctgaaatcctatggtattgcgtttgtaacgttgatattaatgcaaaatagtttaggaaatggagtcttctgcaagggttctatatacttttcccacattgtatgagattttccaaaattttggtgtgaattgggcacttttggaaaactcctgaaaaagaattagtttccttcatctgcagacctttgtccaatacggttaccatttctttatagtaactcgattagccatatatgtttgtttctagtcctgctcctttgctcctctcctatgccttcccagtgctggctccattttgaagactcaaggacagaggggaagcagatcctaaagagaaaaaggagacagaagaaaggatgaaggaaggaggtcatgggggagtggtggcttctgagcagtttaatttgctgggggagagcagacagtcactgcctacaatacagacagaaccttcctgnttcactttctgtcctatctcttcctgaccttatgaaacagtggtaagtaaatgaattaaaactggacaagcaatggcttccctatttttcccaggactaaggtccggggcccttccgaatcccctagactggttggccttttannnnnnnnnnnnnnnnnnnnnnnnnnnnnnnnnnnnnnnnnnnnnnnnnnnnnnnnnnnnnnnnnnnnnnnnnnnnnctccttgcctgggaaacccccctcccctcccaaaagccactttttcccttctgcccaaaactcatttcttttcttggggcccacaggaaactctttctctctggaagcccctttgtggggaaatttccagggaaggg

SEQ ID NO: 452122 - DNA, 710 bp, Homo Sapiens
  misc_feature (442)..(484): n is a, c, g, or t
  misc_feature (534)..(534): n is a, c, g, or t
  misc_feature (586)..(586): n is a, c, g, or t
  misc_feature (591)..(591): n is a, c, g, or t
  misc_feature (660)..(660): n is a, c, g, or t
  misc_feature (676)..(676): n is a, c, g, or t
ggtcggattccctggactttaccccacttccaacaacttttctgcttttattttcaaatgtcaaattgtatttttgtgttttattttctcattgaagtgtaaaagtatcacatatatgaaggaatggctggtttagacatttactttggcatagtaaagattgatattgataccacccaccatcctttcctctagccccagaaagaaaagtttgacaactcaaaaacgattaaattatcttatcttgttatttaatagaacaatggaagctgtttcgtcaaaattaaaatactttaccaaaaaaatacttttttgtattttaatctgatagtgaatttggggattatttatgtaaatgtatcataattaatagtaattatgagttatttcactctctgtaatttgtgatacccaagattcatatttatttaatgtgaggtgnnnnnnnnnnnnnnnnnnnnnnnnnnnnnnnnnnnnnnnnnnnacagtgttgttaggatatcgcgggcatctcggccagtgggatcgctccanctgtaggaccagctgttctctcttagagtcagggccaggggggttttgcctncaggncgatggtgggataatccgccatattctggacctaccggaaatgcctggttttatggccaaaaaggaccnaagctggccaattccnaatgggtatttccggaggggcccaactttaaagg

SEQ ID NO: 452123 - DNA, 1287 bp, Homo Sapiens
  misc_feature (21)..(21): n is a, c, g, or t
  misc_feature (41)..(76): n is a, c, g, or t
ctggaccggtccggaattccncgggatgacaaatgccatgnnnnnnnnnnnnnnnnnnnnnnnnnnnnnnnnnnnngcaatagaaacccactacattccattgaactcatgccttcggttatgatctatttggtctttcagccttccagaaattgtctgtacaaggcaaaagtatatacttataaaagaaaggccagctgactaatgcaagtggggaaaagtaggtgcctgcaggggactgtttatagtaaaaatgcctatagtgcagtgcattgcttttgaaaggggatcatattctaaacaagaattggagatcttttttaagatacttgcatctctttctccctctgtccttctcagttcctgtgagggtatatggactttctggttctgcaggtgtttgttattgagggacacttcaattaagttttgggaacttgcccctgggcatgatgcttataaataccatggtaggggaatgcagggtggggcagattgggaggaacatggggaaggtggaaagcccttgagtgagaaaacgacaagcatctccttcttgacgccagtggaaatgccttaaggtggaggaaaggacttaagtcacaagtacatgagcacttgatttctatatagaatatttaattcagccagctgaattctctaggccattaatgacttctgttggtccttgctgtctccttgagacctgtgatagcgaaatagttcattagaattttctgcttgaaaattaagtagtttccttgctagctttggacagctgaaaaatcgggtggaatctatggaaaaaagattaaggcaagttgatttattactgattttgcaggactggatagacagttaaatcagtgcttctccaagtgattcatgggccacctgctgataaatcacctggcccactatttttaaaaagtgattcagggcccctatatcagacttctgaaccagaatctctggatgatcccaggaattggcagcatttgtggatttggaaatgattcttaggcacactgaagtttcaaaacagtcatttaaagtgtgcctattacctatagctgtcaaactccaggttaaacattttcttcctcttgaacctggaaactttttaaagctgtcatgataatttggcttcattctgaggtgtaagctcttaagatctaaattccatctaaattagttattttagatctgatcactgctgttactgcactcttgtcttcatctagatttaggattagactggctaagctgaattgttaatgctctttt

SEQ ID NO: 452124 - DNA, 1016 bp, Homo Sapiens
  misc_feature (211)..(285): n is a, c, g, or t
cccccggattccaaggttttttggcccctgcaataaaaaaaacagtgccggagggatggccacaaggactcccaaaagactccacgggacttccagggacactatgatttcttactttaccctgcaaggtctgggctacccttaaatggactgttcagctggaaaaacagcttttgtattccttattttagttttggttgcccagaaagtnnnnnnnnnnnnnnnnnnnnnnnnnnnnnnnnnnnnnnnnnnnnnnnnnnnnnnnnnnnnnnnnnnnnnnnnnnncgtctccattcaattcacacacacctgggtcgcgtgctgcttcactcaagatcttctcttcttataaatatagaaaagggatggagcttgttttcaagtaaaatcactgatccacgttttttgtccttcctgggacacacacatccttcttccctgccttgggcaagggccagtggcccgggctctgcttgttcttggagaggagacagcgggataaccacggagatgcgcgactcaccaagcagggaaggaaggagactgggcaggcttcaggagtggtggggttaccgcgcagggagcagagtgcaggggagaagaacctactggctgttcttggtgtcagtctccccttgcacgaggcccccgccagaggtgattaaatactgcttatttgatacactgtcccaccccctgctccctccagccactccccttccctcttctgggcactggggttggtgaaatctcaattcctttttttggttttatagtagcgaaagtttagaaacaggaaagcccacacactctttggacttgtcttctctacctaaacaaacggctcggcaagtaaggatctgaaacctgctctcctccctccgcccgtccctgctccccacccaagaaaacagaaacaaacccatcgtggctgtggaggctgctgcaggcacacactggtgtataatagagacgagtaaatatattatttcacttggcatggtactggcgatacc

SEQ ID NO: 452125 - DNA, 923 bp, Homo Sapiens
  misc_feature (593)..(593): n is a, c, g, or t
  misc_feature (606)..(606): n is a, c, g, or t
  misc_feature (862)..(862): n is a, c, g, or t
gcatgagctaccatgcctggcagaaattcaagatttggataaacttacttctttgccaagcctgttcttcaagttattcagaactgggtgtataccttgtcctcatatgtatcttgtccctgctgtcttttaggttagcaaggtgtatgaatacttttaagttttgtttgttcttttcctcgtggtatcagtgaaatactgatctattctctggctagggtcaatttacaaaattgccatggaactgagcaaaaggcccacgtgggataaaaatcactcaccatcgacgccaccagtatttttcaagttatggcttttgaagtataacaaatttcagtaaacaaaatcaaaagaaaaaattcctctgcgtacaacaaagaagcacctgttatattttgaatgcattcttcatgttgccagctttctaaacttgtttttttgatgcctcaacagacagaagtgaaaattatatgccactcttaagtacatccaggttctcctgtacatattcccaatatggaatgctggctagcaatcatggcactctctcagaaaccagccactggaagttaaaacttctggatttcaaaagntagtacaggctgntaaatttaacaaaggaacaaaccttcataaatggtacaaactacctgcccaacacactcttctattttccagaccctttaatattgagtagtctagtcttggattgactatggtgggttaggtctaatctaagtatcttaatagctatctagggataatgaataaaattaaatacaactggtacctcaagtatcataagagaataaatttatgaagacaagcagaccaaagcaactcaagattttgtacacctgantactgtagctgtaacttcaaataatggttacctagaaacttattagtacgaaatcgcagga

SEQ ID NO: 452126 - DNA, 1106 bp, Homo Sapiens
cggtccggaattcccgggatgcctgcgggactggagcagagcgggctgcgagggtcttcccagcgtaggcgggttttccagtgttacttgcggctgggcgtggtttactcgctgcctttctggcagcaggcaggaagccgcaaaaagtttctgagcccccgaacctgtagcggacgtggaaaaagaacgcccctcctcaagtgtctggctgaaagatgccacccagggaagggaactcgggctagctaaggaggccattcttgatgttgcttctagatctcatgtcatcaccgagccctcagctgctggtggtagctgctcagcagacccttggcatgggaaagagacggagtccaccccaagccatctgccttcacttagctggagaggtgctggctgtggcccggggactgaagccagctgtgctctatgattgcaactgtgcaggggcatcagagctccagagctatctggaggagctgaaggggcttggcttcctgacttttggacttcacatccttgagattggagaaaacagcctgattgtcagtcctgagcatgtatgtcagcacttggagcaggtgctgcttggtaccatagcctttgtggatgtttccagctgccagcgtcacccttctgtctgctccctggaccagcttcaggacttgaaggccctcgtggctgagatcatcacacatttgcaggggctgcagagggacttatctctagcagtctcctacagcaggctccatttcctcagactgggatctgtgtactgtattttgggatcctcctgggctatcctgttccctatacctttcacctgcacccgggaagatgaccactgccttagctctgactccacttacgagtattcccttgcccgggatctcatggttgtttaggcaaccccccaatcccggctccattcttttaagggcccccaaaagtttggttccccaggctggagggacatttaaaaaaccctggggacaaggactccaaaacccgatttaggacttccgaaggaattttggtggaatccaggattccccctttggaaaattcccccttgtccggtttgggccccccccgaattttaattg

SEQ ID NO: 452127 - DNA, 1598 bp, Homo Sapiens
  misc_feature (35)..(35): n is a, c, g, or t
  misc_feature (119)..(119): n is a, c, g, or t
aggagcggcgcgaaagtcacagggaggtgagtagnagatgtcagaggtgccgagcgtgtataatactcagaatctggacgctcgacacgtaagctcgcgtgtgtgtgcatgtaggcgcnaggtaccgcacatgatagcgcgcggaggaacagtgtgttgtgatagtgacaataatacgcatgacgaagtactatgtccgaggtagaagtgtcccacagggtggggcgggcgcgccgtaatttgcggagactaggaggtgaccttcgcgcatcgggaggctccccgttgtaggatgaaaatgatagccgcgatcgagaggaagcgcttgcgagggggcggtgccaatttaggcgaatttcggtgtcccacagaacggcttcgcggtgttacacccgcccacgggcgcggttgtttggttattcgggtgaggagaatctcaaagggcatttgggtccagtggtccaaggtgttttcgttaggggagaggagggttgaaggagccgaggtggcaattttacctaacccggggccctaccactcccaaaacgaaaggggttaggaaaactttctttaggggccagagggcggcccgaccaaggatgtttatatctcattagagcaagtgggggacggggggaccatggccagtggtcatttgggtagggtaatttttgaataccaacattattggaggcaatcaataagctgatgtacagggtaagctgatatttttattaaagtctcaaatgagtgaagacttaagggtaaaaattgtacccatgtaagtactagaagaaagcatgaataaattcttacataatttgcggtgtgggaaaaaaattttttcgcaatgacttaaaatccagatgcaaagtaaaaaaaattaataaatttggcttcataaaatcagtaaaatttgagagggggcaagatggccaattaggaacagttgtggtctgcagctcctagtgagaccaatgcagaaggcaggtgatttctgcatttccaactgaggtacctggttcatctcactgggactggttagacagtgggtgtagcccacggagggtgagcagaagcagggtggggtgttgcctcacccggtaagtgcaaggggttagggaactacctcccctagccaagggaagccttgagggactgtgctacccagcccagaaactacgctttttccacggtcttcgcaacccacagaccaggagattccctcaggtgcctacaccaccaggggcccgggtttcaaccacaaaactaggtggccgtttggccagacatcgagctagctgcaggaattttttttcgtactgcctggaatgccagcgagacagaacccttcactctcctggaaagggggctgatgccagggagccaaatggtcttgctcagcggatcccacccctatggagtctagcaagctaagatccactggcttgaaattttcaccgccagcatagcagtctgaggtcgacctgggatgctggagcttggtggggggaggggcgtccaccattaatgaggtttgagtagtctgttttcccctcaccagtgtaaacaaaatcccgggaattccggaccggtcc

SEQ ID NO: 452128 - DNA, 1119 bp, Homo Sapiens
aaagaggggttttggccagtcccccggcccagccggggaaaagggggatattcccccctggcggggttttaagttttattgaaggggtgccaggcaaagccccagttcatttcggtggccctaggggtttttcctttccctttcaggggtccagttctactaagtccttggctcgattcatttcccccctccatacttgcctcggtccgggagggggaaggcatttctctagcacttcagaggagtgggcctagcaccaggagtgctagtgtccgttgtccatccgctgagggtcatttacccaccgctctagtacactatctggagtttttttcactagtcgctgtttctctgttgtattggtcactggatgagtagtcatgtcaaatagcaggaaattctgcttctcagtggttagaatacctttctctactaggttctttgcgatgcgctctcgtacattttttcagctggtactgtaatttgagggggttcccaggtctcaccagtgagtagctctatccatgtttggacagtttctgtgggttcagttgctttgatgtgtttcagagtttcatccagtaaaacatcacctgttgggctgtctgactttagcagtacctttctgtctagtagtcgcttcttacgcatggtcgggggttccagatagattcgaccccgcatggccagctctatcaggatgccccctcgcaggcctgatgatatgcagtcattccagaaagatgtgtacccctctttatcttttagtcccagaagcaatacttcttccataagagtaaggcggatatccttagagtctccagaatcttcattgtctggacttttctcccaattactgtcttcctcactttccatcttcttttcagagttcttgcttatttcagtgcgacgggcccggtgagttaaagtggtcattctcacctgtttctgatgttactcctgggttatggctggacgcaggctgtagcttgtgctgtattttagaaggacacctgttctccccaccccacccccgtcctagtaggtgaaaaacttagccacgcagagagcacaaacttcctgatccttcgatgcagagaaggaataacacatcccgct

SEQ ID NO: 452129 - DNA, 1690 bp, Homo Sapiens
  misc_feature (361)..(395): n is a, c, g, or t
  misc_feature (823)..(901): n is a, c, g, or t
ctgttcaaagcattttatttcgcacaaatcaattcagtaatcccaagtgggtgggacctggataggcatctaaactgtatcttttgcggactgcttttttctttttaaaatattgtggtgataaacagagaagatattgcacctgctagttatgttcccttcctcctccctctacttctcttatttgaaactggaattcaatttcagaagggaaattttgtgcactaaacagaagcggacctgagcagccacagcaaaactctcacatgcccctcctcctctggctgccttctgttggaaaagccactcctctttgatcttaaatcactttaaatcttccataaaagcttctttatctatnnnnnnnnnnnnnnnnnnnnnnnnnnnnnnnnnnnaacctgagatatataggggacagagaagagttgagtggttcatgacactcttcctttccccttatacgtcggttacttggacatggctcaacttgggagaaagagggacaagtataagggttcatggaggtactaagagcttgcttggccactcaccagggaatctcctccccaaaggattaagggtctgacaagacatgaggctctccttcaaaacagtctgttgactacagattacaacatttatgtgtgagctatataaaaagggaggcatgtgtgcatgtgtatgagaacacacttctaccaatcttcatccaacccttggtttcctctcaattctagtgggattttctaggcccagggcctaaagttaatctttgattattttatctaaggtaattcccaacaacacaatcactgtcgctggnnnnnnnnnnnnnnnnnnnnnnnnnnnnnnnnnnnnnnnnnnnnnnnnnnnnnnnnnnnnnnnnnnnnnnnnnnnnnnntgcctggcatatagtcgagctccgtaaaggttagctattattagtggtccattgcatggagtaggctgataagtacactgtaggtttgccccgaagtttctgcgggtaacggaccaaaagctaggaaaagaaggtcagagtaaagaacaccttttctcttaagagaatatttctgattgatgactactgtttcagagtagtaattcttgtttgtattagtagaggtgggagtgaaagtttcacacaggggaaacaatagacactaagtactttggaggcttccagcagcaaacctcgggttccagaacacgggtgaaggccagtctttcatgattactgcgtgcgcggcttttcctaggggtttctgaaacaatctagaaaaaggagagatatcacctgaacaatcaaatggacacaggaggtcttaaaagggtggaggagtgagtaccttgcttagaaatttcactcataaactgaccgcacaggaaaggcccacctggggcaagagcatcttactccctaggtaaatctgcccttaatgtgcacacatatggttgaagaaaatggaagaaaggcccttggcttgtgccccctctctcagaacccccagtaacctttgaccagaaagagccaggaaaaaaagggaaatccgttccccttgaaggcctggaaacttgctccagggccccgggcaataaacaaattggcctccccctaaaaattccggggaatttattttttgggaaagaaaaaaaggggctggggggcccccttgtttttcccccagca

SEQ ID NO: 452130 - DNA, 1123 bp, Homo Sapiens
  misc_feature (163)..(163): n is a, c, g, or t
ctggacccccccttttagggtttaaaacctgatccccatggaaaatggccaaaataaagttcaggctggattatacccaaggagagggttttgggcaaaaagacttagggtatgaatggccgggtttaagaatacccaggggtgatttcggaatatgggtatncccaattccttattgggttatttcagacttaaaaaattcatttgtgctcttaaagattttgattcagtttgggtaaaagccagcaatgtctgtctgatgtttcaggcattttccaggaggacaaataactgggacaactgaggctatgacttagtggcataaagttggtttcaaggctaaaagtttggcttgtccaaataaaggcccaatagtccctcaactctcagagcaatcacagtgatggtgtaaagagcctctttgaatgcgtgattgcatacctagtgaccatacaatcagagatctggtcataatgaaacactttatacagacaggaatagacaagggatttctgacacactcatgctttggatgtgtcagtacaagacagtatgtgagactgtgattctgccaggcagaggggaacgggcatgatttatctgctggcaaataagtctccactatacctaatcattcttttatctaagtgcatcatgatcttcttagtcctggacgtcaaaatagtcaattattggctccttggttattttctgtaaattactgctcccaggattcttgtctgactgatgtctgtgaatgaggaatcggtggtggaaggccgtgcctgcatttccctttcaagcacacctgtcagcgtggtaggaggacaaacggacttccccctgatggcagtgaccaccacattgcgcttcggttcactgtccatagctcacgctctccaggccataaacttgggccaagtcatggatgatccggcggtggtctctgttcatgggagggaagctgtggcttttcttactattctttcccttattcacggcctccacgagggtttccatttccttctcaacgtcactgacaaactttaagtccttcctggcatcttctttcaaactatcactgaattttgaccctgaagaacgtatattgaaaggatcagaa

SEQ ID NO: 452131 - DNA, 1100 bp, Homo Sapiens
  misc_feature (33)..(33): n is a, c, g, or t
  misc_feature (293)..(301): n is a, c, g, or t
  misc_feature (305)..(398): n is a, c, g, or t
tcatatgtgtgaggggaggttattccgcgtaanattggtaccgcgcgttactctcctttctgcacgcatgcgtcgctacgtagccgtcccccccgtctatcgttcagggaacctggtgatggctatggcggtccgcatctgatgtgcgttgcgtcctgtggcgcgaaagtggtatagtagtgtggttcgcggttgatctccacccgtgagctaaaggagggatgtcggtttctcgcagcggaggtccggaatcgggcccccgcctggcccctgtttttagcgtccaccaaatnnnnnnnnntttnnnnnnnnnnnnnnnnnnnnnnnnnnnnnnnnnnnnnnnnnnnnnnnnnnnnnnnnnnnnnnnnnnnnnnnnnnnnnnnnnnnnnnnnnnnnnncatgggttaggtgagaaatgaagagtgaggtatacaagagcatccagaaccatactatatacattccagctgttttggtgtagaagcagcacaaatgtagaagctgcattgtttcttgataaaagggtcctggaaagatgaccagctatacagtttccactagaggaaatgcagattggcttgtacgactttagagtatgaaatataaagatctggagtctgttccatgttttttcaggactggtgtgactatattatggataacgaaggaaaggagcctcctttgaaagaagcatctaaattagggatgggctcctcatttggaggatgttagaaactacgaatcaatgtctctcatgttcaatggagctcccatttttatcggtttcatgagactattattaatttatttgaatccaagatgagtctcaaatatacccagaagaaaaaaaattaagaaatgaaaccaagactcctaatgctttgaatgttcgtaacattcgagaaaaatttgagcctgggctatataatcaaagtctaggatttgtgaacctaacagggttccactgtcacctgttttcaagagagtgctgagaaaaattccaatctataccttaaacaattaggttaaatgatttaaagaaattagccttcagaggactgaatttttaatgatttttcatccgcgggaattccggaccc

SEQ ID NO: 452132 - DNA, 280 bp, Homo Sapiens
ctggcttcttccttcctcagcttgcagatggactatagtgggactttgcctgatgatcctgtcagccagttctccctaatatactccctttcaatatatacatatatcctgttagttctggccctctggagaaccctgtgacacagtgaccggtccctgcagcggactggatagttgtatcagagtccgtgctgtggacaatcccggaactcctgtcacgccagtttacatttaggcctcgtgccgaattcgccacccaggcctcgtacctagccgtaat

SEQ ID NO: 452133 - DNA, 1942 bp, Homo Sapiens
  misc_feature (90)..(113): n is a, c, g, or t
  misc_feature (220)..(220): n is a, c, g, or t
  misc_feature (498)..(569): n is a, c, g, or t
tgttcttatgtcgactggctgcggtaatatattatgggggggagcgtgtatcctcgttcactccccacgccggcgagtgggccggatatnnnnnnnnnnnnnnnnnnnnnnnnaaagactagcacgacgtggtgcgggcggtatagggggggagatcatatcgcggtggcgacgaggggcgttatttatattgtggttggtggacgaaaagagaggatanatgggtggggtaacgcacgggcgtataacggcagacgcgaccgtggcgggtaatgtgggcgcagagaagcgggcgcgtgtggggacgcaaacggtggggaacgtggcgcggaggcgcggagcgcataagacgtttgtgcatccgggccgtattcggatggcaggtgggggttgtctagcgccacgcggcggcttttaggggcggctgggtgttcggctactaggggaggagcgcggttgtcatgggtgttgtatcgcgcctttacttcccaggccgannnnnnnnnnnnnnnnnnnnnnnnnnnnnnnnnnnnnnnnnnnnnnnnnnnnnnnnnnnnnnnnnnnnnnnncatagcctctcgctcggcggtccggtagtcaggtgagaaaatctgggaagggaaaatcaggcgccggtatcggttggccctacggcaggtcccaggagcgcaccatatggtccaggccccctgtccgcggtttggtgccatcatgggagatgtgtatgcagctgaccccatctgtgtggccctggaactgcctgaccagggtctggttgtgcaggtcccagacagcaatgttcccatcgctgcagcaggagaagcagactttggcgtcagggctaatggccagggcataacaggcgggagccgaggacgtcagctcggccttgatgcggggcgtgggcgaggccaggtcccagatggtgagcgtgctggcctcgccgcccacgatgagcgtgcgcccatcagggagcagcttgcaggagcggatgtaattgtccctgttcaggcagtccagctgggagatggggctcttgctgcctggctggctggatgtcccagatttttcaggcagcccttgcccacctgtgtagacgtgcctcgtggggttgctgatggttcacggcacacaccaccttccccgtggctgagtgtgttgatctgccgggcgtgcctcgggatgccggggcctgccagggcgtcgtgggggaagggcacgggctgcatctgcccatcagcactcacatggaatgagtacgctggttttcctccaggaatggaggccaggcttgaggggaggcctgtggcccgcatcggggggtgagggtcaaaaccaaccattggcgatcggccataggcagcggctgcagcagcggcggcggcgctcatctggggtgggatgttgtggaggccggcgtaggcgccaggactggtgagggagccgttcatctcatggtggctcatcatggcgaagggcgccgcataggagctggtgatggagatgggcgtgcgcagagccgaggctatcgggtccatgcccggaggtttacccggcatcgacctgagccctggggtcgtgctggtgcctggagttggggcgtcgttccttggggttggtgtgttggacttgagcccaggggtggaggatttgtcgttatgaccaaggtctttggtcttggaggaaggtgtgctactggaagaggccaccgaggcagggctggtgggggcatcttttttcaggctacgggccttgtccagcccattttcaggaggggagtgtgccgggctgacccggggcgttgcggggtcctcattggaaacatccaccaccagatcatcactcttgtccccatcactgtcgtatcggctcaagctgtccttctcctccgccttcccctcgtcggaattcgccacccaggcctcgctacctaggaccgtat

SEQ ID NO: 452134 - DNA, 1068 bp, Homo Sapiens
  misc_feature (46)..(102): n is a, c, g, or t
aaattttgggcaggggacgccgcccggaatcgagggcaagccttcnnnnnnnnnnnnnnnnnnnnnnnnnnnnnnnnnnnnnnnnnnnnnnnnnnnnnnnnntgtcggagagcgggtggttcaaggtccacccaagaaaggcccaagttcttcggattcgcaagtgctactgaaggctccggttagaggcacggggttttccgcctgtgggagggccacggacggaaattcggtttttcttccaaagggatttcgaaaaaaattctcctttaggccccaagccccccggactggaagccccccttaattcttccgggtaagtcccgggagggggtgccatccttggcctttcccagctccatagagccaagttttgtgaactcgctgtggttcagtccccggggagcatatccagttcacggactttcactaccacgtccatggggtggtccatcttcaacttctgagcacagagtgattccggatgaattatacaacagatggacttcagttccgcacccttgcagaacgtcgccaccctggacttcagttttgtgacaagcccgttattggcatccaccatcgctggggtgccagtggaggccacgcttactaatctcgaccagttgatacagaactttttcaggctcttctcaacacgcaaaaagatctcgttgccagattttgtacccgtcatgggcaccgtgtccagaagttcttcggacacatcgaaattctcatcgacaccacggatgaatatggccaactgggtggtattatttatatccgtgatctcatcgattgcgatagaatatgccacaaaagacctgattttttcacgtaacttctcccataagttcccagctaggtcctctacaggctgcacgggggatttctgggttggacttgggtttgcaaacacttgtttttgctcgggacactcggtgtctgacgagcctaagagatacttcctgagcccttttttcagctcgtgaagcttctcgtcacgcattctttccgtatactggtcataatgcttgctgtgattgatccccgggaattccggac

SEQ ID NO: 452135 - DNA, 822 bp, Homo Sapiens
  misc_feature (515)..(525): n is a, c, g, or t
aatttcagcagggatctgtaaactattctttacctgtacatacagagatccaaggagaaacaatccaatcatttgcatacccagaaaaaatgagaacactgtttttgtagatgcatgtatcacacttattttgcatgtagtttaattggattgccaattttgttctttagaatttgggctctacaaaggttacatcctattaaaaaggctcaatatttacctgttcaagactacttttacatgtaattataacttgccataaatgaaaatctaagaagctcttgagtatggttatgacttttattaatcatatctgctgttattcccaaacttctcaatgttacatgaatactaacccttgttttatataaaatatgactaaagtaaatttacctacaggtgcctctctccttcattggtgattaaaatttcacgcccgagactaaacttcatgaaactactgcaagcatgtgtatgatagacccattagcttagtatctggcattgtggccagnnnnnnnnnnntcgttacctacaaaatctcttgggcaacacttaagccatggaagagcccacatgaatccaggtctactttcctttacaggtagattccagaacaacaacaaaaaatgtaagactacaagaaatgatttaatatgataaaactcccatttcaaaacccagttctaaaggatttactgactaatgctgattatttagtcatggaaaatgtctctcataaaagtgctcctaacaaaacatgatctacataatttataaaatgtgaagggttggaccttttatgagagtctccgtcgaact

SEQ ID NO: 452136 - DNA, 1067 bp, Homo Sapiens
  misc_feature (34)..(34): n is a, c, g, or t
  misc_feature (154)..(154): n is a, c, g, or t
  misc_feature (1013)..(1013): n is a, c, g, or t
gccttttttcaaatggcacccccgtgatctgggntatggggccaaattgtgggatccaccttttcgggtggggatttcctctccggggttgggatgtgtttccccttggggcggttgggagaattggggagaattgctttctgggtgtggaccncaagtagggggtcgtggaacaaatttttttggggctggccagttttggagcttggggggtatagtccaggctcaggggactgactccatggtcattaaagctctcggagtttcactttgcccatctgataaatgaatctgagctttggagttgtacagattggggtggaaatactagctttgtgtttccacctgtatgaccttgggcaagtcaccagagcgtcagtttcctcatctctaagatggagataagagtaacaatgcctgtctcaaggcatcatgaggatgaaatgggaggggacaaaatacagcatggtccctggctcatggtacacacctggtgtttggagctgggcgggggcaggggaccaatgagcaatgagggtccttcagacagtccaagattccatccttattaagcacctaccctgtgtccacaggggactggacagaggaataggaagacacataaaacaagaggcaatttctgccttcctcagaaccgacccactcagcaagggtttaagcccagaacaacacgtagcggtccagagagtgacttgattcctacacgtgggcagcggcgaggcccaagatcaggaaggagtgggtccccaggatgagtggaacttgaaagccctgaaagaaaggatttggctctgttggggaggagggatcccacagctcctggggcattggtctctcaacacgaggcatgtggcagcctctcttgagggggaggtttttgaacccagcacctggcacggttaggcacttgggagaggcatgcccaggttgctgtgtgcataaacagctggacagaggagctccaggtggggccagcaaggagcccaccttcnctggtgctgaagctgtgtcagagaaaggaaggagatcccgggaattccggaccc

SEQ ID NO: 452137 - DNA, 254 bp, Homo Sapiens
ggaatcactgaacctagtagttcttagacagcttggtttgagaatccttttgcggttaaaaattagggactgagccaggcgcagtagcatgcgcctgtagtcctagccacattggaggctgaggtaggaggatcccttgagtccacaagtttgagttcagccagaggccctatctcactatatatatgtatctcaaagacttcaatgggtttttgcttacatgggccagtaattgttgaacaaccagctatttg

SEQ ID NO: 452138 - DNA, 802 bp, Homo Sapiens
acttcacagcaagatttattaatacatccaaaagaaagaaagaaaaatgattttgtcacactatatacagataatacatacagtgtttcatacacatattacatcagtttttacacaagaaaaatatacataaaaatgtaaacttttgtatacaaaaacccttaaacaaattaaacaaggtccagataacaaaaggagaccaattcattattatttcatcaaatttttaaaacagtaatacagtacattcattgagatatatatggaaaatgtgagccatctcttcttgtttaaagggaaatttcaaaccaaaagtcaatcgcctcccaagacgtggtcctcccagcaatgccgcacccaatggccacaagtatgcctgtccaccagaactgggggctcttaccaaaacctgcccatctcctcatcttgctcctacagtctgtgcagaaacaagtggctcctaacttttgtgcatataattaaactcccagccactatgaacacaaatacagaggagagattgtcagtttgtaagttccctttaagcggcttttatatttttgtatttatttttaatgcatggcctgttaaacatacttgggtgccaaggtgaatgagaacactgaaaaagaagggctttgagaaccgctagtccttgctgccgtgcagtttctttgttagaagagattttaaaactgtccaacctgtctcatttgctggtttcaaataagctacctcacctttgatttcccactgcaacttggtttcaacttacacttcagtacctcggccgcgaccacgc

SEQ ID NO: 452139 - DNA, 1356 bp, Homo Sapiens
  misc_feature (338)..(338): n is a, c, g, or t
gtgtgtattaccaagtgatctttgaactggtcccagctgttaaacacactgttgcagacctggcattcgtagagcttcttccttcctttttttgcccctactccagtttggcatgcagtgaggtgacatttcagagtgctatttctagcaaatcgttcatgacaatttggacattcaaaaggtttttcacctgtatgttttcgaagatgttctttaaaatgtccaaaatggtcaaactgtttctcacagtactgacatacatgaatttttttcccagttctttgcttcttactgactccaccttcttcaaggtgggtaacaaatttaggtgctgtttnccatgcggctctctcgaagatatcgtttattgcaatatttcacacttgaaactctcagtggagtgtgatttcatgtgctcctgtttgctcgtggggtcagatggacagccatcttctttaatctgcccttttctgtcaccttgacggtacttgctggtaatatctgccaacagtgctagagcagaatcatcagaggaacctgtgctctgtatgtactttacggactgcttggcagaagccacttcctctaatgtttcgatgccttcatcttccacttcaagtggcttcggcaatctctacctcaatttcaacaggttctgattctgcagatggcaatgactcagtgataacatttgaagtttctgcaatcttcctttttttggcctcattttttcctgtggtattttcctctaagggagctgagttttctttgttcctgacttcaagggctttgatagcttctagcatttgtagaaactctgctgctttccatacatcattggcttcttcttctccttgtatcattaattttgctgtatatgtgaactcaattaaatggcgaaaggccattttactaacaccttctatctccaccaatggttcttgggtaaactcctgaaagaatttgtagaagaacttactacaagcagccaaaacagccttgtgagccttaaaatggtgtccgtcgacaattagggtgatgtcagtaaaccggtcctgctctcgctgttcattcaatcggtcgaggatcattttatgatgttcagggaactcctgaaggcattccatcgtctcttcagcctccatggccgtcgggctgctctaattggagtcgggagacgcgagctagagcggggtgggcacagcgccggaggttccgagcgccagggcgcgcaagtccaacaagggaggggactcgacagccgtggcggtcctctaacggcccgccaagcccttctgcccggccggggctcccaccgccccgggacccggtccggcccgcgacatcccgggaatt

SEQ ID NO: 452140 - DNA, 1072 bp, Homo Sapiens
  misc_feature (758)..(758): n is a, c, g, or t
  misc_feature (782)..(782): n is a, c, g, or t
  misc_feature (992)..(993): n is a, c, g, or t
  misc_feature (1016)..(1016): n is a, c, g, or t
  misc_feature (1034)..(1034): n is a, c, g, or t
gtgaagggcattgccaaagtggaatcagtaaggcttggcagttgaccttgtttgttggagagaagggataagattttaaagctacatgtctgaaagaatgatgctgctgattgaaataaaggaagaaaggatgcatttcgggctccaacctgtcctaggaaggcctagacctcaaacaccaacacctccatgcatttcctctttggctactatgtcttttccctgacttctgcctctccagctctctgggctgctgcttccacctgttcatctgacttagaccctccctgctgggtccttgttcacctactcatttggtgcttcgtctgccatcagtacctccattggcagctgggtggggatgtcagtcaccatctcttatatttgcttcccactagaaagatcaagagaagttatttctttcccttgcgctccaatttttctctagacagttggtatccacaattttaaaaaatgttccatgttgtataaacaagcattcgctgagaggggctgttaatacacatcgtgccccttttataaaaattcatgcatggaatcctacattattatgcatcaaaatctccagaaatgtcttaggatttttgcagggagaatattaaatgcattgttttgctttgttttgaagagactagatgtgcagaggaagagaggtggcatggtgggagggtacatttgagttgtcaacagtctctgcagtgtcaggtcaattacatcagcacttggactggaccagngaaaggaatgattctgcttcctgngaatgtcagaaggacctgatgattatatttggcaaagccaggaggagtggctttgaatgtcattgctaagaattacactttgagtagcatttctggatgtctgagcttttcaatgatacttcttttctgctgtggctttcctttctgttggactgggttcccagaggggtcctcttggtttgtcctttgcccctcgctttttatatcagnntcatgggttttctcctttcgggncatctttcccttcccaancggctggttttcttccaacccccttcctggcctgcaac

SEQ ID NO: 452141 - DNA, 1363 bp, Homo Sapiens
  misc_feature (1149)..(1150): n is a, c, g, or t
  misc_feature (1191)..(1191): n is a, c, g, or t
cccagggaaaaaggtaaaaccatttcactttcaaaggcataaaccaaacggaaaagttggggcatgcttaacttaagtttctggagcaaataaaccgttccaagatattttaaaagataagaaatccaatttttcatctagataaaggggtatcctcttcattgttgcaaaatggccactaacattttccatttcaattttagttcacattatgcccaaagtttgcatgttcatcagtggatgcattaggtaacaaaaatatgttcacagtttattatagtgtatggaagttaagtggcttctaaaggaagccaagatctatgactcaaaaaccagctcaacagcaaaacaccaaatgacccttttaaaggtaccaatattcaaatgctctaataaatacatatataacaaaagtgaaataagtaactatagtgagatgaggttcttccaaaaaactctctagtcttgtcaagcattctaggagtctgagccaaagcaacagcgccattttgttcattcctccccctgacccacggacacttcctttgagccacctctatacccagctaactctggtattccctctagggaaggttttttatcagccctgggactcgccagtgcctcagtaaaccgacggactatgttacaaagttaagttgtacaacgtgctgaatggctggaaagatgtagtacctttgttaatccctggataaggaacaaatgcccgtgcctgaactggcctaaggggaggtttgcccagccctgcagcccattgactgcccacatccagcaggattggaaagataccttgaaaagcttagcagtgccggatacaggataaatacaactcacagggccttacataagtgtcactgaaaataaacaacatagagttattttcctgaaacttggttttggtagaaaggtacgaaaataacttttcattgtccacaaaaacttcctcctcttgactttgtctgccctgagccttcttagcccctggaattgtaatggctaggtcagcacagcccagtgccaatgccagccaacaccagccgccacggacagcttctcttcaccctgtttcatgtcaaggatgattttaatatcgaggttactcacttttcaacattttcactgcacaanncttaaagctatacttgcacccctaaaaggtgaatatctacncaattcttctgtccttgtatcagaagagaggcagagaagctgaaaatgggtagcaatgcttccagggacaagttaaaggaatgcattgtaagaagaccctggaagccatagaagtttagcaaacacctaaaacagaccgtagacattcataggaaatgtcattctaataccc

SEQ ID NO: 452142 - DNA, 771 bp, Homo Sapiens
ttttgtccgtaggtgtgggaaagtgaaatatccattacttataatccacttgcttgttttgaagggctaccctgaggagttgactgtgactcctttcagacatgcttacatgacaaaagtcattacaactggagcaagaggtggccaggcagccagttaagaaacaacaggggagctggtcagggaaaggcccctgtgcccgagctccctggggtcatgttgagattgatcagcagcaggacacaaaagatggatttcacaaccacaccttttacttataaaacaaaacagagagcaaaggagcaaaataatcttccccgggggaagaaattcaatttggcctgaatatcactgtatcctcactaggcggatggagttggcagccttgtacgaggttctgctagggaataatgcaaatacttccccttggcatggccttgcaccctattcagatgaaactaggtaaacttcctgcctttggaggcagacttctgaatgttctcagttcctgctagcaaagcttgactggtaaaaattagaaaaaataatctcattctgaaaactgacatcaaatgtctatggggaagaagtcggtgctgacagttccatggaaatatttacttggttcaaccacttgcaaacacctgtccacaattagactcttcttctctggctgtttttcattgttgattggaaagcacaaggaaaagcctggaaggcaaatgctgcccccatttaaaagtaggagactgggccaagtgtggtggttca

SEQ ID NO: 452143 - DNA, 1036 bp, Homo Sapiens
  misc_feature (43)..(57): n is a, c, g, or t
tttttggggcccccggggatgggcggttcccccccaccatttnnnnnnnnnnnnnnnaagtcttctgctgtgttccagaaggttgggtccctccaccatttccggattttttcaaattggtgcttctgtgcagggctatggaggacttggcattgtttcccccaggcaggcgcacggtcccctctcaggaaccccagaaacacaggcagtcacgagaggttgagcagttgcggggatttctgcttttcttttaagccctcccttgcttcccccttcctggggatgccgtccgaggagtcctggcggctgactttcgagccaagcccacaaagtggcacaaggggctgcgatgcaggaaagagtccccggggacccagagaagtaaacagacggccccgaagttgtcacagcagctggagggagaatcaggtttgcaaatcttcccgggctgtaatctcggctgattaaacagccaaatccatgcagtggtggaggtttttacagaagcctagagctgagcattcatggtgactgcacgcagcccttcgcggagccggtccgcggtgtctgaatgcgggctcgcttctgggcgatggctcaaatcagcgcaggcttaccgcaagatgcgccgccagcatcccctggaccacaggcaggatgctcaactggcgcgcggagcatcccaagaagcagctaatcgcaagcgggtcccctcggactggtggtctccatccactccggctgtcagctccctcccgcctccgctccgggaggacgtgggggctcctcaagacccctccccactcattctcgagcgaaagcctgggttgctgagcctgcaccgacacgggtttgcagctgcacggaggagcaggcaggtccctttaaggagctctttgcctttgtgtgcgatgggaaggcaaagatcacttgcaccaggctcttgctgtaacaaatcgggagggttgctccataaaaaggggctctgcccagactcagaccaaatctgctgcagcacaacagttgcaactccgct

SEQ ID NO: 452144 - DNA, 717 bp, Homo Sapiens
  misc_feature (652)..(652): n is a, c, g, or t
cagattgctcttttgccatctaagtttgcctgaaagtgggggcccacccatcacagggccaaggtcttccctcctccctatcccctcttcctattcctgtaaccagtcagcacctgccccaccccaggcccctgctctgctcccagccgcccttccctccatcccacgacagctaggaattacgtggggcaggacacgcagccatcgccatgttcatagaagccaggcaggcaggtcccacagtcagtatctctgcgggaacagagtagccgtgtgtggcggtgcagggccccgcagtctaggcatggttggcagtagaagggtgaactgctgacacactggctgacctgggcactccacaaaccagcctggcttacagccacagcgggtgtcggccactgctgaacagttctccagcgccacctgggaggcctgctcatcacaggcctggcagcgggcacattcagaattatggtggttctcccaggccaagaaggtgtcttggggacacacaaggcaggtggagttgccgcagggctccgtgcaaggggccttcaggtagtgccccgctgggcagcctctgcaacaaaacagaccaatcttcttgtggaagtcaccggcacagtcacacctggggctacgagtgccgccnctgggcccgggcccccagcagcaccaggaggagcgccgccgccaccgccgcgcagccccgcggcc

SEQ ID NO: 452145 - DNA, 1144 bp, Homo Sapiens
aggagcccagcacttgctttctcccccaaaaatgagtttgcctttgagatggaggcttccactctctgcttcaatggctctgcaccctcatcctggaagacggccagcccatgatgaagggcgatggtcacaaaggctgtgagtgccccagtctcatcattgcccaccaaacccccctgcatgctcctgtgtatcactggagaggggtcctggaacgagccgtcagcctgctgctgggacagaagccagttagatgtctcctgcagtttctcaggcgatcctcctacctgctcctgggccaaactcaggacgttcaacaccaaaggctgtgagccaggtgctgctgtccggtgacaaccaagccgcataggaaccatccgccttcggaaactgctggatccgcatgtagcttttctggatcagatccacggcgtggtccttggtctcgggaggcagtgtgttccactgctctgttttgtccaggtagcgggaagcagccagtgtcggagccaagtagatcatggtttgctcccccacagcctcgaggaagcctcaagagggaggccacgcctcctggtgacaaggccccctcagagcctaaagctgtccaatggatctgaggctgtaaccctgacgtagctgttaaagtccccatcagggatcatattgggatcagagttgccaggtatttccaaggtccggcctcggtggtccaaggggttgagttcatagaccagctcctctctatggatggccccttccttctcaatctgcagaaccttggacaccgcatctcccacagggaattcgaaggaccctcgagccaccaccttcagagacacagcggtggctgccgtgggcaccacagagaaggcaacaggccgggcagagcccgcaggcaccagcacctgctgggccagccctccgcccccagccaggcacagcccctccactggggacacgtggacgctcacagtcaggtttttatccaggtagttatagaggacaggccgcagctccagctgctcaaagcggcggacagacatgggcaggcggaggtgcaggtggaactcgcggaacacccggagctggactggggtggccacacataggcctttgatcccgggaattccggaccggtacc

SEQ ID NO: 452146 - DNA, 276 bp, Homo Sapiens
ccggaggacctgattgatgaggatgacattcccgtgcgcagcttcttcccagagaactggctctggagagtggaaacagtggaccgctttcaaatattgacactgtggctccccgactctctgaccacgtgggagatccatggcctgagcctgtccaacaccaaaggcctatgtgtggccaccccagtccagctccgggtgttccgcgagttccacctgcacctccgcctgcccatgtctgtccccgctttgagcagctggagctgcgcctttcgc

SEQ ID NO: 452147 - DNA, 989 bp, Homo Sapiens
  misc_feature (685)..(707): n is a, c, g, or t
actggcactgctggtactcaggctactacatgtctcccaatgtcaggcctgttggaatcatgctgttcttgaactgggtacttcttatccgagttaaattcattaacatgactcctgaattaactcctgcagagccatagaaaggatgcctagcaaagcggctgtaccagccaatcttggggatttcgtgctcaggggccatggctgcaacctgggtggaattaaacagcctcagaagcttccagatgtcatcaacaggtctcagaaagaggacatcggtgtccacgtagagaagtgagtccacatcctttaaaatcaccggaagaaagagtctctgggcagcacagggtttgaacaatttcttccactcctgagggtttccaacagaaaatgtgatggggtagattctgtgctcaaacttctttgtatatgagtcaggccactggcgtaactgcttatcaaactcgggcttcagagagtcttcagtgaagatgtggaattggatcttcctgtggctaaaaagcacagctgatttgagcatgaccagcgtctcctccagccgattgccacaggccaccacagccaggtggatccagagctcgggtggcagcacagcttggaaactcctgggttctccaggcctcctagaaagagggaaaacaagtgaaagctattactaaactcnnnnnnnnnnnnnnnnnnnnnnnccggcgagtgaatggttagaacatttcaaaacatgatcaggcacaatctgttatattttataaagtgataagcattttgacaattcttcctgcttagagaaaaataccatttattcccatatttatcctggcaatagcaggatgagtcactgtttggactgctataggtgtctgaggctttttctgccagcactcagctttctggtgcctgctggctgcctactggcccatgtttggaaatagtattgctaaacttcgacagctgacacaagggctgtggag

SEQ ID NO: 452148 - DNA, 1456 bp, Homo Sapiens
  misc_feature (59)..(59): n is a, c, g, or t
  misc_feature (90)..(90): n is a, c, g, or t
  misc_feature (1402)..(1402): n is a, c, g, or t
taatcaaaaaggggaaaaccattatataattggttacattagatgaagtttttgccatntcttcaggagaatggctctttacgacttctntgatgaactgttcaagtgcagtgaaatagccttggcactgccatgtgtcattgtgagtcccatctggaaaaatggctaatctcttagtccgagatggggagagttcataaagttgtttcatcattactggtggaattaattgatctgagagtccagagatgaaaagtgaaggcattctacactgagagatttttctgtaggacaaaaatttatttttgtagcaccataaaggaaggtaacgcatcggaaagaatgaaaataaagtgctggccatatgtggtatgcttaaaaatgtgttctccaccataatggctgaaatcctatgtgaattttcagaagccaaatgaatagccactgctccacccaaggaacggccaaaaagaaaaatttttcgttttaatcaaggtcaggtctagtcatcacgtagtctaacacagcttcagaatcctaagtagagtccttcttcacttgcttctccttcactttttccatatcctcgataatcaaccagcaaaaggttaactttgaggttaaccaacataagtaatgcatttggcaacctgtgacctatgttgcctgcattcccatgaaaataaattatagttggggaatagggtgaattgtctccagtgtatcgtatcaaaataagattcagacgtattccatctttggttctgatgaaaatgttttcatgtggaatgccagtgggcatgggaacataaagacgtgaagaggatggctgttctggaaaataaagcaatacatcctggaatttatacagaatacctgctattgatatgaatattaacaaaagtaagataatgcctccatacagatgaaaagtcactattaaaggtaaaagagaaatacggcagagagcccaagaccatgaagccaaggctattagccatctttcaacaaagttccacagcatccaggacttttccattgtagctctctgtaagtatctcagactcgcggacaggctgcgcagtcggccgcgggcacgaaaccgggcgccgcgcagcagcgtacccccgcgtcgcttccgtcgctcctcatcatcctcctccagcccaggggccgctgccggcgccacggtctagcccggagctcctgctgcgagctgtggccccccttccgccccccgctcgggtgtcgccggcaaatgcccccgccggctcccacataacctgttctccgtctccgctcccggagtggacccgctctcgacgattcgagctcgccgatttgcctgatccataacttcgataatgtatgtatacgaagtatgcgccccacacgccgattntaccctcgcagggtccgcccgatttaggaggtcagttacccttccggtgggggc

SEQ ID NO: 452149 - DNA, 933 bp, Homo Sapiens
ggtaccggtccggaattcccgggatcgcggagccgtgggacgagggcggcgccatgagaccactcaagtatttgaggtcatcagctgcgtccatcaagacatgatattgaacatggacaccatctggtctgttggtctgtttttgttggcaaagtactccaaaaggatgcagttgtatgtgtttcagctgaaccacataccatagctcctctcccctcacaaaagggtttctctggggggagaaaagtaactgattatacctctcatgtctcaaactgaaattctgagaagcaaatggtcagttgagggccccattccagatctgccgggacgtcctcagatgtccagagctggcaaaaggtggagcaggcagcagccttgggcaccagcctgtctctttctgttctgataaggccacacacatggctttttgtgataagcttccagcccatgccactgaaataacgtttaagaacctgctgcatttcacagaaatagcgtaatggaaatcattatgtaattaaacaaagcatgaagctcattatctttttctttttaacaaaaccttcaatttcacattttagtgtacactgtggtttccagagaaatatatggatctcctatattctgagtcagaccaaatttattgcctttattcttaccctagtctatggggtcaataaccgttttcctgaatgctgtcaaaatggtgcctgaaaatatctaaatcccagcaaaaacctaggcctccactttgggacccagtcatagatctttctaggcagaaaggcctcttaggggagtacatgcccttggcaaaggccatgggactcggaagcaggaaggtcacggggatgattttatgggcatcgcaataatccttttggtgaaaatggccctttgttggccctcaacccagctcgagggcaggtt

SEQ ID NO: 452150 - DNA, 949 bp, Homo Sapiens
  misc_feature (906)..(906): n is a, c, g, or t
tcttgtttcccagaaattacttctgcatgagagtcagaaaacagaaagtcaaagtgcacggggatatcggtcagaaggtcttccagaatagctttctgctggctttcggggaggattctcattccagccgtgcagagaatgtagagaggtgtctctttgtgttttgcccgtggcacatgctctgcagcaaagttcaaaagtggaggaatgtaatcactgactttctctggagaggtagcaaatttctgaaatgcccggttttatcttcatgaccactggctttcggtttttatccctcatttgcctgatatccaacagatcatgtggattgccattatgccttggccagcagtaaacaaatactcgagacccactgctaccacagtccaccacgatcccatagttcacattggggttattggtgtctgtagcttcaatgtcggtaactcgtgccaggtacctttgaaatttcttgtctctggttagtcgcccatacttatttcggattatgacaacagaaaaatataaaagtgaaacagcagcagccaggacactaatgaccataatttggcgtaaattggtattcagaattcgaggacaccctactggagatatgctaaaatgccaagaagcaggaaaaagacaggagatgccaatcctccccatactgaaaggtcagcaacaaggcaatgctctgggattcagtccttctcacaaacaattatagaaataatgctggggtcctcacggagttagagccctcctgcttggccggccggggaccccgggagcgggggaccaccagtgggcagcatcacggccagccggcttcctggaggccgcgctcctttcctggagccgcacccccgcccgatcccggaaattccggaccggtaccaccctatntcttctttctcggggtgcgctatattattttcgtgtattttat

SEQ ID NO: 452151 - DNA, 958 bp, Homo Sapiens
catggagtccatctcttccacattatccccatacaagccatgcttgctggtgccagtgaaaatcgtcccgtggtggggagaggtgtgtcgcacgtgaagaaagggagaaaaagagaaggaaagttttccttactgtgcttttctaaaaagggaaatcgcttccttcaccataatggatccagctcgttcagccttcatgggctgctccgtgatctcgtgcccccgcatgaggaggcagtcccagtataaaggggacgtgtggctggagaaccaagcatagcccaagaggaaaataaacagaatcatggagaagatcaggagccagggaacagagacccagccgctcagcttcccaaaggttagggtgaggatggcaatggcaactagctgcacacagagccagagctgactctcaaaggctaattccgtgttacgagaggggtccggccagcagctgtcaacgagagtgaacggcatgccatagtagtagtcaaacccataattatatggatggtggcactggtcacttcgggagtcgcagttcaagccttggtgccatttgcctataagccccgtgctgtatccttgcttctttagcaaggctgcaagtgttgtctcattaagagggaggcctgcggggactgcaagattttggatgacacgtctattaccactagaaaccatacctcatggtgtcattgccgtagcagcccagatctccaatacccaggtcatcaaccatgattaggacaatattaggcttgtcgtcatgcaccctgtgtgcctggcatgtgttcaagagtgcacacaccaaagacatgaagaccaagggtctcctgggcctcattgtgcagcttggaataccttcttgttgtctatcagccgtattatctctctaatgtctaggagcagaacagacaggctgttctgcaaaggctatcccgggaattccggaccg

SEQ ID NO: 452152 - DNA, 732 bp, Homo Sapiens
  misc_feature (50)..(50): n is a, c, g, or t
agcttccttggcggaagccttcagcacactcctcagtttgccgtaccagnctgtgggcattctgcaccacagcaggaagtcgggcataccagctcctcagcacatcctgcagcaggttccgagccaggcgggtcttgccagtgtacaccaagagcaggtggtcattgagcttctggacaaagccctcaggcaccgtgacctcttctacctccaccttcagtggcagctgagcccgggagcgccccaccttgatgccaggcattaggccacctacttggtcctgccagccacctccagtggtgagcacctgctccaggtgcagcactgcgtggatcagggcttccagtgcccaccacccggcctgcggctcgctgcaaggcagccagggcagtgcctgccaggatgctgctggtgcccaggccagagccgtggggcagctcagaccaggtgtgcagctcaaagccgcccccgaaggtgcggagcagcatgctcactcagctggagttccgagtggacatgcacgatccctgcacagatgaaggccgccttcagcagggccctggggcatgaggctggcagtagtcccgcaggtcagccaggcaccggcacactatcttcacagtcatctcatcctgccgaggccccaccgccagccacagctcaggctccgggatcgcggcgtgcctggctccgatgggccggcggccgtccactcgcacagccaggcccagc

SEQ ID NO: 452153 - DNA, 1098 bp, Homo Sapiens
  misc_feature (100)..(148): n is a, c, g, or t
atttatgaagcattgccatttaaagtatcatctttcatgtgcttgtgaaaatggcataaagccggtttcttgtgctggttatgtaattttcagaatgtgnnnnnnnnnnnnnnnnnnnnnnnnnnnnnnnnnnnnnnnnnnnnnnnnncatgaatgtcctagattcatcttaaattccaccaacagtgcacttaaaatgtgcccaacctgagggtcaaacctacctgctgacatgtaatttgtgtttgtgagacattctcaacagcatttgctttccccagctgagtgatcttcctcacatctgaatgtcttcagtgcaaaaggaaatgtttttcttcgcaaaaatactttcaaatactcttacttcaaggaagtgcattaaaaacaaacttctcatttgcatccctggaattcaaagccctaatcaagtgcttcaggatcaagagctaaacaggggaggacaaagcgtggcttcttcactaggagtcaagccaaagtcaactggtttggtctccaacgtagatcggaactcggttcaccagacgacctgaggacccggcccagaagagggagtatctcttcatggtgccttcagatagaaaatctcctaggatttctttctttccctttgatctacttccaactctccctttctatttcttcaagacctttttcggatccctactgcgaaggacctaaggggccggtgcccttccccactggatccctaccctgcctggtgtcttaggagcccaagctcacctggaacattactgcccgccagagacagcgagaggaccaaggagcgcggcggtgcggtgggaaccacagacgtcaccgctcacctgcagcctcgtgggctcctagaaaattgaataaatgccccctgaagcttctctgcaggtcacacggaacgaggagggtggctgccgacacgcgggagaagcttcaagaagcgtcaggaggacctacctggtcctgcccctgggccttgcagacacggctggccaggctgatatggtaccaggtagtctcaaagaaaatgttcaagggtggaccaaacatacaacacccaagattaaggctcttaaatgtctg

SEQ ID NO: 452154 - DNA, 553 bp, Homo Sapiens
gcaactgagaaatttgtttttaatgcacttaattgaagtaagaatattttaaagtattttggcaaagaaaaacgtttccttttgcaatgaagacattcagatgtaaggaaaatcactaggctctcacaaacacaaattccatgtcagcaagtaggtttgaccctcaggttgggcacactttaagtgtactgttggaacttaagatgaatctaggacattcatgattaatatttttagttttttagtacaatttaatattttaaatttaaatacacattctgaaaattgtataaccagcacaaggaaaccggctttacgccatatttacaaacatagggaaagaaagggtgatattttaaatgacaatgcttcataaatggccacctttttaaagtacctagagaaaaaaagttaatctagaattctatgcaaaaataaaatttcataactgtgagtgaaataaggacattgaaaaaatacaaaagctaaaagaattcaccaacccatgctgcaagaaatcttaagagtcctccaggcagaagcaaaaggatac

SEQ ID NO: 452155 - DNA, 842 bp, Homo Sapiens
cttctggagatgagatggtaaagatgtggttccttggaacatgtcttgccccgttatttcactgaagccctccatcatcagttagcctgaagtgggtgactctttaagtggcaaatagcatttgattttggttaataaatcccattgatcttcaaccatagagtgccccatcataactgtttctttggattccactgtcttctttgagtcggaggggaggaagggatctgtctggcagaagggcccgctgggaggcagccctgaataagcgagccttggcgttgcttactcttctaatcttcgcagggtccactgggggcttaggaaaggaaaagcaggaatcctcctctctggtgggagatgctggaactttcggtttcagctctagtggactaagacgtgtgccagagataggcctggaatcagatgactcaaaactggatgcatggaggctgaaggaggaaggaggtctattttctgatgttcttgaggatgcaggtccgaatagttttctttgagcctcctgtggtgtaaatggtctttgggttctaactgttcttaatgcatttcttgcttcacttatgatttctgcactggtcttctgcttggacactgaaggttgataaaatggatccagttttcctaacattttatcatttggagacagcatctttcctttgaaagtaaaatattcttcagatagacaccacatcctgtgatgagcactggagatagcagcggctgcgaggttcaattcatcctccggctctccccgggtagcggccagggacgcagcgctggcgcgggcggggtaaccccacgacgccgctcgaccacacgct

SEQ ID NO: 452156 - DNA, 1001 bp, Homo Sapiens
  misc_feature (805)..(805): n is a, c, g, or t
ttgcgctcacaaacccagaaacctgtaatttttgccagtgctccccaagtggttacagacatcagcagttctcggggaagggctctgggccccacctgaggcacagagccagattttgcttgccagttgcttcctggtttcatggagcttttccgcctgtaaaatgggcatctgaaaaaggtacacctcttggggccttgggagccttggcggtaaaatgatactggccatctttgtaagaatcaaaatgctctataaattcaactggccaaaagagagtgagtttcttcctaaacagaatctcttcaagtatctacttcctcaggttccacagccttatagggagggagggggccaaagtctctcaccaggcacagttagaacaagatttctactgctctctaccgaatcaatcctccatcaagtatgtcagttgccagaatgcacctgactgatcttgaatgacaaaacatgttcaactgagagagacaaaaattagtcctagggagagaggtgagttgttcttgagacaacaatgttaccagctaccaactccacagttgtagacagctttctataactttcattttggggtgccatgatccatttgcttaaaaaaattcagcatatgcatgcaagaaataatcccttcaatggcgttatgaacatttttacactctggccagtcaaggagcataaactagaaatgcttccctccagggggagggtctacccatggactttcccgccttgtggttggtgcctggccctctctgtctcaggctcacagggttcaaaccacacntgggaagacaagcagcacttaactcccatgtttggccgagcccctgcttagagagctgagtgtcttccagctttagctccaggactcttccggcgtggtcaagcctcttactgcttctataaggcttttgccaccaaatctaaagagattcttcaagagtccgagctaagaatgttcctgggagaggacgtggaag

SEQ ID NO: 452157 - DNA, 1193 bp, Homo Sapiens
tccaaggccacaagggcagatgctccaagaccagtgtgcaggcagcttcttgaagaagtggctgcgagtgaggcccttgctttgggccactgtccccacctgggaagagcagggacggtaatgcaagtgctggggaatgatgccaggtgttccgctccccacctatcagaggttccaatgccccccagggcaacacaccccaacatctacgttcctgaagagaaggtgggactctcaggtcacacttctgccatcgaaaaaagtgcaaaagccagcagctccaggaaagtgtttctcagttccccccaagtccaggtgggaggagagaggggccctggagctccctgggagcaggaggccccagttctcatatttcggcaaaatacttccctctccccgtgcagccagcctgcccttgcacatctttggaggcaggccacaggcctggaaggtgtgtggacctgcaggagagccagggtgcggaccacccagccaacttgcgtctcagctcagggacttcctgcagaagaggcctcaacccaacacctgtccaagttcgttcccatgaggcgtcttcccaggtcaagatgcaccaaacagtcacgtggaggttttacacattccttaactttcagcaactaggagcctgcctcctttaattttaggattctgccaccagtgtggtcttcccagctccaaacgtgccgggagatcacagaaacgaaacaaaacagcacagtgtccccagcggcctcttgtcaggaccagcactcatcaccctcccaaggctttgtgaaggtctccgaggctggacattcctaggaaacccagagggtggaggtgggggccccacggctaaaggcagggcgccagggacccacgtggctttctggtgtccagcggccgaggggacacagacggtgccaagcatggttctcttcggccaaggctcccccgctgctccaccccaccctctccggaagaagtcctcaggatacgttttgcctcgggcggagggcaggacacaagctaagctgcagaaatggaaatggaatggaaccgacacgtctgcctcagtgtttcctggaggagtcagcgctgctccgggagcctttcatgttttgtccaggcagctgcgtgggcacctccgggggcaggcagctgggcagggcggccgaggtggaggccacatg

SEQ ID NO: 452158 - DNA, 1507 bp, Homo Sapiens
  misc_feature (58)..(58): n is a, c, g, or t
  misc_feature (1268)..(1274): n is a, c, g, or t
  misc_feature (1276)..(1283): n is a, c, g, or t
  misc_feature (1351)..(1351): n is a, c, g, or t
agaaaaggattcttcttccagaagtaaagaactcatctttagagtacctttaaatganttttgtttttctttcttattttgaggtggattggtcttctctttttttgggtttccagctcactgggactctcagaccttacctttccagctcaaacaccattagttaaattccttcattctcattagaatgcagcctgctgagtatgtgggtttcactgccggagtccatcatttagccagtatacatagaggaactgcttcgaatcaaggcaactggtgaagggcttagcatgttggcagcaatatcccagagattgaatctgtttgcattttcctcatctaggataacagctgcttgaagccagggctcttagccctttgcattccccttgagcgaggaagccacactgcctttctgtgtctggttcagagctcttccttcttggcatgttttctggactacatgcacatgggcagctatagattaatctgcaaaacctagtcacttacctacccataatatctgggaaggtgtggtatttgttttaaagaaacattgtttctttgggagggcagtttctgtctggactttgaggtggacttagttatccctacagttctttaactctcagcttttaataaaagatgaaatcagatattgatgcagttgggtcacaattctttagaatgcttctaccccagggccgcttcctgttcctagtcatggttttccagtttagtagtggagtttcttgaggctaacttacagaaatttctaactgaaaactttaagagttattgatacttgttttttcagtcagtcacttacatcacctagcctactctctggaatttaaatttatttctctaggctggtcctggaagttgataaccttttggcaaagcttagatttaggagaaggcttgagtccctgttcagcgggtctgtggattctctttgcttatggctctctgcctgcagccctggcagaccatactgtatgtcatggatacccagtggaaatattactgagatgaaacacatttccaagggtatttaaactctcactctgccacctttctaagggtgggaggctggcagagatgctgcaatgcttgataatcatttggccacactgaaatttccaaagggagctcttgccggtgcttaaaaccaaaactcctggacacttagaaaattccatgaatctagcacaaaatatccattcttgcccaagtgtatcccctttctctccagcttaatcttnnnnnnntnnnnnnnntaaagcccaggccaaggggtacttttaactggaaaactgggggaggagggaaagaacactagcagggnagctaaaaaggcagggttgctggggtaagcccattcctgcctcctacctgggtgccctgtatctacatttgctgaaatgcctgtgcgcccaattggccttttcccttcatcctgcaagatggaagccccatctttcttttccaccctggggtggag

SEQ ID NO: 452159 - DNA, 713 bp, Homo Sapiens
gggaccgcgccctcctcccgcggtcttctggcgaggcccgcggtctttatacgggggtggtccggcggttggctgtgttggagtggagagagtccttgttctccttctggatacagttgtgaacctggaggaagctgttatccctgtcggagttgtaggtggcggtgggcgtggtggcggccttcagggggtccctgctgagcgtgtacatggagatctccgtggacggcagggtgttgaagcccttgatgcccacgggggaggcgtccctggagtgtgagggctccgtggagcgcgagctggagcggctgcggcgctggtagcggtagcggtagctggggatgcgggtgatggcagaggcctggaggtagtcctgtggcgcgggccgtggcccgcagctgtttgtgccggtcgataaacatgtgcaccgccagcaccccgaccatctcggcgatgatgaaggacagagccccgaagtagaaggaccagccgtatgagtcactattctttttggagtcgctcttggaggggtctccggaattggcagatatgtacactctgatgccaatgatgttactcagacctgcggggcgcagggtggcggggtgggggatcagagagcaggccgttagtttctcaggcagtcggacacagggcagccgtaaaggccggggccagctgtgtgggccttccccggtcccgcgccttcatga

SEQ ID NO: 452160 - DNA, 1083 bp, Homo Sapiens
  misc_feature (801)..(862): n is a, c, g, or t
  misc_feature (929)..(992): n is a, c, g, or t
ggaattttcgggattgcgggcccgcgcctttctgtacggggacgccgatgcccaccagaacaacagcaccagcagcaacagtgacagcggcattgggaacttccaccaggaggagaagagcaaccgggtccttgtggtggacctgggtgggagctcgagcagacacggccccggaggcaacgcgtgggacggtgtgggtgggaggggtgcccagccctggggtgctccctggactgggcccttctgtccggaccccgaagggagccccccatttgaggccgctcatcagactgacaggttctgggacctaaacaagcacctagggccagcctctcctgtggaggtgcccccagcttccttgaggagctcagtccccccttccaagaggggcaccgtgggtgctggctgtggtttcaaccagcgctggctcccggtccacgtgctccgggagtggcagtgcggacacaccagcgaccaggactcttacacagattccaccgatggctggtccagtatcaactgcggcacactgccccctcctatgagcaagatccccgcagaccgctacagggtggagggcaacttctcgctccccccgcttgatggcccgaacaggtattgttcccttaacgcctttcgaatgtaccgcattttttgtcccccttctcatgtttccatcgattaccgcttattacaaaggttccaatgtttgccctccctcacctttatttccttcccccttctccttcctatcgccttcccgatatttttctgggccgctcccttatcattccttttacnnnnnnnnnnnnnnnnnnnnnnnnnnnnnnnnnnnnnnnnnnnnnnnnnnnnnnnnnnnnnncgttgcatgcgtctgcacttctgtcgctctcggatcctcctgcgctttttcttcgcttgctttatcnnnnnnnnnnnnnnnnnnnnnnnnnnnnnnnnnnnnnnnnnnnnnnnnnnnnnnnnnnnnnnnntcgtgtaaacttctttccctgttaagcctgcccgtcttggttactaccctccaccctttgcgacctctcttttttaacttccctccccacc

SEQ ID NO: 452161 - DNA, 1076 bp, Homo Sapiens
  misc_feature (52)..(109): n is a, c, g, or t
gataaatgtgcggggcagagggcggctcaagagaagggctgagggaactgtnnnnnnnnnnnnnnnnnnnnnnnnnnnnnnnnnnnnnnnnnnnnnnnnnnnnnnnnnnaagcggagaggcctgggcatacgaggatcgggatggcgcgggttcaagggaaggcgacaacttcccgggaaaggacccctggggggtggggaaggactccgctggatttccagggccttaaagttcacggaggtgggcggcccagggagcgggccaagggagaggtttgcaagcggccgttgtgtgggggcggaccacgggcctcggcatgcgggggagggggcatccagggggcgtctacttcatgccactgggcagcacctggttggcggcaatgagcatgacactgatgatgaaggcgatggcgaaggcgcagatgagactcttgcgcacgcaagtctggcggatctgctggttggagcaggtctccacatccacgggacactcctcggctgtgcccaggtggctctcctcctccgtcatgatgatgttctctatgtccttcatggacaggtgctcgcagaaggtgtcgtagagcagccgcttcagctcatccaccgtcagcttctgcatgtcgcacttccagaagacagtatcaaagtcggtgccatggaacttctctgggatccctgaggtggagagtttgggtcccagaagggtcacaaactcctcaaagtccacttgaccatcaccatccatgtccagccgctggatgatgacctccagctccacctcgttgggcatgtaacccagtgagcgcatggctgtgcccagctcctgcttggagatgaagccattgccgtcacggtcaaacaccttgaaggcctctcggatctcctccagctcgtcctccgggatgtccaccgggcgctgctccgacagcaggttgggcacggtgtagatgccccggtacatcaacgccgccgtcaccgggtggaacggcatcttggaggctccgcgcccgcccgcccgccgcaaactttgaggccggggctcatgggccggtggcggccccatggaatgaatc

SEQ ID NO: 452162 - DNA, 1100 bp, Homo Sapiens
cgcgacgggaagggggggaggcggctgcggggaaagggaagcgatggtgtgaaggagagggcccatgggtcgcgggaggaaaggcgtaatcgatgggatctcggaacgtaaatagccacggccacggcccgtttaggggaggggtggccggccgctccggggaagctgggcgggaaggacggttgccgagaaagggtacgggaacttcgtgggggggagatgctccaaggcgggcggggggaagacgctcggttggtgtcccatgtacttcaacccctttgtgatacgtctccagaatgcgccctcttggctttttctcggctcttgcgcacggcgaggttgttgcgctcccgcctcagccggtactcaaggctatctttgttcactgccttcttgcccttgtgtaaggggccagccggggagggcgccttcaggaggggactgcaggggggtgcggcagtggccaaaggggccttgagaacgcgcagaggctggccgggtgctgccagagttgggggcaggtgcatggctgtctgcccacagtgtgccacttggtactgcaggggattgtagctgcctcggctggcagctcggctgccctctggcccccggggctcctccttcaccgccacagccctggggtcgtagctccctgggctgctgtagatgccaggccccagcgccttcctgtctgggccgaaggtatgtggagggtaggcaaagggccgagggttaggcggcaagtagtgggggaaggcaggggttccggggcccttgaggcctctggcctcaggcgctggcttcacggcaaagagatcggagagaagctgctcttccccagactcgatgtaggcggagaggtcaatggaggcctcatgctcacacatgtcccctagctccccgggcccagctcggccccctgagaactcgagtggctgctggccaccccggggctcacactcgtagtaggtcccgtgggacatggccggcccgccccctcggctccccgcccccacctgctcttgaggcaccccttggggtgctccggctgccctctctctacctcctcctgacctgggcctgcccatccggagaattcc

SEQ ID NO: 452163 - DNA, 1140 bp, Homo Sapiens
  misc_feature (549)..(549): n is a, c, g, or t
cattctgggccacctgcccagggcagaggcgcttgccgggttagctgtgttgctctgcaggtagcggcggaaatctttgatcataggccggaggacctggatgaggacgctcagggcagcctgtgtgccctccatggcctgggcctggcgctcctgggcacaggcctgcacttcctgggagcggcggatcatctgcagtaggtcgttctgctgttccaggtgctgtgcgatctccttcacatgcaggttggtgacccgctgctcctgtatcagcttggcggagttgagagcaatgcggctcttgagcgcttgcggcttgaccgacgtgtctgcatgctgggccatcatgtccacaggggtctctggtggcagaggtgggggcgcctcagccgtgcagtactccaccacgccctcctccagcgtgtgataggtggtctctgtggggatctgtgtcagggtgaccgtggctgcggctgcggtggccgagggtccgagggccacagggtggatctctgtggtgctgggcaggctgatgatggtggcctcgcncagcaggttgcagatacgttgttgcatgggggtcagcagcactggggctacagctgggccaccgccgccactgccaccgcctgtcccaggccccccagctccgtcctcactcagtgggccccggcgcctcaccaccctccacggcggcccggacctgggcaaccttgcgacggacctcggtcttgaggtcagaccacttcttcttgacctcaggcagctctctgcggcaggtggccacggcgttgacccttctcaggatgccgtgccaggccgcactcttggcggccaggggtaccccggcgttgaagtggttcaccagcaggtgcttcttcagctccagctcctccacgatgatctccacctcccgctctgagaagttcatcttccttttcttggctgggacggccatggcctctcccctcccctctttttaaagaaattataatcccctcaagcgccccaattccccttctcttcttcctcagcctcgcccctcacccaccccctacaggggataggccaggcttgctcgaggccaagcaataggcctttggtaacccccctcgcatccagggaattccggaccggtcc

SEQ ID NO: 452164 - DNA, 1169 bp, Homo Sapiens
  misc_feature (640)..(653): n is a, c, g, or t
gagtgtcaaaggattgagtaatacatacgctgggactaatatgatctccacaacaggctcccgggaagatcggggagagtgagcgggtcgtgtgagctggtggacgctgcgacagccgggtggcagcccgtttgtctgcggcgccccgagacctgtttgccccgaggcctctgcaagcggcgctatctgtcccgtgccctggcacagatgcggcccatagggtcagcgttgcgcaaagaggctccacataaaggaaagggggacaagctccaatttaagagtcccgagttcccatcccaattccaagtgtgaacggggggatgggcatccattttaaaaaatggattaatttatggagggactggccaagcaaaaccaagaaaaggggtgtttcaggattaccaattaggaaggttaaagggcagaaaaaaattctaggattccatcattgtaaaaaatttgttccaattgaggcaaagactatgaggaatttcacaaagggtaaaaatagctcctactggagagacaggattatatacgttccctatccctccttgcaaacataactatttttctaaacaatttgtaataatagtaatggcattatagtgtttttataaatttttaaaacgtttgcttnnnnnnnnnnnnnngaacctgtcttctctcactcaacctcctcttgaaatcagccctcctccccagagcccacacctaggtaagccacatgtcctgctatgggaggtggatggcccagcagcccaaatgcaccagagccagtgatgacacagctcaacgcagaaaaactgaaagcagcaaggaagggaggtgccactaggtggctctgatgacctaaatgtgagtactgtagaaatgatctaaaagccacagaggaaccgaccacggtagtcagttactgatgctgacaaccctgagaccggagattagtggtggattaactcctagaacggcaggagtagcccaggacagatataaggcaagggttgtttccagagctgagtagaaatgagccatttcctccttcctacttctctctgaagcaacaaaacagatttacaacttacagttcttggcaagtcatgcagaaaatttatggaaaggctcttttataatccttcatcccgggaattccggaccgcgtaccaggc

SEQ ID NO: 452165 - DNA, 1298 bp, Homo Sapiens
  misc_feature (944)..(944): n is a, c, g, or t
  misc_feature (1215)..(1215): n is a, c, g, or t
  misc_feature (1278)..(1278): n is a, c, g, or t
taagccactgcacctggcggggtcttgcttattttaaaagaaatattctgattcatattttaggactttttgtcaacgaaattggttttgatccctttgggtaccatttttattgttttatgtagaatgttagaaattaccactaatttacctggcagtgatgtcaaattgactgtaattagcaggtagaaaattatttgtattatattcatctgattcctatactggatgagcaaggagcatgcttcctttgggacattcttacagcagggtgtctctccaacagcccgacaggcctcatctttttggttggatacctttgaactccatggttacgtgttaggtccacatttgtgtttttttctagcctacctatagttgttggcctttttgcatataactctcgggtaatattttgaagcatgctgaccatccaggcatatagtattttcaagaaatgactgaggtaggggtgggggtcctggtccggctgatgggggtttgctcagcactgtgccagtggaagcaggtgtattgtgggcagttttgtcattgtcctcaagtccttcgcagacagtgcacagcctgctgtctgcagtcggccagaccaggctcctccccagcacactccctgtgggatggccgctgctcaggacacagtgggacaaagttgggttgataggatattttagattcattttacctttgacaagggcaggccttgaattgggagcagcagccacctggcctcactctggccacaggtgacacttggtccttgctgccacctgcttggggctatgtggctacggctacacaaaagcctgtgcaggttagaagacgactgtggtgtgcagtggtgctctgggagtggagacttcctctgttctcagagactcacccccagccctgaccctagaatttagggatagccaggaagtttnttagtttgtgttaacctagaagggtcactttaataaaaattgttatgaactatagtattttagatgatgagtgacttattttaattccactttaacattttactgtgctgttaacttggaagacctgtttgaaattagtcttgatttcacactcatttaatctgctgagcacaggggctgttgtcatttgtaaaacgcaaacactgtgggaggtacttcttcgccatccagcttccttcttttacaaaaccatcattttcaacatgaaaanttatgttcagttttatagggaatatttattgtttcagggtctgtaattgtatttcaaaaacgntgtcgtattcaggtgtgttg

SEQ ID NO: 452166 - DNA, 713 bp, Homo Sapiens
  misc_feature (450)..(538): n is a, c, g, or t
  misc_feature (551)..(608): n is a, c, g, or t
acaaggctttttttctttggagaaatcactcacgatcatatgaatttgcttccaaaacatccaaatttaatgtactaatgcaaggactggtaagacttaagattcacataacgtccctcatagttaagtctcttgcttcctactattagtggaatcaatcagcatcaggtacttcaaagaaagtcaaatcctaagcctgcccaggcccaaagacaaagccagccaggacctgaccacctgtatcctcttggtggcaatctgctgaagccagatgagttctgctttttaattccaatcctattctgccactgaaactaggcctgggcaaccactcttaatcattaacatatcaaaaggagtatctcctctgagaaaagagcttttctcaggttctagaagctagcttttacaaaagacgtcttcaaataggggccgggtgcagtggctcannnnnnnnnnnnnnnnnnnnnnnnnnnnnnnnnnnnnnnnnnnnnnnnnnnnnnnnnnnnnnnnnnnnnnnnnnnnnnnnnnnnnnnnnatctatttctacnnnnnnnnnnnnnnnnnnnnnnnnnnnnnnnnnnnnnnnnnnnnnnnnnnnnnnnnnnacaactagaacttggaactctggggaaatctagtgcaacaaccccttgccggagagaaagatcctagaaacagctcttgaattgacatcccgggaattccggacc

SEQ ID NO: 452167 - DNA, 1214 bp, Homo Sapiens
  misc_feature (884)..(907): n is a, c, g, or t
  misc_feature (920)..(1008): n is a, c, g, or t
  misc_feature (1141)..(1141): n is a, c, g, or t
cagtactcctgcggtctaaggtagcgaggcctggggtggcgaattcggcacgaggcactgtgttccaggtgtgaagtgctgggacatggcaggcccagtgatggaagcagctagtgaacgattcccttgctaatgcctagtgcattaagttcattgcttgcgaaaggtaaggaaagaggccagtgtttgagcggtggggaagatttgttttttctagccagcttaggatctcaggattggttttatccaagctagtgctttgaagaacactatctcttgccaggaaaagatgagtgataggtcaaagcttttacttgagtctcccctagtgtcagagatcaggagaaaagacataagagaatttacaaaagctattcagactgctattgaaaacatgagaagaacttgtctcccattttgagagttcctatctaaataaagccaattcctcagactgaggggctgttcttaagtgttctttatacattccagttatccagttaaagccttccccatgtgaagctgatgtttgattccagtttcctttgatttgcctccctaaccttttctagggctcagtttgtatttctttgccttgcctcagactactttgccaacccacttccacaacagaatatgcttcaagatgtgggcaggtcagtgtcctgttcatgggagaaaatggcttaacagtctgattttctcaaatgattattgaagagttgttatcgtttttattataaaaacagttctgacctgtcaattcaagaagctgtttactaggatctttctctccggcaagggggttgttgcacctagatttccccagagttccaagttctagttgtggcttttagtgaccctttaatattttaggacataannnnnnnnnnnnnnnnnnnnnnnngtagaaatagatnnnnnnnnnnnnnnnnnnnnnnnnnnnnnnnnnnnnnnnnnnnnnnnnnnnnnnnnnnnnnnnnnnnnnnnnnnnnnnnnnnnnnnnnntgagccactgcacccggcccctatttgaagacgtctttttgtaaagctagcttctagaacctgagaaaagctcttttctcagaggagatactcccttttgatatgttaatggattaagagtggttgccccagncctagttttcagtgggcagaaatagggattgggaattaaaaaagcagaaactcattctgggcttttcagcaga

SEQ ID NO: 452168 - DNA, 865 bp, Homo Sapiens
  misc_feature (425)..(513): n is a, c, g, or t
  misc_feature (526)..(549): n is a, c, g, or t
ttggctttcccaaaaaacaatccccaaatttttaaatgttacttaatgcaaagggaatgggttaagacttaaggattccacataacgtcccttcatagttaagtttcttgcttcctactattagtggaatcaatcagcatcaggtactcaaaagaaagtcaaatcctaagcctgcccaggcccaaagacaaagccagccaggacctgaccacctgtatcctcttggtggcaatctgctgaagccagatgagttctgctttttaattccaatcctattctgccactgaaactaggcctgggcaaccactcttaatcattaacatatcaaaaggagtatctcctctgagaaaagagcttttctcaggttctagaagctagcttttacaaaagacgtcttcaaataggggccgggtgcagtggctcannnnnnnnnnnnnnnnnnnnnnnnnnnnnnnnnnnnnnnnnnnnnnnnnnnnnnnnnnnnnnnnnnnnnnnnnnnnnnnnnnnnnnnnnatctatttctacnnnnnnnnnnnnnnnnnnnnnnnnttatgtcctaaaatattaaagggtcattaaaaggcacaactagaacttggaactctggggaaatctagtgcaacaaccccttgccggagagaaagatcctagaaacagctcttgaattgacaggtcagaagtgttttataataaaaacgataacaactcttcaataatcatttgagaaaatcagactgttaagccattttctcccatgaacaggacactgacctgcccacatcttgaagcatattctgttgtggaagtgggttggcaaagtagtctgaggcaaggcaaagaaatacaaactgagccctagaaaagg

SEQ ID NO: 452169 - DNA, 1212 bp, Homo Sapiens
  misc_feature (295)..(347): n is a, c, g, or t
  misc_feature (479)..(564): n is a, c, g, or t
  misc_feature (572)..(667): n is a, c, g, or t
  misc_feature (701)..(713): n is a, c, g, or t
  misc_feature (716)..(777): n is a, c, g, or t
  misc_feature (794)..(818): n is a, c, g, or t
  misc_feature (838)..(838): n is a, c, g, or t
  misc_feature (846)..(847): n is a, c, g, or t
  misc_feature (856)..(857): n is a, c, g, or t
  misc_feature (864)..(866): n is a, c, g, or t
tgtactcgtggctctgaatccagctgggccggaggactcgacggggcgtacgggctcggcgctgggtctgtcgagatcagagccgcctgcacaggcgatggctcgcgctgagcagttccactccccaccgccagcaccagcttacgcggcggccgctttcctggagggtgcttgccgctagcgcggccgggcgcggcgcgggcgcacttcccgcccgtccagtgcgccgattacgggcggcgacgcgcggcgcctcgggggagtggggggcggcgtcgtggagagtaagcgtgcnnnnnnnnnnnnnnnnnnnnnnnnnnnnnnnnnnnnnnnnnnnnnnnnnnnnngtcctcgggcggtagtctcgtgtgcccgctgccccactcgtccgggtggagggcgcacgctccgctctctggtgtggctgccgggcagcactcccgggtagccctgaggcggtcgcgcgcggccgcggggtnnnnnnnnnnnnnnnnnnnnnnnnnnnnnnnnnnnnnnnnnnnnnnnnnnnnnnnnnnnnnnnnnnnnnnnnnnnnnnnnnnnnnncgtggccnnnnnnnnnnnnnnnnnnnnnnnnnnnnnnnnnnnnnnnnnnnnnnnnnnnnnnnnnnnnnnnnnnnnnnnnnnnnnnnnnnnnnnnnnnnnnnnncggtgcccctcgcctctttttttgtgttgctctnnnnnnnnnnnnnacnnnnnnnnnnnnnnnnnnnnnnnnnnnnnnnnnnnnnnnnnnnnnnnnnnnnnnnnnnnnnnggggggcctcccccccnnnnnnnnnnnnnnnnnnnnnnnnnaaatttaaaaaaaattgttncacagcanntgcctaganngaacagnnntttatatggctgccataaagtctgaaacacaagaaaactaataaaaaaccacctgttaaatacacaattatgattattgatgtcctttcaattaaatcttgtgtgtttaaaatgaaaaacacgcagcctggtacaaatatccatatttcaatttgcgatctgctgcattggcatgagttttggtgaaactgcaaaatcacacccagtactcttctgtacgtcatccactgtcaggccttcccagagctcaatcagagtcaaccctttcttcttgtccacatcaaacacagccttttcagtaataatgcggttgacacatcccggaaattccggaccggtaccagcc

SEQ ID NO: 452170 - DNA, 795 bp, Homo Sapiens
agcgggtgcccggttcatccaaggcgcaagatggcgctgctttttgcacgttctttgcgcttgtgccgctggggagccaaacgattgggagttgcctccacagaggcccagagaggcgtcagtttcaaactggaagaaaaaaccgcccacagcagcctggcactcttcagagatgatacgggtgtcaaatatggcttggtgggattggagcccaccaaggtggccttgaatgtggagcgcttccgggagtgggcagtggtgctggcagacacagcggtcaccagtggcagacactactgggaagtgacagtgaagcgctcccagcagttccggataggagtggcagatgtggacatgtcccgggatagctgcattggtgttgatgatcgttcctgggtgttcacctatgcccagcgcaagtggtacaccatgttggccaacgagaaagccccagttgagggtattgggcagccagagaaggtggggctgttgctggagtatgaggcccagaagctgagcctggtggatgtgagccaagtctctgtggttcacacgctacagacagatttccggggttccagtggtgcctgccctttgctctctgggaatggggagctgctgacccatttcaggggcttgaaggtgcccccaggggccctctaggaatgtcccattacttgggaggtcccaaatcaccgccttttggccaacccctcttttttggaagatggctctaaagcccctttttactttttgccttcaagccaacccttcctaccttccccccaatatcga

SEQ ID NO: 452171 - DNA, 613 bp, Homo Sapiens
  misc_feature (265)..(401): n is a, c, g, or t
ccgattccagcttttattgggccgagcactcccctccaggggaggctgccgtcagaagggtggggacgcagcaccttggtcgccatcacccccatctgggccaccctgacccccgtctcacccaggcaaagggcctgttgctggcagactttggggtgggcaggggctcagtggggtgcccggcagccaagggacagtgcgagtttctcggtggcatcaggggccccaagggtctgttgaagcaggaggagcctggttcgggagnnnnnnnnnnnnnnnnnnnnnnnnnnnnnnnnnnnnnnnnnnnnnnnnnnnnnnnnnnnnnnnnnnnnnnnnnnnnnnnnnnnnnnnnnnnnnnnnnnnnnnnnnnnnnnnnnnnnnnnnnnnnnnnnnnnnnnnnncgcagccatccccctctccggtacccagtgtaggtcacaataatttaaagacactatagacatttcgacgctatataacaacataagttaaccaggttccttgcagaggctgccgggcctatggactcaggtgtgttctgggacttggggaaggtaaggggatggggccaggctgagggtggggcattcacgatcccggaaattccggaccg

SEQ ID NO: 452172 - DNA, 893 bp, Homo Sapiens
  misc_feature (837)..(837): n is a, c, g, or t
ggtaaaaaggttcactcattcctgtcatacctggattagacttcccccgacttgccggtactcatttcagtcaaaacttgaatttagatgctggcctaatagaagtttcagatctttttttgtagccacttggatcagattcacctggaattcaggtaaatctaataaataggcacagtgggcgtcccagtgctttgtagctgatggcaggcagatacatcacttcccttccaattgttgaggatatatagccaaatttgccagataggaataaagatttcaatttaaacacaaagtttatttttcagagatggaatattccattcaggctcagcaaagaaataagtagacagatgtttcatgctgaggggaacaccagggaaatggcttggtcatgctggccatgatgctgaaagctcgtgctgccaccaatttaagtaagttcaaggaggcttaaccttccctctgtatctcagtgtggccatgttattttacagttattatcagatctgcagacactctcttctcatccttcctgcattggcgttcccattccattcccattcctaatctccctgaagatacgaaaaatcttcaagatatttctgcttaaattgcaccaggtgctgagaatgcagagatgactcagtctttgcccaaagaagctgacagcctttggagtcaaacagcaccaacttcaaatcacagctctgcccctcctttgtcttgtgactttgggaaatttacttaacttctttgggcctcagtttacttatctttcccctcgccccacaggtctgctcatttattttggatatggcatctggaacagcaccntggaaatcagcgctcgagaagaggccctgcaccaaagcacgtaccaacgctccgct

SEQ ID NO: 452173 - DNA, 767 bp, Homo Sapiens
  misc_feature (616)..(667): n is a, c, g, or t
agtggccacgggggggcttgggacagccaggccccgggggtcgtgggcatcccttctggccctggggccccctctgtaacggcgcgctcattggctggtgccccgagcagccccgttcgcgctgcagagtgctgataagcatctgcacccgggcgctcaccgacgcgctctccacgccctcgtcagcctccgagaagcacctggggaacctacagctcctggcgggccaaaggcctcccatttggactggagagcaaccactggagaagcgttcatgagaaacattctagcagacggggaggggcgcgcagaggggcgatgctttatttctctaccggcttcacatcctccaaagttggcaagcggtacccatgagacaacgtctgcaaatgcttctttgcagcttaaaaaggatgactagaaacccaggatcagcacgccgtcatgcgtaggttcattcttgacccaaccgacaagctcttgaaattctgtgagtccaggttgactgtgatgaaatggcagccagtgttcccacacggcccagagatcaggtcctcatcactccacttacacaccgaggcattctctctctgctttttcaatagacttttgactnnnnnnnnnnnnnnnnnnnnnnnnnnnnnnnnnnnnnnnnnnnnnnnnnnnncgtcccgggggaggcggcgggccgggggcgggccggaggctgcagggccagcgcgctccgccctcggccggggcgcggggagggggcgcaggggcgtccg

SEQ ID NO: 452174 - DNA, 1047 bp, Homo Sapiens
  misc_feature (67)..(67): n is a, c, g, or t
  misc_feature (103)..(103): n is a, c, g, or t
  misc_feature (132)..(132): n is a, c, g, or t
  misc_feature (140)..(140): n is a, c, g, or t
  misc_feature (188)..(188): n is a, c, g, or t
  misc_feature (922)..(932): n is a, c, g, or t
gagtctcagggcctgtcccacgtggcctccccaggagcctgccccgcgagagaagcgccggacctcncgggcaagggccctgaggggtggacgggccgtgcgngactgaaagacaggctggagctggagctnctgcgcanggcgaggagcagtacgagtgcgttctgaagcgcaaggagcagcacgtngccgagcaaatctccaaaatgatggagctggccagagagaaacaggcggcagagctgaaggccctgaaggagacgtcggagaagcacgattgcctagcaaatctccacaaatgctggagctatccagcattgacacagccggcacagaagatggccctgatgcgtgtctctctgagagcgacaccaaagagatgaagaaaaagcttgagacaaagagactggagcggatccagggcatgaccaaagtcaccacagacaagatggcccaggagagatgacggagaacttggggaggcaccaggagaagctggaggagaagcaggcggcttgcctggaacagatacgggagatggaaaagcagttccagaaggaggcgctggcagagtacgaggccaggatgaagggtctggaggcagaggtgaaggagtcggtgagggcctgcctcaggacctgctttccctccgaggccaaggacaagcctgagagggccttgcgagtgcccccccaaaacttgtgtgaccaggacccccttcttaccaaaggcagaatgcccaggaagaagccgcctcttgatggccccaatccccctggggaccttttaccaacgagaggtccaacccctctcttttggggatgggggttcctatttccccccatgaaaaagggagtccccccgccttttttgcggctgtggtggaaacccttggcgttttccttttggtaaccttttgttnnnnnnnnnnntctagcggtccagggcctataacgttttgtattacgcgtatcctcgcccgcccctctcattttcttcggcgcccccctctttgggcggccctcgtaagaattttttccccccacc

SEQ ID NO: 452175 - DNA, 1313 bp, Homo Sapiens
  misc_feature (47)..(81): n is a, c, g, or t
  misc_feature (90)..(302): n is a, c, g, or t
  misc_feature (313)..(440): n is a, c, g, or t
  misc_feature (867)..(891): n is a, c, g, or t
  misc_feature (1115)..(1143): n is a, c, g, or t
  misc_feature (1211)..(1211): n is a, c, g, or t
acgagggaggggtggggcctctctccccctcggaagggcccccctcnnnnnnnnnnnnnnnnnnnnnnnnnnnnnnnnnnnggaagagannnnnnnnnnnnnnnnnnnnnnnnnnnnnnnnnnnnnnnnnnnnnnnnnnnnnnnnnnnnnnnnnnnnnnnnnnnnnnnnnnnnnnnnnnnnnnnnnnnnnnnnnnnnnnnnnnnnnnnnnnnnnnnnnnnnnnnnnnnnnnnnnnnnnnnnnnnnnnnnnnnnnnnnnnnnnnnnnnnnnnnnnnnnnnnnnnnnnnnnnnnnnnnnnnnnncccccccgggnnnnnnnnnnnnnnnnnnnnnnnnnnnnnnnnnnnnnnnnnnnnnnnnnnnnnnnnnnnnnnnnnnnnnnnnnnnnnnnnnnnnnnnnnnnnnnnnnnnnnnnnnnnnnnnnnnnnnnnnnnnnnnnngggaaattggttcaaaacccaatttttaggtttttttccagccgggaattttttagatttccagatttttaaaaaaaatgggttttggaccccccaaaagagctttcaggaagttccaatgcatctttgtgccataagagaggcccttggccaccattcagagcttattgattcagattatatacacttctaacaacactggtttcacaaattctcagaccacgtagattaaaagcagcaaattaaatgagggaggggaagagctgcaaaaggtagacactctgatagaagccacagtcaacaatgttttcaattcagcaaacactgatggagtgcctaccacgtgttgggccccgtacctagtgctggggcataaagatgagcaaggcagcccaaagggtgaaaatccaggggaagaaaaggtatnnnnnnnnnnnnnnnnnnnnnnnnnaaggagagagagaaaaagtacaagaaacaaaacaaatacccaatagaaaaacgaaaataaaattttaaaagggaggggcaaacacatcctgcacgcctacagttctcccgcagtccgttatttgtgacagagtcacccaattcagaacaggctgaaatggagtaaactcggtttaagaaggcatagagagatgtctcttgtaggttttaaaaagatctccttcnnnnnnnnnnnnnnnnnnnnnnnnnnnnngttttggcacttaagagggataagctggctgtgtgttcaccctggcaggcaggcgggtgtttagtcgncggccacgccggttagctgagctgccacggaattgtgcactgctttgggacactgggcaaaggcgtgtcctcgcttgccacagaggttgcacacgatgcctt

SEQ ID NO: 452176 - DNA, 1259 bp, Homo Sapiens
  misc_feature (463)..(540): n is a, c, g, or t
  misc_feature (592)..(612): n is a, c, g, or t
  misc_feature (691)..(725): n is a, c, g, or t
  misc_feature (845)..(882): n is a, c, g, or t
  misc_feature (1007)..(1015): n is a, c, g, or t
  misc_feature (1023)..(1053): n is a, c, g, or t
  misc_feature (1113)..(1121): n is a, c, g, or t
ggaaaccacagaactaggtgaaaactccctacctctgactgcccgggtgtcccttgggcaagtcagctgaccgggccatttccctcagttgtcaagtagggatttagaggtgtatgtgctcctactgtgttctctgctccaaggaatcatggcgcagtgcttccagaggtgggttgtgtgttaccatgtttttaacaacgggaagcaaaaactttatttgaactttcattctgatgcttcactgatgacaccggaaatgaagataatttgttttgtgattgttttattgtgttttcaagttttaattcatgaattttcctgtactaaaacaaagagcaaagttggttaaagcctgcatgtaaataaagtccagtgggatttttgacacctgcttgacgtttctatgtctacaaacagtgttgtaatgaatacggcctttcatcattaaacattcgattttttnnnnnnnnnnnnnnnnnnnnnnnnnnnnnnnnnnnnnnnnnnnnnnnnnnnnnnnnnnnnnnnnnnnnnnnnnnnnnnggggggacaaaaggggggcctcccttaaaagtttccctagggggccccaccnnnnnnnnnnnnnnnnnnnnngcaaaaaaggggcccctatttaaacctaatttaaagcttggcatttgcccccggttaacccgcaacgggggggaaaacnnnnnnnnnnnnnnnnnnnnnnnnnnnnnnnnnnncctgggggggcaacttgtggacaaaattttttcggcaaattaaaacttttaaagtatataacgaatttttgggggcaaaaaggggcaaaccattcgccaattggcaggtttgttaaaaannnnnnnnnnnnnnnnnnnnnnnnnnnnnnnnnnnnnnccccaggccccctggggcctccaaatttttaggggcccttttaaattgccatgctccaagggccttttttagggcccccgatggtcccagagggtgggttatgaccttatttacaggcgaaaccnnnnnnnnnggagtttnnnnnnnnnnnnnnnnnnnnnnnnnnnnnnnctttccccctgtgaaatcgaaacccaagtgggagggcgaaccgcttggggagtaaacccnnnnnnnnnatggccccccttatatatgggtacacaacaatcttcccctatcttgcccacataatattcttcccatatataagcccttttttttccaccgggtggtttacacgcggagggcttgtttccaaaaacttctttttgggg

SEQ ID NO: 452177 - DNA, 1246 bp, Homo Sapiens
  misc_feature (130)..(140): n is a, c, g, or t
  misc_feature (579)..(579): n is a, c, g, or t
  misc_feature (607)..(607): n is a, c, g, or t
tgaagagggagccccccgggggaaaaattgtcgaagcgttttcgggggggacctgggatatagcccagtatggggggaaattcctgaggaaggggaaacagcaagttgcggtggttttcagcggttactnnnnnnnnnnnagcaggccgaagcctggtcggagtgagggggtaccccgatatggttggaaagattgccttggtttttccactttccatgtaggttttcccccctggagctttttttggatttctttttgactgggattcaaaaaattccggcctgaacaaaaaagaaatccccttttcaagtaaggtgccaaattcctgggaaatctgttttaacttgttttatgccaggggtgggctttggtctttcgttccgttgttgctcttaggattcttcccccattttctttgctttggctttgcaaggcttcaatcaggtttgggcagccaggtttcaaggcgcaggttgtaggtctggctttggcctgttcagcctggtggcagatgttttaatccagcctttgatgtgtcccggcttccccacgtttgatgttatgtaattccgtgtccnttccgtttatccttctcctggtctcttnttctctttatctctgcccttacgtcgttgtctatcccgagaccgagtacgcgttcttctgtgactggcgctttcactgctacgactatgagaacggagacgaggtcttgacctggaccttcttgttctgctttttgacctagacctgtgaactctataggatttccctggaccccttgaacgacttcgtcttcgtttccttctggagccataagaagagctactgcttgatcgatgcctgcgtcttctatcataagaatgtgaacgaggctgaagatctctggaccaagatcttgactttgatcttgatttccttcctcctttctttcggctgtatgttctactatctgaagaactgctcgaggaggaccgtctacggtgtttcttttttctcttgcttctgctttcttcttcagtatctgatgaccgacgtcccatttctgggtccagacctttgggctcacacctcccgttgacgtgcaagcgccgcagtccctgagtcgtttctttagatcagggcgccgccggcgtcctccgaaggtattcagtttaagctcaccgccatttgaaaatgtccggctccgggcgcggccctagaaatggatggggggccggtggggaaaggcggggcggcgaggcg

SEQ ID NO: 452178 - DNA, 380 bp, Homo Sapiens
ccctcattccccggtaaggaaataatgtttacactatttttttgttacgcccgcccagatatgcaccagccagagaaatagaaagcatttgcttaaatatttgttaccaatacttatgtaccaaaaattcaccaaaggctagttcccccttgaagccgagcacctggccgttgacactggaaccagttccaacccctggctgggattataagccatgcccctgatcccgaggaagaaagttacatgttgtggagattttcagtctgaacattaacatttccaaagtttggcaacattatcttttaaaattatgcaaattatgtaaacaaaaggacattttaaattgatctacatgcaaactcatcccgggaattccgacc

SEQ ID NO: 452179 - DNA, 1255 bp, Homo Sapiens
  misc_feature (563)..(571): n is a, c, g, or t
ttcagaggatcccctctctccacacggaacagttcaaaccactggctgggattataaagccatgccactgatccagaggaagaaagttacatgtagtggagatttacagtctgaacattaacattttccaaagtttggcaacattatcttttaaaattatgcatattatgtaaacaagaggtacattttaaattgatctacatgcaaaactccatgtcatgcaaggacaccaagcaccgggatttttctctcacagacagagcccatgatgtgcagcactcagttgaaggaacagcgatggcaggcaggtgtgctcaatttcagattgattcaccttgattcaacctgcccttttccactgattttaaaaccagtttttatagagaaactataaagggaaagactactgtcatacaaagctaaccaaaatgtttttcttccagctaacagtacctttgcagaaatgggaagggataagatcaaacagtagaacatgatacactacttttatatcacacaaatttattaagttatccattaccaattatatgggcaaatcaagnnnnnnnnnccagtatgcatgctctatccctcgtggtaaagaaatttaagtggcataaatttggatacaattttgctcttctgtggcatatagattagcaagatttctcacacttaaaccacaaatatatgtgggtgtttagatacatacatgcatattaaatatcaccagttttttagattagctgcaagtcttttgaaacaagggaattcatgattcaaacacaagtttaatgacaaattatttacccatgtaatcaaacaaatggatatcccttataagtagttacatgatcacttcaggtattcttcagtaagtgatacatacaatcaatcatgattgcctcagacagcttctggcctttatgtataaaatcacaactagcacttaacgttactgagggacatttaataaatgcaatggctcctagttacaaagtagcagaatgaagcagctataagccctgtgcagttactatatgaacacaagaactagctcttggcagtagcaatgaactagactttctcctcaagcagaggtgtattaaaagctgctcagcaatgagaagtagtccctggatatattcataagtataaataaagttacagactcctttgttacaaaaatgtaattaaggtaaataataggacgttaacaaatgcttttgtcagggagaagatgtcggggagaaga

SEQ ID NO: 452180 - DNA, 1230 bp, Homo Sapiens
  misc_feature (145)..(193): n is a, c, g, or t
  misc_feature (466)..(467): n is a, c, g, or t
  misc_feature (487)..(487): n is a, c, g, or t
  misc_feature (504)..(592): n is a, c, g, or t
  misc_feature (597)..(598): n is a, c, g, or t
  misc_feature (618)..(619): n is a, c, g, or t
  misc_feature (624)..(624): n is a, c, g, or t
  misc_feature (640)..(640): n is a, c, g, or t
  misc_feature (659)..(659): n is a, c, g, or t
  misc_feature (673)..(673): n is a, c, g, or t
aagagagggacgcgccccggagaagggcgggagtaggggtgcggagataaatcagagggagaatatgcgattcgtgaggatggtgcgaatggtgttggtggtggctcgtaaggggtctgaagtctgttaaaaaaagcgctttttnnnnnnnnnnnnnnnnnnnnnnnnnnnnnnnnnnnnnnnnnnnnnnnnntggtacaaatattcaatttggggttaccaaaggtgggtttttgtggttaccatggaaatgaaatttgttatagggtggttgggattgctgaggatttttaagtggccgctttgtcaacctgggagttagtatattatgtgtacttcaagccagggtaggtttttttcaatcccttcaattccaccgtgcccaccctcatggttctgagtctcccaaagtcccatttatgtccacccccaccatgccctttgcatacgccatggccttagctcnncaactttataagtgaggaancatatgggcatttgatnnnnnnnnnnnnnnnnnnnnnnnnnnnnnnnnnnnnnnnnnnnnnnnnnnnnnnnnnnnnnnnnnnnnnnnnnnnnnnnnnnnnnnnnngaggnntgctgacctcaggtttactnnggacnacgtctcagagacagnggcaggggatgagggcaangacccctctaaggncactcccccacccaccctatcactcctgctcttaaaggacccctttagggcactgaaggggttggacttctcagtgcaagccaacacccacacctccaagtaccaacagccccagagaacagcaggggtcctcaatcctgagcacccctccaaggaggtcaggagaacaagccttaagccagagagtgaagaggatcagtgtctcggacccagagaggattcagggaaagggcacaggagggaccccagtccagagccagacagagttcagctgaatgtgggaactcatgccatggagtggatagccctggatgactgaagagcccagtgcccaggggcgtctcacccactgtggagacaggcccttatattaggtggcaatggggccacctgagttctggaccatggctcaagcccaggccaagcagccctggagtaagggcatgaggcagggggccccaagccaagttgaacactggggtaccgtccctggagcagcctggggtaccctgacagcacccatgccccagatcccgggaattccggaccggtaccac

SEQ ID NO: 452181 - DNA, 1055 bp, Homo Sapiens
  misc_feature (452)..(574): n is a, c, g, or t
cacaatctgttctcccatttttttccatggtaataggggttgacattgaataacatgcctgcctaactgggactgtatttgctgttttccttgtattttatgcagatttgttaatgcaacaccaagggcaataattagtaggctggtcctttgaggatgcatctggttttaggatgtcccgccagcagcattagttaaaccccattcccaaagccatttgtaagtgagcgacccttggctcagctccccccacgccccatgcagcctcttgtgccgtccctacttgggacacacgtgcacacatccaggttccatttgcacccatcaggctttactgtttcagctgaagtgtgctctccaggaggcgggcagcttgctccgtgtgtgggcagtgaggtgtggtctggtgtgatgagatgtgacgaggtacgatgcggtgcggtgcggttcannnnnnnnnnnnnnnnnnnnnnnnnnnnnnnnnnnnnnnnnnnnnnnnnnnnnnnnnnnnnnnnnnnnnnnnnnnnnnnnnnnnnnnnnnnnnnnnnnnnnnnnnnnnnnnnnnnnnnnnnnnagcgtgttgtggtgtgcatgtgcgtgggttctctcctggcatggccagcgctctcctgtcaagcccggcctcagcttcctggccagagcgtctggcatggaatgtgctctgcagctttgtctctggggggacacccccctatgatgggacaaagccatcaccgagcacatcccgcgctgcagagagctgacctttggctccatctggccctggggctactaatgtggaaggaggccctgggccaaaccagctgcccggctacccttggttctgggaggcctccggagaccactcccaccaacaaaagctggagctatctgtggatgagaccaggacggcagcacgtgggtcatcggagtgcatgcagccgggcagtcgccactgtcctgagctaggaggcgccactgctgcagcaatcacgccagccacgggggaggctgtgggttcggaacgagatcccgggaattccggaccggtccac

SEQ ID NO: 452182 - DNA, 916 bp, Homo Sapiens
acccagtctcttccatacagagcgcacgcacagtatagacgagtccatgtcttgcactggaacacgagcgggtcaagctcgggcaagactgctacgatgtgtctagcccagcatctccccagccttcctgattatctagcgagaaagggagtctccctgctgagcacctggggtagggaggacggaagaaggaaactggtgagaaaggagggagctgccattcctgggctatcctctctctgttgcaaggcagccatcacaggagcaccctgagctaggagtctactgccggatggatgcccgcctcgtggcaggtggagaagcaagtctccactgacaaacataccagctacctccctctgtagaggggtgccctgtacagaggtgctcactcaggcccccaactcaggaagggagggcagcacccactaaaggaatgcactggcacctagtatgcatccagctcaacactgagttactgtaagtctgttcctatgaggctgtcagctctggggacccaggatcctagctgaacagctggctggtactcctgtcagtgccctccaccaacttctaacagtctgctgttggttagcctgttcctgcttcttttctagaggggactcagtccagcaggatctaagagagccctagaatgccctgaggctgcaggaacccaaattaaggcaggatggacctcacagtggagaaagagcaatgtacagatatacaagccctctgttcagcatctcctgacacccaacaaaatatgcctaacctctctataatcccctagttctttgagtataattggctaggaaaagaaagttatagatttgtccaaaggacaatacttcataattcctcagaaacatccgcagaattccggaccggtaccagcctgttgtgcgaccat

SEQ ID NO: 452183 - DNA, 1090 bp, Homo Sapiens
  misc_feature (43)..(43): n is a, c, g, or t
  misc_feature (136)..(136): n is a, c, g, or t
  misc_feature (872)..(872): n is a, c, g, or t
  misc_feature (909)..(945): n is a, c, g, or t
  misc_feature (981)..(981): n is a, c, g, or t
gcaggttgcaccgcaggaagcaagacaaaaccagggagctcanaagagtcactgccctgatcccttccgtgccggcagctgcgaggacacaggcccctttgtatcctgcggtgcggaggtggagcagaggagaggntgccccggctggccccctccctcgccccgcagcactgcccctcctttcacagcaacccacggcctcccccgcgcttgacccagctggcgagctgccccttatacctggatccgcccctcgggtcgcaagctccccaaggcccgatcaccgagcggtgcctaggaactgggagcgtaacttggctcggctcagaactttgcccgtgagccaaagaacactgaactcatctacctgcttgcttgacatctcatctgcattaccaagctatttggtggacgtccacaagcgtccccggcccccacgtagacccagttgggtccccgttccgtcggtcccctcctctgcacacgcctctagccttataccccgtcttgatccgaaagtttttccacccatgaacccccagttggcgctccccgaccagcaaaagccccttccctggtccacgatcccgaccacccggttctccaggagacaatactccaattctctggaaagtggaagaaaccaagctgaagctaggggggcgctgggacccctattggggctttgagagcttccggttgtcatctcctaagtattcggagacccttctccaaaactcttggggtgaccctcaagactcttacctgctatatagttgggggtctctggtcctggactagagcagtaggcaacctgggtccccccacacacacggggaaagaattgggaggggccctgccttgtgatgtcnacccctcctccccccaccgcgcgcacgcgcggcgcgnnnnnnnnnnnnnnnnnnnnnnnnnnnnnnnnnnnnnggccctgtccccctttctccaccctgcaaagctagntggcatttaagctcacaggagccctggggctgccgactttgaaaggaggtttagggcagcaaccagagttggaccctgggggggtggctcctttgacacgacaagcccg

SEQ ID NO: 452184 - DNA, 905 bp, Homo Sapiens
cgaccgggcggctttaataacgccctcccgcccccccttttataaccaccgagatccctgtccaccctccccccaaccccccaaaagctggtaccggtccggaattcccgggatcccggcccagccttgctcccgcccccgccggtcccgcgttcccacggcgcctggttgcccccagccccctccctcctcccaccttcactgtgtcccacccttcctagctttgtgcccggggtgctgagcccttccccgtcagccgggccgcgggaggagggagccgtcaccgaggagctgccgctcgctgccccgggcaggggcacaggcttcatccagtgaatactagagggatcgaacagttgcaaccaaggcaatgtcttactacctcagctcagaaaaccacctggacccagggcccatctacatgcgagaaaatgggcagctgcacatggtcaatctggctctggatggtgtcaggagtagcctgcagaagccaaggcctttcagactgttccccaaaggcttttctgtggagctttgcatgaacagggaagacgacactgcacggaaagagaagactgatcatttcatcttcacatacacccgagagggaaatcttcggtactccgccaaatccctcttcagccttgtcctgggtttcatctccgacaatgtggatcacattgattcccttattggctttcctgagcagattgctgaaaagctgttctctgctgctgaagccagacagaaattcactgagccaggtgcagggctgagggctttacagaaattcactgaggcctatgggaagtttgggtgctttgctccctgtgttttgcggaaacaggtatctcgtggatttcagaaaagcttttaggggagatttaagtcttttcccgggagct

SEQ ID NO: 452185 - DNA, 1088 bp, Homo Sapiens
gtcatttttagctcgaccacatcatcaggtctttgccaccgaggcatagtgtagaacagtcccggtcagttggccaacctcccgcagccaagtaggttcatccttgttcctgttcattctcatagatggccctgctttccccagggtgacatcgtagccaaatgtttactgttttcattgccttttatggccttgacgacttcccctcccaccagctgagaatgtatggaggtcatcggggcctcagctcggaggcagtgacttggggccaagggacctcgagacgctttccttccccaccccccagcgtcatctccccagcctgctgttcccgctttccatatagctttggccaggaaagcatgcaatagacttgctcggagcccagcactcctgggtctcggggtcggggaggggacgggggcacccacttccttgtctgtgacggcgtgttgttccccactctgggatggggaagaggcccgtcgggagttctgcatggcagttcactgcatgtgctgcccccttgggttgctctgccaatgtattaataccatcccatagctcctgccaaatcgagaccctctgacgacttgccgactaactggccaccacaagctgcagtctgtagcactgaacaaacaaaaaacaaaacgctcaagccttacgaccagagaaggatttcagcaaaccaccacctcccactcagtgtcccctccaaacttcacacttccctgcctgcagaggatgactctgttcacacccaatccagcgcggttctaccccacgaaactgtgactttccaaatgagcctttccctagggctagacctaagaccaggaagtttgagaaagcagccgcagctcaactcttccagctccgccagggttgggaagtccttaggtgcagtgcggctcccactgggtctgcggaccctcctattagagtacgaaattcctggcaactggtacagaaccaacctagaggctttgcagttgggcaagcttaactcgcggccttatttcttgcctttaattttcccacaaggcatctgtttgttttggggtcctccacgatttttagggccc

SEQ ID NO: 452186 - DNA, 1266 bp, Homo Sapiens
ttattaaaaacacaaaatattacgtacaaataaatgtggaaccgcgcagggccgcggaggaaaagacggagggggaagcgccggaaaaaggggcgatttcggtagataatgtctggtgcgatcgataggactgccgttagtttataaatagcgaagttctctcgcgatttccataaatcatgtttaacaaccgcagagaaagaggtagactagagaagaggaataattagagtttttaacattaactatagttgagaccgtagcgcagtgacttccttgcggttgtatcgtccttctcaataacgcttgaaccccgtcaaaattgggatgggggcaccagcgacgattgtcttggggattttatgagggaggtgctgatgggttgaggagttagtgacgtgcgtctggttcaaaaaagggttgcaaaaccatgaaataactgagcagggggagaactaccatcatggtatgaaactgggggatttaagtaacagggaaagaaattatgcaaaaaagtatcatggacacaggaaaagggaggaaaaaagtagagcctccttctatttgctgggacacccattaggtactttcccccttatacatccagttgtgctgagtgggaatacagtttgagagctttactcccaatgatgtgccagtgctcttgactcagcctgggggttcatctccacaggcatccttcttacctgctttggtccatcaagctctctctccacatcctccagcatagtcacagtttcctctccattctctggatgatgcttctgcacccaggcctgaagctcttttgggaggatggccaggaactgctccagcaccagcagctccaggatctgctccttggtgtgcacttccggcctcagccagagatgacaaagttcccagagccggctcagagcctcatggggcccaggtgaatcctggtagccaaactgcctgaattgctggcggaaggtctctgggctgtagctgctgctccagtggaggctagagtctggatcacaggtctgctcttcctcttccatcttctctgtcagaatcccattacactcctctgaagtttgtgttaggagtgatgatgactttcccaattttgcagacattttgacagacaaatagctcagtactgttaggctttaatcctcaaggaggtgaagctgtcctgatggacactcctcccgacgccgtcgatccggagaattccggaccggtaccagcctgctttggtttattatagggaggggt

SEQ ID NO: 452187 - DNA, 1111 bp, Homo Sapiens
  misc_feature (382)..(391): n is a, c, g, or t
  misc_feature (986)..(986): n is a, c, g, or t
ggtccggaattctcgggatctggccaagtgctgacgggcagaacacaatgggcagtcatggcatgagaaggcccccgccagtcaatcctggcagtgtcaccagtgacctttatgactcttgtgtggataatttctttgagcctcagatttttgtcatttttaatgatgaccagagttacccttattttgttatccaatatgaagaagtcagtaacactgtttccatttgaaaaatcttggtactgctaaattatttgatatgaactcaatccagcatttgtagcaggttttgaatgggtgggactgggtggggaacagcattggacattaatagggcacttttcagacccattttttaaagtgctagaaaatgctttttttnnnnnnnnnntacaagttttaaaatgaccacttactctttaattatttactaattgctagtgtactcagtgtggaaaagactacagattacacactcttttcattcacacttgtacatatagacagcaatgttattaggagcattaaattaaaaaactgaacagcctaatttaaatgtggcttgggcctggtagaagtttgaccaaatggaatggaggctgtgagcaatgtgaggattctatttatttatttacgtttgataaaacttactggaactagtactaccatgcgtattccctgtccaaagcatcactgctttggtatagtataagttcatgaaattctggtgggtagaaagaaatttttatttctatcagcagtactaaaaatgtatcagccaaccagagaacatcagtgactttaacttctgcagagtttggccccagaatttcagagttctattttagagggaagtttaaaacaaccacaaaaaacaaccatttggaaaaatttttgttcacccagcaaaactttttcactaattaggtgatatggaaatgtggatttttgtggttggttaaacttcagctttggggaaactccgnctcctttcattatccttcctttcccatttgagggggttgggggcgactaatttgggttaagggcaggctttgagggttaaaagaataacttcccttttcggggtccaaaccaattttggaacgga

SEQ ID NO: 452188 - DNA, 525 bp, Homo Sapiens
  misc_feature (19)..(19): n is a, c, g, or t
  misc_feature (24)..(24): n is a, c, g, or t
  misc_feature (33)..(33): n is a, c, g, or t
  misc_feature (59)..(59): n is a, c, g, or t
  misc_feature (71)..(71): n is a, c, g, or t
  misc_feature (81)..(81): n is a, c, g, or t
  misc_feature (97)..(97): n is a, c, g, or t
  misc_feature (127)..(127): n is a, c, g, or t
aaaaacccctaaccaatcngcccnaaaaatgtnacctccccttttccctaaaaaccttncggtccacaaancctaggtccnggaaacccccgaaaanggaaagtaaataccttcctaacccctcaanaactgccctttaacccaaattacctgcccccaactcccttcaaattgggaatggaatggataatggaaaggagactgagttttccaaagctgaagtttaacaacacaaaaatcacatttcatatcactaattagtgaaaagttttgctggtgacaaaaatttttcaaatggttgttttttgttgttgttttaacttcctctaaatagaactctgaattctggggcaaactctgcagaagttaaagtcactgatgttctctggttggctgatacattttagtactgctgatagaaataaaaatttctttctacccaccagaatttcatggacttatactataccaaagcagtgatgctttggacagggaatacgcatggtagtactagttccagtaagt

SEQ ID NO: 452189 - DNA, 995 bp, Homo Sapiens
gattaggcagaactgggcggtccaggacccaggcaggacccagagagggtcaaccaaggaggtcctagtccacccagggcctagcctgcggctaaggctaagctgggatactgggctaaggaaccacgcataggagaccctgcgggccagaggctccggccccagcctgcggagcacaggatgcagcaggtgattttctgtgcccagcacacaagctctggccttatcacatgtgtcctcccactggccctagaatgagcaaagagcttgggcggatagcctgagcctcagccagggagcaggctggcctcgagggagcaggtcagcccaggaagggaggggtctgcccatgaccaggtggggtgtggccacagtagctggagattggcagcacccacccgctctcccatccccagggaactttcttccagcttgccaggtgtgacccactccatctcaccgggaccctcacagcagcgtgtcggtgcgtttgctgcgccacaccaccaggccagccatggcgacagtcagaacgacgggtataacgatcagcgggatgagaacctcgtctggggggtcctccaagtggaccctgtccacggtgcagttggagaagaactgcctgtggatgccggtgatgaagcctgggccagggggttgggccagtagcagcccacgacattggcctccatctcggtgcagttggtgaaactctcatagtacacgatgaactcggacaggttgcaccacttccagacgtccaccttgcccatcatgtctgcgaaagccttcccacacaggggcagcctctccaacatgcctgtctcgttgcagccgcctgctctgggacacccaccgcagagcagcagcagcaacgggagaagttgcgggcgccgcagcgctccagtctccatggctggccggccgcagctgggtcacgctcggtcccgctgggggcgcggctgggggacgcccgatcccgggaattccggacc

SEQ ID NO: 452190 - DNA, 1147 bp, Homo Sapiens
tttcccgggctcacgggagggcaccgttttcgcggggcgctcccgcgggttcccgggagttctccccatacataaagcccccggcgaggggcttttgcccggggctttttgaggtttccaccatggccctcggccccccacggaggttgtcaggggcccccgggttgttggaagtcaaaaggttcagatttttccaggggcttggagagggttgcggcatgggtacttccccccaggcggggggggttcagtttcccttgcttttccccggaagtccagggccacgtttaattcatgtcgtccatgatgtgcacgtcgaaagcctttcgcagtccccacaggggctccggatccgccacaggtccctgacttccacaacccacagcgtgcagcgaggctgcctgggggcatcaccatggcactggcccccaggtgctggtccacagcgggtccgcacgtaccagaagtagaggttgtgccacggcagcaggctggtagtgaagaacggctcgcccaggaggagagagacctttctgccctgtaggtccctcatttgttaataattccggccgtttctctatgatgttaattttatcttccaagtggttagccttgaagatttttctcaacagtttgtgagaagctgctgaactctcgactgtaaacacctgctccacccccaggtgatgggccagcacggagagcaggctgccatcgctgacacacaggcacacgctgtctggcttcagcacggtcctcagagcctggacgtatcgatcagttctgtcctggtcattgatctctccaaaccgaggccggttccagagcaggtgaacctggcagtcacacacggggcgcatctggcggactctctcattcttttcagggctggtcctctgcaggctgtaccatacgcagtagtcatcgtggtgggctaccagatagagcgctgagccctgcaccacaggctcctcttgtggcaggaagtacacacactgcatccagtggtcccgccactgcatctcctctgggtctgagtgtgcccagaagggggccatggtgcacttgatcttcccctcagggtccatttcaatgtcccaccacgagagaaccacctgagctcggccagagtcagatcggagaattc

SEQ ID NO: 452191 - DNA, 1808 bp, Homo Sapiens
  misc_feature (16)..(16): n is a, c, g, or t
  misc_feature (47)..(47): n is a, c, g, or t
  misc_feature (1472)..(1472): n is a, c, g, or t
  misc_feature (1585)..(1593): n is a, c, g, or t
aaccgctgggcccagnaggccgcccggggaccccagcactgacccgnaggttctgccgacccccgaaggcccggagtctgagaccagccggggccccagagcctccccaaccaaggctctgctgtccaccccggtgagaaatggcgagagccacagccgggaggggctggccggcctcgtcctggatgccgagcgcaccctcggggagctggacagagacgccctcaggagaagccgcctgcggaaggtgcagacgttccctaggctgctgtccgacagccccgaggccaccctctgcctgccgctgacccgcgggaaaagccagctgcccatatcggaattattctctccggaccccaggaaggcctttctggacaggaaaaatggcctttctagcttcccggctcagcccaaatgcaggctgtggccggagcaggagccggaacaccagctgggacgggttccctgtgcaggccgcagcacggacaggtgccctggggtgcccggcagtccaggacagcccgagacttcacaccccagccaggggccagcagaggcccctgcagaccctcgagatgctagcggtgaagcccagactcccagggacgatgagagaattccagaaggagccaggcagctgggaagtgcagccgcggagcagtgggtgtccctgcaggacctcctgtcccagctgggccggcccttccgggagtacgagctgtgggccctgtgcctggcctgcctccgcgcactgcagacacgccctgagcacccagcctacctgtgtctggactccgtgctggttgctgaggacggggctgtgctcttccagccaccccctgccaacggttcctatgactcgttctttctggctcccgagctggcagaggagaggctggtaactgaaaaggcctctgtgtactgtgtggccgccgttctgtggaccgcagccaagttcagcgtccccccgcaaccacaagctggccctgccacgcaggctcaagaccctcctcctggacatggccaggcgcagtgccccgggagccggccgtcccgcggctgagggcatccaggtgttgcgggagctacctccctccagcgaggcatggacagccggaaaatccttgcccacctcagagcttccatctgccaggtgtaccaggaggaagagaccatcagcctccaaaacgccttctcagtggttgaactgaagcccagtgtggcaccagccccagagcccagcccaggcttcctgccggtgaacagcgacaccgggcttgtggctgtgccagggcccgtgcccggccagcacccctgcggtgaagaagccacccagctgcctgcagcgttcacctccgaggccacgcactttcagcccattgtcctcgcgcagaacgcaagtgtgggcaggggaccagccctgccttggtcccagaaggagtcccaaggaaagggggggcccaaaaggaagngatcacgctcaacccaaaacttctcccctcaagtccaccttgataaatcactcttcctgcaaaccccctttacactccccccacgacctcttttcgaactcttcacgccaagnnnnnnnnntatatccccatcaccagaatgggaccactcaagtcgctccatctcagttaccaacataacgcgccccccgaaaccctctctactcaccactcccatctccaatagagattaattccggtgtaacttcgcgagagatcccacgcaagcacctattatttcgcacaccgccactcgctcccccctacctccccttatccttccgttcgccttatatt

SEQ ID NO: 452192 - DNA, 925 bp, Homo Sapiens
gaggatccaaaaaatggcaccccttcttgttttattccccaattattgtgcataaaggccctttggggggaatttaccttgttgttccaagcaaagaaacttgtagggagcttccctaaatatcttatgtgcactttcaggccatgtgttccacgtttctgttctccatgggtgctttcaggaggcttatgggaggatttccaagatctttaaaatgagttgtaacacatactaattcagtttctattttcaaattcaattctccatctaggtttgcttcaataacaaggtgattgctgatgtttttcattttttccacaacactcttcatagtcttcaagactggtaaataaatactaacatcaggatctgggaccaccggttcttgtaagtccttccacaatttcctaggaatcacctttatggggatgtcatgggtcacaatgcggctactgcttgacatagataacagctccacggagaccgtgaggcagggaaagtgtttattagtcagtttgattttcaaagccctggcattctgggcagtcttcaaggctcgagataagttttccgatgttagctctaaataaatctcattgttttctgcagagacaccctccatttgaaattcgttgaagaagttctcctgttccagctcacaccacatgctcactcctccattagccagcttgtcacaaaggatgaagttaagcttatcagggctgatgcggagggtgcaggttttggcaagcttggctatcatgttactgattcgtgtgaagtggttcagacaggccccgtccacgatcttggcccgaaacttcatggccgcggatggcgcagccgcggcgggcctctgtgggtaacagaaaagcgtcgcgccctgagtgtccccgcccggaaacacggcagcgcgaacagtccc

SEQ ID NO: 452193 - DNA, 1676 bp, Homo Sapiens
  misc_feature (41)..(80): n is a, c, g, or t
  misc_feature (286)..(286): n is a, c, g, or t
  misc_feature (345)..(480): n is a, c, g, or t
  misc_feature (500)..(526): n is a, c, g, or t
gttccaaaaatttacccccgctgggggtttttttattcccnnnnnnnnnnnnnnnnnnnnnnnnnnnnnnnnnnnnnnnntttttaaatttttttcacatggttaaggcttatgttctttcccaaattttccatttttaatccctaaaagcaaactttagggttctcaagttttggtaatgtggcccattaattataaatgttaaagggatggggtgttgatggcctaaatgccctgtattccccaggcactttgggaaggccccgggtggccggggtggcttganccccaggagttcaaagaccagccctggacaacaccagtgagacccctgtctcttaggannnnnnnnnnnnnnnnnnnnnnnnnnnnnnnnnnnnnnnnnnnnnnnnnnnnnnnnnnnnnnnnnnnnnnnnnnnnnnnnnnnnnnnnnnnnnnnnnnnnnnnnnnnnnnnnnnnnnnnnnnnnnnnnnnnnnnnntgacagaatgagaccgtctnnnnnnnnnnnnnnnnnnnnnnnnnnngataatgtttatcatgtccacctccacaggacaatgagatgtaattataataggaaatatgatgggtatgtttcagggagaatgagcacatctaccagtactgaatcagctttgatgttcagaaacatcaaagaaatatggtctcatcacttaacacagatgataccttagaagtttcgtttgtttctactctaaatagaagggtcttctttccagaacgacagatccgatacactgcggcctctcccatcctgacaaagtctctgcatgccaactccagcgacagggtgctaggacagcgcagggatgaaatactgaagggacacgtcttcatgaagcagatcaaaatgccccatctttgttattcacaatattgccataaggcctttgtggggatttacttgttgtccagcaagaaaactgtaggagcttcctaatatctatgtgcacttcagccatgtgttccacgttttctgtccctcatgggtgctttcagagggctaatggagggatttccaagatctttaaaatgagttgtaacacatactaattcagtttctattttcaaattcaattctccatctaggtttgcttcaataacaaggtgattgctgatgtttttcattttttccacaacactcttcatagtcttcaagactggtaaataaatactaacatcaggatctgggaccaccggttcttgtaagtccttccacaatttcctaggaatcacctttatggggatgtcatgggtcacaatgcggctactgcttgacatagataacagctccacggagaccgtgaggcagggaaagtgtttattagtcagtttgattttcaaagccctggcattctgggcagtcttcaaggctcgagataagttttccgatgttagctctaaataaatctcattgttttctgcagagacaccctccatttgaaattcgttgaagaagttctcctgttccagctcacaccacatgctcactcctccattagccagcttgtcacaaaggatgaagttaagcttatcagggctgatgcggagggtgcaggttttggcaagcttggctatcatgttactgattcgtgtgaagtggttcagacaggccccgtccacgatcttggcccgaaacttcatggccgcccc

SEQ ID NO: 452194 - DNA, 944 bp, Homo Sapiens
  misc_feature (787)..(787): n is a, c, g, or t
  misc_feature (803)..(803): n is a, c, g, or t
  misc_feature (811)..(811): n is a, c, g, or t
cgattctgtcctaccccaagcagaatgcatgcaaaagacacccttttcccacccaccttattggtgcccccaaacccctggcctgctgcgtagatggtggtgaggccaggccagcagtgctgtggccaggggagaagaaaataaaacgcaggccctgcccttggggaaggcccctttctgggcccccttttccaccagccaaatctgcctggccctcggacccctctgcctgccccaacccctttggaggtttctcggccttttctgtgccacttggtggggcagatggcctgatgggctagtgcttggggcatagaatgagggtccccctgaccacctgagcccaaatcctggccccaggtgcaagcagcacccctcgagggctctgccccagtatccccagggaattcacacccctccccttctcccacagccaaggacagacaggctgcctggacctgagcccaacagccttcagcctcagaaacgcatggggggccacacactccttatatcctcccacactaaggttcccctggccccacgggagcttcaggaaagccccccaagttagccactgctctaggacgagctctgtgtctcccacaccacaggcctcgaagcagggtggctggtgggtgccctgcaccccaatcccaggtccccttggccccctatttttctcgggcccattggggcctgtttctcacctgctggctggaccccctgaagggccgttcccagaggctccccaggaggctcaaggctgggggctttggtggtgggngtcggggggtccccgncctccagnccccccgctcccaccccccgagcctaccctttgtctcgcatgagtggcatattcattcccggtggtggcctgggggaagtgggttggaccaaggtctgcctttaagctccggggatcagaaccatgtccaggg

SEQ ID NO: 452195 - DNA, 1116 bp, Homo Sapiens
  misc_feature (183)..(183): n is a, c, g, or t
cagcagccaccatgcccgtggggccttgcccccagccccttttccaggggaagtcccgttgatttggtgggatgcccacataggttctgctgctgctgctgctgggaagaccagtgctgtccctctgcgagggcccaagccgttcagaaatcccgagccagctagggtgtaaacggtgggggncatgtggccttctgcctcacttccctttgtcacttgcaggctcttcttgttttgtagttcagagggtttgaggtgcttgaagcatccaaagcaggtgtgagccaggcagaccaggatggtgagcagcagcaccaggaaggtgaacagagtggcggggggccttcataccccaggcgcaggaaggaaaagaagtagagccagaagaggcacaggatgggggctgccaaggcctggttcacagcggcaaagtggatccccttctatcagcttggctgggaggtagacgaagtagaggttgtgccggtccaccatgtgcttgagcaggatgtagatgaggccaaatggcgcgatgatgggacaagtgatgctgtaggccacgatgacagtgaagacacacagcatccatgcatacatggctccaaactcgtactggaaggcctggttctgcttgacattcctgcggtcagcagccgtcttggccatgatcatgcggaaggtatagaggatgagacctggcagccgcagcagctccatgccattgccgatgaaggctgaggcgatgacatagttcacaaagaaggcaccctggtcaggcaggaagacgcactccaacctgatggaggcctccgaggaagttttgtcaaagagccaccggaagaaaaaatctagactggtgagacccagggagggcaggatcagcaccatgaagatcaagaatatgtagactttggtcatcatgatctggttttcccccgacttggtccagtgagactccagcagtgtagagtagtagacaatggaggggagcagggccgagaaggaccagagcaggagggtggggaagaactggctgatgatcgggttattcagcgcatggatgggtttggtgacattaaacttgtccatggtggacatcccggagaattccggacc

SEQ ID NO: 452196 - DNA, 610 bp, Homo Sapiens
  misc_feature (209)..(209): n is a, c, g, or t
ccccgctgaccgccatgctgaccttcttcctcgtgtcggggggctccctctggctattcgtagagtttgtcctctcacttctggagaagatgcagacacaggagatcctgaggatactgcgactgcctgagctaggtgacttgggacagtttttccgcagcctctcggccaccaccctcgtgagtatgggtgccctggctgccatcctntgcctactggttcactcaccggccaaaggccttgcagccgccatgcaacctcctgatgcagtcagaagaagtagaggacagtggcggggcacggcgatctgtgattgggtctggccctcagctacttacccactactatgatgatgcccggaccatgtaccaggtgttccgccgtgggcttagcatctcagggaatgggccctgtcttggtttcaggaagcctaagcagccttaccagtggctgtcctaccaggaggtggccgacagggctgaatttctgggggtccggacttctccagcacaattgtaaagcatgcactgatcagtttatggtgtttttgccacaaaatcggcagagtggatcattgtggagctggctgctacacatattccatggtggg

SEQ ID NO: 452197 - DNA, 1052 bp, Homo Sapiens
  misc_feature (243)..(269): n is a, c, g, or t
  misc_feature (831)..(849): n is a, c, g, or t
acaaagggaggggtattaccatttcaagaaatttccaaccctttttcaaggttcaaggcaattccccccttatttttccaggtatgtaccacactttcttcctaggaatgagggatagggtgtctaggccaaggttattacaaaatttccgggaatgtgggcatttcctagtccccggtatttcataaaggcaaatctgctgacttggcattaagactctaaaaatagtgtgatcaaactggnnnnnnnnnnnnnnnnnnnnnnnnnnnagaaggtgtttgtttgcagaaataacatttacaaactgtctatacagtacacagtactagtacatagaaaatagattctaactttatgatcccctttgtgtaaggcaagactgaatctgtccccaaatttagtcagccagaggtacaagcaagaaacagtggtccatgaatgaatatgcaaatcagatgcctgcgtattaacgtattaaaaatctggagaaacaagaaattccactttttatctgtgctgattctggcttgttggatacatcaactacatttcttaaaacactaacatcacctgggtggcaacagattttgttcaagtggcagctacccaaaacagtttttgaagagtccagtatgcaaccggaggactgcagccataccaggccaatttatgtagcacttacaaaagaaaaagtatctcaatactctatccatgctattgctattcaagcaacagcaataatacaaaatattacaagacagatcacatatgattgcagtgtagaccccaaagactttgttttggggatgctgttagttatacaagacttcnnnnnnnnnnnnnnnnnnncacaaacgggcaaaactcattggcggatgtaaacatccctgttccactccccagcctcattccgtttttttgatatcacttctccatccttttcacagtagcgatccttggatttatgacggctgcgctgcttgttgcactcgttgtggtcctgctctcgatccacgtcccgggaacggtccgatcccgggaattccggaccg

SEQ ID NO: 452198 - DNA, 1214 bp, Homo Sapiens
  misc_feature (83)..(154): n is a, c, g, or t
  misc_feature (210)..(210): n is a, c, g, or t
  misc_feature (256)..(361): n is a, c, g, or t
tcccaaattttcttggaagtacccagattcttttttccttcctccattataaggttagattgtccagtttttattgttgtccnnnnnnnnnnnnnnnnnnnnnnnnnnnnnnnnnnnnnnnnnnnnnnnnnnnnnnnnnnnnnnnnnnnnnnnnattataccatggtgtaatgattcccaaaaatcaaattaagtaaaaccatccttcanttaatttatgtagtagttcggtgggggggcacttaagcaaatttgnnnnnnnnnnnnnnnnnnnnnnnnnnnnnnnnnnnnnnnnnnnnnnnnnnnnnnnnnnnnnnnnnnnnnnnnnnnnnnnnnnnnnnnnnnnnnnnnnnnnnnnnnngagagaagttttagtgttactgaaatcagactttctgacaggaatttgcagggatgctatacacaaactacacaaaaaagtgcaaaccaatagtttcttggaccaaagagtcaaaaagggtcacttttttaatatattagtcaagcagacaggggctatactttataaataaatacacattatctggggataagtgtttaaaaaattctttacttatataatacaaaacaggcttggggatcagtcttgaagcatgaatttttacccagtgggccatgttgagggggttgcagcacaggcccagaaaggaaagcaggctggggctctgagggcttgtgagacgaggacgctgggctgagaagatagggcttcactaggcggagggccccagggtaccccatacacaagcctgccttggcttctcgtccaatttggtgcatctcacactacacagccctgccccaccctggtgtcagcaggcattcagaaagcctcacacttctgctccagtgaacactgccaggatagccctctgaacttccacccacccatcttctgcccatttgttttctttgtcttcaattccactgctacccatcctaccccagtcccttagcctgacaaggcccaagtgtctccaccctgtgctgcagggcagttaagcaggatcagatgccgtgccaatggcctgctctgagctttggcctctctctgcagttgtatctaatagaacaaatacagtaattgtggagctgagcttaaaatattcagacctcaggtttcagagtctgactggcatgggtttgacacctgcctcttagaagctctacttctggccaggcacggtggctca

SEQ ID NO: 452199 - DNA, 1171 bp, Homo Sapiens
  misc_feature (92)..(108): n is a, c, g, or t
  misc_feature (129)..(280): n is a, c, g, or t
  misc_feature (338)..(371): n is a, c, g, or t
  misc_feature (1073)..(1123): n is a, c, g, or t
acctttcctggcaacggtccgggattcccgggatcgaggcttctctgtcccggctagaaccactgcctcactgctttatagattctgagtcnnnnnnnnnnnnnnnnnggcatggtcttactgtgtcannnnnnnnnnnnnnnnnnnnnnnnnnnnnnnnnnnnnnnnnnnnnnnnnnnnnnnnnnnnnnnnnnnnnnnnnnnnnnnnnnnnnnnnnnnnnnnnnnnnnnnnnnnnnnnnnnnnnnnnnnnnnnnnnnnnnnnnnnnnnnnnnnnnnnnnaagcactcactgtgttacccaggctggttttgaactcctgagcttaatcagttctcannnnnnnnnnnnnnnnnnnnnnnnnnnnnnnnnngtgtgagccaccacgcttggccctgcccgggagtcatttttgtatctacaggtatcttcctatgctgtagacagatgcccttttttgaggcaaaaaccctagccatttttctcttctccttcagagtctggaacatcctctcaactcattcaagtgactactgcctggtgctcttggtggggatgcagggaggcctgagaaggccagtgtctatacagaaagttctaacctagtgcactgagtcaatgtgggcactttaaaagccctttcacctgcccagtccacgaaaccgccccctacagtttggcgtttgtaaaaacctgggggcgtttgaggggcaaaaaaggatcaccctccaaaggttcacgcccttgccatcttcgatcccatacaaactttaaccacctcgtctccacacggaaacgggccacactttttctctatccacctttctcccttcccctaaaggcttattccctgcttttcatccatcctgcacttttcgttccgcccctcttaacttagattccccttgggaccatagccttcccgccaactccacgaccctcaaacactcagaccagaccatgctcgccgttcctacaactttattgtatagcagcgacggaggctcccatttatcacaatcctccccccaattctctaactttatcaccgccataagccacctatccccgctannnnnnnnnnnnnnnnnnnnnnnnnnnnnnnnnnnnnnnnnnnnnnnnnnntcactcaaccttgtcagtctaatcgtagacaagcccccggatctttat

SEQ ID NO: 452200 - DNA, 1044 bp, Homo Sapiens
gctaatggcgcttcaaaattctgcagtgcaaagaagttgctggggttgcggagcggagaaccgccaggaggctggagcccagccaggcagcctcctcgggcacacggtgaaggcgccggaactacagctacctccgcggcgccgcttcggccgccatatctgggtacacgggaaccgcagaggacaaactctcacccgcgttttcgatttctgcgctttcttcgagtgaggcaagacctagcagaggcccaagcccgtccctccctgccaggagcagcctcatgcggaccgagccgctgtgcggggcatcccctctgctggtgcccggcgacccctactctgtggtggttctgctgcagggctacgcggagccagagggtgtgggcgatgccgtgcgcgccgacggctccgtgaccctggtcctaccccagacccggggcccggcctccagccaccgagagtccccgcgcgggagtggcggcgcagaggccgccctggaggaggcggcccgtggccacatcctggtggacaccggggggcccctgggctcgggaggcgctgctgggggcgctggcggggcagggcgtggccccgggagacgcgaccctagtggtgggggactcatgggcactcgggccacatccggcaacttgcggtagcttcctactcccgccccgccggggcctgcacgaattatgggcttcccgcgaaggtccccaccctgaccccccgcgagtgggctgcaggaacaacccccagatttacctcccgcacgggctttacgttgtccgccccggaccctctccccctcctttgacagcgtacatactcctgcagcccctaggcgcctgtgccccaccttcagccgctgcctctgacagtatgaccgtcctcctccctccccgtgtccatgcagccctctatccctagtccctccgtttccctgtccgctcattcccgtccccgtcctcgcgcccgcttcatcccctaagatgtggggacggagcctccccgtagaagtaaccgcctgagtccgctgctccc

SEQ ID NO: 452201 - DNA, 1140 bp, Homo Sapiens
  misc_feature (39)..(39): n is a, c, g, or t
  misc_feature (84)..(84): n is a, c, g, or t
  misc_feature (86)..(86): n is a, c, g, or t
  misc_feature (163)..(163): n is a, c, g, or t
  misc_feature (195)..(195): n is a, c, g, or t
caaggtggtgattccggaaaggaggggccctggaatttnataaaaatattttacagccccccaaaaaggcccaaaaccgggccntngacacatgaggtgtcagtccagggagaggtccgacaagttcttcggcacaatgctgcaggaagtcaaagtcaggcancgaagaaggggcacgcgggaccactttttggncctgatcccgcccctgaggggtctccagcagcatgctgcggactttgagcactggcagcttcactgacttgtagatcatctgcagaccccagacctccccacagttcctgcagctgatgacacccccaggcttccagtccttgaagactttgttgatgaccacaggatccctggagacattatagtagttcgagaagttggggttcacattgacatggtgggtgccctcccaccgttccgcaggttcgctgccatgggcccacagccaccaatgcagttgatgcagagtagctgcacgtgctccactgggaactgctgccgctggttctcccgctgggctgcctgggccgcccgcttggttcaaggctgcctgctgcagatcccggatcttggcctggtactcggcctggtccattttctgcacagcagccactgcctgctccatcagcgtctccagcgcctcgttgatcagctcccgcttcagctcccggctaccttcagttgctacaaacgcgtatacactctgatcggcccgggcacggcccctggcctggaccatggagatttcattggtcaagagcccataacgcaccaccacattgcaatgtgggatgtccagcccctcctccgccacactcgtggccaccagaaggttcagggttccatcttggaacttctggatcacttcttgctggtccctcatcgaacagggccagcagccggcgctcggcacacaggatctgggttttagtgacgtgctccctgtgatagaaatcctgcagcgcagccaaggcatccacggcgcggacggtgtcatggatgagcagcgcgtcattgtagcgcctcaggtgaagcgcatacacccgttgctcctgaagcccagccaaagccgctgcgggaatagggcgcagggtctgagcagcccacagccccgccccctccgct

SEQ ID NO: 452202 - DNA, 1121 bp, Homo Sapiens
  misc_feature (876)..(902): n is a, c, g, or t
  misc_feature (904)..(921): n is a, c, g, or t
  misc_feature (923)..(923): n is a, c, g, or t
  misc_feature (925)..(929): n is a, c, g, or t
  misc_feature (931)..(931): n is a, c, g, or t
  misc_feature (933)..(933): n is a, c, g, or t
  misc_feature (935)..(936): n is a, c, g, or t
  misc_feature (940)..(942): n is a, c, g, or t
  misc_feature (945)..(945): n is a, c, g, or t
  misc_feature (951)..(952): n is a, c, g, or t
  misc_feature (963)..(964): n is a, c, g, or t
ggaccggtccggaattcccgggatctcgagaaacctcgtttctcatctccaaatgtgatctcctttggtccagagcagacaggtcgggccctgggtgatcagagcaatgttacaggccaagggaagaagctttttggctctgggaatgtggctgcaacccttcagcgccccaggcctgcggacccgatgcctcttcctgctgagatccctccagtttttcccagtgggaagttgggaccaagcacaaactccatgtctggtggggtacagactccaagggaagactgggctccaaagccacatgcctttgttggcagcgtcaagaatgagaagacttttgtgggggggtcctcttaaggcaaatgccgagaacaggaaagctactgggcatagtcccctggaactggtgggtcacttggaaagggatgccccttttgtcattggacttgcccttctggaaattaccccgagagccagggaaggggctcagtgagcctcttggagccttcttctctcccctcccaactcagcatcaagcaggcattttatgggaagctttctaaactccaagctgagttccaccagctttaattattcctctagctctcccacctttcccaaaggccttgctggaagtgtggtgcagctgagccacaaagcaaactttggtgcgagccacagtgcatcactttccttgcaaatgttcactgacagcagcacggtggaaagcatctcgctccagtgtgcgtgcagcctgaaagccatgatcatgtgccaaggctgcggtgcgttctgtcacgatgactgtattggaccctcaaagctctgtgtattgtgcctttgtggtgagaataataaatatgggccatggggaannnnnnnnnnnnnnnnnnnnnnnnnnngnnnnnnnnnnnnnnnnnntncnnnnnananannaaannnttnaggggnnccacaggttannttgttacaagggggtcctctgttaaggggtgtcccctattagggtttgggactgtgggggccccctaaaccgccccctcaaaatgtgcaaaaacttttaatctgtgggaacactctccacctgggggaaattttatataagtggcaagttctttttt

SEQ ID NO: 452203 - DNA, 1210 bp, Homo Sapiens
aagggaaaacccttttctaactgcaataaaggggccggcaataaatgggcatcactttggtaattggggggttttccaaaaaggcaatttcccccccagttttttggcatttctcaaggaaattcccccgtttggccgggtaattaatgggctccctgggggttcatccagtggaattcgggattttgttcattaagtttggcaagcaaaggtcccttcggagggcttttcccggggggagcccaccggccgggtagccttaaagaggttcaagtttcagtacagtgcttaaggctttttcgggaaaccccgaaggcaaggcgttcaaaaggggagttcaagaactccccctgtgctcagcaatgcaggaaaattcttcaagacgaaactgttaagttattttatccacttcggttagatttgtaggtgttggcaatccgtccaacttcagacacagttgttctaaaagtgacccccagatatgagaaatactttacagaagtccaaaactggcagaatctgtaggaaactggcagcttccagcgtgtcttgaaggttgtccatatttaagagaaagctttgcagtataaatgaaatccataattgttccttagaccgactttgctcacaccatgaagtttaatgcacattaaatcttgttctttcattccacctgtgaacatagccttgaagtaatcactagcagatgccatcatgactctatgcacagggaaagcatcatctgtgtcacctggcatcagggtcacatcacaaagcaatccttcaagtcgaagctggtcaaagccctgtaacaccacagaactgtgggtattgctggtaaagatgcgtgtaggtcctgccttggaagactgcaaatgggatgagaggcccatttcgctgcctccaagggacaatttcatgtgttggtcttcctcttccacgagagatatgtatgctggagaaagtggagttgacctggatgttttaagcacaggaactgggaatttccagatagcaggagagctcgttttccatttcaatggcatgttgtcaccacggtactacaataacagtaaagagcgtttccataacagactaccaactaagacttccattccactctgtcactgatacagcagttggtctgccgcggagaacaagctaaggattctgccagtgcccttaaaccgatgcttccaatcagtccgct

SEQ ID NO: 452204 - DNA, 1087 bp, Homo Sapiens
  misc_feature (99)..(99): n is a, c, g, or t
  misc_feature (125)..(126): n is a, c, g, or t
tgcaaattataaatggttttccccagatttagaaaaattatttaattactttcatagatagtaccctaataataggttaaccttaaccattacaccccncctattattttttaccccctgggcanntgaaaatgaagttaccattcctaggccagatttttagacaaagctttctaaaaccatctttataaagtaaattcagatatgccttacaataaaaagacataaaagattcatcctgagatgaattcctgagtcaataactaaaaaccatttcctaccagtgcatcactaccatgtaatccattctacgcaagctctacaaatattgagtcaaatcctgtctgtcagaaaatgaagacccaataagtttgccgaagtattcagtacaagaggccatttgtcttgcctttttctgacatgtgcatactataaaatcacaggtagccaacatttagtatcagtaaaaaacaactacgtttgttcacctgtttggcatagggagaaaacaatgtatctcatagcattaaatgatacagccttaacacatatgatgctcatatttgcaaagttcccaaatgttgagaagttctagtgaaaagtcatactattgtgcaaagatgagaatttggagccaatgtctgtattcaaaataaccaaaatatattttaaagcaaaatatatcctgatactactatagattctaggaattgtcctaaaagagtaaagtgttgtttcctttctgaacatgaataacatcaaaggaagaacccagttcttaagacttaagtaggaaatttatagaaatttgatttataccagtagtaataacattcataaggaaaaactattaggtaacaattttctccaagaagaggatcagattacttaaaattgttggagaattctggttgtttgtgcaataatcatagtgatttacattgcttttcttctttcagagcaataagaaagttatttggggtagtacttgaaataattcatatacacagtcatttaacatagatcgtttctagtcgagtatgagcatacattcatgggaacaatctgtatcccgggaattcggacc

SEQ ID NO: 452205 - DNA, 488 bp, Homo Sapiens
  misc_feature (322)..(322): n is a, c, g, or t
atggtagtgatgcactggtagaaatggtttttagttattgactcagaattcatctcaggatgaatcttttatgtctttttattgtaagcatatctgaatttactttataaagatggttttagaaagctttgtctaaaaatttggcctaggaatggtaacttcattttcagttgccaaggggtagaaaaataatatgtgtgttgttatgtttatgttaacatattattaggtactatctatgaatgtatttaaatatttttcatattctgtgacaagcatttataatttgcaacaagtggagtccatttagcccagtgggaanagtcttggaactcaggttacccttgaaggatatgctggcagccatctctttgatctgtgcttaaactgtaatttatatggccccgctaaatccctaacttgggatctgggaatgcattagttatggaccttgtacccttcccagaattttcaggggcatcgtgggg

SEQ ID NO: 452206 - DNA, 966 bp, Homo Sapiens
  misc_feature (400)..(400): n is a, c, g, or t
  misc_feature (438)..(440): n is a, c, g, or t
  misc_feature (451)..(452): n is a, c, g, or t
gtctggctgggcctgttggggcgtacctgtaggagagttctgggaagactcaggaaaattacaaactccatcacacgtggttagaaatgaccttggagagtgcactgacagctttctgtttcaggacaatgttcaggtggctcccctatgccatctaaagtcctacccagctcatcctgggcagaagggtctggagctggtccccttagtctcttctaggactttgatctcaggatcagaggtgttgctcttcatttcccgaggcactgcggtattaagcagtttgtaacttggagaacagtttttgtgactcttgaaaggtttattgctcaagtagtctttctggctgctgggcagaggaggaggaagacccacttctcctacagtttgctgaggcccntcctaccccagagtccacaaagcttgtctttctgatcnnncctccaggatnntgctgtgccagggctccaggcctaccctgacctcctgacagtggttattcaggttagggtcactggatgtacgagtcagggggctgcttgtgtcacaggcagaaagaagatcatccatggatctggttttaggtaatctgtccagagagcggccagagaactcctggctctgggccactggggaaaggtaaagatccatgttttcttccccaagtgtgcatggagatgatgctggcagataaacagctgtccagaggtgcagggcccggacatgacaaacaggatgcaggaccatgtctgagctgggtgtgtagaggaagttatgaaagtttttattgccagctcgaaggagcgcccacacagagcaggtccgcttgtagatgttgcgcttctctcgctcacaggggttgttggccaggaaggtgccgtagaggcaggagtatgtgtgttgcacccagttttaccaggaatgctctcattaaattcaaacaggcaggggaactgcttaagcaac

SEQ ID NO: 452207 - DNA, 836 bp, Homo Sapiens
  misc_feature (647)..(681): n is a, c, g, or t
ccagggactttccatggtgccttttccccgcaaggattccccccttgggttccccccaattttcatgcaataaccccagattctggatttcgggtaatttttttctttcgggaggtttggaattttcataatctgcaaaaaaaacctttgatgggataggctctggtgggctctgaaccattcagcatgacgtggatcaccccagaactatccttggaatactggatggatgcccttttccaaagggaatccacaggattattttcacagtcttctgatgtagggcaggattggtaatcgagtccagagtcatttttctgtcgacaccagctcaagaaatctgcaaccctgccatacagaacatcgctcaggggcataaaacgacgggtgttgtctgcacagctgttaacaaggaggtggctattttcccagaacagggacttatctctgggaatagagtgcctggacaagttaataaaaaggtcatagtctgagggcagcacggagcagggatccttgtccagcgccactttaaaggcttcccagatggctgtgcagttcttgttccgctgctcgggactcagcagtgcgcggtactcggcgcagcggcccaggaagatgtcccgcaagtgtgcgctggtgccctnnnnnnnnnnnnnnnnnnnnnnnnnnnnnnnnnnnagcagcaacagtagaagcagaagctgcagcagcagctggagcagccgcgatgccgcgcacccctgggccgccatcggggaactttggtccctccagtcccgtgcttcctccactccccttctctccttctaccaagatcccgggaattccggacc

SEQ ID NO: 452208 - DNA, 1223 bp, Homo Sapiens
tagtaaaagaatgtttttccttttaaaaatactcccaaggctgcctgaaatgtaggcacctctggatttggggtacccctttgcctttccattaagtgggagataaacagattacagaaaagtcgttcaagaaggtcctattaaaacctttaaagctataacttaaaaatttaacaaaaagttcaaaattaattttttataaatagtgaaaaccactaactgtttttttaaagggggaagaatttaatcactataatgtcactttatcaaaacaacctaagagcagtacataaactatttgttaagtcaaaattaaggtctccatgtaggtttgttaattgagccagtgcaccaaaatatttttaggtttcccagaatcccagagaattgattccctttcttatatagccttccagttcttctatgaagattttctgtagcaaaacattattcctaaatccagttttctgaacatgccaatgccagtggtcatcatccagcattaaaatagcttttatcgccctcaatgtccacttcctgatcagaatcctctgaaatctctgattcaaggtcttcctgggaggcaggggagggcgaacattgagagctatccaaagaagcacctttattctgttcactgggcaaatcttgcctctgatcacaggaactgtccaaactttccagttcttcttttttattgctttgagggttctcctgttttagtctcctccatttagcgcgtcgattctgaaaccaggttttgacctgtctctcgctgagctgcagcatcttggccagacgcttccttctcgggcggagagagatatttctgcgtctcgaatttcttctccagctcgatggtctggtcgttggagaatctcacctggccgcctttccttttatgcagaggcctctgcaagaaggggctccagagtagaggtttgcctttaaccccaaaaagaatgggcactaccggctgggcttacaataccacgaccctctttccccagtggctctcggatttatacataactttttgcccccttggatctcccttggtgagccgcacttgcgaacaccgggtgtgtgcgtgttggggaggagcggggctgctgcaccgacaaggcctggctgcgcgggaagcgctcgggcccggacacccgcattaggttgcgcgaggagcctccaatcctggccgggggagccgcggcctcctctgattt

SEQ ID NO: 452209 - DNA, 1149 bp, Homo Sapiens
  misc_feature (359)..(371): n is a, c, g, or t
  misc_feature (420)..(443): n is a, c, g, or t
gtgtcgcctacccactgtgcacatctgaaaactcacaacccaagaaaatcccatcctattttccttatccttggactggagtcaccctattccttgcattgcctgtatacacctcatgcttatgcaatgggaagaatatgggggcccagggggtgtggtactaccttcaggcatttggtaactcaaagaaggctgtacagatatattttttcaaaagaacaaaatccacagatgcaatgtgagttgcgtaagaaacagagtagatagactaaattcagtgaaggaaaggaattgagagatttttcttagtaaatagattattgttaagtaaatagttattaaaaatatatctcactgcnnnnnnnnnnnnngcagtatcttcactcaaaagtcttgcttggaagaataagcagaaagaannnnnnnnnnnnnnnnnnnnnnnncacattcatactaacaagttttgttccatttgttattcaataaaacaaaaatttctaggtatttgctttattacctttcaaatatttactgttgcttggccccaagaatggccttgtacaacttatccagaatgtctattaggattctaatgttatgtccacttacaagtagagacagtaaaaggatgaatacccaatctttagtgacaatgcagctgatttatgaaagagagggctacactgctatggaaacttagcttcaaagaaaatgcaatgtatctgcaattaggtgttcattttttactacattttattaaaacctgctttatactttcaactgcttgtaggcacaacttctgcaagtttaaatatttgagctttacaaataaacatacacatgctcagttttttaagtaaacctgtaaaatacccaggaaaggcaaatgttcattgttttaattagcactggggattttataatataatggtttggcaattttttgaggcattgtttaacatggaaagtccaaccactggcctttgtggaaaaatgctatggtccctaattcacaaatatggctggggtaaatttaactttgccctaggggaaaagcaaaatgttaaagaaagaaactcctgggttcctataatcatattatatggcccttaaactatttggcatggaaaggttcttttgccatggaat

SEQ ID NO: 452210 - DNA, 448 bp, Homo Sapiens
ctcgagccggtacaagacgtccatctgcatcggggcggaccagcggaccagcggaccacctgggtgctgtcgtagttggaggtggcctgaggagctcagtgtgctaaggtgtgtgttccagtcccccacaccacaggctgatgaataagctgtcagtggtaccaagggggctggaatcctcttcaccacagtttttttaatttctcaaggatttactggcactttttttcttttgcttctgttttgccaattgaagggcatgttcttccacctacatttttgcaactgtctactgttaagctgtggctctcacattgctctttatggagcctgcttgtgttttcactgtgggccaagtcatttatcttggactctaacttgtattcattaaaagtaatgagctcgaatcccaagtttttttgggtggaggtgtttttcatggaatctg

SEQ ID NO: 452211 - DNA, 1351 bp, Homo Sapiens
  misc_feature (1105)..(1127): n is a, c, g, or t
  misc_feature (1191)..(1249): n is a, c, g, or t
gccgcaacaccccgccggcacggtccggaatttttcgaatagagggagttgggccctagcttctccaaatcagtagcttgaagaaaggcaaaggagacacctgttccttcccaaccaccgagcttcaatgaggaccccagccccacttccctggaactgccgaggactctgtttggcggggccagtcgagcagcctgtgtggaaagacaggagtgagatctggactcaccaaatccctgaggacagatggcacccatggcccccacccacggaaggacttgagttgtttacaagccctgcactgaggcagattggtgctgttcgcagagtaggcctttgcccgggggcagacttagaaggaaggggagagacaaagggggactgagtttcatccccagaagtttctcagctcctttgacagacattcaagggcaggagggagccccaaagcataaccagtggccagaggagtgggagggcctgaggcatcacatcttgcagatcagaatgggatggaatccacccaggctccagctcatccctccaaggcccctggtctctgcgcacagcaaccatgggacatgcggagaaaggggatggggaggccacagtggccctttcactcttctccctggaaacccaaactggtaagctcggtggccctcccacccgggggggagggttaaaaaacgaccccccttcccggggttgaactccccccaacccagggcacacggttcgaagcctccgggcttacgaaaccctgctgggaggcgccccattggcggatcccgcgcttgttcccgcccggatccctacccccccgccgcaattaaccctttttagacacccggcgactacggggcatatccgcacccccgacgacggtaccttattcgtttttaacccgcttccttgatccccccccaaagacggtctcttttcgcggacaagtgtattctccctacccccccctcatgtgcgcattatccgtatcgataaacaacagccgcgccttcgcagtgcagatatacccctcccatcgcccccacgcgatgcagcgacgcccgcaccgtaccccgcgccgttgagacgtttatattgnnnnnnnnnnnnnnnnnnnnnnntctactatatttatcctcttgtgcccctcgcccctgatcagaagtcccagcttgctagagtatnnnnnnnnnnnnnnnnnnnnnnnnnnnnnnnnnnnnnnnnnnnnnnnnnnnnnnnnnnntaataccgcgccccccccgttcattctatcattaaatcattgtaccccctcctcgtcccaaacctccccaccggggttagaacaacatacaaacccctcgtg

SEQ ID NO: 452212 - DNA, 479 bp, Homo Sapiens
  misc_feature (22)..(22): n is a, c, g, or t
  misc_feature (59)..(59): n is a, c, g, or t
  misc_feature (101)..(101): n is a, c, g, or t
  misc_feature (126)..(126): n is a, c, g, or t
atgttaacaaccttctccaaanccctggccttccccaattggaactaagatgctttccnaatgtttcttctgcccttcccctgaaaggaacagaatgaaanaaaggaaagctggaggctgatggangccaggctgggagcaaagggatggccgtggcgaactgcgggctggaaagattccccagataacctggtttcaccttctctgaaggtctatggagggcgtggagcactgaaggtgggaacatctagggtaaaaaaccattgtcctgttgttaaaggagctaagttctgtgatcacctagggacagctgtggcctcaaagtcacctccatatggttcctagcccagggtctgccatctccttggctcttggagtcaacccagaagggactcctcttaacctcccacaggttgagcccaccagcttacagttggtttccaggagagagtgaagggcactgtggctcccatcccttt

SEQ ID NO: 452213 - DNA, 1204 bp, Homo Sapiens
  misc_feature (20)..(20): n is a, c, g, or t
  misc_feature (81)..(81): n is a, c, g, or t
agcaggacacacttgtggcntgaggaggggaccctgggcttgtgggctcggacaggaagcaaggggaggcagatgagactncacacagctttttgtttgacatatcctaagccccctgcacacgccactcaaggtcttctctgtgccccatctggtgcaggaggcctgtctgtctgtgaaattgcttttagcaatagctgtggatcaccactgagagggtgaatatacaaatgaacaatgggcagaccgtctatgatggcaaaacttggacctccaacctttgaggccaaagcacatcatgtgcggcctctggcgggactcaggtctgggaagcgactgcagcttccctattttctagctctgcttccaactaagaaagtcagatattctccccaaaccaaccccataggatgcccgctgccaggtggcccacccccagcttccccctgacaacagcctccacccagggcatacccaaccagagccttcccatcttctaatgggaagcttcccctccccaccccaccttcaaggctctgccacgcgcagggacagtgtagccttcttggctacagcttcgagtgagcagcctctgccatcctcgctgatgtccccggttaccgtgaaggctcctccaggacactgtctgcactgcctgtcgtccagaccccacctctgcccaggcaccctggccttaatgctgcagcccacagggcacctggctggtgactgaggcctgttctgagcccctcgctggcacattcctggacttctcagtttggtgccagggcctcattcctgcttcccatttgctctgttacaggggaattagtcccttcctttactctttttttgctgtgctttctaaacgtggtgtttgtcataataagaagcatgaaggggcacatggatcagcctcacagacaggtgagtctgtaactcttaccagacccttgttcaccatcatgaaccttgggttgtgggatcaccaagggaaaactggggggaggttcttggccgtccaagggggtttttggtccttgagaaacttgggactttttagaaaaattcttcctctgggattctttgcccctgtggggggacggagggcaccccaccactctccaagccgccgtccactctcctaatcgcccccccgtcaattaagcgccgcataatgcccctaagccccgccccccggatc

SEQ ID NO: 452214 - DNA, 1171 bp, Homo Sapiens
  misc_feature (59)..(73): n is a, c, g, or t
  misc_feature (127)..(187): n is a, c, g, or t
attaatggtgtgggggaaatgggggtggagatatagggacaagtgtgtcgcgtgttatnnnnnnnnnnnnnnnataattggtaggcggggcaataggggggtaatagtgaacgcaaggacacttagnnnnnnnnnnnnnnnnnnnnnnnnnnnnnnnnnnnnnnnnnnnnnnnnnnnnnnnnnnnnnatatggggtgtcagttctttgcgcgcgaagagcagagggttcttagtttgttgtggagaggggtgtccagccatgtgttctcaagattcgggcccagcctgaacaaatgtgaaagccttttaggatacaatcattaggccatttccatcaggctcaatagcagcataatgtggcactgactttccacggagaatatcacgcttaataatttcatattttttattatctggatttttcttactgatagtgacccactccagagaaacatagaaaccacttcctttcatatccaattcctctttctctattcgaagaagtagggtagctatagaatgttcttcagcatttagcagtgagatactgtgaattataataaaaggatccccaagttcttcattaaacataatctcccatttttcagaagcgctatttccacgttcacctgttccaatgacatacaatcttccagttccatctgacaaggtaacccaggtagaagatgagaaatggatagatgcacaaagacggttgtcacatgctgtcaaatctgtaggaagtcgaaacacctctcgtggttttcctaaggcagtgtccagcattactgttaaattcataattcttccaagggtatcaatatagtagacactgtcttgataccatgaatcacagtgcaggtaattatacattccaaaagcatgcatgtgttccagtgtatattgatcatctcgaagttttacctctgccacagctgcgtcaagctccagctggtaacaaggcagcggctcaagagagagcttgtaaccctcgaagcggggatccaacagaggtctcttcacccgtagggagcaattagccgccacctccatcgctttccagggccgcagcgtgagaattaataaagcccttgttgaaaggtccgcgcttcacgcctcgcacagagactgggaagcggcgtgttccctcgtccgaatcgccacccaggcc

SEQ ID NO: 452215 - DNA, 1103 bp, Homo Sapiens
  misc_feature (62)..(74): n is a, c, g, or t
  misc_feature (224)..(232): n is a, c, g, or t
gtttctggggggcgagtattttccgggtgtgtctttttagaataagagcgggcgggctctcnnnnnnnnnnnnntgttttacaccaatcgtttttatatggaggggaaaaagaataccgtgtggcaatcggcgcgggtattaagcaattcgggccccccggggaggcggattgttccgccgggtcttccgggataaggggcagtggctcttaaagggccccccnnnnnnnnncttcaccatccacggccgggtcaagtgcaatccctgcctcaagaggctttagctccagcagttttttctccgggtgttgggggccctgggtctgatcaagggggaggatggtgtggcaggggcagtgcctgaatccccaagaaagtggagccttcaaggtcagggctctgtgggcccagggttgggatttaaatcccagctccacaggacaatgaccttggccggtggcccatcctcttctggcctccatctcctcatctgtcaaaccgaaaagataacaggactcttcactgggctgctgtggggatcaaatgaggtgacaggtgtgaaccacttggcctggcccagagataagctcaatgaccgtcatgggctgctgcctatgttgtcgtgatacttccaatcagccaatccggggcactggcctcatccacaggacatctctctctgaacaagcaccacaggctcgatggttctgtgcagagcctcgcctgggatggagcactgcttctgtcccggctctgccccctgctagctgttattagtgcaagtcccttagcctctctgatcctcacctataaaaggggcacagttaccctggcctcagagggctagtgtgggggttaaatgagagaaggtcctcatcccccactctcctctgcattgagactgtggaccccaaacctgtttgggagcaagtgagcatccaacattggcagcccctgcccagcactccgcttcatcctccctcccagcaagtgagcagcaggccaggtggtagtggaggtaacaagccacctgtacctctgcataacctcggatgctgcgggactgaggctccttcctccggcatcccgggaattccggaccg

SEQ ID NO: 452216 - DNA, 1189 bp, Homo Sapiens
  misc_feature (271)..(283): n is a, c, g, or t
  misc_feature (457)..(481): n is a, c, g, or t
  misc_feature (525)..(589): n is a, c, g, or t
  misc_feature (611)..(611): n is a, c, g, or t
  misc_feature (619)..(671): n is a, c, g, or t
  misc_feature (676)..(678): n is a, c, g, or t
  misc_feature (832)..(841): n is a, c, g, or t
ctttttgtgcgtgttccgcgggtaacgttatatatctggcgtcccgcggcttattgcgtggtatttattacgcgaggaacaaatttgtgtggtgcgctcggctatggccgcgggatttgcttttgtgcggcgggtttctacgttgcacggataacatattttcttgcgggtcaccgcgggcgcaatgggcgtgtgttggtgcaaacatcattttactcttcgggagaatgtgtttatcgggtatcgcaatagcgcggttaataatgttgcnnnnnnnnnnnnntgcgaattttcgccgcccggcccaaggaagattggtgggtttgccataattaaagatatacgagagggcatttggcccgccccccgcatgtaggaagaaggcgggggcgagaaaagcttttccgaaagagaaaaggccccgtaaaaggggggcttcggtttcgacaataatttnnnnnnnnnnnnnnnnnnnnnnnnncgctctgcggtgtggggttggggcggtccggcccgccgccctcnnnnnnnnnnnnnnnnnnnnnnnnnnnnnnnnnnnnnnnnnnnnnnnnnnnnnnnnnnnnnnnnntcgcctgtgggtttgttgctcnctgggtgnnnnnnnnnnnnnnnnnnnnnnnnnnnnnnnnnnnnnnnnnnnnnnnnnnnnngttcnnngtcagttaatatttaattttaataatacttgttatgtttgaacagtcagcaatgcacaaagaaaaaatcttcagtgaatgtttacacacagtgtgaacacatgctttaaatatgcagtggaggaggaggggtgaattcacagttaacaaagctnnnnnnnnnntccttgttataaattacacaaagcatatagaaatatttctctgaatgcatagattaagactttaaactcacctaccagcaactgtgcagtcttattccactgcgatacgcagtagtcagttgaccacagaggattttataaaggagaagagagaccagcataggacagagatacatcaaacccacctctcaccagagacaccagtcccttgcttgcctctgtcgctaagcccagaacgtgccctgcagctgctcctctggaggccatctcccagccaggggctccactgctccactttaattaatctgggtggctgaaagtgttttaacccaagatcccgggaattcc

SEQ ID NO: 452217 - DNA, 1088 bp, Homo Sapiens
cataaaccgggtttctatataggtgctacaaaggccccccaaattttataccccgggtataatatgaaaaaccaattggccggttattttcccttaaaaaaccttaaacccccaaaccattgggtcttcattttttggcccttatggtagaaattctattgctttcatttccaggtagaggatttaaaaattttattgatttaggttcaggatttagatattgatattttggattatgtacataaagcagattcaaagggttaaataaaaaccagaattttggagtgtggtcaaataaggtgcacagatcccagaaccctcagagggcctgctggccctctccagaccatttgtgtccgtggtgcaggagctgggcccgtccctaacagctccgcactggcttagtgcagtggtgctcacagtttcaggaactactaggtgaagtgtctggctcaagtctgccaagtgtcttcactccatcgtcagaagtggagcactatcccctaggttcgattccccatgaaatattttatgatttccatcctctttgcccgctcttccaaataaggccctgtgatgccaacgaagggggcatggttgagggtctaaggctctcattagggcctaattctgtgtggatatcaacacatgacagacacttgactgcaacattcaagacatttaaggcagtgggttcatttaatgactacttttccaaataaatatttgtggcatgggcagttctaccatgtaactgtcattatctgtggtaatatctagcaaggggctgttctatttgaattggcatgtggattactggtttggaacactcagaatgctgggagacctgtttaccccctgaatacttacttcccttctgaatattcacacagcagtccacagaccaaagtgctgttgggaggatgtaattggcagctggcttcattactttgtgaatgaaagcaaaacaaagatattttactttgacccccgatttccagtcttgttaatgccagtcactcccaccagaatgctggctgaagaccaacccacagaggactaaggcaatggtccaatcccgggaattc

SEQ ID NO: 452218 - DNA, 1436 bp, Homo Sapiens
  misc_feature (40)..(40): n is a, c, g, or t
  misc_feature (83)..(83): n is a, c, g, or t
  misc_feature (170)..(170): n is a, c, g, or t
  misc_feature (228)..(311): n is a, c, g, or t
  misc_feature (1231)..(1313): n is a, c, g, or t
gcaaccttgaatgatacccacatcgtcaactcctcaaaangtagcctgtactttttcagcactacccacccagaaggtatggntagcccacaattccctcctagcaccttgtgagaaaatactgaacccagtttaactcctttggggaaattcaagttgggtcctaggtnacagatgcctggctgggcgcgatggctcatacctgcaaccctaaaactttgggaggtnnnnnnnnnnnnnnnnnnnnnnnnnnnnnnnnnnnnnnnnnnnnnnnnnnnnnnnnnnnnnnnnnnnnnnnnnnnnnnnnnnnnagggggtgggtacagatgctattaaatagtaatatataccatatatgcagaatggaaagcaaaatttttccaaaaatatcattcctcagaaaagagagtcaccttgtgtttttgtctttgtcctttttgaacaaaatactcttcaggaagacaatatgtcgtgaaagggtcacaagtaatggcaattttctgtcttataaaggtcacctagcaaaatcaggggaaaaaaggcaaagacatattgattaattattcctgagggtatgactttggataacaagtattggagatcattaagtaggcttttaaataattattgaacagagaaatacaagaagtacttatttatggtgattatgaatatgtaggaaaaaaaccctgatgtttaacaagtggttctcgagatgtagtaaaatctccactgacagcattctactcaatgtaaggcatgctctaccttagataactaggagggaactgttagaggactcacaatgttgtttcagtgatgatagagacccagttgtaaacgatgcatgtgaagtatttgaataaaattgtttgaggaaaaaccaatttttctaaattagtaccatttgcataatttgtgctattagatgtaaatgagtatttaaatactgaatcaataaatggtttaaatagacttaaaattatttacattcacaaaagtctacatttgaaatataggttaaataatataaactcttaaagctgcataatcaagttggaaaaaatgctaacacttggggtgttgatgtgtatgtaggtatggaggatgcaagaaagctcccctaggtgattgcaaccctaatcccctaccatttcccctccctatccctttaaacaactacagagaaaacagtgtctcacaaattataagaattgtttagggtccttannnnnnnnnnnnnnnnnnnnnnnnnnnnnnnnnnnnnnnnnnnnnnnnnnnnnnnnnnnnnnnnnnnnnnnnnnnnnnnnnnngcactctagatgattcataaaatcaggtaactttggaaaatatgggcctagagcattaaatgaaacagtactatgtgtattggtggcaccgtttcttgcatcccgggaattccggaccggtcc

SEQ ID NO: 452219 - DNA, 1178 bp, Homo Sapiens
  misc_feature (328)..(328): n is a, c, g, or t
ccctatcgtggatggggggggtggtcgcgattgagcggggagtcgaatgtatagggggtgtggagaggaagaggagcgcggaatattgggtgtggattaggatatatatttcggggtgttggggggcgctaattaatagggcgtgtttatttagggatggagagttaatattgtttgtgttggaacgggggttatgggaggtgtttgggaaagagagttttcgagggttttggttggggagaaaacagtggagtgccgcttttccgcagaaggatgttttttgggtgggaaccctttggcgcccaggcgagaacagaagtatttaagngtccagaaggtttcctttaaatgaaaaggggtgggggctataataaatcattgggttccatggacggaatcacatttaaaaaagggttaattataatgcaaaaggggagttgcccactttcacattccacacaaaactttttgttaacatttagtttctaacaaaacattaattaatgcactgttaatgtactacctttcttagatctcaaaatgtgttgtcaaaagcaaatgttacaagaacaatagtgaccaagatatttaatacagctaacacaaattgaacttcaatgtgattttttaatatttaaatataattttgattacttagaatttttcccaaggcaaatataatttgtctacattggaacacataaacaacaacccagaatatgctgccatggaatgttcccagaaatacatttaacagtttattataaatggtaaacaactcatcactcaacatttataatactaagcatattctttaaacttaaccacattctatttcccctcagacagttaacttttctatgtgcctggacagctctaagtttttaaaatgcagactgctgtgtttccactgacagtttaaattcacttttaatttttggtattcagaatatctaccacaacagcagttatgaagattcaagagtttgctaattttgctcttgaaatgtactcccctcacctcacagggacggcagcacatgagacccaccccaggtcatcctatgcacgaccttaccccttctgggtgggtaacagcttactttcataattacttagatcagcgattcccaactgtgctggatacatctcacataaccagtgtgatgcatgaatcc

SEQ ID NO: 452220 - DNA, 925 bp, Homo Sapiens
gtcttctgaacccagcagtaccgcgttccagctgcagtgtccagctccccagccgtgcccccatactccttggggaggatgcttcttggaaggtttgtgtggagagagttcaagtcagacccatggaggaagaatctgtttgctattttctcctttagaaatggttttatgatggcaaaatgcctttaaatattcgaggttcattcaccacatggactgcttttatccgaatggggaaaccatcctgggtttcttcagactgaatgagtttttctaaggtcaagtatatggctcggatgttttcagtaattggatagttgcttggtatccatctgtctgggcggatgcagacgacatggcagcccctggggtcagtgtggggcagcacggtgaggaacccggaagcaaggacatcttttaaggctgatggcttcaagttattgaagacttcgggccagcttcttctacagctgtggtagttgacgaggagctgcagggcccggtcgtaatcaaacttgcgggctcggaggaagcgcagcaggaaggcatcgtcgagggatgtgctcaggttggggtactccttccgcaccatgtcacgaagggcctgcacatctcgaagtctccattccggcttttcctgcagctcttcccgggctttggtgaccaggtcttctgtcagtgagcacacatagcccggaggctcaggtggtggtggcagctcattttcagagagtgaggccacagaagggctggttctcagagagtcactttcttcggacattagctaccaaggtcccaatggttatctcttggaacagaacggcccgactacgggcggagcgcgggtcaatcggcggcgggagcctcgtccggcagcgcacgcagaaccgacccgcacctccctgcccggcctgcccggcctctc

SEQ ID NO: 452221 - DNA, 1225 bp, Homo Sapiens
  misc_feature (267)..(275): n is a, c, g, or t
  misc_feature (460)..(485): n is a, c, g, or t
  misc_feature (532)..(827): n is a, c, g, or t
aaggtttaaccctttggaaaattaaaggggggagggttccccgatttaagggcatatgtccccttcgggttcgaagttcggtttttttggggttaagttccccttttttcgaaacaattccaagatggacttataaggtaggaaaaattcaaaggcaaaaccctccagcaattcatggcctcccaataaatgaaaatgccagtttagggaatccttttggatccccccaaaacccacaacaggggcaaagttcattggtaaacagcnnnnnnnnnttacatgaaccactataacattttttaggatattttgtctttttttcaaaaggaataatagtaacaaaaaaaccaagagagctcataaaaagtattctgagtataaggaacataatcttaatattccatactactcatttttcaaagaatatatccaagactttgaaagtggaatcagaaatggnnnnnnnnnnnnnnnnnnnnnnnnnnatagtgaagagaatccagaaataatttggtggcaggtttttattttnnnnnnnnnnnnnnnnnnnnnnnnnnnnnnnnnnnnnnnnnnnnnnnnnnnnnnnnnnnnnnnnnnnnnnnnnnnnnnnnnnnnnnnnnnnnnnnnnnnnnnnnnnnnnnnnnnnnnnnnnnnnnnnnnnnnnnnnnnnnnnnnnnnnnnnnnnnnnnnnnnnnnnnnnnnnnnnnnnnnnnnnnnnnnnnnnnnnnnnnnnnnnnnnnnnnnnnnnnnnnnnnnnnnnnnnnnnnnnnnnnnnnnnnnnnnnnnnnnnnnnnnnnnnnnnnnnnnnnnnnnnnnnnnnnnnnnnnctgaagcaggcttttagataagattgcatgtccatgaaaattttgagggaagaaaaaaacttccaccctgttgcaaagattaaggcagtgaaaggaatctgaaaaacactggatctattatgaccaagcttgtctgctcttaatgcattccaaactcctagttccactttgcatttcaatgtagaaatataacagtgttggtaacaaagtaacatctgacattccatgataattcttggggaaaggaagtctcttttgtgaaatatagatggagtcaaatgccttaggagaagttttggtcaaaacgtggtcctctacatgagctctagaagaaatcattcggctccttctactgctgtcgtggaaacaggtttcacatagtatggcccttcactccc

SEQ ID NO: 452222 - DNA, 984 bp, Homo Sapiens
  misc_feature (423)..(446): n is a, c, g, or t
  misc_feature (934)..(934): n is a, c, g, or t
  misc_feature (942)..(942): n is a, c, g, or t
acacctccaacaatttaattgcaaaaacagctggtaccggtccggatttcgggatcacctttgttaaggggtagctttccagaatgtgacattgtcctcagaaagatagacataggcttaaacataatggacatcctaaataggaattttcagattgtttttgaagtgaaaagtgttttaatgtctttaaatggaattgcataactaatggtatttaagtattttacatgttgctaataactttgaatatgattgttgcaattttatggaacctgggtctatgggactgctttttaagcagtttaaaaaaggttttcaaagtttaaaagccaatcttagcatgtataatccttatgggattcttaagttttatcctatcttgtttttgctcaagaacgctttatcagtgacgtttgttagaannnnnnnnnnnnnnnnnnnnnnnnaaattgtttttgggctagaaatgagtttctctagttttatttgttctccctgagttggagttatgcaatgaatggcatttttgtggtaaaatactaatcctaaaatctgttaactcactgttcatttaagtagggaatatctgtatacattaatgactaggtaaaacaggaaatacattttgaatatacagcctaaaggcaggcagttacagggtttttgatttctccgattttatagggtgcaagttcccagtggcaggatgccctgctgtgtgactgactacactgtgtcctgagcagtggtaatttcaatcacctctcatcagtttggccagccctacaaccaccattcctagccctgtgttgcttgacagggatacctgtgcttgaatgggacataagggaaaagtccttacttttctccccaattttacctcttcaatctttggttcttcccggaacacacttcccttttccacaatggcaantaaactgnaagtggaggatttggatacagggggatttttggaggacccaa

SEQ ID NO: 452223 - DNA, 947 bp, Homo Sapiens
  misc_feature (699)..(765): n is a, c, g, or t
gtctgtcaaaaattttatttttttcatatcacacagaatgatgttaaaataaatccccagtaatatatatttatatacttatttacttgtgtcaatatttacaaaagactgtggagctctatgaagtctatgtacacccatgatcaggtggacaggcaatgttcattgaggcacatatgtacacatatatgtataacctatgtacaaatatcagaccctactgacacaggaactctcagctgcagaagtcctggggtgggggcagtgttggtggggctgaaagcttccagaatatgtcagcaagaatgataatatcaatacatcctgtgcaatgtagttacagctggtgtctaaattttcaagaagcaaacaaatagttaaatgactcccaactcccatgagtcttccccgcaagtcctgctccgccttcagctctcattggtccccagcctcttatcaccatggagaccccagttccctttcggcctcatccttacgaagctttaccatcagccttggagttccttctgctattgatcccaaggaggcttatttatctacctctttgagttttcagcaattattagagacaggacatgggagggcagctgaagattcatgcacaagcagcaaggaagccagtgcaaaccctaactggagtctgtgctgcatgagcctaagtgagtggcggccatttcnnnnnnnnnnnnnnnnnnnnnnnnnnnnnnnnnnnnnnnnnnnnnnnnnnnnnnnnnnnnnnnnnnncacacacatcacacacaatataaagtctccagaggcagcctatataagcacataagcacacaggtctggaaaaggaaatagcatcctccactcatgagctttacagctatgtccctgatgaaaactagagaatcttccttgattgctggcaccattaatcgcaatccggaaaattccggacc

SEQ ID NO: 452224 - DNA, 1147 bp, Homo Sapiens
  misc_feature (426)..(434): n is a, c, g, or t
gtgggggtgaatgttcggagcgtgatgtatgttaggagggtataaatagagaatgggaataagggaggtagggtgagaagaaagggatttataagttgaggtgtagatcagcggaagaggaatgaggaaaataagggacagggttaagcgtccgaggaggaaagcccgggtaaattttgggagcgctgtgaagtgggactaggtgaaaaacgggtgtgccatttggaccggtgattggggcaataaggtggaaaaaaggatggttgaatgggaagtgaagatgcggcgatttacgtaaaagttgcggtgtcacgcgggcaggacatgggatagcacggtaaagtgaggaaacggcattaacagtgcgtagcagtagaaggaatggaatgagggcgtaggaagatttctagagctagagaaggtaannnnnnnnntgagcaacgtggggacagcttgtgaacaaggttgggaggacgttgggtgagagagtagcctagaaggtcgcgcaagggaacagaaaagggtgagcgatactttatatgccatacggaggttggcaaaaggattgtcgtggaggcagagcaccttaggggttgttcagtagtaatctcttttggtaaggaagtcggagctggagtcatcggggagactgtctttgtgagcattcgctagatctgcaggccagaccctcaagtgatttatagttgctgccagatatctgaattttttcctccattattttcttaatgtccttgaagctgaaccccattcgtatagcttcttgtaccataggattttggaagatggtatcatcaattcttctagttagtgatggtgttttctcagtagttcttaccagacactcctcaagtgaatgagttaaatgaatattgtttatatattcttgtcccttctgttgtaacagatatttgcaccctggataccatttagcatgttgttcccaagggtcttcactgggcttccaatcagttagccctcctccacagtgaaagcactttactttatcaccttcaccacttgggccgggcgtccctcgatgagcgccacgccggctccgggcgccgccaaggtcccgccacctccccgaaccggatgggggcagtaagaaaaaatgaggcccttgcaa

SEQ ID NO: 452225 - DNA, 1292 bp, Homo Sapiens
  misc_feature (21)..(21): n is a, c, g, or t
  misc_feature (45)..(45): n is a, c, g, or t
  misc_feature (54)..(54): n is a, c, g, or t
  misc_feature (91)..(91): n is a, c, g, or t
  misc_feature (594)..(602): n is a, c, g, or t
  misc_feature (1233)..(1233): n is a, c, g, or t
gtcccatgcattccgagaaanccactggagtttcctggaaaagtntgaaagccnccagtatgttgctgggaatggttttccgaaaaagtgntcctgtgtgttaagctcaaatcttcgtcatgtgagagtatttgacatggacatagatgatgaatgggagctcgatgagtcttcatatgaagaggaggaggccagtaataagcctgtaaaaataaaggaagaagtgttgtcggagtcagaggcagagaaccaacaagctggtgctgccgctttagctccagagatagtcattaaagtggaaaaacttgaccctgagctagactcctaatctagcttgccattattgtgtgtgtacttatggccaaaaggacataggagatggactaagatgtcttggaccacctttgtgtaacaaagaaataaacagtacattttacaacccctcaaccccacaacctaaaccaccaatacccgcccctccgtcatacccattaaaaacacaacacacagactcgcgacctctattcccacctcttattcgcacggggcgtgtcgccttataacctcccatctcggggcgggctccggtctctnnnnnnnnntctttttttttcgtccatccggcagtcccccctcgctggtgctccttcctccaccccttccagcttccggccgcgcccttctccatacaacgtgtgcgccgcacccaaaaactgcttccgctttgggcggctttcttctggaggaacactctctcctccgtcggccgggtgcggtctccttcatggccttccatacctccttcatacaacaaattctccaccccgcttttttgggcgtcttttctatctactttcctccccgggggtatcgttcggatggtatatcaattcaccacccgtactaccttccgctgtctcgcacatacgtaaacgctcttctccccttttacgcatgcgcccgttaccgttcccacccgtcacactttattttactacgcgggcaaactcgcccatgcctctcaaaacctagcgcggtttcttcagccatccttaatccccgaattcctgtctccctattggcctcctcctcttttttggagcgctcctcacatctctctcaattcgccccacctcctctttctcccttatgactgtctcctcccgtgacccatctctttcaaccctcctccctttttgtaatacaagcggtccacctttggcgcgggtgtgntgtaccataatcgtcgctaccctccgaccctttttcgtcttccctccagtgacatccct

SEQ ID NO: 452226 - DNA, 736 bp, Homo Sapiens
  misc_feature (682)..(682): n is a, c, g, or t
  misc_feature (686)..(687): n is a, c, g, or t
  misc_feature (691)..(691): n is a, c, g, or t
tttttttgaaaaaataaaatttactgtttatttctttgttacacaaaggtggtccaagacatcttagtccatctcctatgtccttttggccataattacacacacaataatggcaagctagattaggagtctagctcagggtcaagtttttccactttaatgactatctctggagctaaagcggcagcaccagcttgttggttctctgcctctgactccgacaacacttcttcctttatttttacaggcttattactggcctcctcctcttcatctgaagactcatcgagctcccattcatcatctatgtccatttcaaatactctcacatgacgaagatttgagcttaacacacaggacacttttcgaaaaccattcccagcaacatactgtgctttcatactttccagtaatctccagtgcttctcaaaatgcatggtacgggtgggaatagcactacactgttcatctagccttgtagaataagtcccagtgaactgatattctgcagaatcttcactgttatatactaaagacaaaggcagctggaccaagagtctatctcttccttcacgtcctacagtgtctttaagaactactgttacagtttcatcatcataaaactgtgcatctaaacaactgtagatgcttcttctgactttttctgttgtggcatatgtanagcnnaacnaatttaatagcaattagtccattactcacagattgagaaatatca

SEQ ID NO: 452227 - DNA, 980 bp, Homo Sapiens
  misc_feature (29)..(29): n is a, c, g, or t
  misc_feature (63)..(78): n is a, c, g, or t
  misc_feature (88)..(88): n is a, c, g, or t
  misc_feature (94)..(94): n is a, c, g, or t
aagagtgggggaacaatggctgccccggnctgggccttgccaaggcttgtaaagcctccagtnnnnnnnnnnnnnnnnaaaccctttntttttncttcgagcccagctcgggatccctcacttggggctcagcggcaagtggccaaaagcccaggcagtcgtggacccagcgcaaaagtgtgggggagctgccgggggtgcagcccaaggtcaggtggtccacgcggctgacccacccggggccaggcgcagaggacacgggcctgaagccgggtaggaagggtccgcggtagccagcgcgctccagcaaggtcaggctgaggatgccggcaggcgagctgaccacggcgtaagtggcggcaccctgcgcgtcccgcacgcgaacgggagggacaggcacgctgcagcccagcgctgccagctcccgggttgcagcgccggcgtccgccacgtcgaagcacaggtttgtggcgctgggcacggcgtgacgcggatccaggccgtacagcggctctccagaccctgcgccctcgttcaccaaaaagaccgcgtcgccgctgcgcagggctagctgccgccagccgtccacctcccgcgaagccaggggctggaagccgaagaggcgctgcaggttccgggctaggggctgcccggcgggcacgtggaaggcgatgtggcacaaacgaagggcgggcgcggccatggcgctctggacggcgacctagacttgtccttctggggccgcttacttgtggttggggacttcggggctctcagtcctgggctgatcgtccggagttggggagtccggctcaccccgcagagcgcgttcctcgctttcttccggaaagaagtcacccgccgacccctgagagctcgcggttctccctgcagcgccaccccagccaggagcagcgtctggaccaccgggtctcagtgagccgagccctcgtgccgaattcgccacccaggcctcgctc

SEQ ID NO: 452228 - DNA, 1150 bp, Homo Sapiens
  misc_feature (302)..(310): n is a, c, g, or t
  misc_feature (984)..(984): n is a, c, g, or t
  misc_feature (1001)..(1001): n is a, c, g, or t
  misc_feature (1098)..(1098): n is a, c, g, or t
aattcccgggattttaacttcagtgtttggttagctgctctttccttacggtgtctgctgatgaagttcacccagctgattagccaggtggtcagtggtcgactcttctctggagttgggaagcttgaaaggaaagggcctctaagttcttgccacttctagttccacccaaattgtttgggtgtctgccaccatcatttaggagcattcaaatgtcttccactgtcatttttgagtttatatatacataaacttaaaatgtatagaaaagattttaccaatttaatttaatgaaaacttgnnnnnnnnngcctcattttaaaacaagctctcttaccattctcacattttagtttagaggttaaaaaatagaccagaattctggaaatagtatatcagaataaaattgagatatttctgatttatttgaggatcatcttgagaagggttagatttttaactcattcagagggcctaatatttaaagcaggatgattttatgcttagacaggggacatggtgaaatggcatagcaattgctcttcggtttctgttctttttctttatgagacaggtatgtttggctcaggcagcggctgtttgtttttcctctgcttatcactgtacatttttctatcaaatgctttggttgcttgttttattgaggatccttttttggttttcttaggcaataggaatggaaaacctcagaacgctggggtaaatttaaatgcaggtatttttaaatcttttgataatgaagagctcttatcctttaaaagattcaaatgtaatctttggcaatcacctgatttatttctaggaaacccccactttgtgaacctttctatcttgtaccacccctaggggacctggggactccctggttcttgccgtggggtgaattgaaaccaccaccttttcttcaaaagaagggggggcccctcctttgggaatcccaggaaccctttaggaaaacttggnttggttgagggaaaaangccacttctttttttcagttgttggaaaaccggtttggtgggttcccacgtcctccgggttctggggactctttttgaattttggcaagcttcccanccagttgaaaaaatccccccggcttttagggacccccatatgggttatggga

SEQ ID NO: 452229 - DNA, 626 bp, Homo Sapiens
  misc_feature (555)..(555): n is a, c, g, or t
  misc_feature (564)..(564): n is a, c, g, or t
  misc_feature (573)..(573): n is a, c, g, or t
  misc_feature (590)..(590): n is a, c, g, or t
ggggtcagctttatatacatataaaatatagttagttttaaaattattgacatttatttaaacttttatattggattgtttgctattgctctgtgtgaggatacataatctttcagtaaactgtatttttaacttttccataagctgattttggttcattttatcaacgtaagcacaccctgttcatagggaaaataaaccttgggttataagcattagcctgaggacaatgaagccacttaacctaatttatgctttcgactgttctgtttccagagaggaaagcctttacaaattactctcagttctttaggggcagaaggcttgtttcaagaggtttgacagaagaaaggaatatatgaacttaatgagatgtcgacttggttcaggtctaaaaatgagggcaaaacactaaggctctagcagtgacttgttcactaaaaagagagagtcctgtccccagacggttagtacaaagccttggatacagtttgcttgtactatttttaatatatgtggagggagtacagtgttttctaatttcatttcaagtantatatgganttaaaaccngggggctactgacacanacacagtaggccattagtttagactcttccttagtg

SEQ ID NO: 452230 - DNA, 532 bp, Homo Sapiens
  misc_feature (17)..(17): n is a, c, g, or t
  misc_feature (55)..(55): n is a, c, g, or t
  misc_feature (77)..(77): n is a, c, g, or t
  misc_feature (86)..(86): n is a, c, g, or t
  misc_feature (142)..(142): n is a, c, g, or t
cccaaggccttggtacnaacccgtcggggggaaggggactctcccctttttaggngaaacaagtcactggcctagancccctaagngttttgccccctcatttttaagaccctgaaccccaaagtcggacatcctcattaangttccatatattccctttcctcctgtcaaaccctcttgaaacaagccttctgccccctaaagaactgagagtaatttgtaaaggctttccctctctggaaacagaacagtcgaaagcataaattaggttaagtggcttcattgtcctcaggctaatgcttataacccaaggtttattttccctatgaacagggtgtgcttacgttgataaaatgaaccaaaatcagcttatggaaaagttaaaaatacagtttactgaaagattatgtatcctcacacagagcaatagcaaacaatccaatctaaaagtttaaataaatgtcaataattttaaaactaactatattttatatgtatataaagctgaagtcactgccttggatagtgttac

SEQ ID NO: 452231 - DNA, 885 bp, Homo Sapiens
gacaacagagatttattgattaatttgcaatgttaggtacaacatagataacttcatcacatggttacaatccagtatttgagctttgtaagataagtaaacatttatttgagcacaacaaaagtctacacacagtattctgggattgtttaaaaaataagtgtattctattccatttgatagcacaaagaagcacatttcagcgtgaattgatggatatattttaaaactgggcatttagttaatgtgtcaaattaaggcataataaccctaaatttggactatctgaataagaaatgcctaatgagcactgggcaagtatcctaggatgggagtggggaaggaagtatggcttacaagggagctttctttgcatttcaaaatgtggatgatagagaaggtgaggccagcattcatggtatgggaacctgttcacatttaaaattactttgtgatctttaaaaatagagtaaaagtatagttatccagaagtccttaataaacacctctttgatcaagaaaataaaagtccgtgtaggtcatttagttggaaggaaagaagacttattagggagacattagatacctttatttttcaaaagagtaaatctctgttattaaaataactaaaatgtgtcaaagtcttcttttcccccaattcaaggctaatatctacgagtcagggaaagtctatgatcctaactgatcatgtcaaacacaagaccattaccctgcttctgtcattataaatgtcactggagcggcatgtctgtatcccagaatccggaccggtaccatccactttggttgatacgccaacactgtgagggaggggtgtttggcgtgggtggtgttctatttcgtgtggtggtggtcggtgggcgc

SEQ ID NO: 452232 - DNA, 1386 bp, Homo Sapiens
  misc_feature (307)..(307): n is a, c, g, or t
gtcgggagcagtcccctggcgcccgggctttcatggtctaggcttgaactaacagtggtcgtgctaccgtacagagtgagtcctctccctcgagccgtccagtcctctcaatatgcgcgtcaccgaacgctatgggatgggctcttggagttagtgagtcgtcgcgccgttatatgcaattctgtgttattctccgcttgccacccctgagtaggcgagctagtctcgcgcgctcgcatattggggcggggtcatgagggttctaaagattgtcccccgagtcgtgtgcccgcgtgttgtttccganttctcggaggtcgcccggtccatagagttacggctgagttgtgctgcgcattcttcttttccgagttatggcggcatgcgtgcgaagacgggtggtcccacccttgccgggaggcgtacgcggtgaggggcatcccagacgggtggacgggtggagacgggtcttagggcgcttatacgctagcggagacccggttcccggttacgcgacgccggcggtggccagaccgaggggtcggagggcggtgccaccgttgctgcggtaggtggccaccgtggctcctcttggcggtgtgtttcattgataaccagctgtggtgtggtatcctaccggcccggtttcgtttgatgcggttttcttattccgtggggtgggggcggttatgtcccggggttgcgcttgtccccttgaaatagtgctaaagctcagggtgctgcttaaagcatctcaacactgcccttgcaccactctgatgttaaatgccccttcttcaagcttcatagatcaattccccagatgactagggggtaggataatggcagaaaaaagcgaggcactttttccttctaggactttatgtagctggccccctattttagtgaatttggatttctacatcctatcaatcaatttcagacttccattaagatgctggcagcatttaaatctgattttggaaggatataaaatgaggacttttattattcttgtccacccaactttaggtaagaccaaagtgggagtgctattggccagtcatccttatgatttgtatgctttataaaatgattgagtttttctatttccccaatggcatcttttccttctattcatgatttaagttttgctaaaaatatatcaagagaatgagaaaattacctgtaattcttgttgtctgttctgagactgtcacaatagatcactgttctgggaatggaaatatctacaacagcctccctgggagtgctcctgacactcctttctctctgcctgttttcccactaccactagcgtactctggtgagcccatccaggtcacagccagacttctgagtgactcaccacagccagccccaaag

SEQ ID NO: 452233 - DNA, 1124 bp, Homo Sapiens
  misc_feature (900)..(923): n is a, c, g, or t
  misc_feature (1005)..(1013): n is a, c, g, or t
ggccaggcgaaccgctacctcgccacgccagccaggggcacccggccggccaaaattcagggtgggtaccgggtccgggaatttccgaggataattaatttaattcaggtagtattacaactccaagtcccaagatacaagaaaaaagagaaatacagtacaacacagtgtctcttaggaaaggaactgctgcaggatttgagacaatgagcgtttagtacagcccagtgttcttgatttctcattaggagcaactttccagggcactgaagcgaaccaggaaaagaaatggggagggtaagcccaaggggtcgctgctcttcagtgtccagttggaaagagcttgctgcgatcaattatgctgagaaggtagggccttgagagggaaggaaggatagaaaaaaacagttttaccgggcgctgaaaaaagtgatagaagagaggtagaactgcttcctccatctttcacgtcaagttcaagtttttctttttgttctataagaacttttgtctttatggtgcttgctgcggtttgctgatgtagttcccaggtcctgccttcctctggtgacttattaacggactggccacggctgagtaaaatgcacttaagaaaaaaaagaaatcacctctctttgcccagactcacatgctgcccagtacctgagggagagctccgttgtcgctggcccagagaaattccagtttaacctatgcctcccctagccaaatccattgcaaataaatgggtgtgtgcccacttgccagagaatctgccctgactcacccccccgccttttgggcgtgcccagggagaagatgttaaatggcttccgtcccggcaacttgggaggtgaaagaggggggcccccgctccctcccggtagcaccccacgcagnnnnnnnnnnnnnnnnnnnnnnnnggtgaacggcgactaaaggggacgcggtactctccgttctcgaagcccacgagaccccggggcaggcaggagggcccaccgnnnnnnnnnaggttctccaacggggaccggtgttacgaagtgcacccgggagagaaccccaaaaaacgagacgcgcataccccggcaaaaatggaggggaccccccgccagcactgtgcg

SEQ ID NO: 452234 - DNA, 1786 bp, Homo Sapiens
  misc_feature (150)..(167): n is a, c, g, or t
  misc_feature (212)..(212): n is a, c, g, or t
  misc_feature (380)..(380): n is a, c, g, or t
  misc_feature (382)..(390): n is a, c, g, or t
  misc_feature (467)..(467): n is a, c, g, or t
  misc_feature (474)..(474): n is a, c, g, or t
ggatgcggggtcgcgaaaagggagggggagggaaaaatcggggaaataggagtatatggtgggggggcagttggcggtggagaaggggaatgtcgggacggattgtgtggaggacggagaaacggtaatatgggaggtaaacgtcagatnnnnnnnnnnnnnnnnnnaaaaacgcgtggaaagggaagggatagaggggtgtcagcatttantaaacggcgggggtaaaccaacgaaaaagcgagggataggacgggatagtagtaacgggggatattgaggcgggttggacggaagcggttatgttaccaggaggaaagaggatatagggggggaaaaagacactgggggggtcacgtcgggtgttacataattattcnannnnnnnnnaaaagatacgggatatacgaaatataacggagataacggcgcggggtgggcgttatattatagggtttgtgggtggnaaaatgnatgggcggaaggagcgaatataggttgtacggacaggggatgaaaggtgtaatatataatgttaaggggggacagtggggttctgtttgggtaaggtttaggtgaatagggcacgggtggttagttaggaactgatgtatggtggagggggaggcgcgaggatgggagtcgccgaggtatcgcgaagggggcctaggacagcgaattgcccaagagaaaggaagagagcgcaaggagctaggtcctttctgcaaaaggggggagggggccgactgtgttggttgatggggccacggttatcggttggtggacggggatattttggaatgagggaaccgtgcaggccagcctcccaggaagagagaggcattggaggcaacgtaggtaacttaataagccccaaaagtgggcccccaatgatggcacaatagaataggatgagaattccaaataggtttcctccaggaagacattcactgccagtaattgaccaagctacagcccacagaagaacaatgatggtaacatttgttatggccctgtccagtgaaccatgtggagggcaagccagcatttgtctcagtctttgtacgtgatttgcttcagttggtgtttcttgtagcttttttttcactgcttttcaaaagaatacttccttctgttggttcatttgcatctatacctttgagcttcataactgtctcctcctgtgcttcttgatgcatggagggcgtgtaattcattcctgtggatggttctgaatcttcatatgtaattcttttatcttcatcccccattatttataattaagaagatgacacagggaagcgtaaagagttagggcagtacatcggggaagtagtccagtttctgtctgttgattaggatcagggtctgtgcaatggcgggggatcgcgatatacccttctcaatcaaggggtttagcgattagatacgtgttgacagttgtgaccagggagaacaagagtccgctgataagcggtttcagtccgcggtcaaaggggtagtcgccgtctctcatggcgatggcccgctgggtgacccatcgcagtgagctagtttctgtggtcgagggtacagtaatagcggagtatgcatggcttatagggagcccgcagcgtcagctcggtgtggcaacccgcggatttcagctagaaaggaagggaagcaaacgaaagtaggatgcgttatgaacgtggcttagtgtagcgatcgcggctgccagtccgcccctcgccccccgtgcggaaacctcggatccacgccgcgtctatcggaagaattccggacc

SEQ ID NO: 452235 - DNA, 1221 bp, Homo Sapiens
  misc_feature (15)..(15): n is a, c, g, or t
  misc_feature (57)..(57): n is a, c, g, or t
aagggtagactgtanaataatatcaggtctacccacgctatcaagaagctatataantctaaaggcgcgcgcgctatgataggtggttggatcattgtcgacgatgaatagattgcatgtcaagttcttgtcttgtgaggtggaggcaggagttgggggaaatcaatgcaggttattgggtttgtgtagtagtaccttcatgtcgtagtgcgtagtttgttgtataaaaataatggcgggtagacgaatgtatgcagaaaacttgtctggggctacgacgtatagtacaatgtttggccgagtgcaaacgcgaatgacttcccggcgggatggagaggtgggggggatgtttgcgtgatatttaacgagcgggatgcggtatgatggcctaggggtgctgtattgtcctgagatagaggagtaaaatatgttgctgggataggcgttgtattaggacgtaatgtcatactgtccgtgttcggatagagctagatagagccgtctttactgtgtgctaggatgtcgagtgtgttagggaagcagtccgtatgggttgaagtcgtgtgttggggggtgaacattgttatagagcttgatcgtgttgtgatatatattggggggtgtgggagtgttgattatttgggggtattctagcggtaatcaacgattgcgatgctgtgtgctgtggagcggtacgtggggggctatataggtgttggagggcgctttctcacggtaaagcgggctttccttcctcaccggggctctctgtgttctggccaggccagggcataggtgacagtgttcagagtccagacctaacacatccttccccggctacgctgtgttcggtgcctaggatgccagcctcgcctcccggttctcagctggagaggccccttggacccctggggggctcttgaaatgtggagttctttgttgccccttgacctagccctgcgtgatcgtggtctctgggggactctgtagctctggaaagttttgcaaggagcccgtggtgagagtgagaggagtcaaagagggctttgtaagcatgagggcccaggggacgcagcgggagttggggaggtgcagtggcacaggcgggcagagggcatgattggaaaggcagccgggggtgcaggggtgcaggtgtgcaggaaggttggggtgacaccaagaggcaggggattgaaggccatggtcagcagcttccggtgg

SEQ ID NO: 452236 - DNA, 1294 bp, Homo Sapiens
  misc_feature (76)..(77): n is a, c, g, or t
gggaaagcagggctggtgatgtctgccatcaccgtcatcatcctgatcctctactttgtgattgagacgtttgtcnngtggaaggcccggacatggctggcagagtgcacgccggtctatgtacaatacttcgtgaagttcttcatcattggtgtcactgtgctggtcgtggctgccccagagggcctgcctcttgctgtcaccatctccttagcttactctgtcaagaaaatgatgaaagacaacaacctggtgcgccacctggatgcctgcgagaccatgggcaacgccacagccatctgctccgacaagacgggcacgctcaccaccatccgtatgaccgtggtccagtcctacctaggggacacccactacaaagagattccggcccccagcgccctgacccctaagatcctcgacctcctggtccatgccatctccatcaacagtgcctataccaccaaaatactacctcctgagaaggaaggcgccctcccacgccaggtgggcaataagacggagtgcgccctgctgggcttcgtcttggacctgaagcgggacttccagcccgtgcgcgagcagatcccggaagacaagctttacaaagtgtacaccttcaactcggtccgcaagtccatgagcacagtcatccgcatgcccgacggtggcttccgcctcttcagcaagggggcctcagagatcctcttgaaaaagtgcaccaacatcttgaacagcaatggcgaactccggggctttcggcctcgggaccgggacgacatggtgaggaagatcatcgagccgatggcttgcgatggcctccgcaccatctgcatcgcctaccgggacttctctgcaggccaggagcccgactgggacaacgagaatggaggcgtgggtgacctcccctgcatagctgtcgtgggcattgaaggaacctgggcgggcccgagggtccctgaaacctatccgaaaaatgccagcgtggctgggcatcccaagtcccgcttgggggacttgggggacaacaatcaaaccggccccgggcccattcgcaggcaaatggccggcatcattccaagccccgggggaggactttccttgggccctaaaaaagggaaaggacttctcacctcgcgcggttccgccattggaaaaacgggtgaaattatatacaggtaattgtcttgtgcataggtggtggccccacacctttgcgggttttatcggcccggtagaggcattccccacactgccgcgcacctcttgtggcgcatactgcgtagtgttgttcacc

SEQ ID NO: 452237 - DNA, 860 bp, Homo Sapiens
  misc_feature (67)..(67): n is a, c, g, or t
  misc_feature (120)..(120): n is a, c, g, or t
  misc_feature (497)..(505): n is a, c, g, or t
  misc_feature (515)..(527): n is a, c, g, or t
  misc_feature (529)..(810): n is a, c, g, or t
catctttttccccaaaaaataaatatgccaaatttaatggtaccctgaaatttctttccattttccnttcttaaaattttcatttggacatattaacccttgagtgcaaacaggggggcnaatgccttattaatacattcttgaataatactctgagcaaatcagatcctatgaatttgttttacacagaaaattatttacatttcccccaaacccacaatgcagccttacactaaagaacagttttataacaaaacctttatactcaaatttatccattcgaactttagaataaacatgttttaacaagttggaggagggcaggaaatggccatgagttctgattttcctagttttgtagtattaaaatgtctccacgtctacctttggatgtttggtaggcatacctaacttacagctgatccaaaccctgcaacgacttgattgtaacagccttagattctaataaataaagtaggacagtgttacaaaacttnnnnnnnnnttcacctccnnnnnnnnnnnnnannnnnnnnnnnnnnnnnnnnnnnnnnnnnnnnnnnnnnnnnnnnnnnnnnnnnnnnnnnnnnnnnnnnnnnnnnnnnnnnnnnnnnnnnnnnnnnnnnnnnnnnnnnnnnnnnnnnnnnnnnnnnnnnnnnnnnnnnnnnnnnnnnnnnnnnnnnnnnnnnnnnnnnnnnnnnnnnnnnnnnnnnnnnnnnnnnnnnnnnnnnnnnnnnnnnnnnnnnnnnnnnnnnnnnnnnnnnnnnnnnnnnnnnnnnnnnnnnnnnnnnnnnnnnnnnnnnnnnnnnncccacctcttctttcaaacagtgtttgaaattttagggctttctgaattt

SEQ ID NO: 452238 - DNA, 1316 bp, Homo Sapiens
ggaattcttgggatagcagagctaccagctgccctgttggcttcgctggtcggatcgtcctcctggccccgccaaacaggcggggggagcggccccgactgtggggccatggcagtagtctcctcgttctccgccgccgctagcctagctgagtcgccggcttctgcgctaggggctcccaccgcctccgcaggctaaggagccgctgccaccaacgagctgtgagggttactatgctccctctttgccgccgtctcctcctcttgcccgcgcaggcacccctctggctgctcagtcctgcctcagtgtcaaaccagaagagaagtaaaattcaacaaaaatttatgtgtggagttccttcttaaaagaagaaaaaagtgattatttagactatggatcggagcaaacggaattcaattgcaggatttcctccacgtgtggagcgtcttgcaagagtttgaaggaggtggtggaggagaaggaacatgtgcagccaggtgggaagagtttggccatcttcgtatcgagctcttataagtgccttttccagactgacgcgttctggatgatttcacctgtgaaaaaatagggtctggcttcttttctgaagtgttcaagggtacgacaccgagcttctggctcaggtgatggctcttaagatgaacacattgagcagtaaccgggcaaacatggctgagaagaagtacagctcatgaatagactctcccatcccaacatccttaggttcatgggtgtatgtgttcctcaaggacaattgcatgcaccttacagagtatatcaactccgggaacctggaacagttgctagacagtaacctgcatttgccttggactgtgagggtcaaactggcctatgacatagccagcgggcctcagctaccttcacttcaaaggcattgtccatcgggacctcagatctaagaactgcctgatacagagggactgagaatggttactactgcaagtggctagctgacctatggcctggctgagcaagatccccgaatgctcagcatggggagtgcagaacgctgcgccgcgcgtgggctcccaattcaggatggcaccctgcagcgtctccggacacgcagagcgcctaatcaccggcaagacgtgcagcactgctggaacggcgccactcggggaatcatagcctcctggcgaacgacccattccccccggcaatcccagcgaccgaacccgggacaatcagaccccgggcaccgcacactggggatcccaacaactggcgcccaacataaccgcggacgaccggagcaaagaccccgggacgga

SEQ ID NO: 452239 - DNA, 1177 bp, Homo Sapiens
  misc_feature (1088)..(1118): n is a, c, g, or t
gctaagtactgcccctcagcaggtatgactcagcaccgcctctcaacagggatgactcagcagggatgactcagcaccgcccctcaacaggcatgactctgcagagatgactcagcactgtcccttagcagggatgacacagcaaggatgactcagcactgcccctcagcaaggatgactcagcactgccgctcaacagggatgactcagggatggcttagtactgcccctcaacagggatgactcagcagggatgactcagcaccgcccctcaacaggcatgactctgcagagatgactcagtactgcccctcagcagggatgactcagtactgcccctcagcagggatgattcagcactgcccgctcaacagggatgactcaggcagggatgactcagcagtgtcccttagcagtgatgacacagcaaggatgactcagcactgcccctcagcaaggatgactcagcactgccgctcaacagacatgactcagggatggcttagtactgcccctcagcagggatgactcagcaccgcccctcaacagggatgactcagcactgcccctcaacagggatgactcagcagggatgactcagcactgtcccttagcagcgatgacacagcaaggatgactcagcactgcccctcaccaaggatgactcagcactgccgctcaacagacatgactcagggatggcttagtactgcccctcagcagggatgactcagcagggatgactcagcaccacccctcaacagggatgactcagcagggatgactcagcactgccccttcacagggatgactgcaagaatgactcagcactggccctcagcagggatgactcagcactgcccctcagcagggatgactccgcagggatgacttcgcaccggccctcaacagggcatgaatctgccaaaaagactccgcactgcccctccaaaaggaagggttcacccggggatgacactcacatttgccccccaacgggggatgattcagcaaaatccccgcggggatgaactcagcaatgggcccctcaaaagaaattggaactaccaagggaagaattctatgannnnnnnnnnnnnnnnnnnnnnnnnnnnnnngggggaggtattctcccacaaaaaaacctccgggggaagacacccccaaggggcccctc

SEQ ID NO: 452240 - DNA, 1670 bp, Homo Sapiens
  misc_feature (1192)..(1259): n is a, c, g, or t
ctccccatttagggcctctgggtggtctaccccacaacgatggattatatccttaggggtcatccgaagggtcatactgaacaatccagtcgacttcaggaatgtctagtcctctcgctgccacatccgtacacaatagtgttcccgaattctgcattgcagaactggaagaatgtggttgtacgcttattttgctttttgctttccatgaatggccaagacgggcaaatcaatgtagttcagcaactcatagtggtatttcacagacatacaagatgaaaagaagaccataagcttcttctttcggttcttcttaaggaatgtaaagagcagaaggaatctcttttcagaaggacaaacaacatatccctgttcaagaccatccactgttgcattcgctttatcatcatcaacgccaacatacaatggctcctttttcagagaaatccttgccaggtcttcaacttttcgagtttgggtggcagaaaagagcatagtctgtctacgtgttggcaaaagtttaataatttgctttaattcctcttcaaaccccacatccaagatacgatcagcttcatcaataaccagacactgcaggtttttatacataaatcctggggtattctgcatatggtccagcagacggcctggtgtggccacaatgatgttgatcccattaccaagtttctgtgcttcagcagatctgttactgccacccattatcaagccataggtatgcacgtggtgagtcatcagctccttaagaacaccaaaggtttgcatggctagttctctagtaggtgagagaataaggactcctgttccattcctgggcatgaaccttaacttaacaatgagttcagctgcaggatgagaaaagctggggttttaccactgacggtttttgtagctgcaagaagatccctgccttcccagaaggtgttctgatacttttatgctgaaatttcagtcatgtttgtaaaacccatttcttttattgcctttcagagtgttttccattgacaagattacatagagaagcaaatgaagtatcctcaaaagctcctgtcagtcccaggggcaggctgggcatctcactgtcatcttcatcattatctggcttctccacattattttctgtttctttagtagtctcggcactttcttcttcagatttccctttgttttcagnnnnnnnnnnnnnnnnnnnnnnnnnnnnnnnnnnnnnnnnnnnnnnnnnnnnnnnnnnnnnnnnnnnngattctgaattggaagactgcattgctgcttctccattggttaatacagtggatttctggggagactttgtaacttttatatttcccactgcttcttgagacatgcctccattttgagtttctgataagcccacattcatgggcttttgttttgattttttaacctttctacttcccattgtttcttcagatacatctccattttgagtttccgatagggtcagatttgaggccccctgaaactttaggttccgctgccgcaatttgaggttccgcttctcgatcttcttacgcaggagtttcatcggcaggtgtgacattctgcccaacaagtgcctagaataaggcgccacacagtacagctactcagttctcaggctgacgttcttcccttccggatccaaggaattc

SEQ ID NO: 452241 - DNA, 1018 bp, Homo Sapiens
  misc_feature (553)..(581): n is a, c, g, or t
cgtgagaaaaacatggggaggaccatgtggtaaggtggtggtaaaggacaagtagtaaaacaaatacgaggcagtcctcaaaaaacgctccggtgtttcaatgtgaatctagataagtggctctcggaatcaattttaagtgaatctgaatctatcatatttgtgtaattgttgacaatgtatgtttatgtgctatgtaattaaattaggtctaactatatggagacattccactccctttgctttgacctactctcgaatatgttttctaccaaaatttccggtcctttaatctatggacccctttttctaggtggcattcaagagtgttttgattgtcaagattacttagtataggctaacggaagtatcttgaatagttcatgtcagtcccagggggtagactgggccacctcactctcatcttcatcattatctggctttctccacattattttctgtttctttggtagtctcggcactttctttcttcagatttccctttgttttcagtttttgcttttttcgtatcaggctcagcatcattcaccannnnnnnnnnnnnnnnnnnnnnnnnnnnngattctgaattggaagactgcattgctgcttctccattggttaatacagtggatttctggggagactttgtaacttttatatttcccactgcttcttgagacatgcctccattttgagtttctgataagcccacattcatgggcttttgttttgattttttaacctttctacttcccattgtttcttcagatacatctccattttgagtttccgatagggtcagatttgaggccccctgaaactttaggttccgctgccgcaatttgaggttccgcttctcgatcttcttacgcaggagtttcatcggcaggtgtgacattctgcccaacaagtgcctagaataaggcgccacacagtacagctactcagttctcaggctgacgttacttcccttccggccgcacgtgcgcagctcggccaacaggaaacgcgtccc

SEQ ID NO: 452242 - DNA, 1135 bp, Homo Sapiens
acaacgcctcctatagcttgaggaggctgtcacgcccagcgaccccggcgccgagagaggccgcacgacttttgtggcccaccctggttttgccagagggccgcccgtacgcgggggtcccgttgcgcccacaccaagcctcccgggggtgggcccccaatgtatggggcacgggccacttgtgagcccccccagttgcaccaattaaagggggtggattcccaaagctcccttcaggctcgagcccttttcgggcccagaatccccccatgcgggcgccctgggggagtcccatatcgtactccaaaagccccagttaaaatgccctttcccgcaaggacccctttttagggttccctgtcggacctcttcacaggggcagggttcttcttctgggttctgtgatgccggaaccgtcaaggtcgggctcgttttctcccagaactgaaggttcctaggggattccagcaccaccaattggctgggaagacaggttattaaacagtctctcggatactgcactgggcattcaatgcctcacaaggacagcggtccaggtaagtcagattccagccgggttcttcctctgtcccatgtgatatccgaaaggcccccgcctcactctgagacttggttccgcaactttgatgcagtcggggaggtcagcccttggtccagccactccccacagtcatggtggctgaaagctggtgtgcaaccttgttcctcgaggggtccctgtgccgttcagcaagtcatgcagcgcggcctcatgtcccccaagagtgggtttggatcctcctcagagtacaggggtggcgggcggtagcggaactcttggatgtaggcgaagaacgggccttcaaggctcatgtcggggtcctgcggaagcgggaaggggctctgccccaaggctgcctcctcagtgtcggctaccacctccgagtactcaggaggagcctcaggccgctccggcaaggcccccagcctccagtccagcaggaagctggcgtggctgcccacgctggaggaacggctgccaaaagggtgcaagggaatggtgccgatcaccagtggcagctccagcagcagcttggacgttcctgggatatccacatccggagaattccggacc

SEQ ID NO: 452243 - DNA, 1354 bp, Homo Sapiens
  misc_feature (880)..(897): n is a, c, g, or t
  misc_feature (1006)..(1022): n is a, c, g, or t
tggcacgaggttttcaaatatcaaattgaagaaaaactcaatcctcccatgaaaatcagttcgcctggcctccaattcgtgaggaaatggagtatgcaaggctgagatttctacagcaataaaggagacacacactgggccagagaggcctgccttctgcctgctctcctgcactgaccctttggagggggtctctgtgtgctgaagctaactcaagatggaaagtgaaaccacatgtgccgtgacctttaggttttatgagtagacagtgttcatttgattttctacagaaataatataaattattctttaggtttaaaaaagagcactcataatgcaatatgtgaataatcagtgaggttgatttttcttttttcctaccgtttcatagtctttgtctaactgctagtaaccctaccgagttttatatatgagtgggatactcaatctggccttaaaaagatacacaaagatgggctgtgggtccctggaaagggggagagttgccctttacagaatcactcgagccctttccagcactgttggtctgatgaacaaggttgttttaccttattttctcttggaacatatctgaaaaccttccccacaaataacttgtcacaccttttgtttcattctgagtctttagttttagtcatgggctttcttcacctgctctaggtgcaaaggcatgttgggaaagagatggatgttggggaggaagagaggagatggatttcagttgggagttaggaggagagtaggtgagatgatcagacaccggagttcaacgtcccagcagtcttggtaaaaggagggagcctgctgagccaggagggagaaaagaagattgaccagcttgctagaaaaatacttagcnnnnnnnnnnnnnnnnnngtggaggggggacggagaggaacaaggatggggaggtaggaatgaggtatagaaaagagatagcatcttctttggcacaagactagtggcttaccgcttaccttagagnnnnnnnnnnnnnnnnncaaacccatcaaaatctacttatttatgaatccaaggggtggcagcatcactctgttctagcattctttgtggagatggtctggtgcctagctgggagtgagcagcagcccatcccctgttcactttctctagcccatcattacctgtgaactgcagtggggcagtcatgggaaatagaattgggctggggtttctccttcttttcagttccttgtttgccctgctagggattagaagaccgaccccatgtcccaggacagtgttacttcttctgcatgatgtgtggtagactccctttgctggcttgagcagtgatactgagaaaatacat

SEQ ID NO: 452244 - DNA, 1260 bp, Homo Sapiens
  misc_feature (20)..(20): n is a, c, g, or t
  misc_feature (510)..(519): n is a, c, g, or t
  misc_feature (1049)..(1062): n is a, c, g, or t
gtccataacccatcccttangtgttttaaggggaactttatcccagtcccaatcccctttatgggaaaaggaaacttttcccaaggttatgttgccagtatttaatagtgtgtaaaaattttgtttgactttggtagttgtgccattttaaattatgaatcttatatgctacgataactagtatgcttactttctttaatgcatgtgatcatacaatgctaaaaaggtattttttaaagacccaaccaaactgaggattttgttatacatatctgtatcaacacctatatataaactcttcttcttacctgaaacactccttcacccggtttgggcactaactagatcattttcaaaggaacaaacaggaaggagcaagctggcactccagggtgcatctgagctgagaatttagaagacctcattcaagaaagtaaactgagcattgatgggaaagcactttgcgcgaagtaacattcccactgttaatgttgcagtcaaaattgtggnnnnnnnnnngtggtgctaaaattgttctgaaatgaagattgtttgttgtggggaatattttaatactcttggactttagggaggctattttatgtgtcacttgctcctagttgtttcattgtattagtaattagcaaactgtcctggaaccaagggtttggtacttttgcctgattagcattccattatttatttgaaatgctcagtgtttgctcaaatttggggaaaatatcttttgaagacatattctctgagccttaaaaatggctgctatcgacagtactgtaagatgccctgccagaagatttgatacttttcatttcagtgtaggccagaaatgtttcctaagaaaagatttagaaatcagcaaagggaaacaattggggttcatttatggaatggaaaaactgaaagggccccattcaaaaaccctttggaaaagcttggcctgcatttagggggaggtttcggggaagcatccccttaaaaagaagcctgccttgaggaaatcctccttggccaaggtgggaacacgaaannnnnnnnnnnnnnctcaaacgggattgggaaaaactttccccctaaaaagggccctcacttgggcggaaaggatcccctattcccgaagaaaaatttttagggcaaccttggttgggattttttaaagggagagaacttttttttctctcaaaattgccccgcccaaattggaaacaccaataaaagttggggcccgcgtcgaaattttga

SEQ ID NO: 452245 - DNA, 1233 bp, Homo Sapiens
atgtccctctgagcctggtcctgggggtccattttggtcatcatcctgtcttccaggaggttaaaggtgagcacttgtagaacatacagctggtgcgccatctcattgttgatggcccgctgggctcggatgacatgtgttaaaatgatggaacgcagttgcttctgagccaaaatattcgccatctcctgcctcctctcatcaggagccttcaggaaaagcgcattaatcactgcaatagtataggtttggatttcttgatctgacccttgcaggtgtggaatgagctggccgatggtgatctcctgcgccactttctggtagaggtccatggctattgagccaccatcgactccaaaaatggccaaggcccgctgcaggatcgagatgtctatggctgacttgttcacaaaacttgctatcttcttaatgaacgccaccgaaaaatgtatcccaggacactatgccatggtccatcagctcaacgaaggccgtcagggtgaaggaacagcatgtctccaaagcaaggcttcatgatcttctgcaatttctggtatcgctcagtgccgctctccaccatctgcgtgaggagagagataccgtccaggtttataaactcctgggcaaacgtgacatcccgggagaggctggccaagtccttcagggcttccagcttggcatccatactcgaggactggattcgttcatggagctgctgggcgttctgagctggagatgtggttaatcgaaggatagtgccattttttatctcattgcggttcttttctgtgatatagaagtttgaactatcggcatgctggagtgcaaaatattcatggttggcaagagaccacccatcacagacttcctttattattgcagacagtggttttttctgatcaatttccatgagtttggggtaggcgcccggccattctatggccaccttgacgatgtccgcgggtggcggcattgtaagtccccaaaatgttcaaagccagtgggaatgaggatcctacagcgtaaacggccacacgtgtctatacctgcttggggtcgcaggacagcagcggcaagggttcccggcgatcagagctccggcgacccgccagcattgaaggggaactggaggctctgtcgcccagcgtggggccgcggcggcgtgggtggctctgcctctatcctgtgcccatcctcgcccgctcccgctcgccccagcacatcccgggaagt

SEQ ID NO: 452246 - DNA, 914 bp, Homo Sapiens
  misc_feature (200)..(208): n is a, c, g, or t
  misc_feature (868)..(868): n is a, c, g, or t
cctggggcaacaaaaagggttttgaaaggggcccccctggggggtggggttttccccagtttttccctggtgggggtggtaagcctccgaggggcccctgcccaggaggcgggccctgggaagggttttgggcttttttgggcttcccaagtagtttcccaagccttgaattgggccccccagggccaagtgaaatgccnnnnnnnnncgaccagggtacattcccgaagccaggggaccaggatacaacatcttttgttacccatcttgttttccggtcatagtgttttgtggcagtactcctcagccatccttgtatccttcaagatgtggacataaatgaaaagagcttgttcatgtttccccatgcgccccaacaggagagctcgttcttctaagaggccatcaaagggaaaatcacagatgagccggcctggatcatagtagctggaaatctccaagaacatgaggagcttttgccggtattctcccagctcaccctcttcctctccagctgggactggggttttgcctgcagggaaggacaggagatactccttcatcagaccttgcaccttctcacagtatagctggatcaggcagttgtggaaccgagagcctgtctcctcccaaacatggatgatgtgttccagataaggaatagccagacccttaaaattctctattaagaagccgaggactcgatcacgtggcagagactccacttccgggagatcttcagtaaatatcttcaggccatcttctgggaagtctctcagcacccacactgagtaggagaaaatcaaatgcaggttttctgtgcccagatgctgcagatactgcactgtcctctcgtggcctttcaganggggagttggctttcttggactggtccatcccaagaattccggacc

SEQ ID NO: 452247 - DNA, 908 bp, Homo Sapiens
agcgggcgagtcccgcttcttccccttccagctctgccccatctcctttgccccagcctagctctctccttcctgcgacctgggagaatcggagtgggcttccagagtagtggcatcttgcagatgctggcccgtgcccggctcccgggcttccagagcgcaaagggaagggtaggcagagagggcactgggcgagcaagacctggcgctgggccctggctgcgcaccagccgcctgcgccggtctctgtgggcttcgcccaggatccccgacggcggggaggggaagccccgagtctcctgtttcctgcctacgcgggcagggcggggacacgcggagcaaaggcacccggcaacctgaacccccaggtgcgtcccgcgaccctgcaaggagctgctgggaccctccggtggacatgggtggggccctggggccggccctgttgctcacctcgctcttcggtgcctgggcagggctgggtccggggcagggcgagcagggcatgacggtggccgtggtgtttagcagctcagggccgccccgggcccagttccgtgcccgcctcaccccccagagcttcctggacctacccctggagatccagccgctcacagttggggtcaacaccacaaaccccagcagcctcctcacccagatctgcggctcctgggtgctgcccacgtccacggcattgtctttgaggacaacgtggacaccgaggcggtggcccagatccttgacttcatcttcttccagaaccatgtgcccaatctcagatcaagggaggtctgctgggggtctcaacccaaggggcatgttcaaaatcatggtccctcgggctcaaggccggaaccagctgggacaggggagaagggacgggaagtgggatagacggatggccggaaggg

SEQ ID NO: 452248 - DNA, 1456 bp, Homo Sapiens
  misc_feature (20)..(20): n is a, c, g, or t
aaatgagactgtgtgtaaanaaataagtgtagataactagaaattagataggggtcatcaggcgtttcggtatacctataaccagcactcggaattcctgacactgtttacttgatttaggaaagtttatgcctgctgcttctctgcctctttgaggtactcccagccgtcttactacagtcctgtaaatttaagtgcaatatatagaaacatatggatatatacagattatatatagggtgtaactataaagcaggtagactacttttttgcatcttggggaagtgagctcattactttaggttcaaattatgccaagaattttagatgtgatcagctggcttaagccaactcatgtcatgataaagctggattttcaagtccatgttttcttactccaactcttagagactcattgttccttaggtttgttagagttgagattttttttctccctgtcatctttgtactctctcatgtttgcatgtcttacattttgttgccggagaacaaggaagtccatctgtaaggagtttcttaaacggagaattaaaacctagtatttaacactaaccattctcctatgtatatactaatttatctgggaatgtaatactttattaaatgaagaaaatgatgctttcttcatttaatattttccacatcctggaaaaactataaactgacacagaatagattgaaatcttaactggggctaaacaaaaccctttcccttggcagaatctccctttttttcagggccataatggcatgatgtaaaaatttgctttaaaccattcatgcccttaaatagctagattttaaagcataataagcatattaacatttttaagcaaaagatacgttaacagtgacctttggttatccacagtagcaagagtaaagcacagatcattgaaatccatagataatcagtgaatcaactttcctaccaaacaatagattcatttacatttctttttcctccctatcctttcctgtaagcacctgtttttccatggaatggggttaatgagtaggtagaaaaggaaaaggaataatcagtaggtgctgacaaccagtgaccatataagcagctgattgcctgtaattagtcaggctgaacaattagagttgaatgctgaaattaggaaccacaggtggtaatcctgagtagatgtagctcttcagcgtcatctcctgccctgagctccaggccatctctctaaccaccaaagaactcttagtacctacgggaaggaaaagctgtgtgcgacacagaggaaactccattatttgaacacatttctttggctcttgacaaatacttgcttttcctctaatcttgcaagagctatggctcttctattttccatcacacagcttggcatgtaggaaaggttgaaatgatcctctagactgtgttggtcttcgtattctgtaaaaccattttttt

SEQ ID NO: 452249 - DNA, 1257 bp, Homo Sapiens
  misc_feature (1237)..(1237): n is a, c, g, or t
actttcccagagggcgccctcttgttttgtttgtgggcagaggcccaccgatttttggtgggggcccttccccagaaaatataggcccacccaaaaatggggtctttttggttccaggccagggggcctttggggttttccctgggattccttcggttaagaattctccaaccatggtaaaggttttccccaaaaaccagggaagccaattccagggcttctttcttgcctgccccaccctcaatttccttttttggtccccaggaggccactgtttctgcccccatggggatggaaagccagtggaaacaaggcccaagagccaaacatcaaaaaaatcaccctggaagagcaggggagagacatgtgcacttccctgggccacttcaccagcgtcacccatcgttagcagccaccagctgccccatgccctcacggatgtagacagactggatctccttggtcttgaggcagagatcgcaggcccagacggcagaagcttcagtggtcagcagcccataggcgctctcagtcatgcctgtgcactcacggtggaaccatttctggcaggaggcctccccccagaatggcatcctggtcatcgttcccctcactccgccaggcaccacatgggtacaccaagcctgggggaggctggggcccggagcccccacctgccttgccagggggtgccaagctgttggcatctggagtgcccccaccccgcccactgctgttcggggggaaactgggctggttcccattaccagcagcagccggggagcctgagtggggctcctggggaaaagcagtagaagcaggtggattcaagggcttccccccatcctcaccaccagggccaggaaagccagggtccggaccaggaaagggacttgtgttaggcggcaggctggggagcccctgaccaggtctctggagaggagaagggccaaaaggagcccctggctgagcaaatcgttgggacagagaaggtgggcccagctctgctctgggaggctgtcccatggtgggtgagatcatgggaccaaatccccccactgggcccggcatcatctgcccactgggaggactaaagttttgacccagaggctggttgaagggttggctgggaaagttcatgttgcctgggggtgggtagccaggcccctgggggggcatgttgaaagcagggcccataggattgggagggaaggggggtggctgtcgacggagtggntgggggccccctccacctcc

SEQ ID NO: 452250 - DNA, 843 bp, Homo Sapiens
  misc_feature (199)..(200): n is a, c, g, or t
gttttttattggggtgggagtatcccaagccccttagtttcatggcccaggtttttttcttggggaaaccaggctatggccccattgttcaccttccctaactgggccccgggcgccaaagcgaatggttcttggaaagcttctggaggggccggaggcgggcccgacatttttatttcaaaggatttttaggggaatnnacggccatcttctatttcagctcccagaatgttcatcatcattttcttcttcttcctccacctcctcttcttcttcatcatctgttgtatttcctgttttaccttccatattacttaggtctgaaatcagaagtgcctgcaagccattctgtaatttgatgtatcggtattgcttggggtcgctgggagacttgacgatctcagggtccccagcattactgagagaccccctccgtccctcttcctcagattcatccgctcctagacgggcaacccggctgttctcgcccagatcctgtccattgggctgcaggtcagggcagctgcaggtagacttcgccttgttccttccaggcatggccagaataggaaagggtctggcagcagcagagtcttcgcaccgaccccgcgtttcgattccccagagcgccgcgagctcccgcccggcctcacacaacttcctccgggtggcacagactgcagcaacagtgactctcctcagcattcaccaccaagctggagcgatggacatcccgcttcccaggacccacctcctccgcgttctagaggcggtggcggccggccctggtgctgccgcagccgcggggaacaggcctgaacccctcccccaacccagtctccc

SEQ ID NO: 452251 - DNA, 1057 bp, Homo Sapiens
  misc_feature (101)..(101): n is a, c, g, or t
  misc_feature (384)..(384): n is a, c, g, or t
gggcgcataaaatttattccctacagaggaatagtccctttcctgaaggccaagggaagctggggcttttggacttgtaagccccagtcaagtcaaggggnccttgggcaaggaggagcggaagaacttcccaggcccttgcgggctttcccaaaggggctgacttggctccaataccaaggtccccaggtggccagccctttaccctcaaaagcacttattggggatggggcacacagagctggccagagaccctaggggatctgggtggccaccaacactgctggtcatggcacagcacctccattactaccctgcacaccgcccggcaccagttacaggtctttcattacattctgctgcaagaggaaaatgagtaaatantcctttgacagtcctgggtttggcttttcatcatccaaagatgtacttccttcctccagtgggtagaagtgggtgtccctggaatgcctctgtaagacggagcagccgtcccggttgaagatcacccgggccatttgaaaactgcggagggcatacttttggctctcctggcctcttagttgagtgattttctgagacaggcacttgcagacagatgcagagagtgagtttgcagagcctggctgtggatggccaaacatttcatagaatctatccagggatttccgaaggccatcatcctcttccttctctgactggcctttcacagcagggtcaagccagaagttctcagcggtccaggagttattttgttctatatttaagttactggtgtctggatccacatcagaagaataaggaaaagaatggaattccaaagaactgaaagcctcgctgttggcttcttggctgggtccctgcaggacgtaatctcttatgtcacacgctgatggcaggtccaaagcactgctctcctctgacaggctgcctgaagtggcgtccctggctgccatagtcctctcctccaaagcactccagaaaactgaggagaaaagccgccaagccccccgacacactcaccatccgcaaccggaacgcggatcgcaggaattcc

SEQ ID NO: 452252 - DNA, 1094 bp, Homo Sapiens
atctccggcgtgttgggtgtaatatataaatgcgttcgtgtgtggtattataagaggggagacaggtcaccccgtgaaacatgaatgtggggaggtatataagttttccatgagaaaagtaaaagtgtgggagggtgttcccgggctccggggtccccccctggtttcgagttgaaaagttcgcccccacccgcgcagatttgtttcccgttccattccccacctcccttcagggcttggttcaagccccaaaaggtttcctgccctctgaaagggctggggggccccacccacccccagtgtggtcaaggaggcaaggggcaggtgcttgacactgccaagtgccccgagatgactctactgctcacccatttctttgggcccctggcagtctcctacttgtcccccagcatggagcacctggcagaactgggaaggcaggagggtggttggtgagttgaggcacaggaaggccaatcccctctgcaccttttgtgctttggaattccacagccccacacctgcccccagcctagagaagcctgtgggaacacaatgacttggccaccttcaggaaccaagaggagtaaactggactgggcaggagggcacagactggtcccaagctatgggctgactgccggggatggattctgctgccatgtaaacaggcccttggaatgcaacttcctgggccctggaggatggccatgcagccacttttcaaaagtgctttgattctggactatagtatgtgcatggtttggacatgaaaaaaaatgaaactcaggtgaggtgtcctgctcccaactctgcagcctcagggccagcagggggcgcagccaccctctcccgccagctacccacttcaagatgaggctaaggccaagactgaagcggcaactgccagaggtgaacccattcgggaaaaggcatgagcgcaggatgactctgaggacaggagcaacaccaggcttgcataagtatcgaaggccgtggaggttaaggctgcaggcgccctctctattaggttgtgtctgctgtatcctctcgtccttggagctgctcctcgtgccgaattcgccacccaggcc

SEQ ID NO: 452253 - DNA, 1271 bp, Homo Sapiens
cccagccagtgggcgccgcgcccgtggttcagccccagccggggccccgcgccgctgcagttcctcggcgccgtcgttggggcgcagggcggtctcgggcgccagcagctgtgggcgcgcgctctccagctctttctgccgcaggaggtcggcgggcagctccagccgggccaggttctgcttccgcaggagctcctgctgccgggcgaacatctccgcctgcgcggggggcaggaagccgtagcctggggtctggcacagagccgagggcacccccaggaaggggggcctgagatgggggcccagggcgacgtgaggggcattctgcggcgacagcaaggggggcggctgaggcagctccctctccgagaaggacggggcggcagctggggcggcgccctcccggtgctgagccaggccctgcttccgacgctgacctgccgtggaggagggcaggtgggcttccaggccactggggcccctcagagctgcagccgccacctcctgccggaccctcaggagatcgtggctggggaggcccaggtggtagaggcgctgagggtcctcaaaggtgctggcctcgctcagtgctgacacaagccggcggtaatggtcctccggggccatgctgggccccagctcccgcggcagcagcagctcctcttgaggcgattcgcttcgtgccctcttctctgaaaagcagtcgctgctgatacggggggagcggcccagcctcttgcccaacaggtcaccggcgggtcgcaggccaatctccaggctgcctctctggaattcacagcggctctgatgctcgggcataacgaggtggcggctgcggtggacgctggatatgagggtgggaaggttgccgtcctggctgcaggacgcctctcggaaagagatgttcacgtcccagtgggtgtggactcttctcttcatgatacggatgtgcggaccatcctcctgcttcaagcctggccgccgcccacaggtggggccactcccgtcgctgtcaccatcgctggcagagaagctgggagttcgctccttcttcaggttccgggcggcaggcagggcgattgtcctcttgtctgccagccgcccccggttcaccggggaggatattcggcagcccgggcagtcgcagatcggaggatgcacctgcaggatccccttggacataagcgtcttcagacttttccctttgtggcggatgctgcgaatccagtccttggccgtctcgcggccgctgacgaactggaactcgttgg

SEQ ID NO: 452254 - DNA, 1369 bp, Homo Sapiens
  misc_feature (1163)..(1176): n is a, c, g, or t
  misc_feature (1179)..(1317): n is a, c, g, or t
gcccgaaagctgggaatgttttccggggggttttgcccccagagtgagggaaggtgccctttttcttctgggggttataccaggtgggccatggcctaaggtttggccaaaggggactcccatcctgggttatttccccatgagttccttaagcaaaaacccatggggggtgttaaaacccacaatgctaattgtcatgtttaatgaccattatatggagctgggtttaattagggacattagggctgatttattgtgcccgcacccaatgttgggatggtcacttcttgagcgacatcctatcttaagggggtaacttcttccgtttttcctattaactgtagaggcagtatatgcactgtcttgccgttgttcttgtgaacatagttcctttctatcccttctcctgagaccttccctctctatgtgcctatccatcccttaactacctcctctcttaacagtgttacacagcaataaataatgcattccctttttgatttctggtcatatcatcgatctagccccaggggcatcctcaatttctctgtcctgccttaaatacacaagggtagagcataccgctccctcacactatggaaattatatcaatagttatcagactgaaaaacttctgagctttatacctcttctggccaaaggctcccccatgcccaagatactggcctgaacacctaatccctgctcacagggggtggcaaaacatggcagttgaattgtctgcttagcaccttctgtctgcactattcctcctgacatcactgggtatccctgccatttgggccctctgaccatcactagagagatccttggcttccggtccataggggatggcaatctggccccacaggccctatctctgaagactattcagactctgctctgtgaaaggagagtggtgccaagtcatctccacaggagtcagtgtttcttaagtttgctttcttttctaaaaactagtttctactacacaagcaatgcatgagcacattctcttagttagaaaagcaagtcttagccttaacttggaaatgccctttaacttccacccatggagtctgggcctttatcccacttgcctgcagtaagactgttatgagtttggtgtttccctccagactcttctctatgcttggagatcnnnnnnnnnnnnnnaannnnnnnnnnnnnnnnnnnnnnnnnnnnnnnnnnnnnnnnnnnnnnnnnnnnnnnnnnnnnnnnnnnnnnnnnnnnnnnnnnnnnnnnnnnnnnnnnnnnnnnnnnnnnnnnnnnnnnnnnnnnnnnnnnnnnnnnnnnacagctaattaaaaaaaatttttgggagacaggggtctcactatgttgcccc

SEQ ID NO: 452255 - DNA, 892 bp, Homo Sapiens
  misc_feature (46)..(71): n is a, c, g, or t
ttgtgccctgcactctagcctgggcaataagcaaaactccatctcnnnnnnnnnnnnnnnnnnnnnnnnnnttatgagagttacttaaaggtaacatcacatactaaatgtcttctataatcctatatttattaatgcattacaactctgtagattgttagttactaggccagtagctaggaattggtataaatttaatgcaccttctatcctgaataactagcatggaaaagtgaatatatgtgtgagcagatatggctataaagacctatagcttttgcactttatgcatatataatcaatcctttctagttcagtgaattgaccccatccacaggctgattcatctttgtgttaaggggcaaatgaaacggtatattatttctttgcagtctcctctcagtcattcatcaatgtggccagcttatctactcccaattatgttgttgatacatctccaagccatctgtcatcagatcaaaaagcagcaaacagagggtcagtcacaggatgttctgacacaccattgtaactttttgttagagatgatcccatttagaaaaagactggtagaaattggagtgaaaggaaccctacagattagcccagttctctcttattttcagctttacagacaagaacaatttaaatctaaagaatttagtagattccttcagtgtcacaaagctgtttcatgaaagaatcaagattataacctgggatattctgactcctggcccagtgctttttcttactttgtagctacactttgaagtaagattcaaactgttatccacttcaattgccttattcctgagggatgtagtgaagggaaggaaaaagttttctgggaattccgtaaactatattttaaggctttatttcttccaaa

SEQ ID NO: 452256 - DNA, 1117 bp, Homo Sapiens
  misc_feature (140)..(151): n is a, c, g, or t
caacccatgagacgtttagttggtctaacaaataccaaggggtggcagagaaacacccccgcgggaaaaggggccttctagggagaggagttgccccccccgtaaaggtcccacagaaaccctgccattggccccctgtnnnnnnnnnnnntattatttaccccgggtgagagtaagttcataatattgggaagatttgccaaatccttcacctgcattccccaggaagaagggcttgttgaattgccccgttgagcgggggttttgcccagccccccttggtgtagacagtgaagtgggttcggtttcccattttccacactggttttgctgagccctgggcctttctgccttcactttgctgggcatcgtgggaaaggggtcaattttgactctgaaaagggctgggggggattttcctgagatgcaaagagaactttgatagtggtatcgccccagcagcaggaggcacattatttgactgtgaacgtatcattggcattgtgaataatgtcaaaatccacgtcttcctcatcttcacttaacacccgggcatcacacttaatgccaacactgacatcaccttccccagcctcagtacagtccaccgtgaagtgtgtaggttcatttgccttcagaccacttctctccacacctggcccaaacactttgaccttctgaggatggctaccttgcccgatgttgaccctgtaggggctgtgcgggatgttcacgcctccccagaccacagcaatggtgtgcttgatggccttcaccggggtgtatgagcatgcatatgtgccgtccatcccggttcttcatctgggatgtcaatgcgtttgcctttccccatcctgagcaaaatatctttaagggagcttttccagcatccttaggatccacagtgaactcggccaggttgttgacaatgcatccagatttctccaaacctggcccgtatgctcgaaccagatcagggttgtagcctcccgtggctgggtggatgaaggccatgtacgggctgtccttgatgtcttcgtcgtcacacatgatgtgaacagcatattcgccaggctccttgggccagtatttgacatcacacgatccatcatcatcc

SEQ ID NO: 452257 - DNA, 1136 bp, Homo Sapiens
  misc_feature (481)..(481): n is a, c, g, or t
ggaggggtcggaaaagtgtttggcactggggagggtgtaggggggcgcatcggcgaaaggaaccggacgaagcggcaggtttaagcaacggcgatcgtagcgcgagtatagtatacccgacaggagaaccggggatattccgcgcggtaagggaacgtgttgtcgccagaaggtaaatggtgcccggccgacgagaagaagggggctctcgggcgaaaaggtatacggggcggtgccgcaatgtttcggcccgggctggaaacagtgggtaaccgcgctgcgtaggcgactgccaaaatgtaaggggagcgaggcgtttttgataaagaggagcgacgcattgcccccgggaaagaggcggcccgacagaaaagagagggtggccctcatgaaaagggttgtgtgggcccgcgggggactttgctaaagggagggcgcggaagggtcgagggggggatgggtaaggatcggggtcgctggnggtaagaattaaaatagtgcttttaatataattttcagcaaacgtacagtatgtactttacatcacatatttctaaactgctcatttggaaaataaatgctgcaaaaatacagagtaccacactcaaaaatctattgagtatgtgctttttcccccctccattctatgcaacaggttggtttttaccctctcggctgatttcattaaagctgttggagccctcagtcagaggagcattcccaagaggggagtttctaaagcatgtcggcaagccatccccagaggaggtagagggatgggtggaagggaatttgcacaccaggtcagcatgactctttagagacccaggaaagatgcctactctgagagctgtttggagtactcctgaccataagtcacctctttggtcctcatcacaggcctgcgcttggggcctcaaaggaccacacactggctggataatccacatggggaccctcgggttctcggacagggaggagcacgctaagtgaggcccgcgaggtctgtgggtggtggagggctgttctctccaggaagaggaagagggccaggccctcagcttctcacaaaggagtcttctgaaggtgaatgtgattcggggcaggttttctcagtctcaatgtctgatggcagg

SEQ ID NO: 452258 - DNA, 1259 bp, Homo Sapiens
  misc_feature (630)..(659): n is a, c, g, or t
  misc_feature (1131)..(1131): n is a, c, g, or t
ggaattcccgggatctgtctttttagccttgcagacacggtggcgcccccagggatcccacctgctgttgtggctgcatatagtcactcccaccactgcccctgcagcaccgaggggcaggtgccctgggtcctgttacctactgcgtcccacgcagacgcaggcctggggggctccaaaagcttgttctccactcagcctgtaggcctcctccttgatcctgcttggcctgcagaccctcctcccaccccttgaaccagggcatctggatgctgactctgtggtggcctctgatgtctgacaccaccaacagaccctgggccaggtccctaccccagactctgtgcctgaggccatggtatagtggggaagaccaggctcagggccctagagtccccctcccagcccatctgagcaacgtggccatctccatggctcctccaacccagaaatgtcatcacccatgggccaggtaaggagctcccagccatgaggccctacgtcctggctctacggccaaacataagcccttccgcttggctccttaccccatcccccttttgttgtaccctcgccctatatcgccaacccgctcccgtcccaccctaacctttcacgcccaataaacannnnnnnnnnnnnnnnnnnnnnnnnnnnnnacaccttcacttcctccctaccccacatcagcaccctccaacataattcactaacatcacccctcgtcccttcgctttttccccacactactccccactatcccctcacccttgagtgttttacagaccgtaccctcctatcgccatctccgtaacttaccccctcatacccattgcagacaatagcatccgcgctcgctcctatccaatacgtgttcgcttcgccccacgcgtccattctcccttttgttatatcgcctccaccccgcgttacccctaccacccacttatttacacccctctccccacataatcacctttaatcccgttaggccccattctaccgaattcatcccgtcgataacatatggtcaccttatccacaatacgccactctcctttcgtatacaaccaacgatcgttccagaagtctcatacttctcctcaaaccacgtccttctctacgctctcncactactctgcaataccatctcggatttctccatcctttaaccccccaccctcccgactacagattagacccatctgtacacacctcagtacccgaataccctattatggcaaacttcgttactatcg

SEQ ID NO: 452259 - DNA, 1030 bp, Homo Sapiens
aggggggttacaaacagttcccggggggcccgtttttgggaggccaaatcgtggaaagtgactccgtaccctcaaaaggggcaaaagaccagggctggggtccctcgtcatgatgtcgctggtactgcccataaggctgtacccacccggtgccccaggggataagactccaagaggacttcggtcacaccaggagggcaagttgtacttcatccctgtcgcttctggctggggtaggcgtattgtcccgagtcagtctctcaaaacggtaggttggggcaaacgtgatttctttctccctcgaagtgtaggaagaccttctgctccctcctctctggtgagcagctggtcgtgggacaggaggtctgcgtactgctgctgcttgattttctggatgatggtttctgcctcccaggtaggcagatccacacggtagttaagatccccaaaccagaagaggtgcgtgaagcggtgagtgatgttaaagggactcagcttcttgtcgcccagggccaggaaccggagaatgttcatatagttttggtttcgcctaatgcaaggaaaaagcggccatctagcacggggtcactggttccccctccactgtggcaggaagtcactcctgccataggtgtggggcgaggagcatagcaggtggggggaagtgagacttagccctccagccctgctgcagcagaactccttagtgtgcaaatatggcacagccaggatgcaaagggcatttgaggccacattgggtgtacagagggcaggggaccaggagcagcagcatctgctcagcagagaatcagaacagtgaagattctagatggctgtcttcattcctgggccccagctaggcaagatcagcttggatttgtaaggaggccccagaggaggctttctgctttagaaacagtgctagttagcggtctatcaggctaatgacacaaggaaatatcttttctgaccttcagacaaaattcctccacacgtgaggtcactatggtgctgcaatcccgggaattcc

SEQ ID NO: 452260 - DNA, 1823 bp, Homo Sapiens
  misc_feature (1485)..(1527): n is a, c, g, or t
  misc_feature (1743)..(1779): n is a, c, g, or t
cattcgtagtgactctttctcggggtgatatacatatgcgaatccctgtcactccagcttaccttgtgcgtcccagagccgaatgaatattaggattccacattcctgaggaggaggtactttgaatcacccagtcaaacttgcaggaatgtgtccccaatcctcgggtcagcccatcattggttgccaccgagactgttaagactactcttgctttgaaaccgttgttagggtaatttctcttttgtgacttgtgccaatgtccgccatgtaatacactgggcattctggttttaatgttgtggattacatggccatttgcagtttacattcttcttggtctcacagaaaataatagccctcccttcagacccactgtagacttgaaggacatctccaataacttgctggcctctgaggaccaatgacactggatggccaaatgttccacagtagttgcagccttttgagtcatgttgttccaacaaggtcaacctgttcatatctggatttcatgtattttgtttgcaactttgtatacccactgtgggcaagttgcagaaaaaagtaaagtctgaggattgtcttcagaatcagttttgtaggattcatgaataatatcttcaacttgttcagcgaaacctaaatctaacatctgatccacttcatcaagcacaacatgtcgcagtttagaaaagatccaattgggcccctttgcagatggtctttgatacggcccaggtgttccaaccagggatgtcaataccatttgcgaatatgattaaatttggctttgatatgatgttgcaccataaaaacaccgccacgctgagtttcctagttatatctttgaagtctttggctacttggtttgccagttcccttgttgggagcctaaacaagtacctttggtgagcggctttttttaattgtttcttgatttctttggagtctttcaattaaggggatggcaaaagagaatgtctttcctgttcctgtccgtgcttgagctattaaatcttttccttcatatacaggaccaaaggtcttaacttgaataggaaagagatatgttacccctcgacctttcagaagctttatagtctcttcagaaataggaaaattggagaaggctccttctttctgttcacgtgttaaggtctcctctagtttattatcacttgatttatgagtagaagtatctaaagatgatactcgctttgattttttttcatattcatctatatctccatttggtagatcttttcttcttgacttatgagatttggagaattcatctgaaagtctattaaatccttcttcagtgtctccatttagcttctctttcattttagattttttggccttgggagcatccaggtcatctgtaacaccattttctcttgtttctgatttctcatccgagtcataatggtgccttgacttccttctgtcactccagcactgtgtaatgtgttttcagcnnnnnnnnnnnnnnnnnnnnnnnnnnnnnnnnnnnnnnnnnnnaggtccataatcccttatccgaaattgcgatatccataaagctcttttgcctctccttcttctggctctcggactcctccaagggtgcttccagctccataatgtccccccagaggagtttcccaggcattactggccaccgccgcctccctccgggcacagtggccacaaccacccgctctcgacgaattcgagctcggccgatttggcctgatnnnnnnnnnnnnnnnnnnnnnnnnnnnnnnnnnnnnncgccgccaccgcggtagcgctccaatcgccctatatgatctatc

SEQ ID NO: 452261 - DNA, 1050 bp, Homo Sapiens
  misc_feature (58)..(58): n is a, c, g, or t
  misc_feature (199)..(199): n is a, c, g, or t
ccttttcatcaaggccccaacatttggcagtttagaaaagatcccattcggccatttntgaagatggtctttgatacggccaggttgttccaaccaaggatgtcaaataccatttcgaatatgattaaactgtgagaggagagaaatgccacccaatatgtaaaattcaaattttggctttgatatgatgttccaccantaaaaacacgcccacgctgagttttcctagttatatctttgaagtctttggctacttggtttgccagttcccttgttggagccaaaacaagtacctttggtgagcggctttttttaattgtttcttgatttctttggagtctttcaattaaggggatggcaaaagagaatgtctttcctgttcctgtccgtgcttgagctattaaatcttttccttcatatacaggaccaaaggtcttaacttgaataggaaagagatatgttacccctcgacctttcagaagctttatagtctcttcagaaataggaaaattggagaaggctccttctttctgttcacgtgttaaggtctcctctagtttattatcacttgatttatgagtagaagtatctaaagatgatactcgctttgattttttttcatattcatctatatctccatttggtagatcttttcttcttgacttatgagatttggagaattcatctgaaagtctattaaatccttcttcagtgtctccatttagcttctctttcattttagattttttggccttgggagcatccaggtcatctgtaacaccattttctcttgtttctgatttctcatccgagtcataatggtgccttgacttccttctgtcactccagcactgtgtaatgtgttttcagcttatcttgtttaaatcttcataacaacccttttgcctctccttcttctggctctcggactcctccaagggtgcttccagctccataatgtccccccagaggagtttcccaggcattactggccaccgccgcctccctccgggcacagtggcccctcgtgccgaattcgccacccaggcc

SEQ ID NO: 452262 - DNA, 1072 bp, Homo Sapiens
  misc_feature (777)..(777): n is a, c, g, or t
  misc_feature (781)..(783): n is a, c, g, or t
  misc_feature (785)..(786): n is a, c, g, or t
  misc_feature (788)..(788): n is a, c, g, or t
  misc_feature (792)..(793): n is a, c, g, or t
  misc_feature (799)..(799): n is a, c, g, or t
  misc_feature (805)..(805): n is a, c, g, or t
  misc_feature (808)..(808): n is a, c, g, or t
  misc_feature (811)..(851): n is a, c, g, or t
ggtccggaattcttgggatgtggaatgctacaaagttagctcttggaaagacagatgcgttcatatgtaaatataagaagtcgcactcttctggactgtagcaggcttgctgccatcagccgggttcaggcccttgtaagttagctgtacagcagaagtttgctgtctctaggattcatatagcacccacagagctccaagtaaccaaattcccccaaagacaggaggtgtggctgatgggtacacatgcttggtaagagtttctgctttatattctaaagtacttaatgtttttgagaaaaaagttatcgaatattttttagacttaagttttatcttctgtcagaatgtgaaaagttctgcccagtttctgagcaaaaacttcaatttcaaaataaaggttttcaggggttcacttaagtgtatcacaatcaacaccagacgggatattttaactatcagattttcggaaatgtaaaaacctttatgtgtaacttcttttgatattaaacttgatttttgagcctgtaattttcttctccattggaatgaaaataatttgtatttgcaatacattttatatgtttattatgtaaaccaacagtgagaataataactgaattaagccagtatccttcaaaacatgatggaaaatgaaatttgctttttttctaaaagcattcatacactgtcacctcgccccttatttatatagaaagtcagtttgttgcttatgttccctacctgagaaaaagaacagtaagtttgaggagaatntccnnncnncncccnncccccncccccnccnccnnnnnnnnnnnnnnnnnnnnnnnnnnnnnnnnnnnnnnnnncgggggggccgcttttaaaaaattcccttgggggggccccaggttttcgcgaaacccacttttttttggtaaaagggggcccccctagaggggaggccgatatttttaaacttaagggcctctggcccggcccttttttcaaaccgtctcgggcattggggaaaaaccgggcccacccttgggggacatcttttggggagagggaaccccttttctctttt

SEQ ID NO: 452263 - DNA, 1126 bp, Homo Sapiens
  misc_feature (412)..(426): n is a, c, g, or t
gggttcgttttcgcgcggtagggtggatccgttggacagcgacagcgtaaagcgccttttgttgtgtgtattatcgggggtgcgtagagtcaggaggaatagttcgtgtaaacgggtggtatagcgccttttggataaggaataaaaagacggttgaggatgtgagaaaaaaagtggcgcaaggtgggttattcccttagggagatagggattggtcaagggcctgtcggcatttttaatgggggtagggcacgcagtcttttttaaattgtatggtccttgagccaaggctatttgctaatgttgctcgccctctaaaacattaatgggttattcctgtaggtgatgtacaagaaggaacaggcaaagccagaagagtattaactcagtttcatggtcacaaagtcatttnnnnnnnnnnnnnnntatacaccctcttcttccagtcgagtcaggcccaagggaacaaccttggagggaacagctcttttttcttcctccacttccagtgctctcttccctcagtctccagtgcttcaagcttgaaggcaagtagaaaactttgaaggcaatcacacctacgttgcctgttggtgggtggttgggagaactgcctgggaaggagggaggaggatgaagtccctttgggcagggttagcagcacacatctttggagtctgacaacctactcaccagctgtgagaccgtgagcaagtttcttgacctttctgagcctgtgcctcacctgaaaaatgggaatgatgacactgcttccattcccagggctgctctgtgctgcaatgagacaacacaggctgagtgcctggcacacagtaagtgccagtgggttaatggggtcactgtctttgtttcagagcacaaagacctctggctctggaaacagaggaccaggctgcatggtccaggacaggttgctttgcttctgcttctccaactgtgagatagagctgcggtgggacaaggcggggggcagacatttctgcagcaggatgcaggtgtccctcacagctccttccttcacctcagtgggctccaccttgatgccactcatttgagactgtgactgatggactgctggcaggttcatcccgggaattccggaccc

SEQ ID NO: 452264 - DNA, 855 bp, Homo Sapiens
  misc_feature (193)..(201): n is a, c, g, or t
  misc_feature (265)..(265): n is a, c, g, or t
ggggggagaaattcaaacgcccttggttcattagcccagggttttttcttgtggaacaccgttaatgggccctgtttcccctttccttaggtgggggccggggcggcccaaaacggaattggttttaaagaaagtttttttgggggccgagaggggtccgaccaaagttttctgtttgcttctcgtatgcgtnnnnnnnnnattgtgtcgcttggggtgttcggggtctcgtgcctatgtgttagcgcggcgtcgcttgttttcncgggagaagcatgttaagaagtttattttatagaccacagcagaaattccagccaagtttctttagaggaaatcacctgggtgtggcaaacagacagggcttccattattctacctttaggatttcaatagtataaaaccggttgtttttgatggggattacagcagcatcatcagggcagatgcctaattcccgaataacatcaacgacggctgcaatttgcacagttctgttggtgtaaaagtcccagtagaaggtttttggattgtcgtcacataggcaggcagtatacttatagttaaatgcaccttgtagagggatgctgctaatgaggtaagttttaaccaccatgcattctttcaattctgtttgaactgcaagcactgcagtgacttcgtcatttggacgtactgacttgggaatgtcaaaattctttattatgatcttccgagtgttgtcctgagctttgttggcccccaactgcaggcagagaaccaggagcagggtggcagggctggccctgaacaggagctggagcaagcgcatgctggagaaaacagaaggcaatgtgtcccagagaagtggtcccc

SEQ ID NO: 452265 - DNA, 566 bp, Homo Sapiens; identical to SEQ ID NO: 323718
  misc_feature (144)..(248): n is a, c, g, or t
  misc_feature (280)..(292): n is a, c, g, or t
  misc_feature (362)..(396): n is a, c, g, or t
  misc_feature (404)..(518): n is a, c, g, or t

SEQ ID NO: 452266 - DNA, 883 bp, Homo Sapiens
  misc_feature (77)..(89): n is a, c, g, or t
  misc_feature (133)..(134): n is a, c, g, or t
  misc_feature (136)..(139): n is a, c, g, or t
  misc_feature (147)..(252): n is a, c, g, or t
gggggaatccaacccctttgccttggcccggttcctttaggaaaccaataaaccccggttccctttcccttgggggnnnnnnnnnnnnnaaagggttttaaaaattttttgggggccgggggggcccccccanngnnnngtgtttcnnnnnnnnnnnnnnnnnnnnnnnnnnnnnnnnnnnnnnnnnnnnnnnnnnnnnnnnnnnnnnnnnnnnnnnnnnnnnnnnnnnnnnnnnnnnnnnnnnnnnnnnnnatgcttttagaattatttattcaaaaacactttataataaattcaggtaacagtaaagtaatacattcaatagtactaaaatctatagaaaatagataatttcattaaggtgcaattaaaatacttgaaattgggacacatctctatatttcaaaccaatatactggctttctttttaaaagactattctagtctttacgatgtccaaagtttttcctctttgcttttatttgctttagaccatatttaaatttttagcattcctaagtgcatacattttaggcatatactataatgaccaagagtttgtgaacctactggattaggtaaacactttggggaggtatgacctgcacaaagtagggtgggaaagctattatctcccttaatctggacacaactggttcaagcagtctataatttattagcttctctgatagcttcactatttggttttcattgaccttttgagcaactgactggcaaaccccagattcttttcgcctgaaatcttttcaagttagatactgtccatattacacttgtacttataatttactatcttcttgccttggacaacttatttctccaaattctgatttctccagcagtgtattgggatagtatcact

SEQ ID NO: 452267 - DNA, 750 bp, Homo Sapiens
  misc_feature (85)..(154): n is a, c, g, or t
  misc_feature (156)..(156): n is a, c, g, or t
  misc_feature (183)..(183): n is a, c, g, or t
agggtaaatttttgtattttttagtaggaggaggaggttttcccccatgctgggccagggtgggtcttgaactccctggacctcnnnnnnnnnnnnnnnnnnnnnnnnnnnnnnnnnnnnnnnnnnnnnnnnnnnnnnnnnnnnnnnnnnnnnntncatagtagtttcgatttacacttcccnaaatgatgtgtccagcatctactggccatttgttagtggtttttttcttcttttaagaactgctgagacatccataaacattttcaaaatgcagggtatgtttttcagtgttaaggcaactgttctgatgtgtttttcctttgctctctatcaccaaatactgtacatataaatagtaagactgggctttgtgttgtccattgttaatcctaaatgcaacaaaacacatggagactttgaaaatccttcagaataatgctatagttaagattttgctaaagcaagtgttttttctaactccttgagctgcatattgccttgagtaatcatcatccggattgtatcctcttcggtggcacttttgtttcttctgaattcttctcttgcccaatcttccaggtatttgcgatcagaatcatttggaacttgccgaattgtttgcaaaatccttctgtagaggagaagaacttgttgccttcttacgaactgctttaacgttagcgtcgctgggggtaagcgggaagcagccatgtccaccagaggtccgccggagcctcagcgcgcccc

SEQ ID NO: 452268 - DNA, 1111 bp, Homo Sapiens
  misc_feature (60)..(115): n is a, c, g, or t
  misc_feature (188)..(243): n is a, c, g, or t
gggaaaagagaatggggcgacgtgggagaggcagggggcggtggaacggagcggcgttannnnnnnnnnnnnnnnnnnnnnnnnnnnnnnnnnnnnnnnnnnnnnnnnnnnnnnnggtagggcgcatccggcccagatgaggtggcgggcgacgaagccgggggaccgggcggagagcggccggagannnnnnnnnnnnnnnnnnnnnnnnnnnnnnnnnnnnnnnnnnnnnnnnnnnnnnnncggcacttgttttgagggtcaggcggggggacgcgggcccagcagggaggacgccgcgtgctctgggaagtggctgtttggggcagggcaggggccagagctggttttcccccgccttgttcttggcaagccacgtgggctcctgctttagcgagcagcttggctgactggctgaaaccatgccaggatgcttcatgcaaggcggtattcccatccttgtcttgtctgtcccagggcacaccccttccgtggatgagcgccgcgatgatctccgtgttccccaccactgtggcccggtgcaaggcggtctggtccccatcatcctggacatcaaggtcgcagccagccttcagcaagatctggaccacaggaagatggcccttacttggcagcaagatgcaggggagtccggccatgcttggtaaccgctaccctggcgcccttgttgatgagctgaaccacattctctgtttggcctttgtacgcagctacgagaaggcgctctgaaagtgcagcgaccgcatcttgctggctcatgaattaggaaagaaaggttttcagggaagcggtagacaagttccttcagctcaacacgaagtcactggcccggcctggcacccagaggtaaagatgttcacaatcatcagaagatgtctttatgaatatgccatcttcgggacctttctctcccgcgccggacgtccgcgccgcagggaccaaggccggcgacacggtggggggcgaggggcgaagacggggactggctcccgctggctccggcggccccagggcctcggcgccgcccagcgccgtgcctccagccgcccgcgcgccaggcagcgccctcgtgccgaattcgccacccagc

SEQ ID NO: 452269 - DNA, 371 bp, Homo Sapiens
cgtgagcatgaattatttcttgttttattgctttcttgtttctttcttgatgcagagtcaatgtttttgagtaacagtaataagatgcccaaaatccaacagtaaacattcaaatagtaagatctgatgcagaacaaagtcctcaaatgttaactcctataagttacatctagcggaaccacgagggataaaggctgaactcatcatcttggtttatgatggaaaccgctatcctctgacccagggaacaggaggaagtctcgaatgccagccacctgtttaggcactggtggcagcactgtggtctcctcgtgaaatggccggggagactcacagtgagtctaagtatggcaatctctccttttaccccc

SEQ ID NO: 452270 - DNA, 745 bp, Homo Sapiens; identical to SEQ ID NO: 150729
  misc_feature (158)..(252): n is a, c, g, or t
  misc_feature (257)..(258): n is a, c, g, or t
  misc_feature (261)..(341): n is a, c, g, or t
  misc_feature (344)..(392): n is a, c, g, or t
  misc_feature (396)..(397): n is a, c, g, or t
  misc_feature (399)..(403): n is a, c, g, or t

SEQ ID NO: 452271 - DNA, 820 bp, Homo Sapiens
  misc_feature (149)..(159): n is a, c, g, or t
  misc_feature (161)..(170): n is a, c, g, or t
  misc_feature (172)..(173): n is a, c, g, or t
  misc_feature (176)..(189): n is a, c, g, or t
  misc_feature (191)..(225): n is a, c, g, or t
  misc_feature (227)..(234): n is a, c, g, or t
ggggggaatccccaacccttggtcctggcccagggttttcctggggaacaactattggccctgttccctttcctttttgggcccgccgcccccaaagaatgggtttttgaaaactttttgaggggcggaggcggccgaacatgtttttnnnnnnnnnnngnnnnnnnnnngnnaannnnnnnnnnnnnngnnnnnnnnnnnnnnnnnnnnnnnnnnnnnnnnnnngnnnnnnnncaattccattgacaactgacttgtcatctttattaatttttacaaatgcatgtctcctaatatgaaaaggttgattttcactttattgtgtgctttgcacatttacagcagcaacaggaagagcttctactgaatagattttagtcttcaaaaatgtgactgcatcttccatctctagtttgtccatctcccagttattgaccaagatcacatgaaaacccattgcattcaaatgccgcattttcatagcaaggaatcctctggggtggcttgaacccaaacaataagcagatctggaaacacatagcacagctactctttgaatatctgtagcagaagttgtatccacatcagaaagtggtagcacttgattcctgttagtgtccattctgatttcaaaatcaatatgataattgtgtggcaagtgcacatcctttgagaagtgtccttcacctcccagaaggctgctcagcacctctgccacctttgcatttgtatgtgacgatggcagctcccgcggcagctgtgggagtgacaaggctatgtccctcagatagacagtatcatcaagttttagacaagtacc

SEQ ID NO: 452272 - DNA, 656 bp, Homo Sapiens
  misc_feature (151)..(151): n is a, c, g, or t
cctcttttctcatttctggtcagagagcacttctttagcagttgctaatcaatgactttttctcagctttttctttcttcttcactctggaagttatctgggtgccactgcagtgctaattttcggtatgctttaataatttcttgctttntggcatttctttttactcccaagattttataataatctcgtttctgcgactgtttcaataatctttgtgctttctctagaccttctcgaatctgctgatcattttcattgtgttcctgagcagtttcataatcctgaatagcttcatcatacatttcctctatcaaataggcctctgctcgatctttcagggcattcacattgtcaggttccatctgtaaaacttcagaacaaaccctaatagcttcaacaggcttctcgtccttagaaaagcagtggcaaatcctctcctttgaacgaactgtatattcagcaatgcttggctctgttttcatgacagattcatatttgctggtagcatctgtgtatctgccatctctgatgagctcttcagctgactcaatcagcttattaagtttctttacttgtttatagtgtgcaaaacaccttttatgatcctggtcaagtttaagacattcccgaacttcactgagggacagttcgcc

SEQ ID NO: 452273 - DNA, 655 bp, Homo Sapiens
agtttccctggccagtgttctgcctgtgcctgaattgatgcctcaggccaggtaaagaagattcacacagattcttctgtctctccagtgggctgtggggcgtctttcctggcatggcaactgccgaggtgactgctgaggccatgttcagtcctccgggcccgaccatcctgcttggagtggcgtcatagccatggtctgctgttgcctcagacgatttacctggttattgtcacggcccgtcaaagtctgacctattggggtccatgatgaggtagcctgtttcacacttaggtcctgtgactggatcattttccgctgctcttgggaaatctgctgttttgtgacttctcttagtcctgacaccctggagtggcctctggtcagtggtctgtaaactgagaatacatccttggtcttgtgggctcttctttcttatctcacatgaattgtcttgttccagagggctattgcccaaaggcatccaaatcattcatcagcagagtcctaatcgctgcagacaaatcctccacacggcctcccaggggcccctctcccctggggccaagggcaacctcgcgtccccttgccccgcccgtgctgcaccccaagtctacagcgacctccataggcccccagtgaatcgcccagctga

SEQ ID NO: 452274 - DNA, 1058 bp, Homo Sapiens
  misc_feature (166)..(166): n is a, c, g, or t
  misc_feature (305)..(418): n is a, c, g, or t
  misc_feature (422)..(458): n is a, c, g, or t
  misc_feature (662)..(670): n is a, c, g, or t
  misc_feature (818)..(859): n is a, c, g, or t
  misc_feature (982)..(982): n is a, c, g, or t
aaaaaggaagaagaaaaagaaacttaagtggggttcatacatagcatggcagagggacactggagaataaaatggcatgcagagaggaacacgcgggccagtggatgaggcttctagacctggcagtgaactggagtctatttgcttacacaaatttaaccttctntccatgatggaatacaagtttttcttgccaaaactcgcagccccagctgccctagatgaggagcaccgtgctggaaaagtgcacaggctgatcacagagacaggtaggaagcaatggactgttaaaatgcatgttccgnnnnnnnnnnnnnnnnnnnnnnnnnnnnnnnnnnnnnnnnnnnnnnnnnnnnnnnnnnnnnnnnnnnnnnnnnnnnnnnnnnnnnnnnnnnnnnnnnnnnnnnnnnnnnnnnnncttnnnnnnnnnnnnnnnnnnnnnnnnnnnnnnnnnnnnnttcatattcctgatcagctctgaatgtgactattcaatgaagacagtaaagttacagtgtaaggcacacatgacctttggccttgctaaagaagagtggctgaaggtctagcaaattaatgcttgtcttaggttacctgttgatttaaaaaccacaacaacaaagacccataaaaatagggacccccccttcccctccctcccnnnnnnnnnggcggccgccctcggcccctaaaaaagctttcctagaacattccgtttggggggcgcggggcccaagtagggaaaggtggaacatggggccttagcctggttttctcaaggaaaatcccggggacatggacaagggggcttgggatannnnnnnnnnnnnnnnnnnnnnnnnnnnnnnnnnnnnnnnnngaacggcctcttgaaacacaatcccagaaggggaggttcccggaagggcctttcactgggggtccttattccaagagggggcgctccacggagggagttttcggataatctaaaattacaccnccccgcggccttggggaaacctattttgccacataattgggtttggcaaccccccataattaagagcgctctctcc

SEQ ID NO: 452275 - DNA, 654 bp, Homo Sapiens
  misc_feature (45)..(104): n is a, c, g, or t
  misc_feature (111)..(249): n is a, c, g, or t
  misc_feature (385)..(554): n is a, c, g, or t
agaccctccccattagggccccaacttccccaatatctattgtannnnnnnnnnnnnnnnnnnnnnnnnnnnnnnnnnnnnnnnnnnnnnnnnnnnnnnnnnnncattctnnnnnnnnnnnnnnnnnnnnnnnnnnnnnnnnnnnnnnnnnnnnnnnnnnnnnnnnnnnnnnnnnnnnnnnnnnnnnnnnnnnnnnnnnnnnnnnnnnnnnnnnnnnnnnnnnnnnnnnnnnnnnnnnnnnnnnnnnnngaggtggctcacgcctgcaactttgggagcactttgggattacaggcacgagccacacacctggcttatttcctgtaattctttaagtgaaaggcatggttaaacattatggcatcagtgaggtagtggtgtgggnnnnnnnnnnnnnnnnnnnnnnnnnnnnnnnnnnnnnnnnnnnnnnnnnnnnnnnnnnnnnnnnnnnnnnnnnnnnnnnnnnnnnnnnnnnnnnnnnnnnnnnnnnnnnnnnnnnnnnnnnnnnnnnnnnnnnnnnnnnnnnnnnnnnnnnnnnnnnnnnnnnnnnnnnnatttttaaattgaggctggacacggtagctcacccatgtaattccagcactttgggtgtcactgcaaggtatgcttggctcaggatagagcggcaggtcc

SEQ ID NO: 452276 - DNA, 699 bp, Homo Sapiens; identical to SEQ ID NO: 63024

SEQ ID NO: 452277 - DNA, 776 bp, Homo Sapiens
  misc_feature (193)..(211): n is a, c, g, or t
aatttgggggggaaggaaattcccaaagggcccctaagttcccatggccccagggatttcttcccttagggaaaaccacgctaatggaccccatgttccacctttaccctacctggggccccgcggcccccaaacgaaaatggtcctagaaaagctttctcgaggggccgaggccggccgaccatgttttttnnnnnnnnnnnnnnnnnnntttttgattcattcagcatttattgtagcaaagagctgggccaggagaaaaggtacaggaagaaggaatggaatcggaaggaagaaaattcattccagagacaaaatagctcccctcctctgttgtagctgttcctctggcaatacaaactttctgctttcaggttctgcagcattccagaccttgagcactgaatcaggatgggaaaaagacgttgtgttcctccactcgagcccaagttggcagcaggctgttgtggggtcaagaagcccaaattatctggaagtggaacgcacagtcacgggaatcagtccacaactgtccccggctctagttcaggacctcttcaaaaccaccagcatgtggacagcagcagtggacgggagaatgtgtcagacttaactctgggacctggaaactctcccatcacacgaatgaatcccgcatcgggagcgctgagcccttttccccggcctaatggaactgccaacaccactaagaatctggtggtgactgcagagtatgtgctgctatgttcgtacgtacttacgtcatcgctagggtt

SEQ ID NO: 452278 - DNA, 896 bp, Homo Sapiens
ttttgagttctgatttttattgtgactaatacatgaggtgcattattaaggtttgacaacatggtgactgcctataaagacgtctgcaaccagtgcctgcagccttcattccaaatgaacattcttgtgatggctccaatgttatagacaagcattaacagccaaaaagaaaaacagaaatctccttatggtgtgaaagtcctctcagctgcagctgcccggacgcccagaagagccctcccagctgcagagggtgatttcagtccatgtcgaccctcctgcttgtctttacagcagaatgaattctcttttgtctcagcctttcccgattcatgttttctatcctgattctatgaagtttaacatcttcttttgttggctccttcggtgtctggctggcctcagtgatcatgtctcgaattttctgcaggcaatctgccagattccggaactgatagcggctgctctcagaggtgaggatcaactctcctaacctgttgatcttgtttttatgcgtgatggctatcttctgccgcacgggctccgcgatccactcggcagttgccaaatggaacctgacttctgccttggaattcactttgttcacattctgccccccaggaccactactccgacaataagatattgtcaagcgatctggagggatgtcactgtcggcttgctttgcaccattcgggaccctccaggcggtgttcgagccctgagattcggggtagagcttgtccaggctgtaggtgctcttgaactcagtgccgtctttctgcttgtgcagcgcccggcgtgggcaccgtgcgggcggtgggagcagccagactccggctcggctcaggccccagcgcaggcacctggtggccgccatgctcaggtcttgcgac

SEQ ID NO: 452279 - DNA, 819 bp, Homo Sapiens
  misc_feature (23)..(23): n is a, c, g, or t
tacccggagaacccacccccttntggggaattttggttctcacagaaacccgctctggggcggtgcccgccccggggggcgttttgttatatgggtggagggaagttccccaagctccttggttcctggtccccggaatttccctttaggaaccaacgctaatggcccatgttcccgttaccctacgggggccccgcgcgcccaaagaaaatggttctgaaaagacttttcgaggggccgagggcggcccgccaaggatatattttcgtgctttgtggtttcggggaatgtaacaagcatttattaaaaactgtgctgcacaaaacatgttagaaactagccaggtgctaggagtctaatcaaggcaggggcagggtaaaaacatgggaatattacatggacaagcttgtctagcatggcagtctataacccttgagggtttacataaaataaaggaacatttttgtggctcaggctccccagagttctctttatgtttgggcagagactgccccatcccttagtgatcccaccttagagccaggttttcaaagtcatttctcccagtatatctgtctctgtatgcaagtttcctctggttgccttgagcaaaaacaatcatccaagtcaaatttgctagccctatgctgggccagcccacgttcccgtaggacatctgtaggctaagtaagccccgggtgatctgtgtcttggtcttcctaattccgttgcagctcttcctctctcagcccaggagtggaaagtcctaagcctccttccattcatcccattatcaaggtgatggctctccctcccccc

SEQ ID NO: 452280 - DNA, 550 bp, Homo Sapiens
  misc_feature (100)..(109): n is a, c, g, or t
caagctttcatctcatattatttaatcgcgttttaaacttccaagaatctttattgaacttgctcagcatcaagcacgtgtctgaaggagccagggtggnnnnnnnnnngtgcccactggcgacagggagggccccagctggcagaccccccaaccacatcagaggagttttcatttcttcctgggctgcttatctgggaagccttcaaagaattcgttacacatcatggcgatgcaggacaggaagacacagtactcttggaagtccacctcgttgtccctgttgctgtccaagttgctcatcagcttctggaaagcagcttcatctgtccttttccccaagaagctgggcagctcccgggtcagcagctcctttagttctgacttgttgagcttgaacttgtcaccctctttgcccgagtacttgtggaaggtggacaccatcacatccagggccttctccagagggcacgccatgacagcagtcaggatcaaaccaagaaagaagaagcgctgaggagagagggttgtagagaggggaagaatcccc

SEQ ID NO: 452281 - DNA, 815 bp, Homo Sapiens
ctaatggcatctaggggctcgaggccgggggtggcagttaggcgagggccgatcagcgcgcgtgcgttgcgcgcggactttggtagtccgggacctctcttgcatcatccactcctccgtcccacgggcggttgtcttgtggcgagtcagccacaccgcgatccgggtcttcacggatcggctatggaccatgtgggcctacctcatgggcccagccggcaacgaagtggtgtggaaaggttttggaggggcgagcggcccggcctgctttttcattgagtggcgctcgactgcgtgttaaacttacacgaatgtctagtggacttgctcagcatcaagcacgcgtctgaaggagccagggtggaaagaaaatagtgccccctggagacagggagggccccagctggcagaccccccaaccacatcagaggagttttcatttctttcctgggctgcttatctgggaagccttcaaagaattcgttacacatcatggcgatgcaggacaggaagacacagtactcttggaagtccacctcgttgtccctgttgctgtccaagttgctcatcagcttctggaaagcagcttcatctgtccttttccccaagaagctgggcagctcccgggtcagcagctcctttagttctgacttgttgagcttgaacttgtcaccctctttgcccgagtacttgtggaaggtggacaccatcacatccagggccttctccagagggcacgccatgacagcagtcaggatcaaaccaagaaagaagaagcgctgaggagagagggttgtagagaggggaagaatccc

SEQ ID NO: 452282 - DNA, 320 bp, Homo Sapiens
  misc_feature (38)..(38): n is a, c, g, or t
  misc_feature (82)..(82): n is a, c, g, or t
caaactttttaatctccctttacacattatattaacantcatattgcaaggcattccattcacaaatattacagtttgatanaaacttcacacacatactcccaaagtctataccagattcagtcaactttactaaatcattcaaataataaaagtaatgaaaacattattatattttaaagcaataaggtctgaggcactctgggaaagatgttctcttacaagtataatgtgtcagtggtatgaaattatattacaaggatgcccagtaatcaagtacactctaatgacaatgactttgtgatttgatatgtcttcac

SEQ ID NO: 452283 - DNA, 833 bp, Homo Sapiens
  misc_feature (39)..(39): n is a, c, g, or t
  misc_feature (55)..(55): n is a, c, g, or t
  misc_feature (57)..(57): n is a, c, g, or t
tagcttttcgagggccgaaggcgcccgcccatggttttnttggttgttttgtttncnttttcatataggagaatggtttattataaaaagactgtccataaaatttaggcaacaggttatatacacattaagagaacaatccacttgaaaaatggaaagtagaaggtagctagctgatcactaatgatactttgtttgtttaaaattaacaaaggcaaaatgcatatgaaatagtcacattgatttggtagcaataatggtctttaattttcagaaataactgttttgcactagtcttaccattcactatgctgttataagtctgtagcatccagtacataactgtaatttgaattccaaacaaatcctcaataacacagaaacccacacttgagtgctctactttaatatcctaagcaatagagaattatacacaagacaagaagagaaaacatccctcagccctcccttcaattaagaggagacacacaaagtgcatgtgttgcattttgattatgtcaaaagacaatccaagtctgttggttaggtaaatctctgttcactgattaatacatgacccaccttctttcccaattattttattttaaaattctaatgttgctagtgccaggtaatggattaaagagtgcctactcacaaatcaactgtatccacttttacaatatgtaaaaggtacttttaacttcctttcattgaaccagtgtacaacagttcactgtacaactgaaggactgacatggcaatccttaagaattttacctacagaatgaatgcacacaatttgacacattttcttagtttcaaaagattcc

SEQ ID NO: 452284 - DNA, 1568 bp, Homo Sapiens
  misc_feature (376)..(376): n is a, c, g, or t
ggcggcgacgacgtgccacgcggcgctcgttccgttgctgagggcgcgcgatcagtggtctccaccacggcgcgcggggagaggagcgatgtggtcgcctacaaagtgccctggccagatgtgagctcgggttgcagtatcgccgcgcgggcgggagcgggcgcggccgacataagcggcgcggggtgacagagcgagggggcgtgcggctcgccgcgccatattaagtgtcgtaggaaggctctgtatgtctgacgccagtgtgcttgcggacatagagagggatgatggtgattatccggacgtgttgaccctcgcggccgagcgtgtcctggcgtccgctctccgtcccttttacacattggctggtgccatnaaccaggcgtaagaaggctcggcacagcataatagtcggcgccggcgcaccgtcggctaggtaaacactctagggcgcaacagcaacgcgccgagcgcggaaggggggcgtctccctgtcaccaggcgcgctgttctcattgtgaatctagcccttcgttcatcttgaattggcgccggggggcgcacgcgcccaacagcaacagtgcctcacacctcggcgatgcgccgttaggagggctgggttatgggcccggcgggcgaggctacgctcactgcggggcgggtggcggcagaaggggtggggtgtggagcggtcctccctaagatcccgcgagcggggggggcaagaacaggggggagacaggcggggtgggtggtttcaggtctgagcgcgctgcgagttggccgatgctggggggattttctttttttctaagggagcaactttattcacataatttctacaccaagaactcgaggttatctctgatggaaccaatttcactaatatttactttaagggcagagaagtcaaccaagtcctcacagtctcaagaatcaaaaacaaaacaaaaatacaaacagagagcaagtgggaagataaataacactccgaaataacctagctacacacttttagtttccaatttttctagcatgaaatcacttttctcttccatcctgtaagacgtgttctctcctctcccgttctgagttaggagactgtgaagcagctgcccatggtctcccggatctgacggatgttgtccaccccgatctgaggcacccagggaatagccctgagcgtccgaagccctggggttctgatagccatgggatcttgtattagcatgggaagctgatggtccctcgtgccatcacctcgatgataggcactagcaacacatgtagatgaaggatgcctcaattgcacgttctgagcccagtagactttgtaactcgcaccccaagggagtgatgatggcaaactgtctggaaacacctaggaagtgatgggtctaggatatgacattttcctcactgaagccattactgattggcacatcgaactatactcatatcattgcttgagtctgtagaaacactccaattaacattaaaggcactgatcgatcctgcacgctaggagcattgtgaggcaaatactaagagactgaaagcttgtgata

SEQ ID NO: 452285 - DNA, 960 bp, Homo Sapiens; identical to SEQ ID NO: 150760
  misc_feature (444)..(453): n is a, c, g, or t
  misc_feature (483)..(483): n is a, c, g, or t
  misc_feature (510)..(524): n is a, c, g, or t
  misc_feature (553)..(553): n is a, c, g, or t
  misc_feature (555)..(555): n is a, c, g, or t

SEQ ID NO: 452286 - DNA, 692 bp, Homo Sapiens; identical to SEQ ID NO: 323748
  misc_feature (172)..(176): n is a, c, g, or t
  misc_feature (178)..(178): n is a, c, g, or t
  misc_feature (186)..(186): n is a, c, g, or t
  misc_feature (191)..(191): n is a, c, g, or t
  misc_feature (193)..(193): n is a, c, g, or t
  misc_feature (195)..(195): n is a, c, g, or t

SEQ ID NO: 452287 - DNA, 726 bp, Homo Sapiens
catctttatggttcgcattcatctcataatccttgctttccttctccgggctctgtgcaatggcgtcctgcccatcttttggcttacttgcttcagaatctttctcattttcttcttccgtcaccatcttgggctgttagaaaggtatcatcttcaccttcttgagcttcaatttcctgactttcgatgtcctctttttctatatcttctattccttctgcctctattaattcatgagctctcttgttttcttctgcagagagtaactccttggaatgcacattttcttcttcattttcaccaaattcttcagagtcctttagttcatcatttccatcttgctcatgtgcctcttgattctccaattcacagtccttgataaaagcatcatcttccacagaagcatctccactcaactcatctgcttcatgttttttacctttgcctttagttggtttcttgtttggagtatcagttgaaacagttaattcaatattatctggatcgcctccttcctcttcaatagcctgcttgagtcgggagatgagcacggtcttgactccggtgatgtctaagttccgccgcttcagctcggacttcagatcgatgacccgcagatcggtgatctttttaccttccgcctgacccgaggcggccgaggctgccaccgcaccggtagcggcagccatcttagaagagcagcgcgctgccgaggcagcgagtccc

SEQ ID NO: 452288 - DNA, 209 bp, Homo Sapiens
gctttccctaatatggctgtgttcagtaatggccagtgtgtgctccagcctagcagcacatcaagatcatgggacacctgaaatcccaaaggaagcctgaaatgcctaagagggacaagcgggatggctgctggtttaggttgacatcatcgaatgtggaaaccttcagacttcctggtgccataatcaatgaggcaaagaatctgacc

SEQ ID NO: 452289 - DNA, 1121 bp, Homo Sapiens
  misc_feature (175)..(175): n is a, c, g, or t
  misc_feature (218)..(218): n is a, c, g, or t
  misc_feature (994)..(994): n is a, c, g, or t
cccttttgtccccccattcaggggcccccatttccattctttaagttttttcaattaagattttgctggggggaaaaggggaaatgcaaaacccctaacttttggttggctgggggtcacttggcagtgagccctcacttcaaacctgttcactatgaatgctcatcttttgacntgagtatatcatattaatgtttgaattcaggtagaagtacagnttgtcacttgaagggagtagatgtggaagggcgttcggggaggagtgggaagtggggaaagccaggctaaagaatgagggttatagctttagcaatgttgatgagccacatttcccacacagatctgtagcatttgctgttgacctcttttgagatgaactctcccataggccctgccaggcagcactgagacatggaggaaattcagacaaaaaatggctcaccctgatagggaaggagtgactatattttaaattaaacttgctttttccaacactgtgaggtttctgtaatatttagcttttatttggaagcgatagcgtatggcattttttatgctgtttggtttatattgtctactgcaggcttctttgtataagctttgcctgggctcaccctctcctggacactgttttacagtgtcaccgctgtccatggctgcagaggctctgatgtgaagctgtactctcaagatccacgcttttagactccgcatgattaggtcgtgcctttctgtggccaatagaaaagccccttaactcgggcgaggcgcccggcggtcgaccgcgctacctgtcggcccgcctccgccccttcaaaaagctttccccgaacaatttcgtctggggcaacccgcgcccacagaggtaaacggccaccggggtccatagctggccttcctcagcgcgaacccgtggctccttgacctcggcgccttgggcatcttctcccctcgttacaaaagaaccccctcgctgggtcacacgctacccctntccccggaccaaacgtccgcccacagtgcggcgcttccggaagcgggccctccttgcttgggacctccctgtacgcacaccgcggcggtcccccgccaggcgcacgaaatcttcgcttatcaatttt

SEQ ID NO: 452290 - DNA, 825 bp, Homo Sapiens; identical to SEQ ID NO: 150670
  misc_feature (233)..(248): n is a, c, g, or t
  misc_feature (327)..(327): n is a, c, g, or t

SEQ ID NO: 452291 - DNA, 797 bp, Homo Sapiens; identical to SEQ ID NO: 63131
  misc_feature (712)..(712): n is a, c, g, or t

SEQ ID NO: 452292 - DNA, 1042 bp, Homo Sapiens
  misc_feature (763)..(764): n is a, c, g, or t
  misc_feature (766)..(904): n is a, c, g, or t
  misc_feature (908)..(908): n is a, c, g, or t
  misc_feature (916)..(986): n is a, c, g, or t
gggctctgccatgggtgtgggcagcccatcactggccgttgtatcagtgccatggggtacaagttccatcctgagcactttgtgtgtgctttctgcctgacacagttgtcgaagggcattttcagggagcagaatgacaagacctattgtcaaccttgcttcaataagctcttcccactgtaatgccaactgatccatagcctcttcagattccttataaaatttaaaccaagagaggagaggaaagggtaaattttctgttactgaccttctgcttaatagtcttatagaaaaaggaaaggtgatgagcaaataaaggaacttctagactttacatgactaggctgataatcttattttttaggcttctatacatttaattctataaattctctttctccctctcttctccaatcaagcacttggagttagatctaggtccttctatctcgtccctctacagatgtattttccacttgcataattcatgccaacactggttttcttaggtttctccattttcacctctagtgatggccctactcatatcttctctaatttggtcctgatacttgtttcttttcacgttttcccatttccctgtggctcactgtcttacaatcactgctgtggaatcatgataccacttttagctctttgcatcttccttcagtgtatttttgtttttcaagaggaagtagattttaactggaccactttgagtactgacatcattgataaataaactgggcttgtggtttcnntnnnnnnnnnnnnnnnnnnnnnnnnnnnnnnnnnnnnnnnnnnnnnnnnnnnnnnnnnnnnnnnnnnnnnnnnnnnnnnnnnnnnnnnnnnnnnnnnnnnnnnnnnnnnnnnnnnnnnnnnnnnnnnnnnnnnnnnnnnncaanttgttggnnnnnnnnnnnnnnnnnnnnnnnnnnnnnnnnnnnnnnnnnnnnnnnnnnnnnnnnnnnnnnnnnnnnnnnggggcaacatgttttttcaaaaaaaccccggccaaaaaaaggggtgttttcccccc

SEQ ID NO: 452293 - DNA, 1342 bp, Homo Sapiens
atgaaacccaaaccccaccccccacaaaatttctatccaaagaggcaacacaaccaatttcaactcccctggcttcctttctccaaccacaaccgggccaacccagagcgcaggctccccctaagtttcttcctggttccctccataggtgagcaatagccacttagcataggtcccttcctaaatttcaaattagtaaacaaatctgatgactcagtatctgaatcctttctgccttcatcttcttcctcttcatcatcctttgcttcatactcatcctcctcctcatcgtggtagctggtatcaccatacttatcagatgaaaggttcttccaataagcatcatacccagaagctccatctccctcttcacctccagtctgcctgccaaatttcagggagcgtgttgacatgctaaggtccttagtctcctgagtttcatgcccacatttaggacaaggaggctgttttcctttttcttgcttaaacactttgctccttgtatgatcatcacagaaacaagccttacaacggagacatgagtgctgaccaagccgattgcatgaaacacatttaaatgtttctgcctctaaaacctggcagctggcttgatgctcaaattgatcatcttcacagagaaagttatggcaaaaagaacaactgaatattctgcctccatggtcccacacgcctcgttcacattcaacacactcagcatcggtaagagggcaggcacaagcatgtgtactgagacatttcctaccatggcaaacccaagcttcacagaagtcacatattgcacccaccattgcaaggccagtactgtatacaccagcatgctttatgacacagtctgaagacttcatcatgcactttgttttcccacactgtgcacaaattggtaacttctgtacagaattacaaaagtagcaaaatgctctattcttctgccgcctctgacacttgtcacattccattgaggcattacatggatgtttagctaaatctatagtgcttcttgatgctcttagttgtttttcacgttctcggcggttctcagccttcttcctcgcaccagtcttttttttaggcattttcccctcgtgcgcgctccgggcaaacctcgctcactttcgccgggagaccggactcactcagggggccgagggacagggaatggcgtgaggcccacccgcgacagcagtaaatccaactcgtggaccaggactccgggaaagaaggtactaacagccagggaggctgacagccgattccggacactaggagacggaccggacctccccgctctcgacgaattcgagctcggccgatttggcctgat

SEQ ID NO: 452294 - DNA, 1004 bp, Homo Sapiens
  misc_feature (476)..(476): n is a, c, g, or t
ttgagacggaatctcactctgtcacccaggctggagtgcagtgggtaacaagtgcaaaagtgcatctcaaaaaaagaactcacagctctcatgaaaagtttgtgaaccccaccagatgatcaatctccattacattttgattaaaaatgacaacgcagattagtccatgttcttgaatccatccatcagatttgacttgggcctactttccaaaactcaaatgcatcctcaatgggcacttacagtcctaagaagactccaaagcctctgccatcttaagctgccaaggccactctcagaggcttccgagcatagagaaccaccaaagtgagcgtgtaattccctaaggccaccacagtgagtccctgctcatcaggatgtgcaagctcccaaaatgtctgtttaaaaaccagacatgctgtcttaatactcatccatcagggaaggcacaggaataaaacagagctgcccagaanccatgtggatgggtggggcaggagggcatccctcacatcccaacacaggtcggggggtctgatctaagtgcgatggtcacagccctgccaatatgcagggcttgctccttcgcctctgcgccctcagtgcctgggagagatggaatccacggaccctgtgccacagtcaccaggttactttgtgatctccttcaaggacactctcacaattctagtgtgtgtagaaatcatcaagtgaatatggcctttaactcaaagaatgaatgtcttaccctgcaggctgggcccttcctgcctgcctcaaaactgtcatattcctctgtgcccatgccttggtgaacctggcagaccccgttaggaggtactgatttctgtcaggctttccccagtgtaggcctaggaggtgcaggctgggtcctattgcatggatgtagggagcaacatggtcactctcccttgacaaagcctcccttgatccccaaccctacccctaaggtcacagcagcagcctccccaccccagaccacc

SEQ ID NO: 452295 - DNA, 916 bp, Homo Sapiens
  misc_feature (103)..(152): n is a, c, g, or t
  misc_feature (232)..(260): n is a, c, g, or t
  misc_feature (670)..(685): n is a, c, g, or t
  misc_feature (687)..(719): n is a, c, g, or t
  misc_feature (721)..(724): n is a, c, g, or t
  misc_feature (727)..(731): n is a, c, g, or t
  misc_feature (734)..(761): n is a, c, g, or t
agcgggaggctcaggagcgggcggtgacggcgacggcggcggcagaggaggcagcggctgggccgggccccgtgcgtctgtccgcgccccgtggatgcgaatnnnnnnnnnnnnnnnnnnnnnnnnnnnnnnnnnnnnnnnnnnnnnnnnnngtcggtgagccggctccgggccggaggggcgcggaggatgaggccgctgcctggcgctcttggcgtggcggcgggcgccnnnnnnnnnnnnnnnnnnnnnnnnnnnnncccggacccgggcggacgagcacgaacacacgtatcaagataaagaggaagttgtcttatggatgaatactgttgggccctaccataatcgtcaagaaacatataagtacttttcacttccattctgtgtggggtcaaaacaaaagtatcagtcattaccatgaaactctgggagaagcacttcaaggggttgaattggaatttagtggtctggatattaaattttcaagatgatgtgatgccagccacttactgtgaaattgatttagataaagaaaagagagatgcatttgtatatgccataaaacaatcattactggtaccagatgtacatagatgatttaccaatatggggtattgttggtgaggctgataaaaatggagaattaaaaagtgttttgagaagcttnnnnnnnnnnnnnnnnannnnnnnnnnnnnnnnnnnnnnnnnnnnnnnnnannnnaannnnnccnnnnnnnnnnnnnnnnnnnnnnnnnnnncccttggcggccccctcccgccccctcaaaaagttttcataaaccatttcgtttggggcgcggggccccccaaaggggaaagggaaacggtggccaaaatgggttcccccagaaaaacccggggaccaagaaaaaggggcttgggaatccccccc

SEQ ID NO: 452296 - DNA, 382 bp, Homo Sapiens
  misc_feature (137)..(165): n is a, c, g, or t
  misc_feature (249)..(299): n is a, c, g, or t
gaccccacacagaatggaagtgaaaagtacttatatgtttcttgacgattatggtagggcccaacagtattcatccataagacaacttcctctttatcttgatacgtgtgttcgtgctcgtccgcccgggtccgggnnnnnnnnnnnnnnnnnnnnnnnnnnnnnggcggccgccgccacagccaagagcgccaggcagcggcctcatcctccgcgcccctccaggcccaggagccaggctcaccgacnnnnnnnnnnnnnnnnnnnnnnnnnnnnnnnnnnnnnnnnnnnnnnnnnnnttcgcatccacggggcgcggacagacgcacggggcccggcccagccgctgcctcctctgccgccgccgtcgccgtcacccgct

SEQ ID NO: 452297 - DNA, 607 bp, Homo Sapiens
  misc_feature (445)..(445): n is a, c, g, or t
agttcgacggagactctcttactccgataaccagctgagaatcaaaagcttctccccatctctcagcatgtaccagcttcattgcactatcttggagtctgttttttatgtttgaaaagattgactcattccatgtatcaagcataagctttcgaaccatactgtcttccacatttgattttttattgctgccctgtttacccattaaagtaatctctagttgacaaaaaggttttggtaaaatatcacattgtgtaaagaactttcgccattcaacgatatatgcttttagcaaagccgtatcatcttgatggctcagtactcgtgcctgtgcctgcttaataaactcaagaatatcttcttttaaagcctgatgaatttttgctgggcctttatcatcccaaagacagactgcatgcacatccgaacagatcaaaccactgcntgttttgtaacagattcctggcgtaaaagcttcaaaacagtcgggcgcataaaatcccatttgtcttcaaactgaagagaacctttattctttaacagattagacgtcgccatgttctttaacttggactctcgcgagacacgcgagagtctccgtcgaact

SEQ ID NO: 452298 - DNA, 491 bp, Homo Sapiens; identical to SEQ ID NO: 323775

SEQ ID NO: 452299 - DNA, 311 bp, Homo Sapiens
attgtctattgatagtacttttatgactgtaaatactctggctttctccgtgtgaattctcacattagactttaattcgagcgcgtgtgaactgaacgctgatcagtattttttatcaacacctgagaactgttacaccttttattttgtcttttaggaaatccctgtctttccatttttcatgtaaattttgcacagttacttgttcatatgtaaatattttactttcagaaatgaagtttttaattgctattgttttatataggattgaaagaaaattaactcctttattaaaaacaaatttatctgta

SEQ ID NO: 452300 - DNA, 377 bp, Homo Sapiens; identical to SEQ ID NO: 150759

SEQ ID NO: 452301 - DNA, 1408 bp, Homo Sapiens
  misc_feature (174)..(174): n is a, c, g, or t
  misc_feature (535)..(545): n is a, c, g, or t
  misc_feature (807)..(922): n is a, c, g, or t
  misc_feature (1327)..(1327): n is a, c, g, or t
  misc_feature (1332)..(1332): n is a, c, g, or t
  misc_feature (1334)..(1334): n is a, c, g, or t
  misc_feature (1352)..(1352): n is a, c, g, or t
  misc_feature (1381)..(1381): n is a, c, g, or t
gagggcgcaatgtgcgcactcttgttatccgcgataaagaggaggcgggctataatcggggagacaataagggtctatggttggtaatatcgtacgcgacgcgcacctaatttggcgaggggggatcgtcgcgcccgctaggtcgtgatagattctaaatagcggcggatgcanccaatacgaagggaaacggcactcgttgttgtttggggctcgcgcggttgttgttggtctcacgcgggcggcaagaagatgtatatctctctcgtcaagcagaggggcgggaaggtccgctctcctgacagtcgcgtgcgccggggcggacaaagtcgggggggtggcttcttgcatggatgccctcccggcggggaccatggggtggtgtgcaccagttacccccgcgacaatcagctattttttaccgcgatttgcttcgcaccccccccgcgttttttgcaacaagggagttacaaacgggggggcggtggggagaaatttttgcatttgcgatcgccgccgccctgaggcatcgccnnnnnnnnnnnaacagagccccgcagtgagggataaccgtggggacgctccgatttgaggtagttggatggaaaggggaagtcgggggggcccgccgaggcgggttttgtttttgtggaaggagagaacccgacgtgagatgtgtgtgccgggggcggccggttaggaggggaaggtaaggagaagttctctcgtcggttttgggggcgccgcgccccgaaagggagaggttttgggactttttttggggggcgatggtggccgcccggttannnnnnnnnnnnnnnnnnnnnnnnnnnnnnnnnnnnnnnnnnnnnnnnnnnnnnnnnnnnnnnnnnnnnnnnnnnnnnnnnnnnnnnnnnnnnnnnnnnnnnnnnnnnnnnnnnnnaagccatagaagaatatttattgacatggaaaatgttaacaatatacttctatatgaaatatgtaggctacaaaacagtatatacagtttaataccatttttatggaaagaaaaataaccatatatacaaaatcatgcataagaaaaaaataatataaggatgtacataccaaatattaataataatggctatctctggatagtggaatcagagggattatgtaattttcctgataaattttcctgtcctccaaacagcatccgcttcatactattatttcttgggttgtaattagtttgatataattctcttcagaaaggctctgtttcactatatatacctcaaagcatacttttggatgcagcttctgcaattcccatctaaaaagtggataacacttggcncttananttctggcatatgaagacnatttgtaattaacacactataaaatatgnccaagcaggccaggcatggtggctcac

SEQ ID NO: 452302 - DNA, 885 bp, Homo Sapiens
  misc_feature (64)..(75): n is a, c, g, or t
  misc_feature (131)..(194): n is a, c, g, or t
  misc_feature (198)..(456): n is a, c, g, or t
ggggcacccccgagctgggggtgagaagcacgcggcttgtgtgccgacggaaagctttggattnnnnnnnnnnnnaaaacgaggaaacgggaaaaagggggatggaaattgataggaaagagagggggtgnnnnnnnnnnnnnnnnnnnnnnnnnnnnnnnnnnnnnnnnnnnnnnnnnnnnnnnnnnnnnnnnattnnnnnnnnnnnnnnnnnnnnnnnnnnnnnnnnnnnnnnnnnnnnnnnnnnnnnnnnnnnnnnnnnnnnnnnnnnnnnnnnnnnnnnnnnnnnnnnnnnnnnnnnnnnnnnnnnnnnnnnnnnnnnnnnnnnnnnnnnnnnnnnnnnnnnnnnnnnnnnnnnnnnnnnnnnnnnnnnnnnnnnnnnnnnnnnnnnnnnnnnnnnnnnnnnnnnnnnnnnnnnnnnnnnnnnnnnnnnnnnnnnnnnnnnnnnnnnnnnnntttgaaacgttaaacatcgtttttattcccagcacctaccattgtgccccccttataatagacagtaatggtatagtgaatgaatgaacaaatgaatgagttgagaaatccagaataatacatcacaagctacagcgaatttttcttgctagtgctcaggacaggtgaaatgaatcataacaggttggtgtctgtgaaaagctgacagagatgtgagaggtcccaccctgaggccaacaaagactctgcagctctggcagaaccactaagctctcagctcctagtcatcacatctttttcccttaaccctgccaagtcaaccagatgaggagtgtcttcagggtgggtctgttgcccctctttgcccatgccgtcatttgctgtaggggagtgagggcaagtcccttatggccttttaaggaaccgttt

SEQ ID NO: 452303 - DNA, 839 bp, Homo Sapiens
  misc_feature (167)..(175): n is a, c, g, or t
  misc_feature (194)..(194): n is a, c, g, or t
  misc_feature (201)..(201): n is a, c, g, or t
  misc_feature (292)..(292): n is a, c, g, or t
  misc_feature (295)..(316): n is a, c, g, or t
  misc_feature (319)..(331): n is a, c, g, or t
  misc_feature (333)..(334): n is a, c, g, or t
  misc_feature (336)..(336): n is a, c, g, or t
  misc_feature (339)..(344): n is a, c, g, or t
  misc_feature (346)..(349): n is a, c, g, or t
  misc_feature (351)..(353): n is a, c, g, or t
  misc_feature (355)..(365): n is a, c, g, or t
tgtggggtaggacgggacccgcgtgctttcttgtggtcccgcgccgggttttttcttctgggggacgacaccataggtaatgggcccactttttctcttctctggtgcggggcgggccggcgcgcgcccccacagaaagggggtgtgagaaaatatatttttgtgtnnnnnnnnncggcgccgccccaaaacanaccccanctctcccctcttttttctcccaaaaaaccaacgctccgctaccttaaagctctatccttctctccccccaccttctccttcttctttcccnctnnnnnnnnnnnnnnnnnnnnnnccnnnnnnnnnnnnncnntnacnnnnnnannnncnnncnnnnnnnnnnnttaacctcacacattaactttattcaaacaaacagcacttacaggaaatgttaagtagaaaaagatttctgcccactttacctacggagaccatgataaacacgctaaaaaaacctagaaattaagcaaaaaatagcacaataatttaactgaaagcaacaagggcaaaactgtctccttttgtagtttgtggtaccttatagtagtgctcattcagtttcgtttgcttgataaatctgaggactatgagatatcagagttactagtagggtaggagtgctgtaagggtactgggagaagtaggattagttaggggcagatcttgaattctggccaagaaactgatatttaacccataaagagatagtcactatatgttatcaaataggagaataacacaaatgagaaatgactgttaattcctgatgcatagtaacagttgtgagctttagtttaatgtaatatttgtaatcc

SEQ ID NO: 452304 - DNA, 1092 bp, Homo Sapiens
  misc_feature (103)..(103): n is a, c, g, or t
  misc_feature (911)..(921): n is a, c, g, or t
agtgttacggttaatggggagacatccgggctgcataagggaggagatggtaacagttgtttcatgacgatcagggtggtgttaccaggtggatgactgggtngctggaggaggatcaaaaagtgttcccaacacaccttgagaccaaatcagcaatctgtggttaatagttctttttcagaactttttgttaaatttctagaaacagaatctcatccatccattccaccaccaaagctttctgttcatgatatgaaacctctggattcaccaggaagaagaaaaagagatacaaatgcaccagaaagttttaaagatacagcagaatccaggtctggtagaagaacagatgtaaatccgtttttggctcctcgctcggcagctgtacctcttattaacccagctggacttggacctggttggcccgggcatcttcttctgaaacccatctcagatgttttgcccacatttacaccttttccagcgttacctgacaacagtgctggggttgtgctgaaagaccttttaaagcaatagatgattctcaagccagagacaatctagcactttaaagaaaccatgaacactatatgtatgtactttatcacaaagtggcctttggggagaaagtcatgtatttgttcgcaattatgctttctctgaatttaataaaaatattcctaatgcttttagaaactgcaggtgtcaggagcaagtgtttgctatataatctgctttattccttctgatttgacctaatttaagctaggaacatttaatttatcttttaccttaatttacaaaaatacagacagacaaaaatactagtagctatatggcagctttttatttccttttgtgatttccaagctcatttaagctagagattgtggtttatcaagagagtgtgnnnnnnnnnnnaaacgaagaataaaaaaatactagtagtggcttctctgcatagtgcagaaagttgatttgaagcatatattgatcatctttagaggactttgtggagacaggccaacaagattgttgctggaaggtcataggtttcctgaggtgaagtatgtatttggcactgtggaagta

SEQ ID NO: 452305 - DNA, 778 bp, Homo Sapiens
atagtgtgctttgattgtattttggctttgactctgccatttctgaaatgtgggggaggatggaggcagctgacctctccagttgctgtgttgtattcctacccaatttcctgggcagttgatgcatctctgggaaaaacaccagaaagcttgctgaaatggaaaacttggaagaattgttcatctcttaggcttccatttggatgggcctgccttaacattgtttgaaatgcagcgtgagtagctcttttgtttactgtttacaccccttattggcatgtcaactcctgtacttcccttactctgttgcctttcttgagatgcattgtcctgctaacccacaaacctgtttggaaataaacatggaagaatatctggcaggcttacttttagaagacgacaaatcggtaaggcttattcatggttcattgccaggagcagatatgcttttgagatcacttttatttttgaaatggcctttgttcattgtattgtgatccaataacactttgtattaaattgtttagcagccatttgtgttgtgaaggggtagaagatctctgaaacttgtcttgagattgaactcattccctgttccacaaacccatatgtatcctttcctctacctcctcctttcccaattaatttcaaccatagtacgatgtttggggttgtatattttgttaaaaagattaaagaatttatgagttggcttggacaagtttaactttatttttaatgtgttaattacttggaataaatgcattaatctcaaaaa

SEQ ID NO: 452306 - DNA, 378 bp, Homo Sapiens; identical to SEQ ID NO: 246290

SEQ ID NO: 452307 - DNA, 1032 bp, Homo Sapiens
  misc_feature (187)..(187): n is a, c, g, or t
gtgtactggcgcgtcacgagaggctgataccaagggggtcgattagagagagccgcggtcggcgccgaattttcaagggttttccaacccacatcacccctgtgtgggggaaagaagttggcacacatatcggggccagggagtcggctctcacatggaagctgtcccccgccgcgctacctgcgcnatgcaaattgtcccccgggcacaggagtaccggtgaattggaggaaaatccgcagggctgcggcgtatggaacctccctgggggggtggagaatccccgaggtaaaaggcgcctgcggggaacctcacaatcctggggggtttgtgtccagagacgggtgcgggttgcaccacaaggggcgcggtattttatatgggtggagaatgccaagcgccctagtcattgaaccagggggtttccttagggaaccaggctaggacccaggttcacgttaccttgcgggggccccgcacggccaaacgagatggtcctagaaaggcttctcggaggagccgagggcggccacacatgtttttatatttgggtcagagctccttttttggaagttttccaataatttaatcaatgcaaatatacacatatacacattctctacatcaatagtattcaacagtttttatcaaaaggagaaaattttgattttataaaggcagtggaaataaaaaacagtaattattaagttttgctcaaggaccatctagaaggaaaatttagtgacacatctgaaataagcaactgatggccagcctagccttattaagtaacacatattcaaattgtagatctccccctcctatcttccaccccatagctaagaaaggaaacccagggatagaactaattgaactctattagccaggggcaatcgaacccagtgccaatagagagatggactcccaattagtcttcaaatgggacaaagtcataacactggttttctttcgatgttggacgtatgggtgatacgtttctaaatttatagtttccaaattttctgtaatgag

SEQ ID NO: 452308 - DNA, 273 bp, Homo Sapiens
ttttcctggaagcaagtcttttttattgacggaataaacacaacattgatggtagtaggatagagttggtggcaatgtcctgtcactgcaattatgacattcaaatcagacctacataactgtggctgcttttgattctttcaactttgaattttgattatctgtacagaggggcttctaaatgaaaacgaattcacttgcaccacccctactcacctatttactgtttctggagaataacaaattttttaaaaggtggtaaggctaaaagac

SEQ ID NO: 452309 - DNA, 409 bp, Homo Sapiens
tgtagatgcccccaccccagcccatggagttgcttatggttaagcagcctgagccgtacagttgaaaaggggcggtggggcccatctccaaatacacagccagttcagccgtctgtcctcaacccaggagagctgggaaagccagtggactcctgcacctggttcttgtcacgtcctggcgtttgtgtacagatcaccacttctctttttggttcattgttgaggagtcgttttccggacggctccatcacagcattgagctatcaagctgctgttttccacagttggtggtcacagccagggaagttgctgtcttgatttgttacattgtcagtaatccccaaggaaccaatggatgtcagtaggagtttctgttaaatgtctccttgatggggactcagtactgtgt

SEQ ID NO: 452310 - DNA, 851 bp, Homo Sapiens
  misc_feature (55)..(55): n is a, c, g, or t
  misc_feature (57)..(57): n is a, c, g, or t
tttggagggccggagggggcccgcacattagagggcgtcgctgtgagggggccgngngaggcccccccgccccacttgggaattttaatctttcatttttccttcccataaatttagagtgaggggtgtgataccagccccagcccagtctccttggggtctgcatctttgcttcctggcagcctcttgagtggacttggggatttgacgtcagttgctcagctccattccttctttctggacttgggggaggtccggatatgtcggggagtgagtcagtgcaggggactgagggggtggttcccattctccctctagccccctcaaccaatgatccaagttcaaggagctcatctctgtttttcagaccatcgagctagtgccttgaagtctccggaacagcgcacccaggaaggggatgttgcagacattgcccaggaagccgaaggcgacagggaaaaagcccttaaagaggctgaagaatccgtaggtttccaggaacatgccgaggaggggccagcgtaggagcacgataaccacaccccccaggaggaagctggttcccttgagtttgtgccgttggaagaagaaccaaaaggtcttcctcaggccaatgatgagggacaggcccgtcaggaacagcaggtttccaaaggccaggagcacggaatcaaagtacaggagtgttccaaagaggatgaagaagatgccgaaaccggtgatccccacaccaatcttctgccattcggtgatggagatcatgccgcactcagcctggggggctttccgggtggaagcgggcaagtggagcgtggcccagaggacgcagctggtacatggtcacgggaccc

SEQ ID NO: 452311 - DNA, 336 bp, Homo Sapiens
aagactgatcaaggctctgggattctgccacactgctggatggccctcgatcagatggtcttgaacagttagcacatcctggtcccagcccagccgcctggctccaggccttaagtcccccactcctcagggggctggtgggtttgcttcatgctcccctccctcccctacagctgctgttcctgacgggcctgtccctcatcattggcctgaggaagaccttttggttcttcttccaacggcacaaactccagggaaccagcttcctcctggtgggtgtgttatcgtaatcctacgctgcccctacccggactcgcataaccggatgttagatca

SEQ ID NO: 452312 - DNA, 254 bp, Homo Sapiens
atatacaaaagcactgtactttatttaactccatacaaaatgtgattaaaaacattaaataggtgatgttttattttgaagagcattaagtcagtttttaaaatgtagttgttttaccttggtcacctcagccattttttattctcctctgttacaagcatgtgctatacacagcaactttctggcttatatcctttaggagtgaacggacttctccttccagtcttgctaattcttgagctttatcttctacc

SEQ ID NO: 452313 - DNA, 1280 bp, Homo Sapiens; identical to SEQ ID NO: 322702
  misc_feature (29)..(29): n is a, c, g, or t
  misc_feature (123)..(123): n is a, c, g, or t
  misc_feature (258)..(258): n is a, c, g, or t
  misc_feature (261)..(261): n is a, c, g, or t
  misc_feature (310)..(310): n is a, c, g, or t
  misc_feature (459)..(459): n is a, c, g, or t
  misc_feature (552)..(560): n is a, c, g, or t
  misc_feature (563)..(572): n is a, c, g, or t
  misc_feature (611)..(625): n is a, c, g, or t
  misc_feature (640)..(642): n is a, c, g, or t
  misc_feature (689)..(689): n is a, c, g, or t
  misc_feature (705)..(705): n is a, c, g, or t
  misc_feature (707)..(814): n is a, c, g, or t
  misc_feature (821)..(821): n is a, c, g, or t
  misc_feature (823)..(824): n is a, c, g, or t
  misc_feature (827)..(829): n is a, c, g, or t

SEQ ID NO: 452314 - DNA, 221 bp, Homo Sapiens; identical to SEQ ID NO: 97895

SEQ ID NO: 452315 - DNA, 1349 bp, Homo Sapiens
  misc_feature (112)..(138): n is a, c, g, or t
  misc_feature (1152)..(1167): n is a, c, g, or t
  misc_feature (1169)..(1215): n is a, c, g, or t
ggtgctcttgttgggggaagtgagctccaagagtagctttttttcatctcttagtgatcttctgtttatcggttgaatgccacagattcccttttaaacttattttgctttnnnnnnnnnnnnnnnnnnnnnnnnnnntttaacttaaaatattttagcattagttgcacaaaatgtttggataaaattctagtttttataagtctttttatatatttagcctgtcacaacagtgctcaagattgtattgaagtttttctgcattatacaaccctaaaacacagagatctcactgacccgttgccctgtaaccactttctttccttcttttgcctaatacagctcagctaagtccttccataaagatgctaaataactttcatcatcacataaatgtcttcataaaccaaggactattaagtgtattaaaatgaaacagtggggtttagtactccaaatgaactcttaaagaaaaaaactaatcttggcatcctatcactatgtgatattttgtacatcttactgtatttacaagtttatttatcaaggattatccatcttgctaatggcctattatttatttcactttttgttggtctttatatccttttattaatgtgctaaagggaacctgtatatctattttggaaactcctttgaatagtctaaaatagactaaaaatggagtattttatagtttaaattacaaaccaaggtggttccccctaagatatatatcttggtttaccatgattccaaacaaaactaacttgtttaaaaatatttggagtaaagttttatttgcattacaaataggatacaaaaatagttgaatcaggatacagaaatctgctgtgttttgactagttatccctgttttatttttttagatgtgcttaattttatggtgtaactaaagattttgtttgtgtaatgccatggattaagacaataaagtattttttcctagtccttcccgagaaacttttcctgatcagtttgccgagttttgatgagttttgtaaggtttttgttttacaaactatgaatcagcaaatttttaagattgtaccacatagcaaacatacagctgttgaaaaataatgtatataaaatgcatataataaatattaaattgtgtacctgtaaaannnnnnnnnnnnnnnncnnnnnnnnnnnnnnnnnnnnnnnnnnnnnnnnnnnnnnnnnnnnnnncttgtcgggccgcctcgggcccttggaaaaatttttctaaaaccatttcctttttggccgccgcggcccccccaaagggtaaaagggaaacagtgggcccataaccctggttttccctaagagaaaattcccgg

SEQ ID NO: 452316 - DNA, 812 bp, Homo Sapiens; identical to SEQ ID NO: 150871
  misc_feature (158)..(158): n is a, c, g, or t
  misc_feature (689)..(722): n is a, c, g, or t

SEQ ID NO: 452317 - DNA, 349 bp, Homo Sapiens
gagtgtgccaatttctaaaaaggctgttgaagtgttttcttgatctaaaagtgtctgtttcattaactcaatgcaatttccattttattcacatcacttgtatcctctactctcagcttgtcaacccaggatggcaatgacaccaggaaggtaactgtcccaagggagcaagctttcttattatgagtcatttcattcacttttctcccctggaatatactcaactctaagtgtttaacttaataacattcaaatattaccaaaatgtccagtaattaaataaaattcatcgagaacattgttcaatgcttcaaagtcttgaacaacatacttacattaatttgaatcc

SEQ ID NO: 452318 - DNA, 997 bp, Homo Sapiens
  misc_feature (96)..(112): n is a, c, g, or t
  misc_feature (266)..(291): n is a, c, g, or t
cgggattcggttgaacctgggggccggaaggtgcacgacctgaagattgccccatggcacttcaaccctggcaacagagcgagacttccaatctcnnnnnnnnnnnnnnnnngttaaagtaagacccaacccgagttccgatgtccctgcgcctaatcttaagccatggggatgcttatacttgccctaagttcattaatttccccaaggaaatagcacttataacccactcctctgagttttaccgacacatccaagaattagtnnnnnnnnnnnnnnnnnnnnnnnnnngtcatgtacatttacatttaaaacattttatgaggggataaaatatagtcttttttctatcaggtatgttcacacttcctggcctctcattgggaagctgtaagatgtccttcaataagatcctgaacacgcgacagaataatctcattagagctgctgcaattttctggaccatatggtgggtctatagtcaggaccccagccacacagagagtccttggagcgtctccctgttcagtgatggggatgtggttcttctcaagccatttctttaggctgttctttctctcttccagatcctctgggctgtatgctttgcagtctccagacgtgaacaaatgcatcagcttctccctcactctatggtccccttcattcatagtttcaacagtctgcacagcatgtcccataattccggtcacagacatgctgccatcttcaaggaagttcacaaggacaatattggcagagactgggtctgtagttaaaacccatcctttatactcattcttctcactggctgtcactcggacctctttgtaaatgtaatcttgccattctaaggggcctttcttcatccattcactcatgattgccacctggctaaatcagttaaaaaactcctcgcaactctgggtactcagcaaccatgctttgaggaaggatcgttgagcggagaccgcctgagaccagcatgctttgcccc

SEQ ID NO: 452319 - DNA, 323 bp, Homo Sapiens; identical to SEQ ID NO: 150636

SEQ ID NO: 452320 - DNA, 654 bp, Homo Sapiens
  misc_feature (425)..(425): n is a, c, g, or t
  misc_feature (533)..(533): n is a, c, g, or t
  misc_feature (541)..(541): n is a, c, g, or t
  misc_feature (602)..(602): n is a, c, g, or t
  misc_feature (614)..(614): n is a, c, g, or t
  misc_feature (619)..(619): n is a, c, g, or t
  misc_feature (641)..(641): n is a, c, g, or t
gttggtttggtttttgcattcatgcagtctttattaatctgacaaatacagaaaatctgcaatcagctatcaaaattatatcttaccaagaatttgaaaggtatttataaaaaaggtgtattcacagtctgtctgaattaagtacaaagcagtgtccacagaagcagaaggcagacaacatgtgagagtaaatgatcccactgaaaccctcaccccagcacctccaaggacaccaaaaacaagacagtcctgtacttgctactatatgcagctgactttgaaactgcctagtctcaacaattacgtatttcaaaaggaaaattgctttctgggaaatcgtccctgctacacagacacacagaccaactggcaatgctgccaccacatgtcagggctcagggtggacccagcacatccactaaganggcaccctggctgcccaaggctgtggggagacagctttgatgttcaagaaaggggttcattttcagcaccagggtgctttttttatatggcaaatctggaggtgtttncccgttangaggagaggactatgcagatggtcccatgcagatggtccctgaagctgttgagcccgatgncaggctttgttnggtanactctggccagcctttcacaangcctatgaagagg

SEQ ID NO: 452321 - DNA, 720 bp, Homo Sapiens
  misc_feature (149)..(149): n is a, c, g, or t
ttatcaggaagacttcctaatacttggaagtctccagtggcataaaaatcagagtcacactaaaaagggttattagaaagagtcacataaatatttccgttgtctactgtcactgtgtgaatccttgcttatttccctttggagcaccnacttgggttttgctgatggatctttagggtttaatagactggtacagaccttctcctgttgcccaaagtaattttgtatttaatgccaggggcaaactatacacggtcgtccatcaaaatcctctatatctcccaaatgtaaaggtcctcctgagtggtaacagcgaatatccatagcatgatattctcccttgtggtagaaaatgaccacttctctatcatggacaacagctgtcattctttcagattttttaatgtcatcttctctgcccacacacacagaagaatattccctcttttcaggatcttgtgcagagccatcaagattcatgttggagaggaagtgtagataaggaagaaggtctaagacaattcctgaaacacttcaacatttagaggtcaggtggaagagaggttgtagagaggcaagatcagtagagtgtccaatctattgctaatcaaatgaaattcattcacagctttcttctctgtcttatattctccttgaattgcaaataggtggtaactgtccccgagtcctcgctccgcctccgcgtgacgctactgcccc

SEQ ID NO: 452322 - DNA, 886 bp, Homo Sapiens
tgttttcaagcatacacaccagttccatttcaaaaatttttaccaggaagaacttttaattactgtgaagtctccagtggcataaaattcaggagtcacacttaaaaggttcattagaaagagtcacataaaatatttccgttgtctactgtcactgtgtgaatccttttgctttagttcctttggagcaccaacttgggtttttctgatggatctttagggtttatagactggtacagaccttctcctgttgccaaagtaattttgttatttatgcacagggggcagactatactacggtcgtccatcgaaatcctctagtatctcccaaatgtaaaggtcctcctgagtggtaacagcgaatatccatagcatgatattgcgtcccttgtggtagaaaatgaccacttctctatcatggacaacagctagtacattcgtttcagattttttaatgtcatcttctctgcccacacacacagaagaatattccctctttttcaggatcttgtgcagagccactcaagacttcatgctcagataaaaactggtcactgagatgacagctgagcctgaaatgcccagacaatgcaaatgaatctagacatcgccaacagcttggggaagagaattccatattggagaggaagtgtagataaggaagaaggtctaatgacaattcctgacacacttcaacatttagaggtcaggtggaagagaggttgtagagaggcaagatcagtagagtgtccaatctattgctgagatcaaagtgaaattcattcacagctttgcttctcgtgtcttatattctcctgtgaattcgcaaataggtggtgactgtcccacgagtcctcgctccgcctccgcgtgacgctactccgct

SEQ ID NO: 452323 - DNA, 369 bp, Homo Sapiens; identical to SEQ ID NO: 320077

SEQ ID NO: 452324 - DNA, 1338 bp, Homo Sapiens
ttttttgaaaaataaatgaaaaaaattttattgagtattactttatacatgcaaattgaaagtgaatctatattaagttgactattccacaataaaaacctatgaaatgggaatgatcaaagctgtctaacacaatactaatgtgttcaataaattatccagatgtttttccacaaatatttggattacctgaattagctgattcttcagcaaaagttaaattttagctttaatatggtagcagcaggatgctacttaaatttagaagaaaaacataagaataaaaaccctgaatagcatagccaaatcttccaagaaataagttcaccaaaaaagtagcatacacctatttggtatccagaggaggaaacaaaacacaggcacttaatcaacatccaccaagtgatcatcactaacattctattattaccagagtaactgtcgatatgtgaactgtagattagaacagacttacatatctaaaaacaaaccagtaatcaataatatatacagaaatactaacttgaagtcacatttaaataccatcaacagtttggtgtatctgatataactgaattcatttcatcactgctataaattccttaaaagtgttcttttcctaattaacattatctttaaaaaatggtagatatttcccagtatgcatcagttttttcactccaccattcagtaaatgttgtagcaaattaaatagaacctattaactagatctaaaaacagtggctgaatacttaacacaaagaagtacttttgagtaaactattcagattagacaggctaatgctaagactgcattttgtgctactgacatgcactatatagatcgtacactactagatggaaagttggtccatgtccatttatttaaagattctgtaacacctgtaatagtatttaatacagctcccacatactatattcctctcacatagacatagttatttttagtggggataaggatatgactttagcatgctatgagattctagctaagtaaaataaaaacaatatggactcagattttcttaggagatattagttcaagtttttaaactgggaaacaatcaacttccatatatccaggagaaacttagcatggggggaggtgccttagttgatgtgcctgataagcaaactgttagttgtctattagtattatgttttcggcttaatgtaacaacaaaagaaagttgtcacactacctctcagataatatcaattacaatcttagagactgtaattgggaatacaatcctataacaagttattaacaatatcatgaatagttattaagtaagtgccagcactacatgcacc

SEQ ID NO: 452325 - DNA, 1414 bp, Homo Sapiens
  misc_feature (751)..(773): n is a, c, g, or t
  misc_feature (1148)..(1280): n is a, c, g, or t
  misc_feature (1291)..(1305): n is a, c, g, or t
agtgtgggagtagctcacatagataattgtgtgggcttaaaatgtggtaagcccttcccacactttttccggccacgttgtagacttattgccttgtggtcttaccacaggcgatatttgctaatggtacgtgctagttcctaatcaccatgtttccccctttctttacctcttatgtgtttgggggctacaaggccttgtggtgtcaccatataggaacttaagatacgagcatcaaaacggtaactgtccaagggactttgtctgccactggcgattatgcaaatcgatggcccctcacggttgttctttctcgtccctctgacagttctgtgacacaaggaccaaggtgttgcgtctgacttctgtctcctcccatgtctcaagtagcctatagactggttgagacaaagtcgaactctctatcgagagacttggcctaacaatgggtaagacctatggggctctcagaattcatggaaaaatcttgtatcttgggatcaaactggaagaatcagcatccatagtatactacgcccgtggatcaggcctgtggctcacgtccatagaagtagacggtcagtatagttgggacattggaggcaacttgttggcagtccatgactgtacggccccttgtgcaagctcattccttcagtggatctctcagtggagtggtgaacacgtgccacgctggtcagctctgccacatcacttccattcctacgataagcctaagagtgcgtatgcnnnnnnnnnnnnnnnnnnnnnnnacgtgaggcagaagaatatgacacgatgtcagcttctacctgtgtcagatgatatgtcctagaagctggcaggggattcccagtccagggaatatccctacatgatttgttgtcattcatgggtcctccctgggcctgacaacgggaggtggtgggtggcgtgagaacaggttctgagagggggcttctaggaaggccccagccgtagtcctacggcgacttgaataaagtgggaggtcataacatgggccttcggcattgggtttctagggaatatggctcagtagggcctgccccttcaagggcagcaagaacgaagcaggatgttgtcactcccgtctgaataaagctccatgagctgggttggaaagctgnnnnnnnnnnnnnnnnnnnnnnnnnnnnnnnnnnnnnnnnnnnnnnnnnnnnnnnnnnnnnnnnnnnnnnnnnnnnnnnnnnnnnnnnnnnnnnnnnnnnnnnnnnnnnnnnnnnnnnnnnnnnnnnnnnnnnccttggctggnnnnnnnnnnnnnnnaaaaaatttttcaaaacctttttttggggcgcgggccccaaagggaagggaaacggggccaaactgtttcccaagaaaacccggccaaggaaaagggttggaatccccc

SEQ ID NO: 452326 - DNA, 856 bp, Homo Sapiens
aactttaaaatggtaacttcaactttaggttatccataaaataaaggccccttttactccccttttcccttggccttttcttgaatatttttaggccaattccctagaaaaactaagaagccctagctggatagggcttcattccatatgaggagaaaatatgcttcgcctttcatgctaatgaatttttttacaaaactgctcttaaatcatgaatatttcaatgagcacacaaaacaacaggtctcagtgtattgtaaacaccatcaaaacctccacaccattaggcttataatctcacaagcattctgcctcttgtcagacacttcacagggtgcaactgggttacttttgcaggcaaagcggagattttgatttctgttgtaaaaagcccaacagagagaaatcggaggctttctcatctctgacccatcagtccaattcttttgtcgtcctttatggaagtcttttctctgttgcagccactttcagtcattgcaaaaggaaagaaaaagtgtctcccacaatccttctctgggagttcatgtttttttgctacttgtcttctgtttctgtttgcgaaggtgagcctctatctcgtgcctgaacaccagcatgcccagctggccgtgggatgcctcgttcatggccttggactgcatgcacatcttgtactgctcgggggtcagctcgtccatgcagcgcttctcatgccagaggtggaagagtcctcgcacaggcgtccgtaccactatgaggttgctgtggagatacttgcgataaaggtgcacatcctctccgccccagcctttgatgtccagatcaaacccacctatattgatgaagtctgaccgcc

SEQ ID NO: 452327 - DNA, 1056 bp, Homo Sapiens
  misc_feature (152)..(169): n is a, c, g, or t
  misc_feature (198)..(198): n is a, c, g, or t
  misc_feature (205)..(249): n is a, c, g, or t
  misc_feature (326)..(389): n is a, c, g, or t
  misc_feature (406)..(414): n is a, c, g, or t
  misc_feature (422)..(473): n is a, c, g, or t
  misc_feature (497)..(508): n is a, c, g, or t
  misc_feature (514)..(516): n is a, c, g, or t
  misc_feature (529)..(532): n is a, c, g, or t
  misc_feature (539)..(573): n is a, c, g, or t
  misc_feature (637)..(638): n is a, c, g, or t
  misc_feature (641)..(641): n is a, c, g, or t
  misc_feature (649)..(657): n is a, c, g, or t
  misc_feature (664)..(664): n is a, c, g, or t
  misc_feature (668)..(668): n is a, c, g, or t
  misc_feature (701)..(701): n is a, c, g, or t
  misc_feature (708)..(708): n is a, c, g, or t
  misc_feature (747)..(747): n is a, c, g, or t
  misc_feature (791)..(791): n is a, c, g, or t
  misc_feature (877)..(877): n is a, c, g, or t
  misc_feature (967)..(967): n is a, c, g, or t
  misc_feature (1037)..(1037): n is a, c, g, or t
aacagtgcactaatattagtgtttacctccaaggctagggagccaaggggaggaggagaattggaggaaggggagataatgggaagaggatggcgccttcctgagttggctagagggccaaccatttgataacagtttgacgaaatcaatcnnnnnnnnnnnnnnnnnngagacagagtctcactctgtcacgccagngcatggnnnnnnnnnnnnnnnnnnnnnnnnnnnnnnnnnnnnnnnnnnnnncaggttcatggcattctcctggccccagcctctcttgagtagctggaactaaaaggggccccgccacccacggccannnnnnnnnnnnnnnnnnnnnnnnnnnnnnnnnnnnnnnnnnnnnnnnnnnnnnnnnnnnnnnntgcgagatttcttaatnnnnnnnnnggggggtnnnnnnnnnnnnnnnnnnnnnnnnnnnnnnnnnnnnnnnnnnnnnnnnnnnnttctgcctcctttttccccccctnnnnnnnnnnnnccagcnnncctacgaacgggnnnncgcgcannnnnnnnnnnnnnnnnnnnnnnnnnnnnnnnnnnttttaccaccggggggcggggaggtagtttaaacaacggccagcggggcggcgcccggcgcccnnccntcataggnnnnnnnnnggagaanaccncgccggaggcgcgtttttctgtgttttggatcnctgtgcnacgaggccaagggaagagatagtttatttttattattancctcccccacacccaccgcgtgcgggtggagagggggagaatgngcgtggctggcctccggctgctgggaaaaacagagaaaaacacgctcggtcgctgccgttcgtgcccgcgccaccccctgtctgtngtgggtttagggagaaggagagggaccgcttcccacccttatgtgtcctcgccctcaagaggagaaagggacataagcatcactgcctcncgcgccccccccactcgaccgaacacgccgcgcggccgacggacgccggcgcgcgggcagggcacgagcnaagacgagggcaaatctca

SEQ ID NO: 452328 - DNA, 712 bp, Homo Sapiens
  misc_feature (157)..(157): n is a, c, g, or t
cactaaaagatcataaaacaaaacagaaaaattcacactgcagtatgtacagtttcatgacatcacatgaagaaattaaatttctaataaaaatggcaaattatattactgagcagatcgcatcaaatttggttgtgtaaacaccagaattcttacntatgaaatggtaatgtgcctatattccagtattgctaatactgggatactcttgggaataatgtttgcaatgggattaaaaaattcatgaaagtagttgtgtgaattctttatgtttaaaagtggttgacgattaaaaaaaattctttaagacccttcgaatcaaagcacattctttcacaaagcttaaaccacagacgtcatgtccagaaatggaatactgtcatgttaggatgaacatctgatctgatttgttaagacattttgccaaatgcacagatgcacagggtcccccatgcacttttcatgcagcaggtaatcacaacttaaataaaaggtttattctatacatttgtccagacttgcaactgtatacatacatgcacaacttttaaacctgtctgattatatttacacttatacatggaatatacaggaaccaaagagattaaaaggcttttctgttgcattagaacaatacaaaatatgtatttttcattaaggaaatcactatttacatcacctttaaaaaccgattttaacatcttcatggtaa

SEQ ID NO: 452329 - DNA, 1402 bp, Homo Sapiens
  misc_feature (186)..(211): n is a, c, g, or t
  misc_feature (257)..(317): n is a, c, g, or t
aaattccccaaaagccccccttaggttcccagggggcccccggggttttctcccctagggggaaacccagattttttggaccccagggttccccctttaccctttctgggggccccgcggccgcccaaaaggaatgggttctaggaaagctttttcgaggggcccgagggcgggccgccatgtttnnnnnnnnnnnnnnnnnnnnnnnnnntcggcttttttccaattccacttcagtgcctgcatgtttcttatgnnnnnnnnnnnnnnnnnnnnnnnnnnnnnnnnnnnnnnnnnnnnnnnnnnnnnnnnnnnnnctgtcctgactttctgctgagctggcactgctactgtggcttcgggtctggcttccagaaggactgtggcttctgctggggctgacgctggggctgctgtggctctgattcctgcttatgcccacctggacaactgctgctgtgtccaggctctctttcgctttctccactattttatctttcaggtccttagaaatgtttcctgaagattcctcttcttttacagaaacattactttcactgtcactttcattatagtctggttcaaaagcagcttcatcagtttctctagttaagtcagaggaaagtctagaggaatgacttaactggggtttaggcttgacagtactcttgtcaatttgcccagtaatttgctcttttttaacctgtgtctctggtgggttaagtatataaagtagtttattgccacttgactctttattgttccttgcttctaatacatgcttctcacgatccttacaaggatttttatctacagattttgtctcttcatttggccgtttagtatcataagtggctttgtgatcatgaggttttctgtctcttgagggactagaattactttttttggaatctcctgttccttttttaggcaaatctctctcttcccttggtttatttttctgtccagatgcagaatctttattccgagaaggagagtcttttcgtcttgttaattcattcttttcatctctacgtttggaacttgaatactctctggtgtcatagtccagtttttttgtctctattgggagtgaagtctttatttgaggaagcacgagtggaatcatgtttatctgacgttctagcctctttggaagattgagacagacttttaaaatttccttgttcattcagacggtccaaattactctctttctctggctgagtgctgttcttcctcttttcagggttctccttttccaacactgaataatctcgatctttggttttccctttttcactagatgcagagttttttgaacttttaacctcatgttgtatgatttcatggctcacgtccttggtgaatttctgaattttctcggatggctcactttctt

SEQ ID NO: 452330 - DNA, 1286 bp, Homo Sapiens
  misc_feature (1067)..(1083): n is a, c, g, or t
cagtcacagaatgttttattttaaacttactgtaaaactttcaaatacaacacatgtggcaaagaaacaacagttcacacacaacatctgccacaattctctttgaactgccatttctatattatgtgatattttacaatttctttcaatttcttacattcatggtattcttaaaggcagcaatgtcaatttttctgctttgaaaatagttcagttaatgttctgaaattgcttaacatgacattttccttttagtattctactgctgcccacactgacataattcaacatattatttataaactgttgagaggtatactgtacttaaataaatccaactcccaacttctaagttaacctcaatctaaaaacaagcattttcttaaaccagtatactcagctacttttctcaaaaatatttccattctgaaataagattttttgtgagatacaatagtttcatcttttattcctaacagaactcatgccgtactttttttctcaaaatatatttgatatattctgtgcaaaatgttaagttctgtataggcatgtaccttatattgaaaaagtttataaaacataattcctaaaaacaacctcaacattagacaatagaggaaggaaaaacatcagacaaagcctaagttttcacatgagaaactaagtatgttcttaaagctccagtattacattccttgaaaaaactcagaatgcactttggtcattattaaacatatttgaacataggcaaataaaatgaaatgctttctgttgtttttcatagaaagaaaaaacatactacacaatgaggctgaattgaggctgatcaaaaggaatggtaagagcaaagtgatatgacatggctctgttctccacacattcctgattttaagattatgatttagggattagaactgcaccaatcaaataaattatttacaattaatcgtcttaaagttcttaaaatatggtaaaaatatgaggatattccacatgatacactttgcaccaagaaaattctagattgtttcaaataaatttttagaaaccagatgcccagtttnnnnnnnnnnnnnnnnnctgtttcatgtttcatgtaatttctaaaatactcgattgtacaaatataacaacttaaaatcaaggcccaatgtaagacactatcatatttgcccgatttacctaacacaccaacatgataagttctcattggacacttggcaaattatttgttggggaggttaaaagcatctaaaatagcccttatataatgggggtgggcc

SEQ ID NO: 452331 - DNA, 581 bp, Homo Sapiens
gggggatacgatggccaatattatggatatctttggagtgaagtattttccatggatatgttttacagctgttttaaaaaagaagggataatgaatccggaggttggaatgaaatacagaaacctaatcctgaaacctgggggatctctggacggcatggacatgctccacaatttcttgaaacgtgagccaaaccaaaaagcgttcctaatgagtagaggcctgcatgctccgtgaactggggatctttggtagccgtccatgtctggaggacaagtcgacatcaccatgtgttactggcctggaaactgaagggagttttgcaagtgaaaatttagatttctattgacatccttttgttttctaattttaaaaattataaagatgtaaatggaattataaatactgtgacctaagaaaagacccactaggaaagtaattgtactataaaatttcataaaactgggatttgatttctttttatggaaagtttcatatggaatgtaacttggattttttactatttattatcctagggtaatatggatataggggggggctaaggattttttaaattggat

SEQ ID NO: 452332 - DNA, 528 bp, Homo Sapiens
  misc_feature (16)..(16): n is a, c, g, or t
ggcatggacatgctcncaatttcttgaaacgtgagccaaaccaaaaagcgttcctaatgagtagaggcctgcatgctccgtgaactggggatctttggtagccgtccatgtctggaggacaagtcgacatcaccatgtgttactggcctggaaactgaagggagttttgcaagtgaaaatttagatttctattgacatccttttgttttctaattttaaaaattataaagatgtaaatggaattataaatactgtgacctaagaaaagacccactagaaagtaattgtactataaaatttcataaaactggatttgatttctttttatgaaagtttcatatgaatgtaacttgattttttactattataatctagataatatgatataagagggctaagaatttttaaattgaatcatatatatgatataatttgatccttcttgtatcttgaagttttgtacttgggatttctggactgataaatgaatcatcacattcttctggtaaatattttcttggagctctg

SEQ ID NO: 452333 - DNA, 470 bp, Homo Sapiens
  misc_feature (434)..(434): n is a, c, g, or t
  misc_feature (443)..(443): n is a, c, g, or t
ttttttttggaggaactgatgaattcattttaatcacagaaatttgcctgggcttgagcaaactgtggggactcaatagatttggaggcctcctctcccttctgagaggcctgcctgcttcctgccctgatgaatccctaatttcagtacaaactgaggaacttgaaaaacatctgtgcactgggaccgcccctcacaggagggctgaaagcaggcacagctgagttcagcggcacattcagcaggcgttcagtggggaagcaggagacagaggcgggcgctcacagggacccgctccagggcttttcacagccacacatcacagcactttgggttttgccacaacagagcagctctgagctcaatccttgcaccttcaggagtggcattttatggatttaaaattcattgtttcgacattgaaggccctgttnatggatgtngcagttttaaaaaggaggaaacggggt

SEQ ID NO: 452334 - DNA, 664 bp, Homo Sapiens
  misc_feature (65)..(77): n is a, c, g, or t
  misc_feature (586)..(622): n is a, c, g, or t
tagcattgacatttgtattttaataaaggataataaaagccaaattacagccaactgttaaagcnnnnnnnnnnnnnaaattctatggtaacaaaatcagttcaggggctttttttctgaacaaatgatcatgatccctcagtctttcccgtggcatgctcctaaaacaaccctctatgtctaatcagtcacctaagatattgagtggcaagtctttcacagttgctgcttataattcctaaatggtccatattgagtattttcatttctgggtaagggaaaaagcattttggtccattaattcacccactcgctcctggaggacattaaccaattctgctattacaaagacgtgagtgtcatcaatgtcttgaatgatgaacttcttccccagggcattggactcatccaagtacagcagaaactgcttcatggcaggatcacattctataagcactcctttcaagacgttgaccatgttttctcagaaggttcagatgacctgaagaatgctcggcccacagatgcagaagcgcctcggcgttccgctctcgacgaattcgagctcggccgatttggcctgatnnnnnnnnnnnnnnnnnnnnnnnnnnnnnnnnnnnnncgccgccccgcgaggagctccattcccctatagtgagtctaa

SEQ ID NO: 452335 - DNA, 1135 bp, Homo Sapiens
  misc_feature (129)..(142): n is a, c, g, or t
  misc_feature (551)..(622): n is a, c, g, or t
  misc_feature (778)..(802): n is a, c, g, or t
  misc_feature (926)..(938): n is a, c, g, or t
caagcaacatttgtatggatttaagagtattttaagaagacatactgcttgatcttaatacattgatcaggccatccaggacaccacgattctcccaaagtaccttgaactcttagtgattgagactcnnnnnnnnnnnnnngacttgagacaatgttttcttcaacatgctccaaatataagacatttgtttgctgtacagaaagtatcacaaatggaatatatcagtacctctcaagctagtgtttctagctaaataaatgggtgtatataattttatggtggaaaagaactgtactgtctgttatgatttccttcaatgtgcataatgataaaataaataattttaatattcttttgtttccatggttgcctgacctaaattagataaattgtagggctttagctttcttatttttgtcaaaagttggtgttgacatacattccctctaatttgaactggtattgtttacgtttgatacaacattaaggaatttgatgattttcatttcatgaaaatgacattaaatgcaataattttacttatcctnnnnnnnnnnnnnnnnnnnnnnnnnnnnnnnnnnnnnnnnnnnnnnnnnnnnnnnnnnnnnnnnnnnnnnnntaaacacaaaaatttgtcggcccgccttcggcccccaaaaaattttccaaaacatttcgtttgggcgggccgggccacataaggcaaaggtgcccctgggcccttaccgcgttcccaaggaaaaccctgggaattgtgacaaggggctttgaattnnnnnnnnnnnnnnnnnnnnnnnnngcgggccaaacccgaagggcctgtgaaacaaaacccaaattgggagtctcttaaggcccctttccttggatccttttcaccccgggaattccaaaaagcgaggctccctatccccaaattatannnnnnnnnnnnnttggaccacttttttccaagagaacgtggtttgatattctccttttagcgtctcctccccccgaaactgtggtaaaccccctccccaccaacagggtacatggacgcaaaccctgaaaattcgcccaagcggacttttcacacacccctttggctcaccccctgtccggcattaaaataactccggccgccgttggg

SEQ ID NO: 452336 - DNA, 907 bp, Homo Sapiens
  misc_feature (112)..(184): n is a, c, g, or t
  misc_feature (231)..(269): n is a, c, g, or t
  misc_feature (278)..(296): n is a, c, g, or t
gcaagccaccaggatttttcgcagaaaaaaaaggttttcaaggaagattctttgggatccccaaaaaaaagcccgcctcattagggcgggtaaaattccccgggtactgcannnnnnnnnnnnnnnnnnnnnnnnnnnnnnnnnnnnnnnnnnnnnnnnnnnnnnnnnnnnnnnnnnnnnnnnnaccactttgtacaagaaaggtgggtcaggaaacagctatgaccatgnnnnnnnnnnnnnnnnnnnnnnnnnnnnnnnnnnnnnnngcctcgagnnnnnnnnnnnnnnnnnnntcttttcagataatttatttgactatttcttttttttacttgctggactgtccaaaacttcaatcttgccttttccaccttcagaattgggaagcttaatgttatctatggtgacttcagatgggatgctgtcatcttcgtcttctgattctgaactgttctctgaactgtcttgtgaactctcttctgaactgtccacttcttttgaatccgactgattcatctcaaacaaagccacatccatttgtataactttactatgaggcccatcaatgttttcaatattgaaacgaccaggtggtgcagctgccatttcttttcttagcttttcatttgcccgtgccatctgtgggagaaatgtctgtacctggtccaataagggactcctctctatccgaactgtttgaagagtggaggtctttctggacttaggttgggagttgatgagcaacctgtcccatatacctccgcggccgtcgcttcccgccgtcagcagctccttggacactgggactcctgaggaatcccgggtgggcgacgaacaactcgggctagccttgggcttgccatggacctccatgcttccctcgtgccgaattcgccacccaggc

SEQ ID NO: 452337 - DNA, 240 bp, Homo Sapiens; identical to SEQ ID NO: 152198

SEQ ID NO: 452338 - DNA, 1005 bp, Homo Sapiens
aaatcattcagtttaaggtcactagactttagatgagtgaccctgcaggtttataaggcattctgctcagcagtcttgtaaatagtcctatatgaaagagccatgctactgttggacttggtcccactctggtcaaccttgctaacgtcatacgtggcttatggactggatagcactggattccgccgcagccctggccatactgtgccacacgttggaagaactgtgggatgtagaatggagggactccttgtcagacagtgacagcatcatagcatatgcctgcgatttggactttctgtgtaacggctgcttaagttcctctggcacatgggaagtactaaaagaagccagctcagcttcagaatattgattatcttcccattttcctcattttgaggctatctgtgaagtgccttatatgatctagagcagaaagtccacttttatattcttcctctttatacctcactggggatgtcttgcaactcatctccagggcactggtttcttcatagtcatcctcagggtttccttcatgtaaattacttgtcactggttcctttcctgtttttcccagtaatatcattgtcttcatcctcctcatctaacaacacctcatcttcaacttcttcatcatccagcaagtctgaattttgactggtcaccaaagccttttcatctttaaaatgactgccattcattctctcctccacattcctgggagattggctgccatggttgctgttcccaatgaaatttcgaatttctgtgaagtaagcgtcttctttgtcatccagaatcgcacctgtactttccagttcagaatgaggcgacgatgttgctgtaccggacatgttcccattctcatgtttctttaggtgtctgtctaaattggtttgttgaccaaaacacctatcacataagtgacacttaaatggcttctctttattgtggatgttgcgaacgtgcctttgcaagttagaagatatgctaaatgatccc

SEQ ID NO: 452339 - DNA, 1137 bp, Homo Sapiens
  misc_feature (847)..(847): n is a, c, g, or t
tgtttcaaatggtgggacttacaagcacttctcacatgagaaattaggggcgggtgggaagggatgggacacagcttctggcaccatggatttaagaccatgttggatccaaaagttggcctgaaaccctgaagcttatgcttcacagctgggctgtaagtcagacttgaacccagctgatatgcaaggtcatggcgtgcccagggtggtgacagttgaacaaagtgtatagtacgtgcccagtggtagcgatggaaaaaagtataccaaatggactttgaaggaccaaaggttttaaaagtcaattggtatcacctccacactgactagggtagtggggtgcatttggttttcaaattgggtacttttaacactttagtgcctgactgctgttctttactgacttgattcagtcactcgtagctttattggtctgaaccagctccttgttcccaggttacagacctgcctatcgttccaataatcctgtttcacttgaatgaagggagtatgtcttaaatgtaaagtttctggttctcacactgtactctgaggtccaaatactgtctgtcaatgtgtaacctgatgtctcaaccccctgtgagaagagtccattatttggtgttcaccaacgtgggagacttcaccggaacaggcttttttgctttgggctctgctatttgtttgcagaacacccaagagcgagcaaacatgctctcttcacagcagtaccttagggttttgccattgtaaatgggtctgatgtgatatgacaagaccagagaaattggatgtaaatttacatttttgaatatgcttgttgtttcacatgatacatttagggtantgcagctccttttgtagtttttatttttactatttaagtttggaaatgatgccaaatttttgtatttctttaatccatgtgttctcttcggtgatatatattgcattatatattgatgtgtgtatcaatatatattgatatgtattacccttacacatacaaacacatataagagggggtgaaaaccgtagcctttgcattctctatagcctctgcagagagatactaagcagcaaaatcttggtgttgtgatgtacagaaatggagaagagtattaaaccatatttaag

SEQ ID NO: 452340 - DNA, 778 bp, Homo Sapiens; identical to SEQ ID NO: 150903
  misc_feature (139)..(156): n is a, c, g, or t

SEQ ID NO: 452341 - DNA, 751 bp, Homo Sapiens
  misc_feature (73)..(113): n is a, c, g, or t
  misc_feature (126)..(252): n is a, c, g, or t
  misc_feature (254)..(255): n is a, c, g, or t
ggcccgcgttttttcttgggaaaaaaaacattgggcccattttccctttccccctgggggggcccgggccccnnnnnnnnnnnnnnnnnnnnnnnnnnnnnnnnnnnnnnnnncggacaaaatttnnnnnnnnnnnnnnnnnnnnnnnnnnnnnnnnnnnnnnnnnnnnnnnnnnnnnnnnnnnnnnnnnnnnnnnnnnnnnnnnnnnnnnnnnnnnnnnnnnnnnnnnnnnnnnnnnnnnnnnnnnnnnnntnntaaaacaaagttcactttattacattaattttacacactaaaataatatgaaatgcagacttgtttaaattctcttgctgattctcttgaagacaatgtcacccaatgtcatggtattggtgattatgtcgccgttgagttcggtcacagacttgatgtttttgaaagctgtcaccagtttattgtcaccttccaactgaaccactgtcttgactttctcccctgtcattgtctccagctcacattcctcccccaccgtgaattcgttttggatcactttggacccagcggtgatggtgaacttgaagtgcttcccattctgcacgatttccgacacccccttgatatccttccccttctggatgagctcttccggcagaccgattgccttcatgaaggcttcaaagttttcctggctctgcagttggtacttgccggagaaactcatggtggcaatagagctccctcttcacgactgacctgcggctctgccccc

SEQ ID NO: 452342 - DNA, 837 bp, Homo Sapiens
  misc_feature (19)..(19): n is a, c, g, or t
  misc_feature (49)..(49): n is a, c, g, or t
aaaaaccttaataaaaaangggttccccaccttggtccccaaattggtnaaaggaaacaatacccaaatgccttaacccgggctacaaactgtacagtcaagttcctttcattttactattactactttattaattcactcctttactaatattttttaaatattacaaagaaatgacagagttgtactgaatatcatggataaagcaaatctacaaaaagtaaacaaatcagcactcaaaacaatctttataaaaaatatttattcaatcttcaaattaaaattataaaagttcatcattttaagctgttttaagaaagcaaaagaaatatgtctatattttccaaatgaactaaagtggtattcccctcctcccaactactcagataagaatggtaacaacccttttaatctttaaccccaaattagtttcaggaacatttcaaaaaattgttttggcgacaatgtctcaacagaaagcctctccgtttatatttcaaaagtttcaaatagtgccaataaactgactagtacaaaaaatatacactgtattttcaaaggccttttggattgcgtctagtagtaagcaggctgctggtgtatcttgcgagacggtcaaacggcgctggggaaggggaaaaggagctcgctttccattcctgtgtgcatgcaacaagcagcaaaacagcaaagttactccagttagcttgtactcagctgtgctttctgccagcagaagatccatttaatgaattctgaagacttggaatatttgaacctagggaaggatttgaggttccctgctgagaactcccattgactgggctcccattaccc

SEQ ID NO: 452343 - DNA, 795 bp, Homo Sapiens
  misc_feature (211)..(395): n is a, c, g, or t
ggggatcccaattcccccccttatgggaaaatcccagagtccccacaggtaccagggaagagccccaaaccctgcccgggctttcaaaacagggggggaggctcccccattgctggaggtaatccaaagagtctgccgagggacttccaagtattcaggaaggggggagaccccaagatcaatgcccccgtggatagtctccatcttcaannnnnnnnnnnnnnnnnnnnnnnnnnnnnnnnnnnnnnnnnnnnnnnnnnnnnnnnnnnnnnnnnnnnnnnnnnnnnnnnnnnnnnnnnnnnnnnnnnnnnnnnnnnnnnnnnnnnnnnnnnnnnnnnnnnnnnnnnnnnnnnnnnnnnnnnnnnnnnnnnnnnnnnnnnnnnnnnnnnnnnnnnaccacttggtatttccgaagaattaaaacattcctccagccgggtctcactcgcaagtacaatatgatctcccatcgtatgcttttaaccataacctcctcaatatcccaacccaaacgtggtcagtgtaacttgcatggctccaattccaagacagggtcatcagacagtgatctctggaaaattcctcccaggtgggctacggtgggggaaaccggcctctctcggctccagagaggggagacggctctctagctgacttcctgtgtgggaaagagtcctctcactgacttccggtgtcagaaatgtccctctttccggccttcaaatatgagaaatgtttctctggccgacttcctgtgtactaaatactccactcagtggtttttagcgtaggccc

SEQ ID NO: 452344 - DNA, 496 bp, Homo Sapiens; identical to SEQ ID NO: 150734

SEQ ID NO: 452345 - DNA, 537 bp, Homo Sapiens
  misc_feature (111)..(124): n is a, c, g, or t
  misc_feature (132)..(244): n is a, c, g, or t
  misc_feature (488)..(488): n is a, c, g, or t
gggggaaatccaaccctttttcttgccccgattttctttggaaaaaattaaggcccttttcctttccttttgggggcccggcccccaaaaaaaggttttaaaaattttttnnnnnnnnnnnnnnccgccaannnnnnnnnnnnnnnnnnnnnnnnnnnnnnnnnnnnnnnnnnnnnnnnnnnnnnnnnnnnnnnnnnnnnnnnnnnnnnnnnnnnnnnnnnnnnnnnnnnnnnnnnnnnnnnnnaaggataaatcactgcagttttatttaaaattttagacaaaatttaaatcatgtatataaatacaaagatgaacattggttctttaaacactgacaaaatcctgaaacaatataatgtatatattttaagccacatttcctatttttacaacatagtttacaaccttcccatttttacaacatagtctaaaactaagtttataaaaaaaagtacataggaaaatatgattgaagcattctcaantacatggctctgagggtagattacttgtttttcatcatttaatccatat

SEQ ID NO: 452346 - DNA, 871 bp, Homo Sapiens
aagtcataggttccagagcaaatttttaaagttacatcgagatataaagatggtaaggagatatttattatgtgatattctcacttatcatactaaaaaatctacaaatcctaagccttggtctgtccaagatggagagtaccaggaagtaaaagatgtgacctactatcaaggactgtgctctgctaggagccctgcactacagtccattaatccacagtattttggtcatatctggtctgtttcctcatactactcaaaatgtgttagagctaagtttttatattagaatgtcatcaaccatttgtttatttttttcattttgcaaacgttttcatttacataaagggctggagagacaagaaagtggtagagattcagaggggaacataaaaggaaaagtattctcttttcccaaaaatccacctttaaaaaggtagtaatgagactttgagaaagagtgctgattcatggacttcccccatttttttatttctatataacacatttaaggacattaatgtactaaaacgtttggtctgtgaaatagcggaatcattagcaccaaaaggagttatggagcttgtatatattattaaaacaatgattgttactgttggtcatgggtaaaggtttcatttcatttttacatcccaaagttcttgaaagtgcctgtggacaagagaaataacacttttcaaaatctccatggggtcgtcaatacgcaccacagagactgtacttggccttcccagttttggtttatctggtagacaagaaacccagggcccccagatgattaccaccgaagccctaaagaagagttcccacatgcacccactgatgtgcaggagggatccctacagtaccc

SEQ ID NO: 452347 - DNA, 414 bp, Homo Sapiens
attatttttgtgtttgacttagatggttgaaatgttttcatttttcatttataagcattacattaatttccatgcaaaaacccaagatcgcatatgtctgatttcaattggccaaaatccaacccttgagtttggacattcaagaccaaaatgaacacgttacttgccctttctatgagtagacatcatgggtgtcctttgaaagatcagcaggcctcctgacctcttaaacaccagcttgccatgagtccacaccaaaacagggagccaataccttccaggcacctaatcagggcaagtaacttcactcatgaaggacagggacacctctataccagggctggccacccacaggatatttcctggggtgctggctctatagcaattacctggcttttggaacaggacgtggta

SEQ ID NO: 452348 - DNA, 975 bp, Homo Sapiens
ccatgctcaaacctctatgctttatttcctttacagcagagacttttagatgaaccaatcactattgaaatataacctatttccatttatatttctctggtctggactatgagtactttatcagcagagtctgtttctcatacaactttgctttcccaattcctattagggtagaagtaacacattgttgctaagtgaaaaggggatattgaattcatccttgctgtgcctaaaagtgccgggacacattattctaactggggcctcaccgtggaaaaagggaccaaatttttaacggaacaagtttaaaatgcgtacataaaaacctttcaatgaccagttttgtggttgttattgtggaaatgattggaacatatataacaatctagctgagctacaaacagaaaactgtggctactacataatgcgatttcagaaacaaagctttcttttgagtcaattcataaatacagaaacattccataggtgataccctgtattctgatcctggtactatttttccactagcataggcagaaaaactaaataattttcaaactggacctataactttttccggcatattgcatctgaaaaaagattatgagacaaaacacaaagaaagacaaacatcgtaaaataacttttatacaggattagtagatctgtttacatataaaaaacagaaaggacctcattacagttagatttcacataaattacaaattgacttttaaaaactactattcaacttcatttaaagtcccttttaaaaatttcattttgaaggcacagtgcatgaaataaaccaaagactgaagcacttgagatgaatgggtgttgggcacctcacataaacagctgtagattgctctagaactgggagtatcacttggaaaaactggagaggtgaaaagctgatttttaatctgagcataaaaaaatactattgtcatacctccagaaaatctgtcc

SEQ ID NO: 452349 - DNA, 440 bp, Homo Sapiens
ttgttttttcagataatttattgttaaatgaagacatcacaaagcaaaatgggagtggggcaggtgtcaaaggtaaactgaaaacgtcgtgtctgccaaacgctattctggtttcctaaggttagaaacaggaaaagtgtcaaatgaaaaggtactcgctcaaattaagtttttttaaaaggtctgtaatttgaaaggaaaacaatttttcactaaaaatatccttattacatgaaagccataatttaaaagacagagaaaaaagctttttaattaacaaataaacagcatctctcagagacacttgggaatgtttgtttttaatcagtgggtcctaaaaattcactgcttccacctgcaaacgaacacgaatccactgtgggatggcgtcctctgacccaccctgaagggttctggtttctctccacacacttcctttt

SEQ ID NO: 452350 - DNA, 464 bp, Homo Sapiens; identical to SEQ ID NO: 323899

SEQ ID NO: 452351 - DNA, 467 bp, Homo Sapiens
tcagaggggaagatttcactttattgttacatcagtctcacaaatgaacccaacacagccagaaacactgaaaggataaagtgccaatgcagagaggcctggcaacaggaggagggaggaatccagttcgtctcctccacgtccccagcctgggcaatatatttctattacacaagagtgagggcagctgacataccaggcaacccattgtatagacactttgagctaagaaatagaaaattgtaccaggtagggtctgtgcagggcaagaaaatagaaaaaagtcagaaaatgttattttcccgagtcaggcatgggaaatatccaatgggtaaaaccaatattttttcaaactctgttatttgagatagacatctaataaggaatgagacaggtctggtgcttcatgctactgcctattttcagaactatgacaccctttctcccacaccctcaatgtaaggtcc

SEQ ID NO: 452352 - DNA, 1231 bp, Homo Sapiens
  misc_feature (45)..(63): n is a, c, g, or t
  misc_feature (98)..(106): n is a, c, g, or t
  misc_feature (951)..(1014): n is a, c, g, or t
  misc_feature (1063)..(1072): n is a, c, g, or t
  misc_feature (1137)..(1149): n is a, c, g, or t
gcctgggtggcgaattcggcacgagggagagaactagtctcgagnnnnnnnnnnnnnnnnnnnaaaccagagaggggtgcatttattttctcacattnnnnnnnnngctgaatttaagtagtctggggctggtatgtcagcaaaggcccagggtccttcccgcgttctgcgtcagcaaaggcccagggtccttcctgtgttctgctccactgtccttagggtgtgaccctttcctcacgctctcaggacagctgtcccagcaccagccatcacatccatgttccaggcaggaagaaggcaaaggggaagggtcctgcatgtggcagctgagtccccttcacaggagcttccctgcaagtctctcccagcaccacccacctccacgccacagctgcacaccccgggctgcaagggagcccaggacatggctctcgtctgcccgctattggaactgggcagaggcaccggggttctgttagtacggaggaaagagaaatggacgctgggttagcaacttgcagagtccccaccacagccaggactcgggcaggagtgatccccactaaaaggcaaagatttcatgccaggctgcaatggggcaatggcttggcctggagtcccacctttctcctaaaaaaacctgaaggctcttggccaaaaaattcccccttgtccaaccctcacttttgccccctattgccaccaaaataaactggcccggaggaggccccccgcccatttcaaggccttcccaatttattcccgccggccgagacgaaccttccccctaaatcaaccccttcgtttcccgcccctccacgaccatttatcgcctagaactgtataaaatccgaccccccgtaccctagttatccgtatctataactcccccctctttatccctccctgatacaataaccatcccccccaagcaattcatctacaacagcnnnnnnnnnnnnnnnnnnnnnnnnnnnnnnnnnnnnnnnnnnnnnnnnnnnnnnnnnnnnnnnntatatatctccccctaccccccaacaacgatcgaacgagcgattataannnnnnnnnngcctatttatatacttcacctttccccctcctatcaccacccgcaccgatatgaacaccatcatnnnnnnnnnnnnngacatactgtaatccgctatgtttcacacactgccgcgccaatatctgaccagtctcgcttcaagcacgtcacgacatagac

SEQ ID NO: 452353 - DNA, 1156 bp, Homo Sapiens
gctcggtacccgggagtggagagagaatgtggaggtggctggactggggtctgtgtgttgggagatggaggcggcgtgggccgtttgaatttgtcaggactgttgcttctccgtggtgaaggccttgtgataccatgggatgttcccatgtgctgcacgtgaagacccggggaattgtaataagacattccagctctagtcagtgaagttggtggcgtgaaaccaaccgtgtgacttgcatatgatagaccaggtgatataggcctgcttgaactcggagaaggtgtgtaagggatcgggctggacacagtgcgaggtcttaatccttgtgcagacatctcgattaaaatacctttcgtcgtccatttctaagctggactcactctcggagagctgtcgacagagggcttctcttctctccatctccctctgcagcttcctctggagcctcaagttctcttctctcatgtgacgttcctcctccagatactggtgccattttctctgaatgctgtaactgagcagctctcagttgcttcttcagccgttccacttcattctttaaaaacctgatgtgacgcatcatattttctggagaatcaatctccatggggatatctctaggcgatggtggagcagagacgggctggtctaatttttcctgcaggattcgcttttcagcttcaagcttatccatcctttttccagaggcgattaactagtgcttcttgttcttgttccaatgtattttcaaggtcaatcttctcccgtctcaactgttctaatgtaagttgcttagaaatggtgtcattctccagttttttaattttcttcatcagtttgttgacctgaaattactgctcttgttcaagatgctgttctagttcggctttctcatgctgcaactgcatcaattttctggagagctcattagtgaggaattcttcttctttctcataatttacagcaagggtttctttctccttctgcaaagcctgaattttcttgaataaagtgttactaatgaattcttcttcctgctcagccctggcttggatggtaacgctggctttgcgcaggtcgcggttctcctcctgcagtgccttgcacttcagtttgtaggtctccagccctcgtgccgaaatcgccacccagc

SEQ ID NO: 452354 - DNA, 380 bp, Homo Sapiens
agacctccccgcctccgcttttaattgtttggccttcattcctcttctacagtgctccctgcaatcagtactggtgctgtacatatttgctagcttcgtacatacggcacgaagtagatgctcagtaaatgttggttgactgagtatcctctgcatctcggtgacatcacatcctgcgtgccgtggcgtcattgtgcattcctctgcgggcggctcagatccggagggtttaagtggttgtttataacatgcaccgaacatatccaacggaggctgtggtttccgaccgcccacaaaaagcgcggttggcgggagtgcgggttcggggtcggctggcagctgggagactccagctctgggcggaaacacactgcctcccc

SEQ ID NO: 452355 - DNA, 1359 bp, Homo Sapiens
  misc_feature (67)..(67): n is a, c, g, or t
agtggcgcctaataaaaactccccaagactgccagcggtacccccaaataatatcacatttgtactnggatcacgactttcccattacatacttgtaaaatgacattcctttagcccgagcattcctacgaagttcatttacagcaacaagaagtgttgctccttcagatactaatgatcctgctaaaatacaatatgcccatagaagggattctattggttgaggatgaagcaatcccatgactcccatggtaccaagatattcctgcacccatcatgaaaatcccaacacccctaattagcgaagaaaatatagcgcatatttggaaaatccgtacggatgagaagggatctggtgtttgaacagacttactgatgcccaatgctagtaaaccctgattacaagtatcagataatgagtgtatagcttctgagaacatacttgctgaaccggtataaatccaggcaagaaatttaaagaagcagtttaatccattgatgcaaagttgcaaccatcaccacttttcctggtcccttaaaaaacactgatgctgttctggagcgtggcttggtatttcccaagaaatctctgtattctcttaatattttttggtttctaaatagcctttctctgtattctatttctgcttccttacgcaattttttctctctggcaagagcttcagggcttccccaaacttccaaagattttgcttccacatctgatctcaagtatacagtaaaagactcagtatcttcatggggacttcgtcgtctgatttttcgaagttgttctagatcactggatttgaggcagaactcatttatcgctctgactccagtgatgaaattattctgagtgtactttgatccatactcccttttcttaaggactgctttaactcttacttggagaggttcttgcttaagtggagctttgagttctgcgcctataccttctgctgtttcaaatgatggtactttttccactctgagtgtttgtgatccctgtccttctttctgaacatttgtggagtacaactttacttgactcagggtaccaatatatggatgactacagggaaccacgtttgaaaagcttccaaatgtcactaaattctgccactcctggtggtcgctgggattacaggccgccgccctgcatcgcagacggagccggcacagggaggaccagctacatctgtgggccgcggcggcggccaagcccggtaacatcctggtggtgcagaggcccctactcggacaccgccttctgcctccgcgccgccaccggtaccaactgactccatagactggacatcagcgaacaccgatggcttcgccgccacaagctccgct

SEQ ID NO: 452356 - DNA, 982 bp, Homo Sapiens
  misc_feature (49)..(49): n is a, c, g, or t
  misc_feature (126)..(126): n is a, c, g, or t
  misc_feature (202)..(214): n is a, c, g, or t
agcgatatccctcccgctttttggggggagacacacctctttttggtgnccgggcgacaaatgaccggtaggggggggccttgagagggctcttttttagcggggggcaggaaggaatgtcgccantttcccccccttggttggtgagctgcgcgtgttgtttgttccccctttatagaaaaaatacccgggggtttttttnnnnnnnnnnnnnaaggaagttccgtttgggttttaataattacccccccattttttcaataagttttcccaagccaggttttttgacacaattctggtggaaggatcttccacccgttcccaaagaatttcaatagggcgttggattagaaaataactggtgaaaaaactcggcgtgtgaggcagtgttcggcatgtttacacgtaatactccctgtccttgtttttctgtttcttgtggccgctcttcgagctctgctgcttctccttcatgagcgtgcggttgctctgggcggagttgctgatgtagttccgcgtctcgtccacttgataggacccctcgtccctgttcctgtacttgtacatggcgtacaggaggatcaagatgcagagggcggcagcagccacaatgccgacgaccatccctgttgtgctgctcgactcccggatcacctctgaggccccccggaacccgtctgattcccggctccgtggggtttgctgtgggcacattacggaacatgggggaggtaattagtgggctcttcagtttggtgctgtctagctcataggcagtgggcaacggaagcaagactatatcaggctggggtttgagatcacggttattcattttgccagctggcaatttgggcaccatcccagacgaggaggaagctgtgaagcggatcagctcaggggataaagatgtggtagtagtcctactagtttcggagactttgttaggtctaaagtccttgattcccacttgggcgctcgtgcc

SEQ ID NO: 452357 - DNA, 612 bp, Homo Sapiens
  misc_feature (60)..(60): n is a, c, g, or t
aaaggcagtaatttttgaaatagttaatgcaactgttgctaacacaataataatagtacnctcctggcttcacatactaacctggacttccgatcaagtgctgattagcccagtaagggaggtcaccaaaaaacccaaatccatttcagtcatgtctagtcttgtaccctccattctccttttttagcatttgaagacaacaggttgagttggcagatattgtttatggacccctgaggttgtttttaccgattcaatctcagttttattgaattcttgataacaggaataggatttgcagggagagcagggatatcagaaaggtctgtactggatgttttctgagaggccaacagagaagccgctgtctgaatagtttctgattgagttgtacttgtctctgtatcaagttgttcctttgcttctgttttatcatgtccactcaaagcaagacagttagcatcttcacttgtttcatcctcttctgttttggttttcctgggactctcttctttatgaggtgaggatgtcctcttgactcctactataggagtaggtatttttgttgcgtgcatttcctgaagcgctgcatttcttgaagatgctagaatg

SEQ ID NO: 452358 - DNA, 869 bp, Homo Sapiens
  misc_feature (154)..(263): n is a, c, g, or t
  misc_feature (289)..(289): n is a, c, g, or t
  misc_feature (453)..(474): n is a, c, g, or t
gtttttttaatttttaagtaggaaatggaatttccccccaggttggttaagggcgggttctcggaattccctgatcttggtggattttgacaacctcgggccttccaaaggtgctggggacttcagggggtaagcccaccacggcccagccaannnnnnnnnnnnnnnnnnnnnnnnnnnnnnnnnnnnnnnnnnnnnnnnnnnnnnnnnnnnnnnnnnnnnnnnnnnnnnnnnnnnnnnnnnnnnnnnnnnnnnnnnnnnnncaccaccatgcctggcccaaaatctngtaattgcttaatactgtatatacattcttataatgatatgatatttccccatatttgtgtagaagatgcatgtggttcttctccaccccctcaagtacttaaaactatcacattggcagagtacaacctttaaatgtctctggcatcctccctcctcccattnnnnnnnnnnnnnnnnnnnnnntatgtatatacacgcccatacacactacatcagagggaaaaaagcaactcattgttcaactggtgttcttataagaatcagttcttaaattccaactgtgtagtaaaaggtaagcaagctataagctaccttttaacctatcctttctctatatacgttccatttacattgtacttgccctccaatctatgcaaacagtcacaaagattagattatgtttgctggcttatcatttcaactagtaacaaattcttaaggtgtgaatacaagatatggagaaaaaatgatgatgcacagctatgctgaaatttcgtattgttcaacttgaaatacgtttacagcctaatgggtacacctagaaaatgtagaaagagagcggcacgaagatcatgccg

SEQ ID NO: 452359 - DNA, 1172 bp, Homo Sapiens
  misc_feature (29)..(29): n is a, c, g, or t
  misc_feature (49)..(49): n is a, c, g, or t
  misc_feature (169)..(169): n is a, c, g, or t
  misc_feature (365)..(536): n is a, c, g, or t
  misc_feature (736)..(748): n is a, c, g, or t
  misc_feature (774)..(774): n is a, c, g, or t
tataaagtccccctttttattggaatccnggccctgtaaatgtgtaccntaaaaaaatccagagtttatttaataaacagaatagtttatttaaagagaaggtcctcttcccttattgatatccatggtatgccattaattcccatttgttactattgtgcacaaaagnccctgttcacaggggaatggtgtaaacatttatactgttttgttcactgtatttagtagacataactgttgaatagttactgaatcatgatgtaaagaatatgtgaccatcttcaggtatgggatttctgaacgtttcaaatttcaatcaatgagcactgtcaacacccacaggagagaataaaattacctgtgcnnnnnnnnnnnnnnnnnnnnnnnnnnnnnnnnnnnnnnnnnnnnnnnnnnnnnnnnnnnnnnnnnnnnnnnnnnnnnnnnnnnnnnnnnnnnnnnnnnnnnnnnnnnnnnnnnnnnnnnnnnnnnnnnnnnnnnnnnnnnnnnnnnnnnnnnnnnnnnnnnnnnnnnnnnnngcagaccaaagaaaacggggggggagccccccgggaagaaaaacacccgggggagaaccccgcccgggcagaaaaacagggcgaaaaggaaaaacagggggggcggaccgcgggaaggaaaaaaagggggacccgaccaaacgcgggcccaaagaaaacacccccagccgaaggaacgcgcgcggccagtgccgcccacnnnnnnnnnnnnngccgggaggggccccacaagaaatancggaccaaaacgcggagggcgggcgaaaccggggaaaggaggggggcggcgaacacacccaaaagggccccccgcgcccgaattgaaattcctctcgataaagacaatttgcgcccatgtgaaaataaaccggggggcgcgtaaaagaaaccctgctcccaaaatttggggcccggcggttaaaaccccccacccctggggagaaagggggggcggggagggaataaagcccttgtctccctaaaaaacaccactttacttccgaaaaaacgcggggcggagaggaaaacacacccgcaaggggtgtttagaacgcggtaagcacaaaaacaattttttgtcccacacaaatccctgtggcaacaaaacaagagccgggagtttcctctcccccccca

SEQ ID NO: 452360 - DNA, 853 bp, Homo Sapiens
  misc_feature (29)..(29): n is a, c, g, or t
  misc_feature (128)..(140): n is a, c, g, or t
ggcacacagcacggtatgggagggacaancggacggaaaaaattacctgggaaaacaggcagcgcaacagtgtgatgtggggagaaacacggctgtatgggtacgcaagggagggggtatttttttannnnnnnnnnnnnaaacaacaacacgcaatggtagggtagggctggataattttcttgggaaaaaaacacaggggaggccacggtcgaaggtcgccaaataaagcgggaacagaccggggccccgaagaaaaagatgatggaaaggatgtaaaacgtggggaaagaggggggagagaaaggacgggaaaaaaaaggaggatgggttatgaaatatggggacggaggcaagggagggcgaaataaacgaagggcgtggggtctataagcattcggggggtgaggtatggggggaaattgtaaacgggagggaggaaggctggaggtaaggtgaataggaacgggaaatgggagacattaaaaaaattttattgttgatagcaaaatttccatttctatgtttttgcaattaataatagaaatatataggagacaatgtcaggaaacagataaaattgtaatttaaataaaaacaaccagtgagagcataagatttataaacatgtaaaattagtcaaattttgttttacaacaaaaagacaaatctggctaatggcccacttgttcaaatagcattaaaaacagaattgtcacacacaccaaaaataatttgttccagttatttcaactgtacattggtcctcattaaaagagaatgaaaagtacagagaaaatattttttaaaaatctcatcaggctaggtgaggtggctcgtgtctgtaatcccc

SEQ ID NO: 452361 - DNA, 834 bp, Homo Sapiens
tggagggttataagtgcattttaatcagtaggcaaattcatgagtacagtattcataaataattaaggatcacctgaatttgtttgtaaggagctttccgtttcctccctcccttttggggtgtgaagggccctccttttcccaccacaaagcagccggttctcacccgagcgcattctcctttcccaaagatctgggggatcgttccatacagagcttgcagggtcatcagccccttggctgcgtggtacagggctcgtctggtcaccctccaggtagcactctttgaatgcaccctctgattccatggataagagatccccatcgaatggaatgagatctaagctgtactcctccctgtgaataaaggatcccaagacacccagatccttcaaccgctgttcgcacaacaggctacggcgtggcacaaacagaatatgaaaatctctcgttgggcctcgtctatcttcactgagcacgttttcagcgattatatccatcaactctagcctgggtctgacaaaaaaaattatattcttcacatcagctgccggcaaacgatttcctttaagtgtgaacattttttccacttcatgttccttcaatagtgaatactgtgcaatcaggccaaagggtccagttaggtattcatcccaaactattgccttgcttcctgcgcacttgtccaggaactcgcgcagctcgcgacgcaccgcctcgcgcaacacgtttaggttcactcggccgtaggacagatgagccgccatcttgctccaccaccccctgccccacaacgccaaccgagtccgccggttcctacgggaggaccccgct

SEQ ID NO: 452362 - DNA, 422 bp, Homo Sapiens
  misc_feature (309)..(317): n is a, c, g, or t
gcaacaggcttttattacttttttttaaaacccatataagaaagacatttaaaaagaaaatatcctggaaacaaacacttacacactgagcaacacaaccaaagaaggcactaccagcagttactcccacctctgggagggaacgggtactcgatactatacttttttcagaggtttagacctcagcataggccttgggtctaactgtgctttagtaaagtctgaattgtccaataattttctcatttcataaacacccttatctctttatatatagctatatgcctttatgtgtatatatacatgacnnnnnnnnnccttctcaaaaataaaatagccatccccatagagggaggttctcagcagcattcacagcggttgcagcaggagccatgccttctattaatgtagaggcatgcagg

SEQ ID NO: 452363 - DNA, 1099 bp, Homo Sapiens
  misc_feature (91)..(91): n is a, c, g, or t
  misc_feature (160)..(175): n is a, c, g, or t
cttcttttccgtgtcgctgtggagcgtgtataggggcccccgttgatggcggcttgtgcgatttgctggcggacgccgcgcgttctgggtngggtgtgtgtttttcccaaagccaattcaaaaaagaagggtttatttttttaatagaaaagatttggtnnnnnnnnnnnnnnnntttttttcaaaccagcttttactttattagagaaaaccttttttccagaagtggattaagattttaaattggtcccatcattaaataaggtgggacaccatatgaatttcattgcactggaagaaatgcaaagcattttttaatataaagtatacagagcattctagtcaactacagctgtgttacagctatgtgttcttttggatttggtccaaagaaacctgagtctgtttccagagagaatgaaaaatgttatagacacctgatcagttactcctcactgtaggatgcacaaaaatgacattccttgtagatcccactgaatcccagtttcccaacacttgatactttcctttttcccttcccccaccccagttcactttgggtttcaggttcaattctcgaatcacaggcatccagattttcttcataacaaacacatcccatggtcagatgaactacccagttttccaggatgacatcacctcttctgctcccaaatttcggccatatttaggtccaaatctttaaggccttttaaggcttgaagatttccagtgtaaaaagctacatctgctgtgaccaacccattttgaggtcctccatcatttatcacatttaagtgagataattgctttttcaagtggagtttataacttgcattaattcttaaaaataacatctgtgtttgttcttctggaaggagatcaaatatagcttcgtgcatttttgtcatttgcttacaaatattcctgaaacaggcagaaggaacaggagccttcacttcatacttagataacagcttgtcaaataagctatccattatcgctacaagcttagctgatatttcagctatgtgatcatggtagtccttagtgatatgatcaaaatgcctaagcatgctatattgcttaggtggtagtc

SEQ ID NO: 452364 - DNA, 1331 bp, Homo Sapiens
atgatacacaataaagactccatttatttgttcctcttcccccaagtttagcaaaataactcagatcctgattttctttaacttgcaaaaaatgccatccttctgagttcagagaccttccgagcccctggtgccagctttggtgcaggtccagttcatatgtgcttctgcttatagtctactgcctactgcaaggctggctcactgtatggttttatcaatataggcagtttgaattttttctgtgctatgtgaaagttcaattggaaaagaagaataaatgaagatttcttttaaaaaattagaggatgatagtaagttctcctggagcaagcttcatgtaggggttcaatgactgtggttgattgcagctttttcagtaactccgtgatgtatatcagaaatgtgtggtagttttgaatggacaggtcaatcaatcttttggattcagcaataaatttttcatagtaatcagagagttggtctgaaaaatcttgcagtttatatctaaactgctggtggtaatcagaaattattttcttcgtcgcaatggcctggcttttaattatttcctgagcagtggcagaaagctctgcaatcttctctttcccttttccatctggatcggtaaggatgctaagatattcctgaatatttctgtgcagaaattgctcaacttgacttgagagttgggaagtaaagttagaggcactgacaatatattcagaatggaagtccttaagagcaactaacaggttcttgatcagactgactatcttttcttcaagttcataatatttcactgtccagccaactatacttggatcaaaatattcttcacgaagggccataatgtattgatggatctgctgtaactcttgagaagcttcctgaagctcgttttgaataaattcattgaacttatgaagattaaggcataggttttctttcaacaatttaaaaacatatgggatataatcactgaagattgtgttgatctcatcttggatataattaataagataagtaaatttcatctctttcagctgtttaatgttatcttctattagttggaaaatgaattgtaaaaggtcctgaagattacgtagcacctctgtggtcttgagagactgaatggctttaaatacctcttgggcttcttttgataaatctttcaacagttccctatacatcgagattacatctattagtttatgtttccttaactcgaaaggaagtgtaatcactaggtcttggaaataggaaaacagtatttctgaaccattatggactttcgaatatacctgggacagtaccgtccctacctcccc

SEQ ID NO: 452365 - DNA, 597 bp, Homo Sapiens
  misc_feature (454)..(454): n is a, c, g, or t
  misc_feature (464)..(464): n is a, c, g, or t
  misc_feature (470)..(470): n is a, c, g, or t
  misc_feature (512)..(512): n is a, c, g, or t
  misc_feature (550)..(550): n is a, c, g, or t
  misc_feature (555)..(555): n is a, c, g, or t
  misc_feature (562)..(562): n is a, c, g, or t
gtgggggttttggaatttctgaatcaaatttaatttcttttatcatcaaaagttaagacatatttccctcagtcttaggaatttttattgttaatacaaaataaattatacatgctgtataaatttttatttatagctaaatatttcttcagtcatcactgtcacttcctgattcactcagctgcaaatcatttcttaaagtattcatcagaaggccactgttgtctcgaaatctattatgactggcatctatatcagggaatcctgtactgtgtcatggtaggatgtcctgagacacaattccctgtatcagaagtagaggatttgcaatcttcatcttctgagtcactagaactatcctcactacttgaagatgatgaacttttgggaatctggatgaactatcacaactactcatctggtccattagactaggcttctgccttcaggtttntctttcgatnatcatnctattgggagatgctgggggacatcttattcttcagatgggngaatgtttttacaaggattggggagtcccgggctgaanttccncatttgnttgttggccgttggttctttaacgggaccgaattt

SEQ ID NO: 452366 - DNA, 825 bp, Homo Sapiens
ctgatggtgagaggtttgcagtgggcacattaggcactggggttgttatccgacatatattgtgtacgggggggtagtgctaagttataaaatggggacggaggtggtcgatgagagtgtggacgtaggcaaagatatttttttcagggagtgaaagaaaagtgacaattgcacaggtgttagaagcccatgcccaggtgacagacagacacagaaaacatcaacagcattttttgatggttcccaggcacagagctgctggtccttcttccaaagctctgggaactgacactgctgaggacttcctttctcagtctccacctggacagtggcaatatggcagcctcagaaaggaaaccttttgctatcagggatcatcatgggcagatcactggctaagaggaaagaagctaactgtgtatccatggtaggctttgatgagaagatgcaggtgaagctgtggaacaaggtgagccaattatccttatcctttcatgctcctgatgaattctgaagctgttacttgctcttgggtggacactttggctggcagggtggggaaggtgtcacaggaggacatttttgctggcactgctgaggtgggcagggctgtggacactttggtggtgggcagggctcagggcacttcgggggtggacatggctctgggcactttggcgtggggcacacaggaggtggctggcagggctgcttgcactgctgctgttgataagacatcctgctggagtctcagaatcaggttctccaaggcagatcggtgcttaggtaccaggagttttctgttgatgttttctgtgtctgtct

SEQ ID NO: 452367 - DNA, 614 bp, Homo Sapiens
tttttacagccacttccctcgcacggtccgctggttcaatcggctgaggagcattgagaagcgtctgcaccggtttgaacctgctgcagtctcatccccaggaagtgatgtacttccaacccggggagccctttggctctgtggaagacgaccacagcccgtgtcctccgcagtaggggtaccacagtgctccatctcatctccacgccacttccctgctgtctggcacacccactgcggacaccgaggtcaatctccacccacccacggtgcacaacttgtgccgcattctcgctgtgttcctggctgaatacctggggctctagcgtgcttggccaatgactgtggagaggactgtgagagagaaggtcccagcgggggccagtgaagctcaggcaggatctgcctagggtgtgctggtttgtccttttcatacctttgtctcctaattgtgctacaattggaagaccttctttcttttgattgtctcaagctgccacccttcaaggacagggaagagaccactgtgggatgacagccagaggaataagaacttgctccctccccagaggtaaacacttggtccaaaggtttgcagggaccaaatactgttc

SEQ ID NO: 452368 - DNA, 198 bp, Homo Sapiens; identical to SEQ ID NO: 246297

SEQ ID NO: 452369 - DNA, 1652 bp, Homo Sapiens
tgctggtaccggtccggattctcgggatccattcagaatctggccaatttaagtttgtattttaaaaatattttatgcatgttaagtatggtcgcagtaaatgaaattgtgtttaagactaaatttactaccgttttgaacagacattcccagatcattcttatattgtcagataacacttgtgtataatatcactttgcaccatggacatgagctggaaaaatgatgtatttttgtagattgtatgtccagaatgactttagaaccgcatgatacggtggaaggagcactggactagtcgtcactaccctttttggattcagggctcctcacaattaaaatgagtgtaatgaaacaaggtgaaaatatagaagcatccctttgtatactgttttgctacttacagtgtacttggcattggctttatctcactggattctcatggtaggatttctgagatcttaatctaagctccaaagttgtctacttttttgatcctagggtgctccttttgttttacagagcagggtcacttgatttgctagctggtggcagaattggcaccattacccaggtctgactgaccaccagtcagaggcactttatttgtatcatgaaaatgatttgaaatcattgtaaagcagcgaagtctgataatgaatgccagctttccttgtgctttgataacaaaagactccaaatatttctggagaacctggataaaagtttgaagggctagattgggatttgaagacaaaattgtaggaaatcttacatttttgcaataacaaacattaatgaaagcaaaacattataaaagtaattttaattcaccacatacttatcaatttcttgatgcttccaaatgacatctacagatatggttttgtggacatctttttctgtttacataaatttatccacttaaaatgtgataatgtggagacaaagcaagatttgattacataaacttttctctgcattggtcttttcactatcttatttgctaacttttcttatttttcttcaacctccccaccctccattttttggatattaaacagggaaagcttgctacattataaagattgttggcaccatttattttacacaaaggctaaaggttaacttttggaaatgatgagctacttttatatatgtgtttactcatgctttgtgatatttctggatcattccagtcataaagacttattacatgtactatttcttgctacctgtgaaaaggtatattttaaagaatgtataaccaacagtccatttactttttattagtatgtagaggatttgtatctaattcatgaatgtagttttacagtagtttgtcattgtaaatggagcaaagtacattatcttctaaaatgtacattatgtaagaattgtaaatatacttaagtaatttgtatgccaaaaaattacattaagtcaataaagatctcacctcggactccgccacaacccactatccccgcaatagcctgggggcccggcttcgcacccttcaaatagtttctctaaacacattccctttggacgacgcggggccctactaaggtaggggaccccgcggccttttaatcgtttcctaaagaagaccccggccccctgaacaaccggattgagatccaccaccc

SEQ ID NO: 452370 - DNA, 288 bp, Homo Sapiens
tctctagacgggatgtatgccctgtgcctgcctctgttttttgaggacttatgccaacccaaacagttgtgatcaactaccttagaccccagtttaacatagttgttcggactgttctcagcaaaataatcatttggccagttgtcattcagcaaactgacctaaaaccatcaaataccccaagagagctgccaggacattatcagggcaagggactttccccagaagagcctccagagcagccagaaagggaaaggcaagccaatggctcatataacaccttctccc

SEQ ID NO: 452371 - DNA, 374 bp, Homo Sapiens
  misc_feature (324)..(324): n is a, c, g, or t
  misc_feature (354)..(354): n is a, c, g, or t
gcattttttttctttaatgcagtaaaaccattcctttaaaacccaaaatctctcatggaacccctacgtatcaaatatataaagcaggagctgcccttgttcagggataatatgtggggcttatggctctaagaaacacagtttgacattcactgctctccttacttcagttacctcatggtatagataaatgggctgggccagaagaggggcatgacctgtcctgggacacgcagccactgaagcctttagtccagtgctccttccacaggcaccacactgggattctgggagtctttccaggccaggggcagagggaagctncaacagtgccacggataaggagtttctggngtcttctgggtacctaccct

SEQ ID NO: 452372 - DNA, 1216 bp, Homo Sapiens
  misc_feature (1003)..(1060): n is a, c, g, or t
tttttttgttttaatttccgaatttattaaaatgattaacctcaatactgcaagtgcatgtacaaaatatttgtaaaaaatgtttttaatgaaacgttaaagaacttacctcaaatgctgaaaaagtcctttttcattctttcagtacaaggaatacattgtatctcaaaagtattacaactcagcaaaaacaatttataacagtaatttgaaaatgattgaaaattgaatactttacatatatttctatgatcatctcctaattcttacaatgccaaaatcttaaccaatcattgcataagctcaagctaagagttttattgaatgcaacctcttctaaactggtcaacggtgtgtggctgtcaccattccacacggtgaagttctacagcagatccggaacagttccgaggcccctacctttaccaacggaaattagggtttccctagaaggcatcaacagtggctgctgagtgcttgtgcataccgactcctgagaggcagtgatttactaccaaatgtcactgcttttgagacccatgggaaggttggcctccaaagaggaggccatgataaaattaaaacatcaaaaataagttactaaaattcagctgaaaaatgaaaatgggaaatgtgttttgtcactttttaagatcgaaattcccaaaatagctatcgttggtattcaaataaggtttaagatttagtctctgaacctcttcaaaacaccccaaactaaggtgggaatacaagaggtgacccgctgccctccagcacctccagacacagggtctaccttcatcttcctcagtggcaggggttcacatttctatgcagggaccccatgcgggctggacgtgctggagggcagcgggtcacctcttgtattcccaccttagtttggggtgttttgaagaggttcagagactaaatcttaaaccttatttgaataccaacgatagctattttgggaatttcgatcttaaaaagtgacaaaacacannnnnnnnnnnnnnnnnnnnnnnnnnnnnnnnnnnnnnnnnnnnnnnnnnnnnnnnnnatcatggcctcctctttggaggccaaccttcccatgggtctcaaagcagtgacatttggtagtaaatcactgcctctcaggagtcggtatgcacaagcactcagcagccactgttgatgccttctggggaaacctaatttccgttggtaaaggtag

SEQ ID NO: 452373 - DNA, 364 bp, Homo Sapiens; identical to SEQ ID NO: 150770

SEQ ID NO: 452374 - DNA, 1198 bp, Homo Sapiens
  misc_feature (401)..(409): n is a, c, g, or t
  misc_feature (476)..(528): n is a, c, g, or t
ccactgtactatactaatgaggtgataccaaactattatgaactttcaagcttaagtactttcatataaaggttacagccttgagttttgtaacctaaattagcagtacgtgatcttagacactgtttttccatgttgtagttgttacctaatcccacttactgtggtctgtaccatttcttgggttataaatgagcaataaaagctaaacaccaaaattaatttgcattagtatactgcactcgtgtcaatttgcataaaaatatatttttgaaaggcttcaatggcctagtgttatcttctaagataccttgaaaaatagagttgcacctgctgtaaaaaggctgaatagcatctagaagccttaaaaggcatagaaaaggaaggactgtattcaaagnnnnnnnnngctttaaattttatccctcccatgaaaaggaaacataaactacatgtggccaaatgtactgcgttcnnnnnnnnnnnnnnnnnnnnnnnnnnnnnnnnnnnnnnnnnnnnnnnnnnnnntacattttgtctagcaaattcctagaatggtgtcatttttgtacatttccattccatctgagtttcaatcaattttttttaacatcagttaaagattttatttgattcattaaagaggaaactggtgaggcatttccaccagctcaagggaagaattttgtaaatgttatatttatggatcagaaataactgaaatgaatgtgcaaatggaggcaaaactggcctcttccacagtggggaagaaagtcaacagaacctccactaggcataatttacatatgtacagactcaatcagcttttaatatagaaagatatttgaacccaaaatctttcattaaggtaaaaaatacaataataatttttaatgaaatcctggaaaattcatacaaataaaattaaaagcctccaatggggtataatccagcaatatcctaggcaaatgcctcctgaagaacaacagcttttttaaaacatcactgtttatcattcaaaattcagacgtctcctatctttggctatttttatctcttcaaactttactcctaaaattgcactaggaaagcgttccttattggaatcataatgggagcaaagctgaaaatgtttctttagaaacatctaaggaaattacttagacccagatacttataagtgactataacaagcccc

SEQ ID NO: 452375 - DNA, 1175 bp, Homo Sapiens
  misc_feature (1035)..(1130): n is a, c, g, or t
ctcagaaagaaacatttaataggaacttacaaacagaagcaatgtttctagcagccactaaatggcggcactcaccctcccaaaagtaccctttatataacaagcatttttggcaaaacgtgtagctagtcatatctcagactttcttgtgaaacacctgaacactggggaggttagataagcatctttatgaggggttatctgtactaccggcactgtttaaagacattgctgcagaatatcttggtatgcaggagtcaaacagcagtcatcatgccagctgctcttcaagatgacatcactcttacaatgcaacagggctgttttcctacactcgacccctcgaaaccagtccttaaaatcttacatgcctgcttcttctgtgatagtccctgggcctagagggagggtgcttgatattgtatggctttagtagtattgcaatggaaatggaaaacagattgggtccagtggaattccacaagagggagatttgcaggcttggttgaatcatctatatagtcttcataataccatgaagaagtaaaacaatgagaaatacataacattaataattggagtagtagaaatctaaataaagtaatatgatgtttaagatatcccttgccttaatagcctataaatatgggaagagtgactatcatcttctgaatttcaagacccatatattccgacagtttcagtaatattggaagattttggaaattctaaaaggttttggaggatcatttcttaattccaaggcatttaaggctctttatggtttagccattaaattgcaggccccaacttttggcaacttttttgagctggcaccatttttctgagcacctttactttccttatgtcagatgtagggaatcatgagatgaacaagttttggttccctgcactgtagcaaatgaatttaggcaacgatatgaaagatgaaaaaagcctatgactatatgacttttggtgtcatgaaactgattactatataatcttgtttttcttccccattgcttgactttnnnnnnnnnnnnnnnnnnnnnnnnnnnnnnnnnnnnnnnnnnnnnnnnnnnnnnnnnnnnnnnnnnnnnnnnnnnnnnnnnnnnnnnnnnnnnnnnacccgcctgaccaacatggtgaaaccctgtctctactaaaaatac

SEQ ID NO: 452376 - DNA, 961 bp, Homo Sapiens
  misc_feature (446)..(446): n is a, c, g, or t
aattgtaaagtattggcaccaaattaaaaatccccggtatataatgaaaatcctggtgaaaaatgttcagatgcctaaatattttggattaaggaaaggtaaaaccaaggatttggttcaggtacaaaacaaaggcatccttatcagtcactagcagtacttttttgcaaaatcaacagctttttatttatcagtgacattatctccccctccaaaaaccctccccaaatatcaaacaattatataccaaaataattttaatttcaaataaaaggattttcaataaatatataagcatttccatcctccatatacaaaatttcttaaaaccattcaaaacggaggctagatagaaattttcataactgtgcttaccaaccccacaactggcccttaaaggtggtgccttttcaggcaatgtcaactggccagttctgttggtgagnccccctacccccaccccacccatcccagtactgttgaatgctcatgttaatgatttgccaggtgtgtgcataaagttgtaaaatggggacacttctggaacaccaacaacaaactcaacaatatggatgatcatggcattgatttgaaaggcagcatttccaaattgatattttccagagaggaacatagcaggtagaaaattccaatggttaaaagctgaaaagaagtcccacatggaagcagtaagaggtcaaaactgagtatcactagagtttctgggtgggagcttttttatttttaagaatggcaagttatgtttagctgagtaacagtggcaaggagaggtcaatgctgacattcctgaaagtcaacttctttacatgatgactacttaggctgctattttaggatacttaaagatctctaagacttggattagacttaacttgaataccttattctgtgaccaaattacatgaaaagaagatacatagttattatttccattcccttt

SEQ ID NO: 452377 - DNA, 743 bp, Homo Sapiens
  misc_feature (49)..(69): n is a, c, g, or t
ttagacggcatggtttaaagggtgccccttggagaggggaggtctcgannnnnnnnnnnnnnnnnnnnncgcttcccaggggcaaatgtcttgggtagtatggtatatcatggtggcggtaggagatttgaaaaagagaagcaaagtctgaaggtggattgttcccataaattaaatcagctttaaatctaggcatatttggaggaatcacaaacttctaacactgttagagaaaagagagatttaaaagctggttaaatctaaacaataaaaaaatccatatgtacaatattataaaaaaagagaaggaagaagatggcattcacaattactggggaggcagggcagggggcagttgcatgctgggggtgggctgcatgggctgccagctctcctgggtttgaaggatgcggtacagctgcttcagctgagcaacgatgttatccttgatgtctggggttgagatctgcaggcggacactgccactatcaaaggatcgtgtgaaatcaccagaaaacatctcgtagatcatccgagccactactggaatgacctgaaccaagatgagtttcctttccaatggtttcccatctggccattcttccccaaagcataagtagatctcaaacggtggctgcttctctatctgtcctttctggtgggcaatgagatcgctaaggaattttccagacaaaatagctggaccttcttttgtctctccctcgtgccgaattcgccaccca

SEQ ID NO: 452378 - DNA, 1281 bp, Homo Sapiens
ccatctaaaatggcaaagagaacatttacttttgatcacttaacaaggacacacccaggaaatttgattttctcaacattaggaggatgaggggagtacagatggaaaaacaaaagataaaacacaaaaggagtacataaaacattgtttagtacaaataatgaaaaatgacttcatgacattttccaataaaagttatttttacagattttgcaatgctgtaaaaaccaggtatattgaaaggggttatttataggttaaaaataaagccattgatgaggtgataatcagttttaacagagttcacgcaattatcttaggctgggaagctactgtcccaagtgacaaaatttatgttttttcacatgattacatattacatttttttgtaaaagaaatgattctgtatgtgggacttgacagctcttgagaaagtgctatacaaacaaggttatagaaatgttgaagtgattgataatcttaaaataccatacaaaaatgtgtaaacaaaaggatggtttagagttgcagggcattataaaatatgtaattttagttaagactaataataatatttttgtgcactttaaaaatggttagtgtaatcttgtaagttcaaagctggtttttcagtgagcagcaaaaggtgttagatgcatcaccacacttcacaggacctctgaaatgactgcagatgtgctgtgtaccttcttaaggggctttggctgaccttatgagagcaggagctcaccatgcttatgggtgactatatcaaaaagatctgcaataaggctcacctgggagatgctctagcattcaaattcctatactcctcttttatctacgctgtcagatgaaaactgcttactgcttttaaaagatataataaacaatataaattctgatagtaaagcactataaaaattaggtatgatatttttggcacaaagcactttttaaacccaagctcattttgcaaaatatatgtctagagtttatcatttgaaaataaaaacatatacacaatatgtaaatggttttataagtgaattaattagaatgtacattttcttaaatactgcacataccttcagcttactccagtaccagacatctgcatgcacaccccacattctacattacacagatattgcacaagtttcaatgccaaaatactaatgcagtctggcaagatttagggtttacctttcagtattattttgtgaaagtattcagattcaatactatttcgcagaaaagctacatgaccaatttcaggac

SEQ ID NO: 452379 - DNA, 1255 bp, Homo Sapiens
cagtatagcaaataataaatttattaggtgcctacaagtacaaaatactgaaagccgctgcaggggattataaagatgtgtaagagacaagccctgccctcaaagagcttacaatctaggcaattagtcacacaaataagttgtgatggcgctctaagtgacctcagcagagttcttgaaaatgttcatatccttcaaattcttctcttgtcaaattaaacagtgggaaagagaacttttgtggcattcactggtgaccctgactctgcttgcaagcatctttctgctgttgcacgttgtcgtcatcctctcagcgtcgtttcctagctggacctttgttggagagaatctccgtgcttcctggaaccttcaccagggtttcctgtttggggagtggggtggctccagttgcagtttgggccttggaatgatttgcagtccgatttttccttcagcaaatccgctcttttgattggtagttgatgctaaaatgctatgctttgcaatctgtggttttaagggtgggagtgagatgcaatattaaggaaggcagcccagacttttcccttactttaaacattttaataatagtgcacttattgattataatctgtacagatatagagcaagttataaacctcttccttttatttattttcttcacttagactgtattcacgtaaagtgtatttacaataagaagaaaaaagccttgaggtacaaaacccaaaagaatatctgaggtataaatacaagtatatcttaaataataatctttatcatgctttatctatgtttgaaagcacagtggacatgtttcttaatagaatggtatatacaacatacaatcttacaaatctggaagccatcaaaattgaatatccatgtatatcttcatgaggaacactgatatccaaaatactcaaattttaaaactctaatctgatgccctgccccaaaattcttcaaagaacctttgaaataacactgaaaatggtaactaaattataacaaaataaaaatccttcttacagctctcattcatacattattcacttttgatccatacacaataaatttactaatactgtctcttgagtcaatccttaccattacagtaaaacctgaataaagaccacccttctaaaggttctaaaaaacttcactggtttgggttggttttcttcttgttgcgttttactatgattactatttttcattaccacttaaatatatttccagggcattctaaagg

SEQ ID NO: 452380 - DNA, 1087 bp, Homo Sapiens
  misc_feature (233)..(259): n is a, c, g, or t
  misc_feature (261)..(264): n is a, c, g, or t
  misc_feature (266)..(266): n is a, c, g, or t
  misc_feature (268)..(270): n is a, c, g, or t
gcccgcctccctttaggggggggtaaatttcccccggggttttgcaaacccgttttcattaatggagggttaaccctggctttttggaaattaaatacgggccccccctatagggagaccccggcaaatttttaccccttggttcaagaaagactgggtcaggaaaccaggtatggcccatgtgccatttcattccctctttttccgccccccgacatagaaggccttgaggnnnnnnnnnnnnnnnnnnnnnnnnnnntnnnntntnnnggagagaaggataagccatttattaaccccacgcccctagcaccagctgtcaccttggacttgttggagatgcaggggctagaaaggaaatgacagagtgtacaggccccttcgaccccgtgtcccataggtggtggcccccagacacaccctctctgctggcagtgcagaacatgcatcccaataccctagaggagaaacaccaccccagggagagccctttctgctccaacctcctgggcaggtcccaggttggggcagcagccatctgcaggtgtttgtcaggcctggccacacatgcggacagaggatacgactggggtaccctagggtgtggggagggtcggcctggggtcagggggcatgaaggctgtgttccagactcctcctgcccccaatcctctgtgcccctgctggagctctcctagcttctctgatctgtgctcctgtctttggggagctgcccggtctccaggaagagccagaggttgttgcatttctccgactccactctcgtcaccccgtagctgaccacagagcctgcaaccacggccactaggaggctccactgcaaagggtatggaaacttcctctgaatgaacatctgcaagccaaaggccatgccggtgcctgtgacgaaggtgaaaacgcccttcatgaaggcgtgtgactggcatgcggcatactccccgagtcccgggtgcttggcagccacggcgtcgtccacccgggacagacccaagttcaccatggttggcagggctcggcctcgtgccgaattcgcacacccaggcctcgtacctagccgtagtttttt

SEQ ID NO: 452381 - DNA, 472 bp, Homo Sapiens
acaattatgcttaagtatttattttctaaagtaaggactaaattgtctctcttccttaagtaggaattaggcttggggaattcatgtctttaaaatgacaaagataacttaatacaaatggcacatcagcctttaaaaaggcttaatttggtttcattttgagacatcaggtaaacctgaataaacatatacagaaaagggataagctggattatgtgggatatttctaagaaatcaggggtcagcagaaagcttttctactcttagcataatatttggtattaaacttcaagttaatctaatagtatcaaaaaaactgtattcatataatagaatgtctgttaaaactgttaggtcacaaagtatgcaaagaaacagaacaggcaagttgctttttccatagtaatccaatcggatttttcttaaacaagttaatatctcacaaaatataaatatctacaatactcatgcc

SEQ ID NO: 452382 - DNA, 771 bp, Homo Sapiens; identical to SEQ ID NO: 246302
  misc_feature (158)..(239): n is a, c, g, or t

SEQ ID NO: 452383 - DNA, 1075 bp, Homo Sapiens
gccgctgcttctggcttctcttttttccttctttcttggagttttgtgtctcctcctgtccctggtatgtcctcctcagttttcaagtctgagctcaaatttcacttctcctgcgaagtatccatgattccctcagtcaaatgcagcactcctactccaaaagtcccactatgctccaaggtcacttttgctgtgttgtgactgtttgcctgcttgtctccccactagactgcaagctactcaaaaggcaatcctgctttttcatttttaagtcgtcaagacacagcactctgtgggtactcaaattaatcaatagttcatcttatttacaatctctcaagcagctcattttatgttagttgcacaatctggaggtctggagttcttccaatgcagatcttgtacgataattgtgttgatttgtctgttgctttttggattctccaagatccaggaaatgctcatgagcatgattctttgagacagtgggtatttttttctcttttggaacagttaagtgttttcttttctcttctgacctgtaagtctttatttcttcttctccctttgcagttctccattcttcttgcctactggctacaccagctgatagctcgggtattaccacccttcgactccaagctaccagatcccgctctgtggctatttcacttcttggtgcgttgtctgtgcatttgccgtacaccttcaatttgtccactacgtcttagtcctacgtttggtggtgaatgaacctctgaggtagaacttatggagcctctacttaagcggctggtattactgatacctgcttcaccagaacgtctcaggtcttgctcctgttgtagtctttgaatcatgctgtccagtgggctgatctcgtggttcgcgtgcttgacttaaaacttgattcagtcctggggaagttgctcccttataaggcataagatgctcctgcatgcaattttcacgggcagaacctaatctttgatatcttgatggatgagggttcccatcagcatcatccaaaaaagggggaggcataagattaggtgcctgcgtgtcctgtgcgcgc

SEQ ID NO: 452384 - DNA, 772 bp, Homo Sapiens
  misc_feature (48)..(72): n is a, c, g, or t
  misc_feature (203)..(216): n is a, c, g, or t
  misc_feature (229)..(229): n is a, c, g, or t
  misc_feature (345)..(346): n is a, c, g, or t
  misc_feature (659)..(659): n is a, c, g, or t
  misc_feature (661)..(661): n is a, c, g, or t
  misc_feature (744)..(744): n is a, c, g, or t
  misc_feature (750)..(750): n is a, c, g, or t
cccgttcctggagttggtttccaaaaaacggtccggggtggccccgcnnnnnnnnnnnnnnnnnnnnnnnnnaatcccacgcgccctttatttgtgtggccggaggatttttttgggggaaacggggggtggcccgcggttgcctgtccccgtgaggggggcccgggcggcaacaagaaaaaggtttgaaaaaagtttttgannnnnnnnnnnnnnccccggcaaaaanttaggagtggtggatagggatagggagagaggaatggggggagattggttattatttagggaggttggaaatggagtggagaaaggggagttggggtggggaatgggataggggtnngctgggtgttttgagctaacataaaggttttattgaataaatacatgcactgtcacgtgaaattagtttaacagaaaggaggttctctactttttaacccccatcccccaccgctgttctctatttgcagtggggggtccagctggaggtggaataaatgcggcaaccacagaaaaaacacacagctacacacaggcctgcatttggcttatgtgcctgaaaaagaagggccgacctcttgataaagaatgtctgtaaaaggaattcttaccgtgcagattatattatcatgggtaaatacagttacaagggntnacttctattttatttattttttgagacggagttcatctactgtttgcccgggatgggagtgcagtgggtgcgatctttggctncactgnaacccttccgcctccggggttt

SEQ ID NO: 452385 - DNA, 825 bp, Homo Sapiens
  misc_feature (362)..(409): n is a, c, g, or t
tcggaattcagtatgccagatgccggggagcgatagattttgatattgcgaaccctgggcttgggggtttcccttgttgatagggtcgccacataaaggggcgttgcaagaatttccattttggaatttggtgtcaaaacaggctcgggttgccccgcgggggcgtttttttatggggtggggaatccgaagcccccttgtccattggcccggttgttcctaaggaaagcaggttaggagccatgttcaatttacttagggggagccccggggccaaacggaatggtttagaaaggtttttcgagggtccgagggcggccggcatggtcggtgtggtattgggtttgtggatagggaaagcnnnnnnnnnnnnnnnnnnnnnnnnnnnnnnnnnnnnnnnnnnnnnnnnaagacgcagcaaatgcgcagcacaaaacttggtaaaaataactcactatatggtacatatacgcagatggtgtaatatatttatataataaaagatgaaaatagtcactttccataataaaaataagttctattttttgtttattttacaatatacttaatattctcttcttctttaccttcctctccagcttcatttccttcatgctgaatcaccagggggtcccacatggctgtcccaactccatcaagctggagtccgagaggtggcaggcaggcgggcaggggcttaggaacacgcgaggcagccgcactctaagtgtctctccacctcttctacaaacgaggagccgtccgtgcactggaagacgtatttccgccgcttgctgcgggtgggctggcagcactggggccccc

SEQ ID NO: 452386 - DNA, 491 bp, Homo Sapiens
tttgggattcttttgttttattgataacagaaaactgtgcataattacagatttgatgaggaatctgcaaataataaagaatgtgtctattgccagcaaaatacaattattccatgccctctcaacatacaaatatagagttcttcacaccagatcggctctggtgtaacaaagccattttagatgtttaattgtgcttctacaaaaccttcagagcatgaggtagtttcctttacctacgatattttccacatttccattattacacttttagtgagctaaaatccttttaacatagcctgcggatgatctttcacaaaagccaagcctcatttacaaagggtttatttctttctactcaatttttcttaaaaagaatttcaagaatcactacacagctaagatatctggagacttgcaatgggctgggagtctatcagtacaatagtaattgcaatcagattcagatacaagagaacaggttctaaccc

SEQ ID NO: 452387 - DNA, 495 bp, Homo Sapiens
  misc_feature (432)..(432): n is a, c, g, or t
  misc_feature (472)..(472): n is a, c, g, or t
ttttttttgagaaaattatgctttttattatagtcacataaaataaagtcagttacatcaagttgtccaaatgcattggtgaattaatgccgctaacgcttacaaatttttatacatatatctatgcatttataaatacatacatatgtaaaagatatatattttctactaaaataaagtacccaaatcttgatatatataggggcataatgggggagaaaagaatcataaggttttatcagttgtagactgtactttcagaatacaagagtctgttttagacacatttattcagctgtaatgaactttaatcacccattcttttctgaattctcctaagtgagttaatgtatccaaaatatcaaaataagtcatgtggcaaacttaatgaatcagaggctaatttttcttactgtacctggctccaaaggnctagacttcccaatggaggcatggttaagcccccatttcnttaaatttgcttggcctttttgg

SEQ ID NO: 452388 - DNA, 848 bp, Homo Sapiens; identical to SEQ ID NO: 150830
  misc_feature (12)..(12): n is a, c, g, or t
  misc_feature (58)..(58): n is a, c, g, or t
  misc_feature (76)..(76): n is a, c, g, or t
  misc_feature (151)..(151): n is a, c, g, or t

SEQ ID NO: 452389 - DNA, 789 bp, Homo Sapiens
gttcaagaggttttgggttgccccacaaagcccaagggaatggcttggagcccacccaggaaactaggaaagccggcaaggccagggaccttttagaagtgagcacaggtttacccagattttctaacttctggattccaaaacctgtgagaataaatttatgttgtttaaagccacgcagtttgtggcaatttgttatggcaaccacaggaaactaatacacttatattcaatctgtctcctagatttcgttgtttctttcattcaattttttggattcttgctttatccttattctacatttccctttcaactgttatcaaccaaattcagttactaattgataaattgactacacagcctccaaatgacagagctcacttgaagtagatcctaaaagaatgtcttataaaacctgctgttgtaacatcacttttctactaggaaaacctcaaaaatgttataggcaaaaacatggctttaataatcctcaaataagacttcagaaacatcccaaattgtattttctgctgctgaaaaagtgcatcttcaccttctttcctgctaataaatgcctgtagaccatgcatgataaaccctccatgaatgttccatccatcctcccctctcctcccaccaaaactagtttagttcaataactacttccttcatgatatcttgttctatttctccaggcaatttagtttctcctcctaagtccattttgctttaagaatcaatagcatagactacatttcattgtttcaatacataatagatctgcacccc

SEQ ID NO: 452390 - DNA, 1376 bp, Homo Sapiens
aaaggcttggttttatcccaggcgcttttttacaggaaggctgaatgggcccttcaggccagaaagggggcctttcgacgtcttttcagggataaaaggggggagcccaaagcgaaatgtagtgttttgggggtggtgcaaattaaacggggaaagggataagacctgggtaacatgtttaggggtcgttgccagtacaattggatcccgttgtgatacgtaaagggcactcaaccagggcactcttgtttctttgctttgtcattcaaccattctgtaactagatactttttggttttgggggtatttagatgcagcacggttgacatgggatccagtaattgacaccacagttgggtcagaccctgttaatggcctgttttctcctgaactgtctagacttccagcttcagtaggagttactaaactgttacttcctccctcttccaaggcagcttgtgacaattctgcctgctgtgcattggcctgcttctgacgctttagtctttgggctgaactggtcctgtaccgagaaattcgactcttcggccggggcctagaaggctttgctggaggtggcttggggactagtttttctgcagcaatatcccctgcttgggaagacctccgggtattcacaccaacactctgtggggtgcttgggatggtaacatttgaaacagagttgctaacttcagattcaggggcttcagtttttgtctcttcaccaacaggagtctctgaggtggttgtagtaatctctacatcagagttgctctgttccaagggctgatcccgccgcttctttcttttctctaagttttcaaaagcatgcatgatggcttctacctttctatcttccctggtcctcctgctatgagctaggttctcctggtcatctataacctcttctttctcttcttctggtttttcttctggattgtctacttcctcatgatcactggatacagttactttttctggaacttcttgtgattgctggtcattattctcctctgaagcctcattctgctgctccatctctagctctttccgtcgtgcttttctacgtctagtctctgctccaatggtgggtaggctttggaggaagtggtaagagtggcagtcctgtaaccttacgactcccttttttggatagggacatttcccggtttcccttggggaaggcaccgccccactcccctaattaccgttaactacacccctttatccaaatggccatggggggacctcccgcctccctcgggggatggcgcggaaaactgcacgatcacgcgcccgggcgcactccccgtacgacaatgttcaccctcccgcatcgactcctcttcgcggccgaaacccccgccgtgcgg

SEQ ID NO: 452391 - DNA, 1105 bp, Homo Sapiens
  misc_feature (286)..(349): n is a, c, g, or t
  misc_feature (457)..(616): n is a, c, g, or t
cacggaggggcccaaagagggtttgagtgtcccccttggggagtatgagggtttttcatacactccgcctgtttgtggggggggttcccgccggtcggcgggggaagtgttatagttaaattttcccaccctctatttctcttataaaattgccccgggcgcgggggcgtatattattaaaatatgagagcccgccttgggggcctccctgtgtaataaaacccactgaaaagcccccccgagaaatccccttttgggtttttttccagaaacccttcgtgtgttnnnnnnnnnnnnnnnnnnnnnnnnnnnnnnnnnnnnnnnnnnnnnnnnnnnnnnnnnnnnnnnngtgggaaacacgttttggcccctgtcttttttctctttttggggggccccgggccccaaggaaaagggtttataaaatttttttggggggcgggggggggcgcaaaannnnnnnnnnnnnnnnnnnnnnnnnnnnnnnnnnnnnnnnnnnnnnnnnnnnnnnnnnnnnnnnnnnnnnnnnnnnnnnnnnnnnnnnnnnnnnnnnnnnnnnnnnnnnnnnnnnnnnnnnnnnnnnnnnnnnnnnnnnnnnnnnnnnnnnnnnnnnnnncatgtttgttttctttattgaaagacaatacagaaatgatgaaacaatacctcaagggtcttgaacatggatcaaatgacagaagtctttaatgcaatggcacagaagcttctggcatcagcacctgcaagccctgttcagtcatcattcatgatcgccaaatactccttctggtgttcaaccagcttcaggaatacttggtatttcttatcatagtattttttatcctgtagtctcgggaacacaactttcccaactttgctcatttttgccattgcttcctgtacagaagcgaaatcccctgaggcacaggcacccagaacagcagcacccacaagaacggactccacctcttgcgacaggaccacaggcatgcgagacctcagtgcccaggtttttcaggcttctgcaagctgctacctgccatttgattcaagttcagatccactgatgtttattaagcgctctgctggccgagggaatactccc

SEQ ID NO: 452392 - DNA, 781 bp, Homo Sapiens
  misc_feature (46)..(455): n is a, c, g, or t
agtcgacggtaccggacatatgcccgggaattcggccattacggcnnnnnnnnnnnnnnnnnnnnnnnnnnnnnnnnnnnnnnnnnnnnnnnnnnnnnnnnnnnnnnnnnnnnnnnnnnnnnnnnnnnnnnnnnnnnnnnnnnnnnnnnnnnnnnnnnnnnnnnnnnnnnnnnnnnnnnnnnnnnnnnnnnnnnnnnnnnnnnnnnnnnnnnnnnnnnnnnnnnnnnnnnnnnnnnnnnnnnnnnnnnnnnnnnnnnnnnnnnnnnnnnnnnnnnnnnnnnnnnnnnnnnnnnnnnnnnnnnnnnnnnnnnnnnnnnnnnnnnnnnnnnnnnnnnnnnnnnnnnnnnnnnnnnnnnnnnnnnnnnnnnnnnnnnnnnnnnnnnnnnnnnnnnnnnnnnnnnnnnnnnnnnnnnnnnnnnnnnnnnnnnnnnnnnnnnnnnnnnnnnnnnnnnnnntacaactataaaaaaataaataaatcctccagtctggatcgtttgacgggacttcaggttctttctgaaatcgccgtgttactgttgcactgatgtccggagagacagtgacagcctccgtcagactcccgcgtgaagatgtcacaagggattggcaattgtccccagggacaaaacactgtgtcccccccagtgcagggaaccgtgataagcctttctggtttcggagcacgtaaatgcgttcctgtacagatagggggatttttgtatgtttgcctttgtatattggttgaactgttatccttatatattacccaatacttagt

SEQ ID NO: 452393 - DNA, 849 bp, Homo Sapiens
  misc_feature (207)..(207): n is a, c, g, or t
  misc_feature (211)..(211): n is a, c, g, or t
  misc_feature (259)..(259): n is a, c, g, or t
tctctcccaggaggctcggtagcacctgagagcgcatgcagatagcctgggattttgagaaaccatgaacccagacagatcacagcttggagagctcagggtcccttgctggtcctctgagagcagtgacctcccagcatcttcctccctggtccaggtactgtgaagcctcaggccccacacccaccctctgccttccatccttgncagnctgggttgcacagcagtactgcccaaatgagatgcccctgcccgggcntggtgccaacattcagaccacatgggaaggaaaaagtgttctgtttattggtctggcttgttctcctgtgcgtctctcagaatgctgctctgcccttgtgggctcaggggtcgcagtggtggtcacactggggcctgcctctgctgcccacctggaagtggcctcagtcagtcttcctgaaccctgtcagcctaaacttctggaagagggggatgaagccttggaggacgctgtggatacggtacactagtccgaagtagatgccaacggtttccagggaggcgaaggtgagcaggccgaccccaagagacatgaaccagtctgcgtaatagtgataacacaccagcaaggccccgatggcaaagcacaggaggacgaaatggaaaaactcatcatctttctttatattcagtcttcttaactgagaggcctccacttctccacttgctgggtcagagcctctccttcggagtcctgattccccagagggtaccacctctccaggagcatagtctacatcttctgtttctctgtggacttgactgttgtcctgaggctgggaggaggatgctgaagtctccatggctttt

SEQ ID NO: 452394 - DNA, 704 bp, Homo Sapiens
ttttcacgtgttacagccgtggactcctttagtacactgttgtctatcttatagttaatctagcctttcacattaagtgttttgttgtgtattttgttgaaataacttacatcgctgctctatatttctgtgtgtagtcagtctttggctctaggttacatttacttgtgttgtgaactacaataccccaaggttattaggaaaagtttgagttaacgctgtttttgaattcagtcagtgaattcagaataagtacattcatgtataacatagggacagttctgctgctgttatttatatgcaattcttctggtaaatagcaatagaataaaacatatttcaatgtttgtgtataggttttatattattattccactaggaatggcataagaatttatagataaattcttgtaacattaaaggattaaaatgtttttacattgtttttgggtgtctccttcttgtgcccatatctgataagctttatggattattgcatttaattccttttatttggagggttttacttccttgttaacatataaagttataaatgaaggacaaggaggagatggaaaatgtgtatttattgttaattcttaaaatagtgtgtaaataaaataacatcagtgtgctttaaagaaatgtgtatgtagtgccttaatttaaattaaatattttacctcctagctgagttcagataa

SEQ ID NO: 452395 - DNA, 1485 bp, Homo Sapiens
  misc_feature (127)..(127): n is a, c, g, or t
  misc_feature (258)..(258): n is a, c, g, or t
  misc_feature (755)..(763): n is a, c, g, or t
  misc_feature (1040)..(1040): n is a, c, g, or t
gtgcttaatggtttggagggaatccatttagcctgttgggggtcccaggacatgctacttgggtacccaggactgaccttgtttggagggcccagtttgagttgcagggttttcctgttcccccagnctgtggtttaactgttgattgacctgggaatgagccctggggtttacctgcacaccctgagaaaaaacatgttttacccctagagacttactgtcaacattagaatttcatggcattatccaaaaacacgnccagggcggtgctatgaaaggaggcaaacttgacacatgattggatggggaggccggcagagttggtggtggtggagaccccgatggcctaatgtctgaattatcagatttctcattagcaagtaaacttgagagaactggagttgatccagttatgccacaagagtttattacatcttgagcaggtagttgagtggatgcctgaatgacatttgcactggggccagcagtttctcgattggttcttttctcaaatagatctggatcacaaggatgcaaagaagtcttttctccatcatttaggtctgagtgagcagaagcctgtgagcaaggagtgtcaacattatctttattctcatcatttttttcagtttcacatttggattccaccttagaatttggagacagtacttccgtttttacctcattggtaacagtggattttttctgtggtgaatgtttatcagagagaaccagagttttgttttcttgttccnnnnnnnnnggttcaacagatacacactgattatctaacttatcatcaattggaaggtctagttcctcattaaacatgcttttcttatctcccatgtcaagttctggatctgtatatgcaatgatatcaaactctcctgaccttaagaggtcatccaggttgggatcattagtttccaaattatctaaagtatccaattcaactaccttgccatcctctgtatctaaatttaagttttcaagatcttcatcatctaagtctttgacttcaaccccctcaaggtctntaacatccagttccttcacagaagggtcatcagaatcaagtttttcctctagaccatcagaaggctgggtggttatctgtaaattatcagacgttgtttcagacggtacagatgttgacaaaggagcttctgaaaattcaccacctagtggatggttcagagtcctcatgaccatagaagatgaatggacagaatgaccttgctcttgttgagatggtggcacttgttccaaatctgggtgcacaggtagctgattaggtagaccctggggaggtcgtcgcatggggtctgtgtgtctagggcccggaaagtctggccggggaatgaagtttccatgtctcagattagaagatgcctctacaacgctgccaggtggagcactgaaaggcagccgttgccttccgtcaggagccctatgtctcagttcaatatatgcttggccccc

SEQ ID NO: 452396 - DNA, 377 bp, Homo Sapiens
ttattattagatatcacaaattgtcaggtctatctttatttgaaggtagaggtagcctcaagcactttagttgggtttgttaaacaagcaagcaaagcggaaactacagctaagcatcttctgaatgagatcatcatcactatagaagaacctatgtcaaagatcttcaactcaagaaggaacagtgaggattagttcctttattgtcagcgtcagaactgtggcttggccagcctcttctcttaggtaaggcatgagcaccctaggcttcttctgtgtatctcttgctgcttaaatgtgtctccattaggggtgtatatccttttcgaagtcttctatattgaagaaaagccaacagcacaaaaagagttcttccc

SEQ ID NO: 452397 - DNA, 795 bp, Homo Sapiens
tggtataccagtaggctaccattaaatcgcatggaaattaattcatcacgagcatcctgctgggcacttggaacctgttccttgcaatgtatcagtgccacttgaaatgtttggataatatcgtaaccttgctgtcttgggtagattcatccaaagaatttatggaaccttgtaaaggtgagaaatatgaatctgctgcattcttcatcagtttcctggattaacagctcaaaatcagtgaaccagttcaagggagtcgtgcctggatgacctcaagtcattgcatatttgttgaagcagaatgggccagtgactacaccatagtaattaaaagacacaggagctgtggcttttaatgggttcctatgaaaccaatgggtcattttctccagatgttttcaaatttctcagagtcggttcagcagttcttctaagggaagaagggcaatatatcggagtccacaagcgagaaaaagagggagtcggagaaccgagactacagaaccagggtgacggaaaaccaggacggcgccaagccggagtcaacgtgacccggcggccatgacagctaccgaggcggtagtgcgcgcagctcaggggcgggtattgccgcggcgttgcagtcccctcaaaacgcttcgttcatcatccctttctaacttctccctcggccttccttttgagctatggtctttttcccagacaggaagagaagagttgcccctacctccggagccgagggagaatgccgcaatagcgatggcggccctcggcgcagtggggcggccccccgct

SEQ ID NO: 452398 - DNA, 926 bp, Homo Sapiens
ggtaaaacattatcattgaaggttctaactccatcccgccaaaacaatccttacagttcataaaagaatccaagagagaaatagaacagtaccagcttcaaaaatatttatccaaaaagtaaggcatcaactttacaaaaaaataattgaaggaggggaggaagttggaggaatgagaaaagagggaataagaagatggtcccctgaccctccaggggccaaccccagcctgccgggcatctactctgaaggggtcacaactcagaccaaacttcgcatctcaccaactatggggtgggcaagctgggcggggaagctgggagacaccatccaggccaggaagggctcctgtgtattccagtttaagcagacagaattcggggtgggggagagaatcccgatttgtgataaaaggatcctaagtccttagtgcagcaggagtggctgggaaggttgcagggcccacagcaaactccatagccttcctttgaagcccagggaaaggtcagaggctgccagccacagaggagggccttttttgaggatctccagagtgggcgccctgctgccactaccctttcaccctgccccaagacagcatgacactgagacctgcgaggagtgggggattattggagttggggatggatgggaaaggaactgggcttcagccaatgctctcctcagtctcccagggtatggaatgggcacctctagggagggggaaagcacccttcctcccagggaaggcatttatatcagatccgtcctgagggttagaaataggggagtatttttaggccaagttcttggatgggaggtgacttaaggctgatctggctctgatctcaggcctgaagggcttggggatccttcgtacctggtcccaagccaaggcccagagaggagaagtgcacgtggggcgg

SEQ ID NO: 452399 - DNA, 1233 bp, Homo Sapiens
ctgggaaaggcttgtgaacggcgtttctgcgtctgccgtggacagcgaagctgctgcggttcctgagccggaggagtgcctgtgaagaaaacggggtattgccctgaggcttatattctgcctcagttgtcttttcttgaaatattataaatcagaatgtctgcacagtcagtggaagaagattcaatacttatcatcccaactccagatgaagaggaaaaaattctgagagtgaagttggaggaggatcctgatggcgaagagggatcaagtatcccctggaaccatctcccagacccagagattttccgacagcgattcaggcagtttggataccaggattcacctgggccccgtgaggctgtgagccagctccgagaactttgccgtctgtggctcaggccagagacgcacacaaaagaacaaatcttggagctggtagtgctggagcagtttgttgccatcctacccaaagagctacagacttgggttcgagatcatcatccagagaatggagaggaggcagtgacagtgctggaggatttggagagtgaacttgatgaccctggacaaccggtttctctcccttcgacgaaaacgggaagtactagtaagaagacatggtatcttcaagaagaagctcagggattaccaagttctgagcttgatgctgtggagaaccagctcaagtgggcatcctgggagctccattccctaaggcactgtgatgatgatggtaggactgaaaatggagcactagctccaaagcaggagcttccttcagcattagaatcccatgaagttcctggcactctcagtatgggtgttcctcaaattttttaatatggagaaacctgttttcccaagggcaggtttgaaagaaaagaggaatcccctctcgaaagaaaccacatatatgtgatgaatgtggaaaacacttcagtcagggctcagcccttattcttcatcaaagaattcacagtggggagaaaccttatggatgtgttgagtgtgggaaagcattcagccgaagttccattcttgtgcaacaccagagagtccacactggagaaaaaccttacaaatgtcttgaatgtgggaaagcctttagccagaattcggggcttattaatcatcagagaatccatacctggggagaaaccttatgaactgcgttcagagtgggaaatcgtatagtcaaagctcaaccctccgggatccttctagagtcgt

SEQ ID NO: 452400 - DNA, 429 bp, Homo Sapiens
  misc_feature (221)..(221): n is a, c, g, or t
  misc_feature (393)..(393): n is a, c, g, or t
  misc_feature (419)..(419): n is a, c, g, or t
gatttataaataagtttatttataatgatatttacataataaaaacaaaacacatggaactcacaagttatacaaagaaactgatgtataataaaaacagcaatatagactgacaggcagaaatttaaagaaagatttaataaagagttaaatatcaaatagacaacttcacttctaaatttcactttgtcactcacactgaattggaattgaacaatggnctctctcttcaggcggtcctgtactgggaaattctgggaaactgggtaaaatatattttgataaggagtttcaagttaatgacctatttccatggcaggtacctaatggctggcctttaggatggaggtcacattcagttctggctttggaaatggaaataggcttttaggnaattctgtttctgccgggggttaggnaaatgttcac

SEQ ID NO: 452401 - DNA, 1242 bp, Homo Sapiens
  misc_feature (1225)..(1225): n is a, c, g, or t
tttttttatgatcacaaatatttttattaagcccaagacataatagcgcattacaggaagaacccaactacatttcattagagataaaagtatggatataacaacaacaacaataacaacaaaaaaagaaacagcctatcattgaaaatacattaatacagaaaacatgagatatccattatgagattttaaaaggtaaaattcctaacaatttgaataactgatttgggtatagtgatgtacaaggaggtagtattaacacatgaagactccttttagccctgtaatggtaaaatatattcagtctgttcaatataccatcaagactggggttaagccgtgagttctcagtctttaatatctaaataatcactgtaagagttttatttgccttccaaatccagagggtcgtactacctagcatcttagcaagttaggatgctttgaaaagcatgatttccaaaaattaacaaatctttgatttataaataagtttatttataatgatatttacataataaaaacaaaacacatggaactcacaagttatacaaagaaactgatgtataataaaaacagcaatatagactgacaggcagaaatttaaagaaagatttaataaagagttaaatatcaaatagacaacttcacttctaaatttcactttgtcactcacactgaattggaattgaacaatggctctctcttcaggcggtcctgtactggaaattctggaaactggtaaaatatattttgataagagtttcaagttaatgacctatttccatgcagtacctaatgctgcctttagatgaagtcacattcagtctgctttgaagtgaaatagctttaagtaatctgttctgccaggctagaaaaatgtcaccaacattttgctgatgcatggagatgtggcagtaataaactactatttagagaggaagagaattggagcagaaagtgactgggcaacagtttcaagagaagcaaaagccgggagagggaaatcaatgaaaacatgcacaagattaggcagagtaatatgcacaattagtgcagttggaaaatgaacagaaggaattaatccatggagcaaggtaggggcttctttagttactattcactggaaaacaacttagtgcctagccaaataaatttgtttcagcagaagtacttgagaggacctgggggatgttagtatatggaatgccacctttaaattcanggttgagttcttgctga

SEQ ID NO: 452402 - DNA, 1919 bp, Homo Sapiens
  misc_feature (1541)..(1567): n is a, c, g, or t
  misc_feature (1586)..(1631): n is a, c, g, or t
taaagggaataagcttgcggccgcgtccgtctgcaccgtgagcggcgcgaaggcctccttgcccgggagcgcgcgcgcctcttccaccttggccggcgctgtgccctcgcgaaccgggctcctgcgctcctccgcgcccaggccgcgagtgctggacgagatggtggcggggctatggcgtgagtcgggcgacgctttgtccagccgcccgctgtcccggggccgctcagcagcgaaaaggtgagccttgaccgcggggctgcccttgtcacggcagggctcctccgacgtggtggtggagatcttggccgcgtcgcaggcctcggggccatgctcctctttgctctcggcctcggcgtcgctctcaccctcgctgggacataaatctttgaggttcgatgtccctacagtggaggcggctggagaagaagcctgggcgaagcagttgaaagctgcttgttcactggaggactcatcagaggtcccattctcctttttgtgtctttcatcaaacaccctcatggactgcagggtgagctgttttcttttttctcttcggccatttccagtgtcccggaaaccttttgcaaaagggttgttgtctatttttaactgggttatcttatcattctggtatgcagtcacagcgatgaattcagtttcggggaacaagtatgtccgaaatgtactataagggagtttcaagatgtcattggctcttacaatgtggaaccggggctggtatttgtgcatggagttcaatatagtctgagtaccaaaactataattcccctgccacgtagcgtgatcacttgggaaggccaaagtaaatccatgtttgtctgaaatgttgttggtgagtttcagtttgtggaaagtgacgactttggacatccactgttccccagtagcggggctgtccgggtgaatgtacatcctctttggcatttcggggtcggccttaccagccaccatccaccgagaattgtgaaatttataacgacagtcatcagcagctataatgtccatcaataaaatgtatttggcttttttatccagcccagaacatctcactttaaatggaggaaacattcgccttccccgacttggtaatgaccatctcggtgccccgcttgtgaaactgatcccaaagttctttagcctccaggtgcaccttgggggtcgtcttccacttctttcttcgggctccatggtcttcaaaggcttcagatgcgcctggggcccccgggaggagaacgggatgccggtctcggccgcccccaccaattgatccatgatcggcttggccagggcgcccggcagcgagagcgccgccgcgccgttgggaggcagcgtcagcgcggggaagaacggcggctggtgacccagcaccgcgctcatggcgaagtccggcgcccggtgaggtaggaacggatggtaggccatgcttgtcccaggaatgaccggatctctcatggagaggctcatccactccaggcggggcgctgggctccagccggggacaagtccgcagctgctgnnnnnnnnnnnnnnnnnnnnnnnnnnnaacagcagcacataattcnnnnnnnnnnnnnnnnnnnnnnnnnnnnnnnnnnnnnnnnnnnnnnaggcagaaatcacaactaatgcacttcaaagggaggaggggaagtgtcttttggagaatgggaggccgcttttaaagagggcaaggcgaaaaatcagcaaacatagtcgcgcgggtgaccgtccttgtgccttgcgtttttaaaaagccgctcctgaacgtcggtttcagaagcgagaggagcgagcagggtctcgactcgcgcccgagccctgccgctgagctcgaaatagacactccagccctgcgtcccaggaatctctctccagcccctcggtcttttgtgcaa

SEQ ID NO: 452403 - DNA, 835 bp, Homo Sapiens
aattttttgctttttcataagtgcaactttttaataaaaatttacatctagataaacaatcttcagatttttgaaactttaataagattttaaaaacatcatgactttgaactgaaaaacatacacgtttagcacacaaatattgtaatatgaatgaactccaactccatttgaaaacatgtgaatcaaagtacagttttagaagttagtaattcacatttaagcaagttagcgccttgctgaatacagcctttgtaaaaaagagacttagtgcatattttaatggtacactgtggttttgtaccatttggttgagtttttcgctttattaaacaagttcttgaaagttggtagataaaggctaacttcctatgacgtgaaatttccaatggtaacagttacattttgtaacagaacactttctatagatttcttttcctagcttaaaattttaaaagcaatcatttgtaaggattgcatcaacatcaatttagcagaggaagatcaaactttattgaaactgcttgcatacaaaatatattgcactataaccaaacaaatgtcaacataaaatccaatctgttgtcgctaatatgtacagagaatattgcccaagagcagttacattacaaggtcattctaccttggttaattatctacagtattttaaaaccaaacagcttacagatgatgtgtgcaaggtaccaatttctgttttcaaatactatacattcccagaataaataactagaaatcaacattaatgtttggcaatactttttaaaagactttttaatatttgtgaaatcatgtgcagtttgttgccattttatat

SEQ ID NO: 452404 - DNA, 1116 bp, Homo Sapiens
  misc_feature (425)..(436): n is a, c, g, or t
  misc_feature (741)..(753): n is a, c, g, or t
tcctgagatttaaaaaaaatttttaaaagagtggatccatttaaataaatttcctaaaagggtcttttccaagcctcctaacaaagtcactaacaaatgcattattttcctacagaattagatgttagtagtacagtactgcatattcagggaaaaagtgtgaggaattgatttcaaaatagttcgttcttgtgtttgacctaagaatgattgtcgcatgaagtgtttgtttttacagtttagcatatataaacaaacatgataggattccttaagatgttaccacccagggggccacaagccagcctgctgtctcaggaagctgtagaaggagtgtttgtcaatttcttgtcactggtttgctgacttactgaggattaattgttgccttacaatgttactgaaataaactgtttaatataccnnnnnnnnnnnnttagaagaacggccaccaaaaagaaaatgaaaatggtcatacactgcttccaaaaaaaatcctgcaaaagaccaaagccttgaattcccaccaataaaaacccccccgggggtaacccccagtgttccggaacaaacccaccatgaaagttttgggggcccctttttggtattaaaaaaattttgttctccaactttggtctgggggggtcgggcttccccccctcgcacagggaaacctcttctcaaaatttctgtttccaaaattaaatatcaccggcttcttgaaaaaaaggtgggaaggtnnnnnnnnnnnnngttaaatataatcgcaccccgcgccatactaccaaccggttccctccagaaacacttttaggaggggggtcggccgtaagaggaatttttttcccccgtggcgcccaatacccacggaggggccccaccccccacggcgcgccctcaaatttatgagaaaatagctctccacacaccccacaccttggactggtaaaccattccccgccgcggcgtggatgcgattatgttacacacgacaatatacccctcccctcatcacgatacacccccctctttcacacgggtaattattggccacccagccctttttgcctctctcccacaggcgcggcccccacaaacccactgtttgcccatcaa

SEQ ID NO: 452405 - DNA, 1348 bp, Homo Sapiens
tgtattgcgtccgccggcccgattttctccactccacttggagcgcaatagttattattgtcggctcatagtgtggagaccacatcagaggtggtcgagagtcaccgctcgttgcgcgtgtttacacgagttatccgggtaatggcgcaacctggtgagataggggaattgtggaacgttctacggggaggatagtgggtgctaaagtaatatgggacagcccatgggttgccgtaaaagaggttggccatagcggcggagtgacaggaaattttaatagttgaagggctccagctagggggatccccgggggggttaaaaacccctgtggatggaccctcgagaacatcccgtgttgggatttggtttagagaacccgtgggttatggctcccggggggtttttttattggggtgaggatgccaaagccgctagttcagggccaaagggtttcgttagggagcgaagttatgggcccatgttcaactttaccataggagggcccgacccgggcaaacggaaatggtttaggaaagattcttggagggcggaaggcgggcaaacaggaatgggggaataatgtaggggtatgggggttagattgggcagaggcacaatcattttagattaaaaaaaattgaacaaagagaccctcttgcgagaggtgagatgaggccctgccatgcaaaggagtcccagcagaggaggaagaattccatcctggagttcaagtttctgtgcagagacaggacctggggacagagaacggtcctccacccaatttcagctggtctgtcctcatcagctttgggctgagcctggggtgatgagaggtggagtctcccctggatggtgaccggacttctggccaaacttgcatttgcattttgcactcatgacgatgatgatgcccatggcgcacagaaccccagcgcagatgagcccgccaacctggaggctgtgccagtcatagtagaaaggactgtttttatcttctaggtcattggcgtccaggacaggaaagcctgccaggaacacaagcaggcccagggtcaccttctgcatgtcagagcgctggcctgtgtggttcaccaggctgagcagaggttccgggagaaatcgggctgccaggcggagtcctgcgtttatccgaagctgccacgccctaagcaaacctcacttcttttccttagatgatgtgttttgcctggtggaaggattgctggcagttgtggagaacttaaagtccccttccaggccacatcttgccgctggtacaatttcaggatcagcagaagatgctagcgtccccggccgtaatgccactctgggtgataccagtgcttcc

SEQ ID NO: 452406 - DNA, 830 bp, Homo Sapiens
  misc_feature (43)..(57): n is a, c, g, or t
  misc_feature (63)..(63): n is a, c, g, or t
  misc_feature (77)..(77): n is a, c, g, or t
  misc_feature (81)..(121): n is a, c, g, or t
  misc_feature (125)..(125): n is a, c, g, or t
  misc_feature (129)..(129): n is a, c, g, or t
  misc_feature (133)..(134): n is a, c, g, or t
  misc_feature (150)..(230): n is a, c, g, or t
  misc_feature (233)..(237): n is a, c, g, or t
gccccccgcgccacaaaaaagaggttgtataaaaatttttttnnnnnnnnnnnnnnncgccgncaatttttggaaanagtnnnnnnnnnnnnnnnnnnnnnnnnnnnnnnnnnnnnnnnnntaanttgngttnngggggatggtttaagnnnnnnnnnnnnnnnnnnnnnnnnnnnnnnnnnnnnnnnnnnnnnnnnnnnnnnnnnnnnnnnnnnnnnnnnnnnnnnnnnggnnnnnggcagaggcacaatcattttagattaaaaaaaattgaacaaagagaccctcttgcgagaggtgagatgaggccctgccatgcaaaggagtcccagcagaggaggaagaattccatcctggagttcaagtttctgtgcagagacaggacctggggacagagaacggtcctccacccaatttcagctggtctgtcctcatcagctttgggctgagcctggggtgatgagaggtggagtctcccctggatggtgaccggacttctggccaaacttgcatttgcattttgcacctgttggggagagctgagtggtcaggggaggggagccccagccccggcccgcctgctcccccgagctcctccactcactcatgacgatgatgatgcccatggcgcacagaaccccagcgcagatgagcccgccaacctggaggctgtgccagtcatagtagaaaggactgtttttatcttctaggtcattggcgtccaggacaggaaagcctgccaggaacacaagcaggcccagggtcaccttctgcatgtcagagcgctggcctgtgtggttcaccctcgtctcggaatcgccacccaggcc

SEQ ID NO: 452407 - DNA, 873 bp, Homo Sapiens
catcatcattcctggaaatttcttcaccagaaggaaccccactgtctggaaagtagtagaaggcatcagggttgtccaggaaagggtttttcagcagttcccatccactgcattcttggacatgtctccagcaggctgcagatacccctcattgagcagcgatgaagcaatcatgaggccttcctggcgattcctaacagactggttggataccagccaatcaatgacgcagttacctgtgaagcagtgattaaaaatcttcttgtccttctctagattcagttcttttattcctttttcagtgtctttcatggacaaatataaggcacctaagtcaatggtttctggcagtcgaatggacctcctggtagatttcctggcaaatttctggcctccttcaatgcatttaatggccttcttgatatcccgaacccaggcatctctctcctccaggaaggctgcctggaagaagtggtcctgctgtttggtcgtagtgatcttaaacacaaacatccttttgccaaagtcttgacaagggctagtcagagtgctccctttcagcgggatcattcctttggggctgttgtcacttttcttcttatagaattcaattccatcttctaacaatacaacccacatgggtttccacgtattgaacacgctccccttcttcacaaggtagccctctctgatccgctttggttccatgctggctggacaggcagatgcaaaggtcactctcaggcaactcctctcagcagctgggcctcctctgcatgctgaggtggctgtgggccgccttttctacagcaggtcgctttcacaatttcccttctgctggcggtcgcatgatcacatcctcttcccctcccc

SEQ ID NO: 452408 - DNA, 498 bp, Homo Sapiens
  misc_feature (19)..(19): n is a, c, g, or t
  misc_feature (62)..(62): n is a, c, g, or t
ggccccggcaacacacacnccccgggaaaaacgtgaaatataaaacggccattaaggcgggncccatttaacccccaggacccaaaaggaagcccaagtctgccaaagaacaaaccaacccaccccaatattacctactcatttccataacagatgcttttggtctttatgtgaactgcaacccatatacattagcactgtaattttgtgcagtcttggcaatttaaaacagtctacagtgaaatttcacgtaagacacaaaacagattaactaacatctctaaaagaaatatcacccttggtgttaattcaaatatatcatgcttcctcaaatttgctggagaaatatttataagtttatatacattaataaactgctgtgaaatttcttcagtctttgtatttactcaaacccttggagtttcttcatcttgtttaaattttttcctggatgaaggcgtgctgtagggcctggttgatgctaattcgtttagctgg

SEQ ID NO: 452409 - DNA, 1232 bp, Homo Sapiens
  misc_feature (786)..(873): n is a, c, g, or t
ccttgctgatttatccagaaagcgatccctttgaccgccctggggatagacccgacctatccgcatccctaacgatgcgttaggatgggaggatggtggaacccgcagggacgagaaggagactgggcacatcactaggatcccagcccctgccctgccccccgggacacattggcacttgggcattctcacgggtcacggcaaggccagcttgaccaagaggtcaaaggcgactggcgtcccactgaccgctgggggtttggcctcaaacttcaggtgaacccacaattccggaatagcgggaccggcacccgggcccttctcacgtggcagcaccggcaaggggctgggggaagagcccacgccagcctacgtcacgcaggaagggagccagtggccaccccaaacacacctctcctcctcacacctggcctacgtccaactctccacggctctgcccagaaggctgcacgtacaacacacacagaggcgggcatttccctgacgactcgtgtgtgccgtgggggagcggtagatggcccagccccaagtgttccgatcttcctgcccaaacatattctgtgacggaaagcctatgttgacctcgtccggcactcaaggcgtgggcagcggcctaacgtctgctgcgggaacacagtcgcgttgaatgctattctcaagacagacaaaacagtgggaagacactacgccaagctgctaactccctggccattgccggactctttcacccccatggactttccgctggcattttaaacaacatannnnnnnnnnnnnnnnnnnnnnnnnnnnnnnnnnnnnnnnnnnnnnnnnnnnnnnnnnnnnnnnnnnnnnnnnnnnnnnnnnnnnnnngtgccacgttcccacccaacgctctctcgcccacttctactgggggcccacttcctctcctgctctctctgtctcaacgtgattgactttcttgtgctgcccaggacttcttgcccacgtgcggccttcaaaacggtaagagctgccactgaacgtgtgaagacttggtgcagataggctgagaggcggcgggagagatgcccatgaactcaagtacccggacacgccctccacttctaccaccactgagtaacaccgccgcccacgggaccgctctctgaggtcccccaagctcaaggtggaggcaagtcccagtgtggagagagccagtgtggagagagccagtgtagagagggtcc

SEQ ID NO: 452410 - DNA, 516 bp, Homo Sapiens
  misc_feature (178)..(248): n is a, c, g, or t
gcactcaaggcgtgggcagcggcctaacgtctgctgcgggaacacagtcgcgttgaatgctattctcaagacagaccaaacagtgggaagacactacgccaagctgctaactccctggccattgccggactctttcacccccatggactttccgctggcattttaaacaacatagttnnnnnnnnnnnnnnnnnnnnnnnnnnnnnnnnnnnnnnnnnnnnnnnnnnnnnnnnnnnnnnnnnnnnnnncgcggaatgcctacttcggggctaccctttggctagggaagcccaaccttgcaacctctgccccgtgacctcgcgagcccagcacgccgctcaagcttaattcaacccattcttggagctcgtgctctcgctgccccttgttcccggttctctttgaacccgctttcagcccccgagccagaccccaggttagatgaacgcccacatgcgcagcgcagccctcctcgccccttccacagcactcagcccggagcagtcaacattaggc

SEQ ID NO: 452411 - DNA, 469 bp, Homo Sapiens
gtaaatatattcatttattcatatatatattcactttacaatactgcattttaacatacataaaaatctaaagcgtttttaagaatttttcaaagtcctgtactgatgctttggcaatctcttcacaaaatatttcatcaggaatagatactagtttgtccaaagagatgtagttaggttttgctggatcatactgtgctcttcctaaataggtaagaaacaagtgtctttctttgaccttaaacagccttgtattaaatacctgtgggaacttgacaatgatgtggtggggaatgctcatcacattgtgcacaaaatcaaacgtctcggtaagtttcattttatttgcagttaacatctttgggattctggtgatcatatgttgaatttcgttatgtttaaaaccaagttcaagacgataaaccttcatattttccttcacgggttccagacttccagttagcagcct

SEQ ID NO: 452412 - DNA, 856 bp, Homo Sapiens
  misc_feature (55)..(55): n is a, c, g, or t
tttgtctttttaaaaattttatttagaagcctacttgtagaagttagcataattntacagattattagaaaaattcttttctttctgcaaacagttataataggttaggaataatagattagaaatgtactacattacaaaacagtggcctataactatctgtacatttactgtgcaccttaaggaaaagaatttgacagtgtgctgtacttacactgcaggtaacatatttttattctatcacacaaaactgaccagtggtagtgcttgaatttatgaatggccattaaacagaacatttaaactcagatgtatatttagcatgctaaaaagtgaaaaaaatttcaactgaagttctgtggctcatcagttcaaatgtttcatggcatttttttctttaagtgaaaaattttgatactgtaaaacagttttacataataaatgcaaaaagataacattttctaaatttttagaaagaatattcacattcattttgtcatgggtttcacgtggctcttctaaatatattaatcatattaataagacactggtcctatacaatttcaacagtccatcttcaattaaaaactaacaaaaataaacagtatgtaaagagtaacaaaaagtaaattaaatatactaaactcacacaacaggtagaataaaatgaaaccaaattacataatggcaggttatacattttaaagaatctctttccagttagtcaaataagatagaaattgaaatgtaaacttactgatttctgtgggattttccccactggttcaaattggaaaatttgatataaatctaatattttatttctgtacatttaatatgattcaatataatctcc

SEQ ID NO: 452413 - DNA, 357 bp, Homo Sapiens
tttatgaacaggaagaattctttattcagatttaatttctcttacattctcaaagaagccaaggaaatccaggtatgcatatatctttaaaaattttacagaatagactgaggtataaggcaagaattgactatctcttaatttctttagttctttatctcatctattttactgctcatttttcacatttctaagtacttattccactgctgttattatgtgccaattcacaaaatggaatggatttcccaatctgaataaaacacaggactcttacccttaaactatatacacagcactatgtgtgactgctgtcattcataaacttggatgctgaagttcattcaaccatccctt

SEQ ID NO: 452414 - DNA, 282 bp, Homo Sapiens
ggagatccctcaatgtactgatttcccccttgtgttaactataccgatattatttttttagcaattgaaatgcacttttttatttcaactcaatcatgattttaagtataaaaaatttatagattgttaaaactacttttttgtgtatttttaaccactcaatgtagcattgtatattttattcttgtgagactctggtacaggtgtgccgcctaatgatttttctgagatgctgggcctttggatgtgtacggtaaccaacttaatgctaatgttcaaagt

SEQ ID NO: 452415 - DNA, 1069 bp, Homo Sapiens; identical to SEQ ID NO: 138527

SEQ ID NO: 452416 - DNA, 857 bp, Homo Sapiens
  misc_feature (819)..(819): n is a, c, g, or t
gggggcgacggctgatgacgcaagagcccgctctcacttttcagcggcaggcgaagggggctgaggaaaggaggtgggtctaggcaggggaaattggggtgccaccagacggagacagcttggactaccaggcttttaagaactgtgctattgttgacttcttcacagaatcaagcactcttttggaagagggtaatctctctccaaaaactgaggacacttaccttccccatatattgagtccagctgtgtttggtggcccaggtactaatttcaagatgccaggacgtgtccagttcaaattcaggttcaactggtttcatctccttcagtggtgtagagtctgctctctcctccttgaaaaacttccaagcctgtatcaactctggtatggacacggcttctagtgttgctttggatcttgtggaaagtcagactgaagtgagtagtgaatatagtatggacaaggcaatggttgaatttgctacattggatcggcaactaaaccattatgtagaggctgttcaatctacaataaatcatgtgaaagaagaacgtccagaaaaaataccagatttaaaattattggtagagaagaaatttttggctttacagagcaagaattctgatgcagactttcaaaataatgaaaaatttgtacagtttaaacaacagctgaaagaactaaagaagcaaggtggtcttcaagctgacagagaagctgacggaacagaaggagtggatgaagatataattgtgacccaagtcagaccaacttcacctgccccattacaaagggaggaatggagaagccagtgnaaaataaagggtgtggccacacctatgaagaggacgcc

SEQ ID NO: 452417 - DNA, 1030 bp, Homo Sapiens
  misc_feature (705)..(759): n is a, c, g, or t
  misc_feature (991)..(991): n is a, c, g, or t
ttttaagttcaccgtaagtgtaattgacagatgacataaatatattgattagaaaataaaatatgattttccaaccattcctagacagtgttctaacatgattaactttaattgccagaagtaaaagcttttattttacatgattacacttcattgtactagaacatatcacaatctctatttccttgagacaaacagtttccctaatatggtattataaaactgtttaaacatataaaaatgttgtgggaagtgcatatttatagtccaaccacttagattgtacaattatcattttgttatatttgctttactacatatctatcactctatccaccattctatccaattatcaactcaccgtttcttatttatgtcaaagtatatatttttcttacatacttaacatatgtagcattattgttcagtatttgtgtacagctcattttttttaagttactaaggttttttattaacacctcagagtagaggttatgaaaggaccctgaattgttccaggaattttcttcagtgagcatttgtgaagactcggggatcaaggttgggttaaactttgtgatgggtccattggcagtctagtcacaagcacctcctcgatccttaggtcccagcggaaaatgatgccagactcttaaactgccacaaggtagcctggaaagaactctacagtccagaaagagctgnnnnnnnnnnnnnnnnnnnnnnnnnnnnnnnnnnnnnnnnnnnnnnnnnnnnnnngtttagtcctgccaatcacagatgaagggataagtaactgtggtgacctacacagagaatagcttaggccgaaaatcgaatggattcttctttggagcaactggtactgggagacgtgaatgacgtcagagcggtcgtatggatgtgttcggaccgaatttgcagaaccaggatctgcatggcgagaaaagttcgaagagcctaaatagtagatattgaggaaggctggagntggagtgcggagacgagcacgcgggcgccggtctgtact

SEQ ID NO: 452418 - DNA, 886 bp, Homo Sapiens
  misc_feature (171)..(179): n is a, c, g, or t
  misc_feature (306)..(322): n is a, c, g, or t
  misc_feature (331)..(358): n is a, c, g, or t
  misc_feature (363)..(449): n is a, c, g, or t
  misc_feature (813)..(813): n is a, c, g, or t
  misc_feature (822)..(822): n is a, c, g, or t
tttcttccaataaaaaaggccccgggcggggggggtaaattttgtatatatggagggctccccttggggcctccctcttgagatgaagattccccaataaaaacccctccaggaaaacccccacccgggaaattgtttttaaaaaccctttggggttccccccccgcgggnnnnnnnnnattggtggggaattcccaacgccctatttcttgggccccggtttttcttggggaaaccactttgggcccgtttttctttccttttgggggcccccgccccacaaggaatggttttaaaaattttttnnnnnnnnnnnnnnnnncgccaaagnnnnnnnnnnnnnnnnnnnnnnnnnnnnggggnnnnnnnnnnnnnnnnnnnnnnnnnnnnnnnnnnnnnnnnnnnnnnnnnnnnnnnnnnnnnnnnnnnnnnnnnnnnnnnnnnnnnnngtgctatgcaaggttttatttacaacttagatgactctatgattgctcagaatctgacacagactaataagtttcattgtctgaaaatactcataaaatacctcatctccaaaataattcaaatacataattaaatgaacgtttttaaaatgagagttttcagaaaggaaaattaaacacattttagtaaatatatgttttatttgtcaagagtaaatgtcagttttatttagaatattcaagtacaaaaaatgaaaatgtatatatctatgactgttaagaaatgttagaaatcattaaaatgttctgagaataccagtaaggcactgaatgcaaataccacctgaaatatgaattatgtgcntttttaaanccttaaatattcagatggtccataggtaatttcctaaaaagtattttaataaaatgattcaacc

SEQ ID NO: 452419 - DNA, 2020 bp, Homo Sapiens
  misc_feature (1881)..(1941): n is a, c, g, or t
  misc_feature (1946)..(1962): n is a, c, g, or t
cacagcactagagaccctgttaaataggggatatgagtcagaatggcttattcacagatggggtcgagatttagtggttggaacacagacaccacagtgagctcctttgcaaagtggcaaacataattttgctttctgccttcaaaaacatatatccatcgcgtttaggcttcatgatactgctcctgcaaaaatgcaagtcgaaagggactgcagggactctcgctgggggccctgtgagcatcgagcagggctctaacccatggcggtgaccatgctggaggggtggtgtggtccaaaggacaggctggatggcgggtgcatcggcgtgggcgtggtcagcatgtggctggagtggctgaagggcgagatgtggctcagggaggacatgtgtctggagagggcggccgggttaaacgagctgttcttggggaagtcctccagtgagtcatgcacttttttgcactttttggatttgctagacatttttcggtttctggtctggatgccttccttcttcatagtcaggggtctgttaatattgtgaagcttgtagtagagcccacaggcattgcagacagggtccccattggcattcctcctccagagtgtggttgtggtggtctgacagttcgcacaggacgtccctgctctcctggctgcagactgtgctggcccgggccttgggcctggacttgcatccgaagccggtgggggagccgcccagcaggctgctgggggggaagagtccggagctgtactcgggcacgtagggcgggtaggtggtgatggggtggtgggtcgacgaggaggctccacccagggcggtcatgctgccacgggagtgggacgactccagcttcatgctgtcgggcaggggcacctggtacttgaggcactctttctcgtcctgccgggccgagccggccgagcctggggtggacagcgatgggtccggggagacgtccttcggcggggtgggcgggaaggtgaagaggtgcgggctggcgtggccccccgacaaggaggaggacgaggccggggggtagacggagaggggccccggggagccgtggtggatggacgtcttggagaaggggctgagattccagggggaggcggtgtggtggctgcccagggctttgccgccgtccagccagggtagggatccatgaagcagaggcgggcggcacacctggctcccgtggtgggtcggagggtacctctgcaccgtggccctgaccgagtttccgtagtagggcgggacgtggttgccttgaccgtcgatgttaaaaagcacatccacctcctccggcagcgggtactgcgccgcgtccatgtaggagtggctgaggcccgggtggtgcgtgtccgggtgctgcccgttgagcacggcggggtggtggtggctcacccagcgcggctggtccgccgtcacctccatggcctcggctgtgctcgcgccctctcgccgggcccggaacccgcgcgcggggagggagggcggtccgcctgggaggtcggggggctcctgccgtcggagggtcgggggtcgttgaatgatttgctttcggtggggggatgggaaggctgggaagcaaaggtgagcaaaggagaaggttttttaaaaattatcttggaggggtcgtttagcaaagagaagaaggggaagacaaaaatccaaaaactgggtatggcagaataaaacgggaccaggttgtaaaaaggggcgacgactctgcaattctgcgagccaggctcctctgcaccggggtcctcagccgctcggaggcggagtccctcctcgggtcacctgggtagcgaagagcagagaggaggaggaggcggcggcgtacgacctgctcggtcagattgcgttgnnnnnnnnnnnnnnnnnnnnnnnnnnnnnnnnnnnnnnnnnnnnnnnnnnnnnnnnnnnnnagtannnnnnnnnnnnnnnnnacagggaatgcattctttctgaaagtatcaagacggcgccctcgtgccgaattcgcca

SEQ ID NO: 452420 - DNA, 1333 bp, Homo Sapiens
  misc_feature (67)..(67): n is a, c, g, or t
  misc_feature (328)..(328): n is a, c, g, or t
  misc_feature (491)..(491): n is a, c, g, or t
cttgcatgtgctgggtacccccgtcttattggtgatttgttgattgcgaatatagcatccggcgcgngctgacccaggtattgtccgcgctcttgtcagtcggtgtcatggtcccgcatctttcacgctatggtgttacaagtgctggttcaaattatgatgaataaggggcatggtttcaagttagagatgataccctgtagtgtggtggtgatccgccgtcaaaaatgtataaggcagcggttttagcatcaccctctgggtcagggtgcggagtgagacgccggatgtgcaacgtgggtgttctccctcttgcggcggcagagcnccgatcgagcggttgggaaaattggtgaacaggggcccttgtatgatagcaaaaggggtggcttttacttccgagaagttgctccgcgcggggggtcggtggaccgctctgcggcctttttaggctgagtcgcctatagccctcacagtggagggtcttcttnttattccagcgccctagtagccccggcctccccggcgtcttaggggcacctcccccattcgataggcaagtaggggcgggcggttggccactcgccatggtgcttccccgtggggtcgccctcctgatgggggtacccttttggcacccgtgtgcccccagactagagtttaccgttaatagtggtcgggaccgtggttgtccttgggccttcgatgcttaaaaaccacttgccacctcctccggcagcggtgactgcgcggagtccatctaggagtgctgtaggcccgggtggcgagtctccagatgctgcccgttgagcacgccgcggtggtggtggctcacccagcgcggagggtccgccgtcacctccatggcatcggatgtgctcgcgccctctcgccgagcccggaacccgcgagcggggagggagggcggtccgcctgggaggtcggggggctcctgccgtcggagggtcgggggtcgttgaatgatttgctttcggtggggggatgggaaggctgggaagcaaaggtgagcaaaggagaaggttttttaaaaattatcttggaggggtcgtttagcaaagagaagaaggggaagacaaaaatccaaacactgggtatggcagaataaaacgggaccaggttgtaaaaaggggcgacgactctgcaattctgcgagccaggctcctctgcaccggggtcctcagccgctcggaggcggagtccctcctcgggtcactccggctcccggcgtttctcccacagtcaaggaaaccagccctcggtctgcaccgaccccaaccccgacctctggtcgggactccacggcgaccttccc

SEQ ID NO: 452421 - DNA, 816 bp, Homo Sapiens
  misc_feature (30)..(30): n is a, c, g, or t
  misc_feature (175)..(175): n is a, c, g, or t
tttttggggcctgtactcaaagcttttttnaaagtccctcaaaaggcagctctttcgggctttttctttctgttcccggtaattcctctcccctgggtagtcatctgtttgatgcgactacggagttgagcaatttcttcttctttcatttccagggtttcatgcatctgacgtnttgtctctgcgattaccattcccttatcttgttcaagctgttcaattaagttctttgcatcacgcaactgagtgataagtttagtcttctcggccatatgaaggtcctttatcttttctagttcttgaagtctttcatccagttgttcttgcagagcttctttttcactagttaatagtgtacattgttccttatgtgactgaattgtttccttacaacgcttaagtaggttctcttgacgcttcactctttgctggagtgtttccagtgtttttacagaagttccatcttccactactggctctccatcactttctggattctcttctttagtgaagacttcagcctgtggttccagctgaggaagtggtttcagtacatcaacattcatcgggccatttcgtaatcgttgtttcagtagagaaacctgagtttggagaacactgatatactgatctttctcctctaaagatgcatcaaactcctcttgcagatgtttctttgcctgctggtccatttggagctcctctcttaattctgctattctccgaagtgatttatcctgactctgacttaatataccttgtagctttttcttctctctctgaagcatctgataagctgtaacaagctcagacctt

SEQ ID NO: 452422 - DNA, 831 bp, Homo Sapiens
  misc_feature (653)..(692): n is a, c, g, or t
  misc_feature (759)..(768): n is a, c, g, or t
  misc_feature (771)..(771): n is a, c, g, or t
  misc_feature (780)..(780): n is a, c, g, or t
  misc_feature (800)..(800): n is a, c, g, or t
  misc_feature (815)..(815): n is a, c, g, or t
cattttaaaaaggcaaaaaccaataaaatttcccattatctttcatacttaaaagtccttgaaatgtcatttatataatttgaaatgtttcccagtttggaacttaggcaggaggggataatttccttgaattatcaagggatattccatacagacttttaaaatgtcagtctcattaggagatggcactgagactttagcaaatagtgtagtatggatgcaggacaaactacacaacttattataaatgcattacagatatttacatagtggaatcctgcttgaatgccagaagttgctactgggtaggactcataactattttacaaagttttcttacgcacatctactacttttaaaattttatgtttaacaatttattctattttaaaatatgtactgtattttgaacataactgcagaataaaaatagataatggcacattagaaaactaagtatcccacagatgattggataatgagaaaaatgtacctacaatcatctcatcagaaacaagctacatcatggaatgttagttatccaagcctgcacaataatgacattttaaactgcaatcatctattggccagcatcacactgaaggcatcgttaaacattcaagcaaagattgctggcataaactattaaaagnnnnnnnnnnnnnnnnnnnnnnnnnnnnnnnnnnnnnnnntctctctcattcatgcacacttcccacatttattaatttacctttgttcccaaagataagataccgnnnnnnnnnnccncggggaacnttatccaaatttggccactnaaagatgacaggtgnctttccccaggaatgg

SEQ ID NO: 452423 - DNA, 847 bp, Homo Sapiens
  misc_feature (106)..(122): n is a, c, g, or t
ggggaggccgtgggtacgaccggaagccgcagcatgctgatcccattttcaatgaagaattgcttccagttactttgtaactgccaggtcccagcagctggctttnnnnnnnnnnnnnnnnntgggctcattttacagtcaatttccaatgatgtctatcaaaatctggctgtggaagactggatccatgaccatatgaatctagaaggcaaaccaattctattcttttggcagaattctccctctgttgtaattggtaggcatcaaaatccttggcaggaatgtaacctgaatctaatgagagaagaaggtataaaactggctcggagaagaagtggaggaggaacagtctaccatgatatgggtaatatcaatttgactttctttacaaccaaaaaaaagtatgatagaatggaaaatctgaaattaattgtgagagctctgaatgctgtccaaccccagctggatgtgcaggctaccaaaagatttgaccttttacttgatggacagtttaaaatctcaggaacagcttctaagatcggccggactactgcctatcaccattgcactttattatgtagtactgatggggacgttcttgtcttctttgctaaagagcccttaccaagggatcaagagcaatgccactgctagcatacccttccttagtgaaaaaatcttttgggaaaaagatcccccctctggacctgtgaaagtactaattggaatgcctggtgcctaccagagtatgcctggcttatccatccaaattggataaatccacctttccacccttaataaaaaccccaaccggggatggaagaaacacctgggttttcccctgggc

SEQ ID NO: 452424 - DNA, 1438 bp, Homo Sapiens; identical to SEQ ID NO: 128515
  misc_feature (1390)..(1390): n is a, c, g, or t

SEQ ID NO: 452425 - DNA, 516 bp, Homo Sapiens
  misc_feature (403)..(403): n is a, c, g, or t
gcagttcacaccaggcgacttccacggtggtttcagtgtccagacctttgtagaccgtcttaaaggagcctctgccgatttcgatgtcaaacttgagaaagcggccatcgttagacattcccacggccttggtctccagctcttcgatatcatcctgctgctggctccgttcctcctgtggctccttggcgctgcgccgccgctgccacttctcgccggcggcggctcctctttgctccccacaaggctaggctgggacactgggcggtctttgctggtactgctggggacagtcgagggggcagggcccgcgacggcctgttccccaggggcggcagcggctggaggctgctgggctacctgggaagtggcggtggcggtcacggtctcttcccggtgggcntccggtggagcactctgcgggacagccgcggggatgctgggctggggcagggaaagaggaaggccgggaagctccagtgcagtggcattggagtcgcagatgacgctccggcg

SEQ ID NO: 452426 - DNA, 975 bp, Homo Sapiens
  misc_feature (16)..(16): n is a, c, g, or t
  misc_feature (692)..(701): n is a, c, g, or t
ccactgtttattgctntggacagttcagcaatgaacagggttgctatttctgtgagctgtttagggggagggatagggggctgctggccagggaccatatgagtgaggcttggggtagcagtagtgttagtgctggcaggagcagcaggcagagtcctgggtgctggggaaggggtgacagagagattaacagtctttgcaaggcttgtggcagcagtggtggcagcgggtgctgtggtgatggaggtggagatgatgaaccttgccgtgccgccagaggaagtggcatcctttgcttgcccttcacttgcttcatgagaagaggacaagggtcttttgggaggaagtaaaggtggtttgggtacattctcaggaacagactctgcttcagaattaggctggcttccagttgagcctagtcgtttctttaggtcctcttctggaatagctttcctaagacttgctaatcttactggctcttcctctacttggactggactagatgatctggcattccctatgggggtggtatggccattctttaacatggcatcgcttggctttactggatcctcaccaccttgctcagggtcttccaacagaacccctcttttaaccagctcttctcttggctttcgcatagatattttccgttctaaaacttctgaagtctctttaaatttatcactacnnnnnnnnnncctccatttccagggcttgaagatcttgccaaagcctgagaacttgctcttccttttggtaggaggtgttgtgtctcctgcttccacactgtccaggaccatgcctggctctgtagtgggctggtctgcttcctcaaatggatcttccatgccactattaaccagtttagggaggtgagatactgtttccagatctccgccgccgcctcctcagcctccacagcagcctctcattctcttcctcgtgccgaattcgccacccaggcctcgcttc

SEQ ID NO: 452427 - DNA, 716 bp, Homo Sapiens; identical to SEQ ID NO: 152230

SEQ ID NO: 452428 - DNA, 769 bp, Homo Sapiens
gtatagaaacagatccatttcttggtaatcaaagcacatttgtttggtcttcctccaaccctttgcatttgatttctaaacattccttcatatgcctttaatgaaagccagcaattatcccatgggccctacttgaatttatctgaggcagctacagattgccctgcaagatgagtttttggagataaatgaaataactggacacacactcacacaagtaacaccacagcagacctcggagtactgctaagtgtacctgtgtcaaatccgcacaggactcaatatagcaatttattcttgatgtatgcaattgcacattgtaattatattaacagagcacactaataatttgtatagattatatatattagatcttgggtatggtttttaccttctcccatggggaacttcttccttcctgatgtggaattgtacatttaaagcttggtcggtgacctttgcataccatcaacgagcacagctaagaacagagtgagagaggcccatggctgattttaccatgtgcccagattaatgtatatagttgattggaatgaggttttatgaatattcatgtttttgaaggcctttaatttctgtctgcatattagcttttaatgtgtgattttaagagagaatactttgacacctgtaaaaatcaaaatactactctttataagacatttcacaaatattcacttacattacaggctggaagtattttattcatatgtatatttataccaataaaatgattttacaagtggaa

SEQ ID NO: 452429 - DNA, 842 bp, Homo Sapiens
  misc_feature (173)..(179): n is a, c, g, or t
  misc_feature (181)..(183): n is a, c, g, or t
  misc_feature (185)..(190): n is a, c, g, or t
  misc_feature (192)..(208): n is a, c, g, or t
cctgggggcccccgggggtattttccctttgggggaaaacccgggctttttgggcccccagggtttcccctttttacccctaactgggggccccccgggcggccccaaaagggaaaatggtttttagaaaaagctttttttcaaggggcccgaggggcgggccgaccaaaggnnnnnnntnnntnnnnnntnnnnnnnnnnnnnnnnnttccggtcttttgctcaatctttttcctttaagtttttcgaatttctcgaactaatgtatagaagggcatcatcaacacccctgtcttgtctttgctgatgtttcaataaaaggaattccataacttcttgctaagtcctgagcctgttttgtgtctactgttctagaaggcaaatcacatttatttcctactaggaccataggtacatcttcagagtccttaactcttttaatttgttctctataatggtgaatatcttcaaatgatttagtattatttatggcaaatacacaaagaaagccctccccagtcctcatgtactggtccctcattgcactgtactcctcttgacctgctgtgtcgagaatatccaagagacaggtttctccatcaattactacttgcttcctgtaggaatcctctattgttggatcatattcgtccacaaaatgattctgaattagctgtatcgtcaaggcactcttgcctacgccaccagctccaactaccacaagtttatattcagtcattttcagcaggcctgggagccgctgagcctctggccccgccgccgccttcagtgcctgcgccgcgctcgctcccagtccgaaatggctggggccgggagtactg

SEQ ID NO: 452430 - DNA, 792 bp, Homo Sapiens
gccccccttttccaatattactgtttttctatttaaaccttttgagttgtagtcagaaactgttgttgggactgcatagttttcaaaagtttttggtacatttctgactttagaaatctggggtaggaatccctttcccatatgcatatagactattttctgagcttcttcaaaacatgtttcagtgggttcctgaatgttcctgatgatagtctctcttgtcgaactgtcaatgttaatctctctaggggactgtggctggatgtaaatcttataaagcttctttgccctagaaattctgctccaccgtgaggcaattttcttataggtttcacatgccatccagaattgaatattctcgtcactgtgctccatttttaaatatgctgcatagactactggaccatattttgtagccattaaattttcaaaagactgggcccactgtaatacttcctccaaagtaaggtttgaagggggcctcttagattcatctctgcacatcttacaaatccaacaattccgcctgctcatttttcaagcttcaaataaacaatgatcatttttttctcatgttggtggtataatatgtggaaacattccattgacaaatatatcctgtcgagcagtccaccatgctaaatttgatctcctctttgttatgatccgtttgaaatcaggttctgaaattttgtgagacacccagcattttatttttcccagagtaaaaggattttactgtctctataattaccttcgatggcactctggcctcagtatgaatgttctccc

SEQ ID NO: 452431 - DNA, 1046 bp, Homo Sapiens
ctttttatgtggcggacattaaaaaatggtcttaggaaagagtcccctgtgtaccctctcggaaggggaatatgtcggtttgatatttaacagaaagatatgccgtgggtttaggcggaataaaccaggggtggggaaaaagtgtttaccgttggtcatcgatcgcgtgaaaaaaggttagattcggttgttgactggggaagaagagtttaaacggaaccgcagcaccaagaattaaaattttcaaggtggggaaattttgaagtaaaattggtgggaacgccaatgggggccagcgggaaatgtaccagttgccccttgttgggaagggcgcctggaaaaagggagagaggtgggaaaaattttcatatgaaccctgtttgttggagaagcaaaggaaaaggggcaaatccctttcggttggaaaaaggttttttctacttaaccaatcctttagtgcctggaaaaatagggccattttgataacaagagtataaaaagctttatgatctgcaaagtaaatggtatctgggtttaaatttcatcccaaggtctcaggttatggctgaggagctatactaagtatctttgtaacacatttctttgaatttttataactaagacaagaaaatttttttatcagatctaggcagaaatactgatcttcatttacaagtatagtaattacttgcactcaggactatatagacatggggctctgaaaaccaaacagaaggaaacgccaaaccataaccacaaggcaaaattaaaagtaactcagagaagcagcgggtgatagtttatgatttcaatataaaaaagaatgcattacctctcagatgtcgccttaaagccagaaaattaagatacaatcaagaaggggatgaatggttttatgactataccacctactacttcaagattaaaatcatcccagagttctgaaatgtcttcattagttaagtaactatacaatttatttcagtctctttttaatgtagaaaatcactttgtaataagatctctacataaggtaaaaaagcacc

SEQ ID NO: 452432 - DNA, 671 bp, Homo Sapiens
ggatggaaaactatgctaatttattaacttaaaagggagattatatctaaatgagagtatatggtatatatgtggtctatatagacagtgattctcaacctttattctaacacttgcacttacatacttcttgtccttaataaaagaaaaatggttgagctttactgtttgtagtttgtaagagaataaacacattgtacatcctttgtgaaattacaaacaccctgattgagattctcatatattcctgtggtgtaaaggaaagtaccttggaatgagctttgggtgccaggcatatagaatgcagtagagatgagacagagaaagatactattgactggcaaggacctttactctgtgtgatctgaggattcactgaaggtggccaaatctgtatttaaataagatgactatggccgcaggttgaaggatggattaaattggaggcagggaaagtgggccatagaagatatttaaacaaaaggtgagtaggcactgaattaggatagcagcaaaagtacagaaattaaaatggacttagaagaaaaaaaggttggacatggctggttgagggtaggagttgtgagagaaggaagtcaaattcgtattgcctgacttaatttaaaaagaggccagatatgatggctcacgcctgtactttggaatgctgg

SEQ ID NO: 452433 - DNA, 798 bp, Homo Sapiens
gggagtctatgcctgtcgtggaagctggcctggcccccggagctccctggagtcggtactgggggcttcgttttgtacgcaccgttttctctctgtgctatgggagatgtcaaggaatcaaagatgcaaataacaccagaaactccaggaaggatccctgttttaaatccttttgaaagtcctagtgattattctaatctccatgaacaaactctcgccagtccttctgtttttaaatcaacaaaattaccatttttcactaaagatgtcatcgtaccctctccttggactgatcatgaagggaaacagctttcacaatgtcattccagtaaatgcactaacataaatagtgactctccagttggaaaaaagctgaccattcattctgagaaaagcgatgctgcttgtcagacattgctgtctcttcctgtggattttaatttagaaaatatattaggtgactattttagagctgatgaatttgcagatcaatctcctggaaacctcagttcttcatccctcagaagaaagctgtttttagatgggaacggaagcatctccgactccttaccttcggcttctcccggaagtcctcacagtggtgttcaaacatcactagagatgttttattcaatagatttgtctcctgtaaagtgtaggagccccttgcagacaccaagttcggggcagttttcttctagccctattcaggctagtgcaaaaaatacagcttgggaagcataactagtccttcgcctatttcttcacccactttctcaccattggatttcagatagg

SEQ ID NO: 452434 - DNA, 909 bp, Homo Sapiens
tgaaatgagagcaggctatcttgaccttgataagcagctcagctcacggccaggagtcgggcccagaacgctcagagcagcagagcccagccctcccctgcagcggctgctgggcactgctcttggaacatggcattaggtggtgggacggccaccttaaaagccagcaacttcaagcctttcgccaaagatccggaaaagcaaaagggatacgacgagttcttagtacacatgaaacagggtcagaaagatgctctggaacgctgtctggaccccagcctgacagagtgggagcgaggccgtgagcgggatgagtttgcccgggcggccctgctgtacgcatcttcccattcgaccttgtcctccaggttcactcatgccaaggaggaggatgactcagatcaggttgaagtccctcgagaccaagagaatgatgtcggggataagcagtcggctgtgaagatgaagatgtttgggaagctcacccgagacacgtttgagtggcaccctgacaagcttctatgtaagagatttaatgtccctgacccttatccagattcaactttagttggcttaccaagagtgaagcgtgacaagtactcagtcttcaactttctgacgctcccagagacagcttccttgcccaccactcaagcatcaagtgaaaaagtatcacagcaccgacgtcccgacaaatcaagaaaaacattcagatgggatacctcctaacacgaaaagaaagaagattccattagtgaatttttaagtttggctagatcaaaagccgagccacctaaacaacagtccagcccccttagtaaaccaagaggaagagcgtgcaccagaatcatcccgcaaatcagacagtcaacaaagatgtggacgcacacggctgaaaggacaagggac

SEQ ID NO: 452435 - DNA, 979 bp, Homo Sapiens; identical to SEQ ID NO: 324104
  misc_feature (16)..(16): n is a, c, g, or t

SEQ ID NO: 452436 - DNA, 798 bp, Homo Sapiens; identical to SEQ ID NO: 324105

SEQ ID NO: 452437 - DNA, 1285 bp, Homo Sapiens
  misc_feature (269)..(269): n is a, c, g, or t
  misc_feature (594)..(607): n is a, c, g, or t
cagggatttttattaattccctataggtcccccccaaataattctttggcaggtttttcctttccccaaatgaaatggattttcattaataaaagtgaaaccgctttggataccattactttggtttaataccttacgccacaccttcagggaggatttttatttatgtgcccttgaatttcaacaacgttaaacccgttacagggaattggttaagctggatgtccttattccaatccattaaccaaaaccatattttaagaataggncaagaagtctgagaaagatggtgatgtaaaagggactaggcttggggtcagagagacaatggtgagttgtgaagtacctaaaccagtctgcgtgaactgcaccatgttagagaacagcaggaacaaaataggctacaaggtcacaataagaagccctggatggtagcatcaaagacgaaacatttaaaaaaccacagaatgaaatcccccaagatggcagctgctcattgtcaagattatttaatcaaccctgctgctgacctgggaatcctaccaactagtaagcattgattttaaaaataaataaggcaattccaattgtccnnnnnnnnnnnnnnaagagaattctggtatgagaaccatacctactaccaactccaaatccaatctatgttgttcactaaatttgacagccacgatcaaataatatttaactcttaaactcctcgtaacttttttgtgattcacctcccccagtcaacacaattctgtgtgtttttacttacggtcagactctgaagagctacttaggagatgagcacatattttaacaaaaattttattctctgtcccatttatttggtatctggaacgaagagaaaacctaaaaatgagatctatttccagcactgcaagcaactttggaggagcttacttttcccctgcttctttgactggttgttacatttatctgttttcaaatttatctcctttttgctgagaaaagaggttatagggaaaagagcatttggatgaattcttcaatttcatttcatttatgactggctgttaatagcgatgtgcatcttggcaaatcagcttctccaaggaacccatcttgcctctctgttaaggaccattctgtttatttcttgtgtttgttacggaggtaaaaatcatataaagcacgtaaatgccaccaacggcatcctgatcacctaaacaccgccttttatgactggtccactatgcatcttatctgtctagctctgtgggtcacggattccatcaggggg

SEQ ID NO: 452438 - DNA, 1556 bp, Homo Sapiens
ggattgtaatgtctatttttttagacttaaagatttatagaagactatagttatctgatttgttattttgcatttttcattctgtaaatctttgcttatggcacattgtgctctctgttttccatggttttattcatttatctcctcctattttgaggggacaacatgggtagttaaatctttgtcaatagtattggagataacactaactgctattatcataacatcttcatttttactgcatgccaaaaccaatgcctgccaaacaaaatcttagacatcccaatataatatgttagttatatttctattcacatcattattgaaaatacccagctcagtgcctggcttaataaatgtttaattcccttacctactcttgctctatttttttatttgaaatggagatgagcaaaataacacattcatggctgaagcaattttttggacatttcttgttaccaaaagatctataatcaggacattgtttatgtaagttggacaaaaaaaattcttcccctttatgtccacccttcctatgattgcaagacaaaatttccctcctttacctcatccctataacatgggaggctgagaaaaatgaggggagatggaaccagatacaaggagatccaataagagaagcttatttaaatattgtgaaataaaggaagaaccaaagcatttttttaagtggggaatccttttgaacagttattatttatccatattattaacaacatcttttctgacaaaatccatcagatgaagtgtaaatggataatcttttaatggatctaaacctagaaagtttcacttactgttcatgtccgtgttccagaattgtgaaatggtgtgtggttttgctttccaagttcttctctgcctcctcttaattctctaattccatgtcttacagaagaatgagaaatttctttcttacttgagtatcatgctctaaaaaacttggcttcagtcacagaaacgctggctctcctgtgcttatattgaagccaactgcctttaattcttgggccctcttatatttttaaggtgcaaaatttgaagtctcagtcaccagacacaggttctatacaattaatgatgagctggagaagtaatatgtagctaatttttcaaaagcattgaatatactttccggaaagaaaacagaaattaaatattgccacatcttgccagaatcccatctgacaccttaactttgtcaagtttcctacaacttgctaatcaagttttatacatttctaaatctccccagtttctttggggctgggaagatgcaactttccatttaatagaaactttgaaatcttggggtaagggagcagtggggggactagggagaaggataagaattagaattattggaaaagcccccacccgggaaccttcctgggcccgaaatattcaaaactaaattcctggctggcttttctcctttggaaaattccccttcaaaacttatacacaagaaaaacctgaacttcggcttttttcaatcttcgcccaacaagcattcctctatcacttggcaa

SEQ ID NO: 452439 - DNA, 638 bp, Homo Sapiens
  misc_feature (64)..(153): n is a, c, g, or t
gaaagatgaatgtaaggttttattgagtggtggagctggctcttggtgagatggatggggagcnnnnnnnnnnnnnnnnnnnnnnnnnnnnnnnnnnnnnnnnnnnnnnnnnnnnnnnnnnnnnnnnnnnnnnnnnnnnnnnnnnnnnnnnnnttgtcaatgttcagtcactccttctcttctctttgccactccattcttctgttcttctgctcttctctttgtctctcccttatttgcaggaggtcacagggaagtagagagggggatgaagaaatacatttcccatcctgaggtggtctgcccatctcacttgaagaggtgctacaggaataagaagtgttctttttctcgttgtaattcaagggcaatattccgggttaggaattccatctctatgagcaggtgttgacattgtttctttgactggcaacttggcaactgtattcggctttccttgaaaactcagatttccctcttaaaaacagatgaggagtcctggaatgctgtataaccaggagagatgttctcctgaccttctatatccgcatttcccagggcgctctctgccaaggtctgaaagaaatgcagattccttgcctcctagtgttgcctcttgactgacaccctcgtgccgc

SEQ ID NO: 452440 - DNA, 380 bp, Homo Sapiens
  misc_feature (355)..(355): n is a, c, g, or t
tttaaggttttattgagtggtggagctggctcttggtgagatggatggggagctggaagggggatggagtgggaaaatgatctttctccgcagtgtggccgtctagcagctaatctcctctctgaccatccccaaccaaagtcttgtcaatgttcagtcactccttctcttctctttgccactccattcttctgttcttctgctcttctctttgtctctcccttatttgcaggagggtcacaggggaagtaggagagggggatgaaggaaatacatttccatcctgaggtggtctgccatctcacttgaagaggggctacaggaataaggaagtgttctttttctcgttgtaatncaaggggcaatattccgggttaagg

SEQ ID NO: 452441 - DNA, 768 bp, Homo Sapiens
tgggcccccaattggttccaaggtcaggtaacttcaaagtggaccaccataggcccttcaagaatgtagccctagtctccttcaaagacatttatggtggaacggcattcttctttgaaatgacgcagatctcattggggctgtacaagcatcttgccaaaactcggtgtaaatgagaaggttccctttctgcggaacaatcaagaagttccccatctgaattgtaaaagcatctgttctccatggaggtattgcagaggaaaatgtggatagcaagcccattgttagactttatgtctccagctccacacaaggtatgcaggccactcacaaagtctactttcttctgagatgcttttggaatctcaaatggtttccatctaagctggttaggatcaggatcaacttcatcccagttgtgagtgacatggccttcgtcaatggattcaaagggcttgtgagaaactgaaggtagaatcctatacagccagcttctcttattggtgctccgtggacaagtgaaagccgatcctgagagctgctcagcatagagattgtaggggcagacctgaggattattctgtccttctggcagggaacctgggcagcgaggatcctctgaagaacactcattcccaaatccagaaatgtactttaactcagccattttctctctcctctatgtgtggtgacttcaggaaacccaggcccagaggatataaagccacaatgcttctttctccttcaaaccactctttggatattccc

SEQ ID NO: 452442 - DNA, 983 bp, Homo Sapiens
  misc_feature (333)..(341): n is a, c, g, or t
  misc_feature (465)..(592): n is a, c, g, or t
  misc_feature (645)..(666): n is a, c, g, or t
  misc_feature (729)..(770): n is a, c, g, or t
  misc_feature (836)..(844): n is a, c, g, or t
  misc_feature (879)..(879): n is a, c, g, or t
  misc_feature (908)..(908): n is a, c, g, or t
aaactgtgagtaacacaaggcaagatcaatattaagattgtgggcacggtgtaacttaagttaataggaatggcagggatgaatataaatcagaacaggactaacagtttgaaacattagatattcaaatgctcagagctgatgagccgagccactacgctaacaactctgcaaaccaaagggttcacaaattgcacaagaacctggcctcgatcccattgtggtgctggtgtgataaaaaataaaagagggcccggttggttcaattgttgctttggacagaggaggacaagcttggccctgcccccagcggaataaaaccattttttaaannnnnnnnnggcccctttggcggaattatttctctttatacactggggggtggttttaaaaattatgagaaatagagagggcaatatccctccgttttcacaaatggtggcccttccgtaaagggaaatttgnnnnnnnnnnnnnnnnnnnnnnnnnnnnnnnnnnnnnnnnnnnnnnnnnnnnnnnnnnnnnnnnnnnnnnnnnnnnnnnnnnnnnnnnnnnnnnnnnnnnnnnnnnnnnnnnnnnnnnnnnnnnnnnnggggcgcggcccctacccgatattttttaaaaaccatccccgccggcgggtgnnnnnnnnnnnnnnnnnnnnnngcgggacaccaaaacaaacaaaaccctctttttgttcccttccgcgccgggggaggggcacannnnnnnnnnnnnnnnnnnnnnnnnnnnnnnnnnnnnnnnnntgggggggagaaaagaaaacctcttctcctccttcccccacaagagcatttcctcccacatactcnnnnnnnnncgtggggcgccttctctccccacaccaccaagganatccgccgtctaggtcccccctgtccccnaacacaccccacattacatgacgcttctttcctgtcgccactaaacacggcccgcccctaacacagcgggcgggg

SEQ ID NO: 452443 - DNA, 789 bp, Homo Sapiens
  misc_feature (218)..(218): n is a, c, g, or t
  misc_feature (242)..(252): n is a, c, g, or t
  misc_feature (358)..(369): n is a, c, g, or t
gggaagcccaaaagccccgggggaggacccaacccagatatttcccccaggcccaaaaaatgcccggaaaaaattcaaaggtttcctgggttggacccaaagggattttttaaagggaaaccttgtggctttggggtggagggagacccccaattgcctgaaacggagacccccaagagtggaaagggaaaaaccaaccccagaaaatgcaaaaatcncgaagtcccctgccccacgggggnnnnnnnnnnngctgtcaaaagcggaggcaaaaggggctttcacagctttatgggggtggggttgatggcagtagcttaaataataacgggaggaggagggtttttatacttcagcnnnnnnnnnnnnctgcccccctcttcctctacgcggaagaggagagactggtagcttgagggttaaggagaaaacagtatttcccccccacttctttaataggcaaaccatctagaaatggactggtcatagagagagaatgcccagatccgccctgtgacactgacagcccccaattcctagagaggtgagagctgtcgtgtggcaggttaggagaggtgccaaccttgggcgatgcggcttcttgggaaataacaggtccagcgagaaagaattggggtgagggagaggatgggggccagaatggggggactccttaagtggtacctaaaattagtctgcggtctgctgcgctgtctggtgggtccttggggtggaaagcatggcagggagggggttggggctgaatggagaagaaagtgagatgctgat

SEQ ID NO: 452444 - DNA, 647 bp, Homo Sapiens
  misc_feature (11)..(11): n is a, c, g, or t
  misc_feature (430)..(584): n is a, c, g, or t
  misc_feature (592)..(607): n is a, c, g, or t
ccctattcacngcattttttaaaaaaccaaagttcaacaccaaatgacatttggttttaaactttagtagataaaaaggtgaaccatgtgacatgggcatttttgtaagtcaaaaacaaatttcacatatggtaaacctaatattcacagtgtgttccctcacttgtaatctctgaatacaaatatactagctttttcgtaaagggaatcatttttttaaaagtagtgccactgacaagatgctacagtgaagattatccattcttaggatatttattttcagtgaacattttctgcacaaaggtagtgttgcactgggacacaagccttttaacagataaccagttgaaatcaaacactgcctccacaccgagttctgttgtgtatttgatagtaaattgatttaaaaataaaagtggtttttgttagnnnnnnnnnnnnnnnnnnnnnnnnnnnnnnnnnnnnnnnnnnnnnnnnnnnnnnnnnnnnnnnnnnnnnnnnnnnnnnnnnnnnnnnnnnnnnnnnnnnnnnnnnnnnnnnnnnnnnnnnnnnnnnnnnnnnnnnnnnnnnnnnnnnnnnnnnnnttttgggnnnnnnnnnnnnnnnnaaaaaaaatttttaaaaccttttgttggggggcggggccc

SEQ ID NO: 452445 - DNA, 1627 bp, Homo Sapiens
gaacatttccttttagcatcatgttcgtggctcaaaaggtttcaaattctgcagtattttggatttcagtttaggatactcaagctctgttttgtatatagaataataccggaatcaattcagctagcaccaatggctatgtcatcatgacaccaaaaactaagtgaaagatgaggaatttaattaagttactattacaaccttcttaaaaagtcagttaatttacgtaaaacgaatctttaattgatcaactgaagaaagagccaaaggcttgaaataattagcataaagtatattcacagatatgaagatgtaattacaaataaaagcatactcaaaggtcacaggatggcactgattccaagtacagatttatactcaccatgaacttctgtaccctaagagggaaagtagcgggaatatagtaaattctgcctgtttttaggtagcgtgagaataatatcctccattatctgcacaaaatcctgtgacagcaacttatctgcttcatccaatactatcatctggacatgatcaaccttttctactcctttcttaataagatccaggattctcccaggggtagcaatcaccacgtgcactgtatcatcaagcctcattatgtcatctcgtaaattggttcctcctgtggttgccatcactttggcccctcccatgtgtttgctgacctggatgcaaatttgactgacctgtagagcaagttctctagtgggaacaatcaccattgcttgtatattgtccttcttcaggtctagccgttcaagtaagggaatgaggtaggcaccgctcttgcctgttccattttttgctctagctaagatatccctaccagataaagcaatgggaatgctctcctcctgaataggagatggcttttcccagcccatttcaaaaattcccatcagtaactcccgtttcaaacagtaatcttcaaactcatttccttttgtggaggtcacatccgaagttttgattcttagatcctttggagggagttttaaagtctttttccagtcatcaccaggtttaatagtggtggtcatactctgtgcttgctgctgagtgccattattgattgtgttggtgtttttcagctggttcatctgttgctgtgtctgtgtgccccctcctccagggccaccagtgggtttcacagggcctctcagctgaccattttgactggacagacccattataacagggttctctgttctggccgtgctcatgctgttttaattgcaaaggtctttcaaacttcaaaacgttttgaaagtcagtagagaaactgtaataacagtttattaggctctccaaaatgaagagataaatataagtcttgctcaataaatgagtcctttattgcaatgcaggcaagcacctgtaagtctctgaacggtaagcagcagtaacttgctctcttgcacggaatcaactttttatttttaaaaagccctctaacaagcttgagttatatctgaattcactcacgtcaatctcctccgctgcccgctctcgtggcgccgccgaagtcgccgcctggctgagctaactcggctcctctgccccctccctcgctcgcccgttcgcccgcccgccgcctcccgct

SEQ ID NO: 452446 - DNA, 615 bp, Homo Sapiens
ccgaagttttgattcttagatcctttggagggagttttaaagtctttttccagtcatcaccaggtttaatagtggtggtcatactctgtgcttgctgctgggtgccattattgattgtgttggtgtttttcagctggttcatctgttgctgtgtctgtgtgccccctcctccagggccaccagtgggtttcacagggcctctcagctgaccattttgactggacagacccattataacagggttctctgttctggccgtgctcatgctgttttaattgcaaaggtctttcaaacttcaaaacttttgaaagtcagtagagaaactgtaataacagtttattaggctctccaaaatgaagagataaatataagtcttgctcaataaatgagtcctttattgcaatgcaggcaagcacctgtaagtctctgaacggtaagcagcagtaacttgctctcttgcacggaatcaactttttatttttaaaaagccctctaacaagcttgagttatatctgaattcactcacgtcaatcaacgaggccactcccgctcggcaccctcggtcctttattgttgactcgaagctcccaaaatggcggacgctccttcctcctc

SEQ ID NO: 452447 - DNA, 912 bp, Homo Sapiens
  misc_feature (74)..(82): n is a, c, g, or t
  misc_feature (173)..(173): n is a, c, g, or t
  misc_feature (177)..(177): n is a, c, g, or t
tgttttaaaagaattttttaaagggagaaaggggggccaaaatatttctttggttcgtagggggtactatatannnnnnnnntgttcagtgtttgtttctttggggtattttttatggttttcgataggtattaattatttaacggtgttgtatttgacgtcgttttcgtttntgcnataatttaaaagctttatttccccccataattttgcaaatagatttcatattagttccactggaagtttttttcgtacagttgcctttctcattgactatgctgttggtggggaaatctgctttctcatgaggggaagggttagatttcatagagatgctctgagctaatcacataaacaagagggtttgacctggcagcctctgaggcagtcaaggaggtcaagaaatcctttcagctaaaggcctagtcaggtgggactagttgccaggatcctctctgcagaactgcccaaacgtagctctctttgaccaggaagcctggaagtcagaccatcttctcaggccctgccaaattcccatcctcagtcctgtggcctcatgcgggaacattttatccaagcaaaccactggctttcgccttgaggtccaatgtgcactcttcaccaagtgcaagatagatcttcactccaaagttcaccgttcacacagtttttggcttgtgctttagaggctggtctctgcctctcctaggaatggtggcatcacagcaatggaagcacaaagacccaggcaagcactggtaggtagagtgtgggggcactgctgccagatgttctctgagcgtgcattacggcaaacactgcattagtgtgattggtgggtaattctacattgcagatcattccttcacagcaagacctacactccgtatgttcagaatctcggctgtggcc

SEQ ID NO: 452448 - DNA, 706 bp, Homo Sapiens
  misc_feature (574)..(574): n is a, c, g, or t
  misc_feature (588)..(607): n is a, c, g, or t
gtggtttcagatgtgttcattttattatgcttttaaaacttaggtacatgttacatatattcattttaaatgccttgatacaaataaaaaaggaaagcacatatatacaaataagaatgccactatcatgggataactttgaacctgcttaaagttttctcaattaacgtattcacaagcttcagtactgtaactattagctggcaaatgtcttacaacacactatatacatgtcatgatgctagggttagaaatcatcgtcctgttagagtacttagaccagaacaatagtaatgcctttttcatgttttaaaatattatatacccagggtgattctctttcaacttgttatatagtctgtacttgcagtatgcgcaggcaggctactaagtttctctcagcctctgtctctagaatttaaagcagtcactgagtggcagaaatttcttctaaaatctattatatatagactgggcacagtggttcatgcctgtaatcccagcatttaggaggctgagtccaggaggattgcttgaacccaggaattgggagaccagcctgggccaacgggantctgtgtctctagnnnnnnnnnnnnnnnnnnnngcaaactatcatatagaagttggaacattattagctgctacactaagcagcactgaatagccttccaaatttctgctcagctggaagaacacttgatct

SEQ ID NO: 452449 - DNA, 493 bp, Homo Sapiens
  misc_feature (181)..(210): n is a, c, g, or t
  misc_feature (417)..(417): n is a, c, g, or t
  misc_feature (449)..(449): n is a, c, g, or t
atttgtaaacatagacattttattaacaaaatgtttacacccttcttacaacaaaacagtgatttagcatgttatactctacaaaagtgtattatagaatattcaagctaaaacaatattatttaaaagtatggcaaatcaactttcatttgcaaactatctactatgagcataggcatgnnnnnnnnnnnnnnnnnnnnnnnnnnnnnnggtctagttttcttttgtcaggcatctataaacaatacagggcatcatatggtttacatacacttagggtccaggcccaaggttaaggactggcaaaaataaagtcttccaaacatccacagaaggcttgggccaaaccaccactggcaggcatttccatggacgggtaaccgggggccatgtggtcatggcggtaaggtccagggnccttaatttgggggttgttttatattggtgcntacaaggcgggccaaaactgttagggcaaccggatttttacttt

SEQ ID NO: 452450 - DNA, 1025 bp, Homo Sapiens
  misc_feature (71)..(84): n is a, c, g, or t
cgagcccccggttttcccgcccgtccttttcaaggtttggaggattttcgctcccaaattggaccatggcnnnnnnnnnnnnnnccaataacgccttccttaaattggaggggttgggcttctgggcctcggttctgaaggggcaccggaatggtcctttcccaaatccccttggtgggactgtggtacccaatttttccaactaagggtaagaaccatcgggtggtgttccccacccacaaacttccttcatcacctttggtacattggtgccgctttggtccaagtgcggggcttgggctcgtgccgcaaattgtttactagttctaccacactgcaggtaatcccagccacagcagctgctgctcccagacccatgccagtgtccaagagcacaaaactgattccttctgtgaagggtgccagacccaggccgaggagggtcaggatgccagaggtagtgccaacagagttggacaccacattggcaatggtggtgcctctgtggacctgctcaacctcctctgcaagggcacggagcttccttatgtgatcctcaagctcccttttcaaccgaggaaactctttcaaaaaccactgcctgtgctgctggtctttatcgtggcggtttttgtccttcatgaccatgtgacttgcaagcttgttcagagctttacggagctcatctgcctcatccctgggcagttcagcagcagccacgaatccattccaggcttcatcatcagtcagcagttgtagcagattctctctgctcacttggtcctggaaatacttaaggtaatcctcaataaagatactgctctctgggttcatggtgccagcggctgggttaccgaggggctttccttggagctctccagtcactgtccagactggaaggttttccttaaccctcgttccagcttcctcttccctcactctcacaccaaggcagggtcctcttgtccaagggatcttcctctgacagagactgagcaagatcccttagacaaggtagagccgag

SEQ ID NO: 452451 - DNA, 1026 bp, Homo Sapiens
  misc_feature (677)..(677): n is a, c, g, or t
  misc_feature (897)..(897): n is a, c, g, or t
attaagaatatggtatttgggaagaaaagtttgaaatgcaacaaatggatatttcaacacagtagtattatattatcagttctttagtaagtgattttagagatgttgtaggctacttttaccgtggaatatatagtatagagatgcaaaacttaaatgtttacatcaatttatattgaatgtcacataatttcatggaaggaaaggtagcttgatatttagattctaagatataatctgaaaggaaactaattatgttctctacacttactgtaatactgattattcttacatatcaaattattgaactttaaaaatttcattgtatagtcattaaactgagttgggttttttcttaaagggtttagcatcactcatttgatttacacattcacattataatatttaattatcatgggtgtatgctttacataaaaaaggtttataaaagttatttatgctatattgaaagtcatcttaagaatctccaggttatttaaagtagttataggagcagagaacaagcacctttatcaaaatctggtcctatgtgccttgctttaccaaatacctgatttttcttggagggtgttccctgtatttcacaactgtagacacctggggcaaaattactgatttttaagaataaatacatttctatttttttggttgtttcnaaccattagctcttcaaattcattaacaaaattaaaataggtatattacaaaagcataaacatttgtgaacagtacttaaataaattgtgatactattgctccatccttgaacttttttgaaacttttacaattgtataaaactgtcagtttgttgtttcatttgtaattacaaaataatttaaaaactttttaaaataatttggatcctgactttgtcnatatctgtatttcatttgtttagaaagattcttttgggtttgataatgtaatttgtatatttaaattttttatggacataattcaaaggaatgtataaattggtcttttgttaaatggctttttaattg

SEQ ID NO: 452452 - DNA, 989 bp, Homo Sapiens
gcggcacccggcggggctgggctgggaatgttcactggtagatgcactgtcacaagcgtcagagagctgggcgtgaggtctgcatggccctgcgggctcttcctacctagaacgcccttccaaggtgaactccacactgcagtcctagacagaggggtgtttctggttggactgtgacatcccagaaagctgtcactcaaaaaaagagtctggggggagggggcccggtggtttaatactacctggttttgctcacttaagccaccagagcagacgccatttcttgcccttcaaagtggggccaaagggtaaatgtgtttggcagacacagctgttcataacatccacctctgggtttgctcgtgtgtttcagaaaacaggtgggtgcaccccttcagttgagggagaaagatttcttcttccttgacaacaatgggttgagtagagttccaattttctccacctcctgcatggccattttccccaagcctgccctcccctaccatacttgatgtctctaagacacactggaacagcggatgcttggggagcccatctgggtgaggaccttgtcaagccactgcaaaggcccattcaggtgcagctcaatccagcagggggtactggtcacagtctgtctcctgtactccgctccccagcctttgacgaagctcatgcggatggtgcacattcgggtcaactggtagacagcctcaaagccctggttgaccgactgggccaggagggcagcgaactcctggttgttgaagatcttcaggttgcatcctgcaaggggagatggaaggctggcccacaagctccgactcccagagcagggagaagtctgcaaagagggcttccaaaaatagggagatggtgtggagaggggggcctttcctggtgggatcttgcagacggtggccgggtgccagccatagcgctggttacagttgggagactggacaaaaatagcgctgtcactgaggccc

SEQ ID NO: 452453 - DNA, 655 bp, Homo Sapiens
tagcagttttggtcccaaatataaccagtgatctagtaaactgccatcagccctatcattaccaataagtaatcacaatgcattaaaaagttacttgcaatcctgcagaattaggcatatgtggttgtaaaataaaaaacaaacctgttttgtcaaaactggcagtgtaaagaaggcagcactggaagtgtatgaatcgtctgtaatgccaagtaccctccataaactcttaaagtggttaggctttgggacccattgttttggtggcatcgatacaccggtgtttatcgatgccacccacatcatctcgtccctcacaatcacactccaccttccataagtacctaatttctgattcctaagcctatctcagattctgcaggatgaatcagttggtttatcattgggtatatccctcgtgcagataattagattttacattcttgctgctaagttatctacaattcttccatatgctttcaattttcctatactacagatgaaggtatagagcaaatctagttttcctaaagatggaaagtagctgttgcttttgtaagtgcgtctgtattacgtgatttctagtaaagaagtatttttctgccattttgaacaggtaagtctctattatgatttacactgagacttgtagatt

SEQ ID NO: 452454 - DNA, 1632 bp, Homo Sapiens
tctgttactttaacttagtgtctctttctattagttggttgaatgattagtactatcctgtagacccagagacatagtttatataagaattgctaaggctgaagttcaacttggctgagtgaagataatcattggttgtgtgagcctatgaaaaagtgtatacgtctaagatttcaaaacaatgggtcccaaagcctaaccactttaggagtttatggagggtacttggcattacagacgattcatacacttccagtgctgccttctttacactgccagttttgacaaaacaggtttgttttttattttacaacaacatatgcctaattctgcaggattgcaagtaactttttaatgcattgtgattacttattggtaatgatagggctgatggcagtttactagatcactggttataatttgggacataaactgctacatcaactttcatctcgcccagagtgctcaaggctggtatgatcagtggatcaggaatgcaattgtgaattcctgcccattgcctctcttggtgaatgtggaaatggccacctgggttttcccatatcaggaagggctttgggatggcacctatattggctgataattgaggatgcaaacattccattcattagtgtgatcgagctgttaatttttagactatagatcaaaatgtgaaacattttatgttcaatccatatttgtcttgcacattataaatatatttttattttttagtaatttaggggagggaggagggagaaagggataatgatgcccttggtatatttcacaaaagcagctgtgacaacctccaatcagtttacttcatttcaaaactatttccaatcacaaggaaagatttatttaaaatatactcgtacatttcacctgtggatgtctataacttcatcctcagtatgttcccaaatctgtgctggcattgaaaggacaaaacattatactagtgggtttttctactaattattttttgaagcattattttcccaacacaaaagagcttttttctcggtataatgaaaattgaaatcctatgtgtattcaatagtaaatagacaaattttattttttatttccacttgaagagttacatttcgtataaaagtttacaaataacggtttttattttgattttttcagtataaaaaaagttgccttgatggcatattatgatgtaatgcgttaattgcttgtaggatagtaaatggtcagtattgaatcctaatctctagctgccgtcttgtagatatgaacgaatgttcaccaagcatgtattttgtattttgttgcattgtacactgcaactaataagccaaggaatcgacatatattaggtgcgtgtactgtttctaaaaaccacaaactaagaatgataaattatcaatatagtttagtatttgctaattttactacactcttttgttatgtatatgtagggaagtcatagggattataaattcaatttgagtaaaatttaaaaccatatattttatgataaagggcctttaacttaagatggccaaagcactgatattatatatttgctgtaaagagaattataagagttttatttttctgatattaaaagttacttaataaagacttgtttccatt

SEQ ID NO: 452455 - DNA, 1305 bp, Homo Sapiens
  misc_feature (184)..(184): n is a, c, g, or t
  misc_feature (195)..(195): n is a, c, g, or t
ttctactaatacttttatatttttacatatgaaagattatgtttagatctttgatccatctgggatttactctggggcataaagaataatgaagggatctagtttaaaaaataattttagctttaaaatactgatgagtatacatttctggatacaattatacaattttgctattgttttaacntttctcttagnaatgttcatactctgaaaaataagatcaaatgaagctcacctgctttacaatatacatttttctaagcacacttgatatatatgtaaatatgtgtcagagtctatacatatatatgcagtattttccacaattctctggaatgttatattaaaatctgatgttattatcactattaaaatatttttccagaaagtttctatttcattttctcaatgtcgtctcactttcttggatcttgatttctttctttttacactgtattttttctcaaaaagtttcttctcaactaagctcacttcttcatggagaagggaagtctttattctgagcaggaaggagaagagatttagtataaactgataactcagagaataatttgattcttcataggttgtcacatgtgtacaatagcatctgcagaatttctgtgtactaagccaatataatgaattcttagtcagcagtgattggcctttctctttcaggactccctgaaggctgtgtccatggaaacacattctatcagtgtcctcttcagtccagttgaactgaaaacttgaagggcttttttttccagcagttgctgttgactcgaccagtgtgctaaattgtttctgtagattcaccaccatttctctttttttatatgctactggtttgtcgacaaatgagtagtagagtggcttttcacttttccacaggtacttggcccttgcttcttcccatttttgttttttctcatcaaaagctttcttcataatttggtaccactttctgaaatcaaaccatggcttatcttttttgttcttttcattatgcttttcagcaagattagacaaagaccactcgaaactgtcatccaatagaaagagcagtttcaataccaccacaatgatagctacagcttgtacatcgtacttaacagcttttgccattttggctataggatcaaatgtcagaaaatccacttctcccattccagtcatttttaccacgtggcaagttaagctatgcatttcatcagggaggttgacttccatcaagtatttcatacacagtatgttgggatgaagatagcagtcttcagttatgtctggaaaacgaggccc

SEQ ID NO: 452456 - DNA, 1365 bp, Homo Sapiens
tagtttatcaaaagaatttattagaaaatattacacactacatacatatttatttaagagtataatttcagtagacagcactccaacttcataatacaaacaatatctcatggaccctggggcaatcactgtgcttctgaagctacatcttttggatggaacattccagcagtacacactgtggccatttaaaggaaggtaagagaaaaaaatgtgataattaccaaaacaaattttaaaaagcacaaaacttttggaatgttaatggataactactattagtctcaaaattctaggcatttctataaaacattgggtcaatgtgactagtaagttaacgggaccaaggtttcaaagatcaatactgaaccttgataaataataagaggaaatgtaactccacaaaatgtttctgattaagtttgtgcccatgcaaaattaacataaatttcttaactcaagaatgaggaatattaaagcaatgtattttttcaacataaagcatgcattttctaatacattcttaaacatttcaaaattttaaaagttcgaattctaatcaagtagctattaatgcagtctaaccagtgccccaaatcagacatggaacacacacttgttactgtcacggaaataattcatgggagtgctactaaagatatatgagacttcaactcttgaccacatcactttttctccaaaactttaggaacttgtttgcaaaaactaaatggtataaaacacattttaaaatgtcacccaattctcaaatgtcactgaaagaaaatgcaggaaaagtatgtattgtgtgattaatcagcttaggcttaactcaaaatactttcaatgttcacaaaattgtttctagagttctaatctaaaacaactaaggaggtgtgccttgatattctgaaacactgtcttaatactttattagaagaaatatgcttgaaatttctttaccataatctaaacgcaaactttaaaaatatataccagtagaataccatattacaaatgcccagaaatgtagaataaaggtcaaaaactgcttggaaatatttttatgattacactcataacaacaaagcttatgaactagcacaatcattatgggaccaacatttcaaaatattttgcctatcaaagctagcaccaggaaaagtattatgcacataaaattgagaaacagataatctttactttagaaaagcacagttctacagagtattgctctggctaaatagtttagctagtaaaaaggtcagtttatctcactgaggcatgtatctccttggatctattaacttatctgaagaactttccaggtacttggtatgtactgaaaattcttactggaatccc

SEQ ID NO: 452457 - DNA, 421 bp, Homo Sapiens
  misc_feature (317)..(317): n is a, c, g, or t
  misc_feature (319)..(319): n is a, c, g, or t
tcacctgaagaaggaagagaaaaggagagagtagatactatttgaagaaaaaaggcatggaaaaaccagataaagacgccatatcacacttccggaaaatgggactgaagagagagaaactgcagagccagcacagcaccatctcatcgtggggagctagttttaccacagaaaaatgagaagttataattcagtgatcttgaagtttccttcccgctctacaattagcgcacagtgtggaaggtgcagcgcggctgcttctcgaaactctcccctaacttgagaacccgctcgcgacggtctaggtgtgagaattncnctgcgctattcataattactctcctgctttgactttaactccgccaccagcgctcactatctgccacctcagcctgaagcagctgcacttgatcccgccagc

SEQ ID NO: 452458 - DNA, 822 bp, Homo Sapiens
  misc_feature (382)..(426): n is a, c, g, or t
  misc_feature (543)..(555): n is a, c, g, or t
aggaaagggaggttggacccaagggaaaaaaattgaccccaggggatgctcaaagggaaggggttgcaaaacccccaagtatcccccttcctgcgcaaaggggcctaaaaagcccccggttccaggccttttgttcccaggctggggtggatgttttagggcaaagttcactaccccccgcccccattaattgtgccccaagacaggagtctgtggtataaactaactgtgctgactttgggcaataaaggacctagaattctaagtactgaattaaaaatacagaacctactaacactactgtattaacaagctgactcctgtaatcttttggagatgacagatgatactggtttttaaaatacccaatcacatatatgcnnnnnnnnnnnnnnnnnnnnnnnnnnnnnnnnnnnnnnnnnnnnnctcccatttcctcagtgctctttagcaatgagtttttatgttaaacacttccaactgtcagtattcccatgaaatcaacattagaaaataaggtagaaaactgagttgttttgcttnnnnnnnnnnnnnggattaaatagctgttgtatccaaacatcacgttctgcttccatctctacattccactttccccattcttggagattaaaaaaacagggttagaaactttaatatctgacagactacaaagggcaaagacgtggcacatggccagtgccacacctacctggttgccacagcattctgaaacagaccacactttcaggaaaatgactaagtacttgaaagggtcagtatgttctgtgttttcagatgaggaagtctgatgaccgcccc

SEQ ID NO: 452459 - DNA, 247 bp, Homo Sapiens
  misc_feature (47)..(59): n is a, c, g, or t
tatctctaacattagaaaataaggtagaaaactgagtgttttgcttnnnnnnnnnnnnnggattaaatagctgttgtatccaaacatcacgttctgcttccatctctacattccactttccccattcttggagattaaaaaaacagggttagaaactttaatatctgacagactacaagggcaaagacgtggcacatggccagtgccacacctacctggttgccacagcattctgaaacagaccgta

SEQ ID NO: 452460 - DNA, 264 bp, Homo Sapiens
ttcaatgctctttatttcattaggaaagtagctgggcaggggtgttcccctgggggatggagtgggggtacagacagtagcctggctcctgtcccctaggattgacaaaccaagggctcagggctcagctgtgtgccacgcagcggctgctgtgaggtgtgttctggtagaaggggtcagctgaggtcagggttcttcccacgtggggatgcaggtgccgcagtctctccatgggggttggggggtggcctccatgcagctgcc

SEQ ID NO: 452461 - DNA, 1538 bp, Homo Sapiens
  misc_feature (196)..(209): n is a, c, g, or t
  misc_feature (1329)..(1378): n is a, c, g, or t
aggcagaagtttttttgtctaaaatgaattttgatgtgttttaaggcagagaccccaataaatgatgcatactacccccagaaccataagaagctttggcatctatctatatacccatctacagtcagaagtagatagatatgtacatagagataaggaaaaactaaccaagatgctatatgacgttatcctgacnnnnnnnnnnnnnngacatgcatcatgaaataaaaggacaaatcagacttacttcatggagaacacatatcaaaacaggtttctgattccactaacacatctaaatatggcaaaagagcaagtgaatgtctcacaaggttttgatgtataatatggatttggttttgtttttatcggtacaaggaaaccatctctgtcaccagcttttatttctaaggaaaaggatttttgtgaaaacattttcaattcctgctggtggcctgatagataccatcctaaaagcttcctttatcagagaattccacaaaaagtcttgagaaaatgaacaatgaatcagaagattaatccaagatgtacagtggagtttgtctacagagacactgacatgacttctgaagccagggggcatgcgagcgctcccaggcacggtccaccaagtgcaacgttcaagtaatcaggatgaaccacaatggcttctgttccatttgtttgaaaaattaaaacagtttgacaccctgaagtcatcggctgaatggagaggcatggaagtctgtgaggcaagcttctaaaaacatgctgagaacggctgtcacctgccgcgtcccacgtgccagcaatcactgacagggaagcgagacatagggtggcggcagcagtcagcgggcactttactcctggggctggctgcaacatctgtgcaaggaagcctacagttttcaattcaggacttggcagaaaaaaagagaggaactagtttgtaaaaagtaataaatgacccaagggtctcaaaatgtatgagattgtgtgcctaaaattaaaatagcttccagaatatatctgactcccttttttgtcatcttcaataaatgaatgcatctttcatggaatgttacacagctgactttaggttttaatcttattacagaatgtctccctcctcatacaccagtcttcctagttaatagtaaactactataggttaataacatctgtaaaggcggctacatatagcacagtactgtgccctgttagaataactgaatgtgtcatacctgttagattctagttttcttcttcattatgctgtaatctcatttaatttcatttcaattactcatgtaagggtttcgctgnnnnnnnnnnnnnnnnnnnnnnnnnnnnnnnnnnnnnnnnnnnnnnnnnnatgctgctttaaggcaagtgggcatccatcagttaagagactcaaacatgaattaaatgcaaacaaatatgaaaccaaggaaggctatgaattaactaaaaattttaacattttgggtgaagtggaagccaaaaagtcaaaacccagaggattggaaagg

SEQ ID NO: 452462 - DNA, 765 bp, Homo Sapiens
  misc_feature (200)..(213): n is a, c, g, or t
  misc_feature (225)..(313): n is a, c, g, or t
  misc_feature (395)..(419): n is a, c, g, or t
  misc_feature (577)..(626): n is a, c, g, or t
ggggagagattagaaaatgttttgaatttataaaattaatgtttttctttgtaacatttatatatattttttaacattttaagtttaacagattgtattcctttcaagtttctatacttgcttaagcaatcttgatttgagtaagggtcttgatttgtgctattatgttctgttagttttggcatgaatatactaaagcnnnnnnnnnnnnnnctagcatgtgtnnnnnnnnnnnnnnnnnnnnnnnnnnnnnnnnnnnnnnnnnnnnnnnnnnnnnnnnnnnnnnnnnnnnnnnnnnnnnnnnnnnnnnnnntcctgtcttcattgtttcaggtatttctttacccctctggattccccacgggctggatcgagatggtccagttatgcccagnnnnnnnnnnnnnnnnnnnnnnnnntggtagagcactcttgcgatgctgacactgccagcctccagtatcctcaccctcgcagacgatatctctctcggcctcttaatcccttacctgagaatgaagggatttaaaacactgatttaacattgaaaggccttattcaagtgcttgtaaatgcnnnnnnnnnnnnnnnnnnnnnnnnnnnnnnnnnnnnnnnnnnnnnnnnnntaacttaaggtctgccttgcatgtattacaaacagaatacagtggtttggaaacctaaatctgttttgttgcgtctgcatccaaaggaacatttgccttcactggggtgataaccctttgatgaaaatgagatatggtc

SEQ ID NO: 452463 - DNA, 1284 bp, Homo Sapiens
cttttctgcattaaatacaaatgcctgattttctctgcccaactttgcttaactgaatcaatccttttaaaagctttcttcttaactgctaaacctatcgtcaattcttaacctaacacaacatcagtcattcttacatgagcacaatacagttaaaataaatacaaagaaaaaattctccccagcaaatactagattcaatcccaaccatacagacacagtcttaaaaaaatcagttatttttttatttgcatagaaccaaaggaaagacttaaaattccaacatacatcctacgaggcttacaatttaattacaaatccaattttgacggaaaaaagggttttggttttcctctactaacgaggatgatactgtttcacatgcttcagttatgtatgctgaaacaccagatgcctatacatctttacttttcgcagaattagtatccagtccaaaaaagtcttttttgatgatgtaccgaacacactgcaaaatcacatttctttcatgtcgaatgtccggagctagaagcatttccaagagatatggatggtgtgttcttggttcgaataacgtttgatagttgtgataatcttttttcttcttagggtttgttttttcaaagcttttctttcggttctcactcttggcttctgaaaaatttctaccagtttgctttaacatcttgacttggactcttaggagcactgctatcaagaacctggttttctgccaaaaacgtctgcttcagtcttgatgggagtttcttctggctcactctctgaccctgaaagactgccatagctactcattagtgagcatagggctggtgtcacttccttgggtatcacagaatgttgtggtttctcctccttatcagactcagaatcactgtttatcaaaacaccaagaggatctgcatttgcctccggtggaccttctagcttcaaatcacacaagtgactgcctgatccagtgactgctctctgtctagaattgtcgtttttccatttgtgattcttgccaggacttctgatctttgccatttgtgaatgtctggacatccccttcatcttgccatattgtgttgttgtcaatactgctcctctcttctccttttcaagttttaacttcttcttcctttcaatattggccagagttggatagtttttccttcgttcttccctccaccgtgcaatttcctctggagtgtctaacttgatcttcttcatgccaggagcatgcatatttctcccaatggaactggacaatcttctcgtgcc

SEQ ID NO: 452464 - DNA, 551 bp, Homo Sapiens
  misc_feature (535)..(535): n is a, c, g, or t
atccccattttcccctccaggaaatgaaaacatattgaaactttcttttgtatttagcagtaatccagcaaaatataagctttaatatagcgactgaggagtggtagtttgagccatgaggtacgggggacccagaatccacttagtgaggacagtgatgaccagcaggtggcagaagtaaattccaagcagccaaaaaaccaaaaacattcggagaattttccccccgttcctgagggacaggatggagtttggacaggaagaactgtaagaagccaagatctgcgacagtcccaacaaatacagtctggtcacatggatacaggaaggacgatctggggaggcataccaacaagaaacgaagccagggacctgaatgcaaaactagcctcaggtgacatgttctcctgcacttaggaagcaccggcaaaaccatgcccacatagagggggcagacacatgtctggggtttcagtttctgcaggaccttcatcatttgttttcctttttgttttctctgttgcccgggttgggnttgcaatgggcgcatt

SEQ ID NO: 452465 - DNA, 802 bp, Homo Sapiens; identical to SEQ ID NO: 152243
  misc_feature (125)..(135): n is a, c, g, or t
  misc_feature (772)..(773): n is a, c, g, or t

SEQ ID NO: 452466 - DNA, 1540 bp, Homo Sapiens
  misc_feature (1070)..(1070): n is a, c, g, or t
cctcgagtctgcaggaggctactgatgaggtggcgcatctccctgtttatagggtctgcttgttcattggcagcaagggtctgctcaaattctatcctcagcatttcatactccttgcggacctgggccaatgtatcttctagctgaattacttcagtcctcagcttcttatgaagactaacctcatctcgctcaataagctcaacctggtgctggtgggttcctctggtgccatgaagcagggtccgagcctcatccaagtgtgctttcaactgtaggctctcattatacaagacggagaactgtgactgcatgcagcgatattctggagtttccttaacgacttgctccactgcactccgcaattccaccttcagcttttcattttgtgtagtgacctcctcaaagtcttgccgaagtttctccagctcacagagacggttctgagccaactctttgttctcctcaagctctgcattcatttcctcaaacttccgagcattgatagtgattgtgccgccatacagactgctccccgctccatacaccttataacctttggaattcacccgttctaggacttctgctaagtgtcggttgagtcgctgttccctctttcgaattttgtcaatatcccactgcaggtcatcaatcatggactccaggacagacactcgtgattcggctgtctccactttactctgcaacttggagaactcatgagacatggtgcgatgcttttcctgaagaagatctgtcaattcctgtagcctcatattctcctgtgcgaggaaagagttcagctcctgcactgcttcctccactatcagattatctccactgtttagcttccgggataagagctcccactttttcttgcaatttttcataaacagtcacaatctgggacacggctcggcgggaagactccacacgttcctgcagctgagactccatctcttcactggaactgctggccaaagtagcaaggaaagagaaagctggctcttgcccttcccctctctctcggtcatctttacgctcctgattggctatcagagtctggttcntggttcaggcacaacaaggggctttttcgttctgtgagtaggtctcccaagccttgctccagatcataacgtttaaggatgatacggatgttttcatcaaactgactccagtatcggttgacaatcaatagtgaggcatcatcagtggcctgtcgtcgttccagtttttcaatgtgctcacgaagttcatcttcaatggcctgccgctgatccaacatttctgccagcttgcgatttttggtttgcagtgttctaatgtctagttcctccgttgaagagacacctcctagcttaattgtttccactgtggtccctgaatcttcaacagctgccttcttctcaggaggcatggaggtgccaggttctccagctgctcttttatttccaattcctgacattttggcagaagaagacagtcgttttccaaggcccgtgcagagattccagctctcacccctgacccgcggccc

SEQ ID NO: 452467 - DNA, 576 bp, Homo Sapiens
  misc_feature (22)..(22): n is a, c, g, or t
  misc_feature (99)..(99): n is a, c, g, or t
  misc_feature (108)..(108): n is a, c, g, or t
  misc_feature (111)..(111): n is a, c, g, or t
  misc_feature (148)..(158): n is a, c, g, or t
tagagttaagtgagctctgtgnatatatgagaatgactattaaactctatagccatactactagttccttttatcaattaaagatagtatgaaaggggnaaaaaagcnccnaaattgttaatagcatctttattgtttcactggtgcnnnnnnnnnnntcataattgtgatgcatttcctgctaaatttacaatgaaggtgatacataaattatatagatcacaagttttcttttatactatttaaaacccaattatattgataaatatgtccagaggacaacatgggttcttaatggatggctgagtccaaatatgcaaaatatagcttctggttttgaccatggtgctttaaaattctcaaacatgcattaatatattctagttttagggaaaatcttacacatggccttatcttgcaatttaggggaaagcccaagatgaatttcacatacagtattcctttcttctaaattaatctcaaactggactagaaaacaagagacagacgcttttgggttagtgctccccaggaatgaagaaaatacacaatcaacaatgaagcaaacaaacaaac

SEQ ID NO: 452468 - DNA, 1037 bp, Homo Sapiens
  misc_feature (41)..(41): n is a, c, g, or t
  misc_feature (670)..(687): n is a, c, g, or t
  misc_feature (710)..(949): n is a, c, g, or t
aggctggtccggtccggattcccgggatcgggaaataaccntcctgaaatcaccaaagagcagttcctcagggccttccgggtgaccgtggccgtggagcagtcgtggtgaaaccggtcagctgtggacctgccctgcgaatcggcagaggcctccgtggtgaagacagaagctccgtgaaccaactcgaggctggagccaagatcctgcctgatatccagttgcctgtttcacttgttactgttactgggagagggagacaaaacctcatggcaatcttgtcctcactggagactcagaaggggaagcattgggaaaccatgtatgtttcatttctggtttaaccaggcttttcaggatgggacttcagaccaaggacacaagttgggcttgcttaggtgttttgtgttgtgcgcaggcctcagagatgctcttccggtcagagttcccttggcagggccttggaggcctctggttggctctctcaggaagagggcaggtcagggattgggcggtgtaaattgactcagaaacctgcggtttcagcttttctgtggcaaacagggccgagggctggtgaagctgttaaggctaaatgtcgcatgcatgaggcgggctgcaggcctccttaggccttttttggggtaattacaccagtatttaaaaacannnnnnnnnnnnnnnnnngagatggagtcttgccctgtcannnnnnnnnnnnnnnnnnnnnnnnnnnnnnnnnnnnnnnnnnnnnnnnnnnnnnnnnnnnnnnnnnnnnnnnnnnnnnnnnnnnnnnnnnnnnnnnnnnnnnnnnnnnnnnnnnnnnnnnnnnnnnnnnnnnnnnnnnnnnnnnnnnnnnnnnnnnnnnnnnnnnnnnnnnnnnnnnnnnnnnnnnnnnnnnnnnnnnnnnnnnnnnnnnnnnnnnnnnnnnnnnnnnnnnnnnnnnnnnggggtgagccaccatggctcggccctaaaaaaacaattttctttgaagaatcccgattttggggccttagtaagggaccccagcaccc

SEQ ID NO: 452469 - DNA, 789 bp, Homo Sapiens
  misc_feature (543)..(543): n is a, c, g, or t
ggggaaaaaggggatttataaacatcatttgtttgaagaacttggtacatattaggttctataatacaccgggctaagagtattctttctttaaatctgttctaagcaaatttagccaccgatgtttccagtttacagtacttggagattgcattcagtttgagtagagcacatcctttgtcctgtcattgcttatattgatccccaattcatctgcatgacttgcacgctttctcagcatggtctctagttcttttccacaagggtgatttaggtgacatcataaaatgagagggcttcagacagacctgtgttcctcacatttacatacctgcattgtctgctcctctcctctcttcagacatattgatacataggcttttggctattttcattttcttcaaaacagtaaagaactaaaggcaactttggcgattaaagccttgatttggttgaatgagaatttttactttgatgttcctgtatttgcatatatttattatttatcttcattaatgtgtttctattagtttgattacttanagatttaatggacatgtgtgtaatggatcccaaagaatcaaatagtattttaaactactactatttaagtagaaactagtataaaactgtaaatactactataagacattggctttttcagacatggatccaaaaaatttctgcatctactttgaaagtttggtatgtatggttggatttacttttgttttatcttcttttggggggttggggtgattttgttctagatgtctcctggagtatgaa

SEQ ID NO: 452470 - DNA, 981 bp, Homo Sapiens
atataattcactttcacgagcgattttcaagtccctcataccgctgctgacactgtttgacagaaacatcggcaatatcagtacaaactagctgttaatttctcccttttttccatttcagcaaatctccgcttttcccacatcccaggtccaaaacagtgatatcacgttttttcttctgtcgtactttttccaaaaattctccaatgagaacacttttcatccaattattaaagtttcttaggtaaaaaatacgactttgactacgcttctccaaaccaacttcctggaagttcattgtaatgggcagccactgttgagctgtgtccttcttccagatttttctgcttttcaggaacatcctcaagtgctatttttctcttattttgagtgccatctccagtagaagatttatcttttggaacatcctcagtttctctttttcttttctttgaattgccttcagcatcaccacaatctttttcctctgggacaatttcaggatcaagttttctcttcttggatggagtgtctttcccacaactagaactttcctttacaagatcatcttcaaactcttttctctttcttgctatgtctacttgcctacagacagaagtcttttcagaaagcccagtcccagaagctgttgtgttttcattaatattgaatgaagactctgtttcagaattcactgacgcttttgcctgttcaagagacatcttttcatattcttctgcttttgcagaatttgccatttatgattacttgaattgatggtaaaacttcatgaaccaacactttcaatgactttgtgaagctgagattttggtatcacagaaaatcaaggtgaaacaggaaatgaggttggtggtgcctatctgatttcgaggcttgaagttgtacagtacccaataggttcacacatccagcacagccaaacgcgattctgtttgcggaaacggcggcccgcgccacccc

SEQ ID NO: 452471 - DNA, 842 bp, Homo Sapiens
ccactttcaactctctgccctgccaccttcaccctttgttgcaccatgttttcttctccccaggcacaaatatttcgttgttaacttattttttctgatgttccccaactaaccacaaagccagccctgctgggatgatggataaaaatcaaattaacaatcctctcaacgtccaggaaatggctgccaggccttctgacttcatgaaacgccggggccagctgtgctcttctatgctgggtcctcttcgtccattgccacattgctgtttgtattcttcttctgctcagcctctggctctgcaggcagaatgctggtgacggtgtggagaagagcttcaatctgctcctccgtgagccgctcttcactctcttccaccatcagctggatctccacagcagtcacaggccggtggttcagcagctggagcttctcagctttggtcaacttgtggcttttcaatgctgtgagaaattctctgacaatttcaggactctggtgcctgcatggtgtttttgatatgtattttaacgtttcataggtgatagtgttcaagttctgttgcccagagctgtgtttattctttccactttctttacgctgctctttcagatcagttagtaactgaaatacctcgtagttactgagaagcgcagaattggcatccttcacttccatgacgtcccgcctcgtcgcccctagctgccagcagacaaagaacctcacacttcacagctgtctccgccgccaccaacagcgccaaggtgccagctccgcgcgccaaggtgctcgccgggatcgccgcgctgcatgccgggagcttggcggacccggaacccgct

SEQ ID NO: 452472 - DNA, 1168 bp, Homo Sapiens
aggatccccatgactaacccaccccatttcatagatacagtatctcgtgagatggtaggtgtttgcgttgttctaatctatggaaaaaatatttatctgcttgacagatcccatcgtgttcctgcttcaggggaccttagggattgtcatcaaccaggcacttcggtggcaatctggagcattttttacaagccttccacttcaatttccatctttaagaagaaactcaagggtcagagtcaacaagatgaccgcaatccccttgtgagtgactaaaaaccccactgtgcctaggacttgaggtccctctttgagctcaaggctgccgtggtcaacctctcctgtggttcttctctgacagactcttcccctcctctccctctgcctcggcctcttcggggaaaccctcctcctacagactaggaagaggcaccctgctgccagggcaggcagagcctggattcctcctgcttcatcgattgcacttaggagagagactcaaagccctggggcccggccctctctgcatctctctctgatctagctagcagtgggggtgtcaggacagtgaggctgagatgacagaggtggtcatggctggcacagggctcaggtacattctagatggctgtcaggtggtgggtagctttagttacattgaatttttcttgcttctctatttttgtccacacacaaatcagtttctcctgatctttatgtcttgggaacaggggccagaccagggagaaactctcaggtactccttgggagttggtcccatacaagtgcggactcctggacattagcgaggtgtaaagagggcagggtctgtgctgccccggcaggttttgctctcagatgctggaatagggtgggcctccttcagcctgggagggtctgagaaaaagatctactgacccccatttatatcacccctgatactttacacccgggctttcttcctaaattcttcatcccataccctctggcacctgccaggcccagttttaagcatccttggttcatattaatgcctccttccccccgggacccccatcgcttcatggcctggcgtccccacacattgccggtcaggcatgatgggcccccgtcatccccgctcgatcccggtcacttgttaaacccctcttgccctcttcgcgcatag

SEQ ID NO: 452473 - DNA, 963 bp, Homo Sapiens
  misc_feature (32)..(32): n is a, c, g, or t
  misc_feature (708)..(708): n is a, c, g, or t
  misc_feature (802)..(802): n is a, c, g, or t
  misc_feature (811)..(811): n is a, c, g, or t
  misc_feature (821)..(821): n is a, c, g, or t
  misc_feature (837)..(837): n is a, c, g, or t
  misc_feature (901)..(901): n is a, c, g, or t
ccaaagtaaaaagaaaggaccacgtactcctngtccaccccctcctataccagaagatatcgctctggggaaaaaatacaaagaaaaatataaagtaaaagacaggatagaagaaaaaacaagagatggaaaggacagaggacgagattttgaacgacaaagagaaaagagagacaagccaaggtctacttccccagcaggacagcatcattctcctatatcttctagacatcactcatcttcctcacaatcaggatcatctattcaaagacattctccttctcctcgtcgaaaaagaactccttcaccatcttatcagcggacactaactccacctttacgacgctctgcctctccttatccttcacattctttgtcgtctccccagagaaagcagagtcctccaagacatcgctctccaatgcgagagaaagggagacatgatcatgaacgaacttcacagtctcatgatcgacgccacgaaaggagggaagatactaggggcaaacgagacagagaaaaggactcaagagaagaacgagaatatgaacaggatcagagctcttctagagaccacagagatgacagagaacctcgagatggtcgggatcggagagatgccagagatactaggggaccgaagggaactaagagactccagagacatgcgggactcaagggagatgagagattatagcagagatacanaggagagccgtgatcccagagattctcggtccactcgtgatgcccatgactacagggaccgtgaaggtcgagatactcatcgaaaggagatacntatcagaangatccccggnagtatgccgaaacatntgagagagaaagtctcgacgaaataggatgatcagattgatccgaagaataaatgcgatgcgantaggagtcgatctaagatggctagtcattaaacaaacgcttacgtggcccctccaaaataag

SEQ ID NO: 452474 - DNA, 1095 bp, Homo Sapiens
agggaacagttgacatgacactcctttattaaaacctagggacattgttataaaaactactgtatataaagacaaaagcagagcaacagcggtcagtgaaaaacacatgattattcttacattctagtattattattaggaatattattggttttggttttcccggttatcagctctcagggagaccccatgcctgctcacatgaagtcagagtttacgggagagaaaatatttccatccccctacccctgcgctgcatgcccttgtccagctggccctggggacgacacatcagccttttgtgggaggtctcctgccttgttaaggtgactgagcccctcacccttgcagcccccacctcgttactgcacattgtcgagacactgaccacttggttatttgactgtgaggtatgccactagctttaaaacgggaaatgggaaaaataggaagaaactgcgtatgagaaactgacatgcaattccaagaagaggctctctcttgggccaccagcttggttccagctgtggccagggtggccatatcatctatagttttagatcctgtgctcagggttggcgctgaccaatgtgggatcctgcacattttggaggctggtttagggtcattcaacagggtacctcattgtacaaacctaagggtcaccgttctcagtgcagtctatgtaaacagtatccctgggagcccattaccatttatgggacagtgtcgtgaaatggtgcctccctggaggtgaaccctgcagcagccccggatttcagtctgtcaagggcaaatctgtcagggctttgatgtaaagataggagttttaggtacagagtaactaacagtcaaatctgctcattcatcaagcatctatctagcaccagctgttggcttggactagaaactggggtggtggggggcaatgacacctccaaggtcactttcacgggtgggacaggtaagtgttctgaattcattttgtgaatctgagcatgtctgttaggcacaactagccgtttcacaagtggtcctagctatagcaggaatggctcccagactaggcctgggtacagggccaggcaagtggcc

SEQ ID NO: 452475 - DNA, 913 bp, Homo Sapiens
  misc_feature (101)..(101): n is a, c, g, or t
gtaaaagggcaagccttccatgccctgggcaagttttcacgtgtagggctttctcaaaaaactctttcttgatccaaattccttttttaggatccctgttnctttgtatgagcgatagaaaacagacctgaagaagcccgcggtctacagctgaacgattcatgataccagagtcttccctgattatatccagtgtatgatgcaatggccacaattgagttgatgcctgctggcagctctctaaatcgtagatattccatagaccgtgtagtcacaagtggctttttgaggataatagagaacatgggccaatgtgtccatgcgaacatggaagttggtgatgtaaactcccatagcctgcttacccatagcagactggtatgtgtttctaggggactggttatgatcaggaaagggaataatagatgcacagacaccaaggatcattgagggatgaatctcacagtgtgtatatgtggaacaataagctacttctttctcctgtaaatcatctggagtcattgcaagcatcactgtttcttcttccagggtatcaatatactccactaccccactggccacaagatcctgccaactatagttgttatattctctctctttcaattggtcaatatgcctcttcttcaaaagtagcttttgtttttccacaatcagaagtggtctacaaatacggcctgcatccgtatagatccgaatctccctctctcgaatatctctgatcatagaaacttcagacacaatgatgtccatctgacgtctcaatttccttagggtgttcataagttgttcgggatctttatgtattccaacccagcagccattaacaaaatcttggttgcatcagccctcgtgccgaattcagccacccggcctcgtacctagcctgatgttg

SEQ ID NO: 452476 - DNA, 1104 bp, Homo Sapiens
agaagactgctccctccagctactgaggaatgatgacaagaaaaggccgaattgcagtgtctccatcagcagtttgctctccatgggcacacgatgacaaaatatcctgaagcgaaccactagtctgacctcagtagcaggattggaagcttcatgccatgggagctgtcaagaaaggcatcccaaagagaactgaaatttaaaaataataatagaccttcaggaataggtgattgtccccatatactggggatgaaatacccaatgtaaccaaattccccagtaagatcacttagtttggcaatagtcttttcttttgagcatgttgaagtttatttgctcaatgaaggctgaaattataagtcagtatatatgtattactaagtagaacttgaggtaattatatgttttagtcaaaagcagtttctgtgggcttggtataaaccctactttgtgatttgctaaagcacaggatgttgactcaaaccaaaactagttttgtagttaatatgtgttgtgtttctgtgacttaatagtcaactagaaacgccacctacaacaacccaggtacttaagttttaaaagttttttttaaaacacttgtcaccatattttggaaaaatactaacatttggattactagttataaaagtgtaatttctactgtgtcataatcagccatgcagctggagacttggccctctttgtacagcaaagttgtgaaaaaaaagtatttgcactacattttatttaaaccattagggaaaaaaagccaacccatgcttttctttgccgagatgtagggctgtattattggctagtgagaagcctgggaacactaggactttgtgtgggctgattgcaggtatcagatccgggattatacaggtactgttggaagtatcttggggattttcctgataagaacagtagtgattgcattaaaaggacaggatgtaaagtgaaatcagtaaaattatcttagtagacagagggtgcttgaatttttacaaaatgtgtaaaaaagtccttcccaatcattaatttttccaggaatacccttaaaaatgtttaaaggaatggtaattccaaaatacctgtttt

SEQ ID NO: 452477 - DNA, 649 bp, Homo Sapiens
  misc_feature (507)..(525): n is a, c, g, or t
gctgaggtgtccactttactcctgccccgatcacctccccttcctgattgttagtccttttgtttctccaggaagtctcttctcatccctgttcacgccttcatgtaacaagcatttatcacactagtaccgtgagccacgcgtgtgctgtggttacatccgtggaacagacagacagcagtgcctgatcttgtaattcttccatcctttcattcctttctctcagtctcgtagctgatccacagattgcaacgtacagatgtgatgttccaggcttggccacaaggggacactttccattcttcctccttgctgagaacaatgttgcgtttgattagaagcgcagccaagtcctccggcttggtaggtttcaagctcttttgactgggctggcgctgacatttgcaggggcagctgctgtggattgcctgcgcattgtttggctgtagttctaacagaggagtggctgcgtctgacatcatttccaggcatcaagtgcctggggcnnnnnnnnnnnnnnnnnnnaatggcgaactctctgacccccccctgcctggatttttgtacagtacatgcactgggcaaaaaagccccccctcaggaagcccaagttttgtagcagcttgttgaaaaaacttgggggcctttt

SEQ ID NO: 452478 - DNA, 680 bp, Homo Sapiens
  misc_feature (312)..(571): n is a, c, g, or t
  misc_feature (574)..(610): n is a, c, g, or t
tcaatgtgaaaataaacatttattataaaaattagttttgacattttaaagtgaatgcagacaaggtgttttccagttcaaaaggtccattgtaagctagagaagtaaattccaaggctggcaataactgactcatattcttcacaagtggcctagacaataaggaaccattcacctcaaattcacagagccatgaatcacctctgcttccccatgaccttttccatatccttcctactctgtcttccaaccatgacacagaactgaaacatactttaaaaatctcatccttggctaggcacggtggctcannnnnnnnnnnnnnnnnnnnnnnnnnnnnnnnnnnnnnnnnnnnnnnnnnnnnnnnnnnnnnnnnnnnnnnnnnnnnnnnnnnnnnnnnnnnnnnnnnnnnnnnnnnnnnnnnnnnnnnnnnnnnnnnnnnnnnnnnnnnnnnnnnnnnnnnnnnnnnnnnnnnnnnnnnnnnnnnnnnnnnnnnnnnnnnnnnnnnnnnnnnnnnnnnnnnnnnnnnnnnnnnnnnnnnnnnnnnnnnnnnnnnnnnnnnnnnnnnnnnttnnnnnnnnnnnnnnnnnnnnnnnnnnnnnnnnnnnnntcatctttactgaaccatttcataagctctactttatttgtctagttggatttcatttcttctggaaacc

SEQ ID NO: 452479 - DNA, 886 bp, Homo Sapiens
  misc_feature (56)..(73): n is a, c, g, or t
gtagatcgtgcgcacctggaatcccacctgcccaaaagactgagactccctttccnnnnnnnnnnnnnnnnnngaaagaaatagcattgaagaaaataccgcacatcagaggaaagcttattttctgcatggtgtcttttcaaagatagaatatttgaagcatgttttctagcgattgtgtgaatgagggtgagctggctgaggcatcgctcaagctggggggtggtgtgtaagaagcacgtggagccacaagaggcacctcctatagtcagctaagggcttccctttctgcgcccagcttttgggtgaagggtgatttctactagacacatctgtgcttcagtcatagatgttaatagaggaagcagttttcctgctgcagattcctgaatagagttgctgaaagagtctacttctggactcaggggaagttgaaggccagtctgtgtagaaaggctgaggcaacggggaaagacctgacagctagttacatacgctctgacatagtactcccatgatggcttccagtgacacatgtgctgatagaattctaaacctctggaatttccctgctggcgacttctatggccgttgactgtacagggtaacctgatgccagatgctatgggcgtgatgagaactagagcattgcagcatggaggaaactgtgaggcaccagatcctgtgcttctgcaggccattttctgaataacccctgttaggaaggttggatctggctgtgacttgcttacaggaagagtcctggggacgaaatcttgagttctaattaaacggaatatacagagcaaaccgtgactcaactcgtctaactccgcatagtcatatgcacacatagaatctcctcgtgtgtatgggatttggatct

SEQ ID NO: 452480 - DNA, 732 bp, Homo Sapiens
  misc_feature (101)..(101): n is a, c, g, or t
  misc_feature (174)..(174): n is a, c, g, or t
ttttttggctcaagccaaggaggttttcctttgggcccttcaaggcttgcccataaaaggaatgcctttttgagggtccagatttgcccaaggccaacctnccatgaaattttcatttgaaagtatgattgtgttatcagcagcaccttttgcaaggcctttgtacacttttcnagacccacttttcaggtcaatagctgggaaaataggaagaaaccaatgtgtatcttttcttctccaacaaaatgagggtaaaataaaccaagtaaaatgcagacatttctatagtttccatgttaatgtggcacttattctacacatattctatctatcaattatacattatctgtcatttagaaaaaaagcaaaatatagaaatacaagaatacagaaatttgaggtaaagaagtggaacttccagttctgtagtggctcaggtcatggtctgcaaccaccaccatcaccttgagtttatagacacctataagatcacagctaatcttatttcagaagtgaagaaagagattgtattcattttctcttagtggcagaattcattacaggcatcttactgttgatttttagctctgtatttattaataactaagcttctgaaagagtccataacaatttcagtcatacttcacagcatttaatgagggaggggtgaggtaacagatgagaatatggcatttgaaaacttggagacccctgaggatcttattaagatcc

SEQ ID NO: 452481 - DNA, 821 bp, Homo Sapiens
  misc_feature (728)..(759): n is a, c, g, or t
ataaataataaattttagaaactttggtaagggggaaaaaagagggccaaaactcaaaaagttggtgttatactggcttttgaaaaattaaaatcccccttctggggggtgggtccgggaaaataatccagggattcaacttatttggtaggcatttcaaaggatattaaaaggattcttacctttaggagacatcttagaaaagattggctaaaatgtgtgaaattcttaaaattaaactggctctcagttattgctagaaaatgataccaaggctagcagagacctctgaaattcacagacattcagaaacccaattccgtcaactatttgaaccaaatgaattaacccagataaagggaattaaacttgatttttcccttcctcccaactgactaaaacaggtgtcaaagagaggcaacagcagaaaagtggtagggggcagaagagggaggggtttaaaaggtgctcagttagactgtggctctgaatcacagtaaaactggctgttctgggtactgagttacttaagaaataactgacactattctaatccacagggacataatgaaagcatcacattagtagaatgaggggacagctgagcagacaccagaaaccacaccaaggattctactcgagatctcaatatgggattcaggtcttagcaaccaaaatctgaaaacgctcctaaaggggatgaaaaggtaacataattaaacatacgnnnnnnnnnnnnnnnnnnnnnnnnnnnnnnnngcccatgaattgctattatttcggactgcttaaaatccaaaagattctcttcaaattgctcg

SEQ ID NO: 452482 - DNA, 629 bp, Homo Sapiens
gggggttcaagagattaattgctctccgacaagaaagactaatgggcagtcctgtggcctaagtaatatacatatagttggattggattgtcagcagtaacattggaaatttaggtttttaaatcccaatattaactttttactcttaaaaagaattttgctgattatatataaaggtagtctcatttcatttgtctctcatgtaggcttgaatatttgttaatttgaattaaatcaaacattgtaaaaattaaaacaaaatttaagattgcatgaaaatgttatactgttaataaagctaaacataaataagtctgttaaaatgaatggtagacactagtgtttcttagtgcaattcaaaaaatgtcaagatgtcatttaaagacacaattttgattaattatgcatacatgagaattgaattacatgctataaatatgagatttcatcttccgtatggtattcaaccatttttaaatattttatttcaccatattgcaaatttttaggcacaataaaaagcaccctaaacaatgtaagcagagtgtgcatgttaaagaacatatttatggaaaaaaaatttttgaaacttaaataaattggtgattttgctcagagatcagcttcta

SEQ ID NO: 452483 - DNA, 716 bp, Homo Sapiens; identical to SEQ ID NO: 62702

SEQ ID NO: 452484 - DNA, 919 bp, Homo Sapiens
  misc_feature (36)..(36): n is a, c, g, or t
  misc_feature (884)..(884): n is a, c, g, or t
ggaatcacatcagtttttaatgtatgaatcagaganccataacaatccactataaatgtagcatggttatgtattttaagtctctagtcctattttccttagtgtaggcataaaaagttcttaagggcttagaatttactcttaaaatactataaaatattactatttttatgacaaaagcaatttatgaatttatggaaaaggaaatatttataaaatatgttagtaaaagcactgtttatgtttgtatagcaacatttaaaagtattcaaaggtcattcattgctaaaaatatttaaagcaaaataaaagggaagttaaaaacagcttcacttaaacttgcagtttctaaaacttatcaggacccaagagcctggaagtatcaaagattaagtggaaatccatattcaaaagagttctgtggaattcttataaagagaagagcaggcaaaggtcatcggaggacattattttagctgaaattctgagtatcattcaaacaggggagccaatgcttggtattaacaaagtgctgttttctactgctgagctcagatgacagcccaccctctatttgccaaaattagtggatgagaaatcatttcatgaactcatccaaaaacatgaagtgcactaataaagctttactgccatccctcagtcatcactttgcttggctaggctggtggccagcaggaatatctccctctacaaaactgtttcaaagtaatgacttggaggaagtggtgtgctgataccatgaaaaaaaattccctcaaacacaaagatagttcaaaaagcatctgtatatggctcagaggaaacaaacagctcagctcatttcaactcaaaagaaacccaagagaccagtttaccttggccanggttacacacatgcaggcaaacttaaggttggcat

SEQ ID NO: 452485 - DNA, 790 bp, Homo Sapiens
tattctttccaccaaggccattaaaaagtggttattttggggcatcagaattttggttggtttaaatttcttttcggcttatttggtattttcatatgccatgaggaatgttaatatgcataacctgtactcctcccaaaagagtagtacagctaaaaagagaaagcagtgccaggtagacaaaatgtctctttcaacactggctgacccctggatattatactggtaacaagatgatagactctgtgttctaccatgttcctgctgtgacagctgcatggcataaagagacagagatgctctacttccaggagttccttgaatgtacttagagtcttcttcctagtgggtctgaccaccttcttagtctgggctaagagctggccgacattcagcagcagcaggaaccccaggcagacaatggctgggatacaggtgcttagtgactctttcagagctgccaaggtgaagatagcccccatcatgagcagaatcaagaacaagttactgatctcttgcagcatcggtgggcccatgaccagcagcaacccagccagcagttccagaaagcccacagctatttggtagttcaggggatctggctggtagccaaataccttcagcgggaacacctcagcaaactgcacgaacagggcattcatccgctccgaaactggagccgagatctcctccgagagcttggccaaccccacgagcgcgaagaagccgcccagcagtacacgcagcaccgaaagcaggagcgccatggccgcgctccccccaccgtccc

SEQ ID NO: 452486 - DNA, 212 bp, Homo Sapiens; identical to SEQ ID NO: 246319

SEQ ID NO: 452487 - DNA, 794 bp, Homo Sapiens
ggggttttcagttgtttctgtaacagcagaaagtgcactcactaggagtagtcagaattcaaaatgctcaagagaaagccatccaatgtttcagagaaggagaaacatcaaaaaccaaagcgaagcagcagttttgggaatttcgatcgttttcggaataattctttatcaaaaccagatgattcaactgaggcacatgaaggagatcccacaaatggaagtggagaacaaagtaaaacttcaaataatggaggcggtttgggtaaaaaaatgagagctatttcatggacaatgaagaaaaaagtgggtaaaaagtacatcaaagccctttctgaggaaaaggatgaggaagatggagagaatgcccacccatatagaaacagtgaccctgtgattgggacccacacagagaaggtgtccctcaaagccagtgactccatggatagtctctacagtggacagagctcatcaagtggcataacaagctgttcagatggtacaagtaaccgggacagctttcgactggatgacgatggcccctattcaggaccattctgtggccgtgccagagtgcatacggatttcacgccaagtccctatgacactgactccctcaaaatctagaaaggagacatcatagacattatttgcaaaacaccaatgggggatgtggacaggaaatgttgaacaattaaagtggggaaacttcaaattcattttatgtgggatgccatcctccaaaaaagggaaacagcccccccagaaaataagggccaaaccgaaagggagtaccc

SEQ ID NO: 452488 - DNA, 935 bp, Homo Sapiens
ccctgtttacaaaaaatttgatttaaatgatcaaaaaaacctaatggttggtcactccttctgtttacaacaaatcttcccttgtgaactgcccacccaagtttttccataataataccaggcaattgaaaaacccaaggaaattatgttaatctttagttctccctttgcaagtgtcttttctttcttacacccagtgcttagaaataaggcactcttcaaccagtgttcactgaattcaactgctgaaattgtaacagttaaattatcaacacaactcttaataaaataaacattcctttgggaaattgtgggaaatcaaaacactttttagtttatacaagtattcataaacataaaatattctagtttatcctaatgccctagctcttatgagtgctatagaggcaattaaaaagggaaaatttcttgagtagttcacatgtggagaatttgttaaaaccgaaaagcagtccaaaatttttaaaaggcatactaaatattagctatactcactattacatggtatatagcaatttagtaattcatagtaccacatattttactttaaaagcaggtcccatattaaggcctgcttttaaaattgccactaaaaagaaaatattttcaatttgtatatttaaaccattaatttagataacatcttttaaagtctacaaatttaacatagccaagagttggtatttgagaaaaaggtttcagtacagggtgtgaacaatgaaaaattataaaggcatgtaataaaaatgttccataaaaacaaagatacctcaagcaggtccacctatacctctagtttagtttagaaactaattcagtattttaagaatcatataattttaaactttgcactaagcctaacctttttaaaaaatggtcagggccaggtgcagtgcctcaagcctgtaatcccc

SEQ ID NO: 452489 - DNA, 205 bp, Homo Sapiens; identical to SEQ ID NO: 246322

SEQ ID NO: 452490 - DNA, 667 bp, Homo Sapiens
  misc_feature (41)..(41): n is a, c, g, or t
  misc_feature (108)..(108): n is a, c, g, or t
  misc_feature (134)..(134): n is a, c, g, or t
  misc_feature (159)..(159): n is a, c, g, or t
  misc_feature (223)..(331): n is a, c, g, or t
tgcatggtgttttgttatgggtgtttggtgggtaaatgtgntgtggttgggaccagtaaccagggggatgatcccattgcaaaggtgaaggggtatgtggggaagccntaggagccctgggggaggcccaaccncaagcccagtcagggaaagtcttcntagaggaggtgacctctctgctgcactgggccctgcacgaggcactgtgtattctcaggagagnnnnnnnnnnnnnnnnnnnnnnnnnnnnnnnnnnnnnnnnnnnnnnnnnnnnnnnnnnnnnnnnnnnnnnnnnnnnnnnnnnnnnnnnnnnnnnnnnnnnnnnnnnnnngcctacgtgagatctatttctgttttaacaaccctaaaggataggtgggaagagaaaacccaatgtcaccccttagtccagcacctgccatggctgttttcacgatctttctctcgattttacacagatgcaattgtggtggggcttctctgtgtccaatgggtctcatttcactagcatgcaagacgttttaacgccaggatgttcgtattcactcgcacgcttggcccttggtttcgtcagcgcggagctctgcctcgtccttcctgtgtccccagtacctcgctctgtccctggaaggaatacacgctctagggtcatttgttgaacacatcc

SEQ ID NO: 452491 - DNA, 825 bp, Homo Sapiens
ttttttttgtactaaaattactttattacagttgatttttttaaacatttcctttgctatgatacaaaggatacttacaaacaaaatattacatatgaccttgttttcgctcttatgttctgacaacttggtaacagcttttaatgcacaatctatacaattaatacaggttatatatgaactataaggtatgctgaaccagaagaatactgacaatatactgtacaataagccttaccagttagtgctgtggaccatttataccaaaaggaaaatgcacatctgtacagtcacctttaccagctggtgctgacagagagggagaggcttcttccccaatgcaacccttgataagcctccactgtgagcgtctgtttggtccaaaaatcgagaggacaatgtgtatttaaaattagttattggtaaagtggtagaacatcacactttcgacacgatactctctcaaaaaagtatcagtcccagttttaaaagaccacaagttctttgtccactatgaaaaccctacgggctcagggggtttgggagatgagaagatgaaggctgccaaaaaaggaggcaagaaaccaagccaaaatctaggtcttgcaaaatcatcatttttcccttcaccaaagggaactagaaatgtacaaattcattgatgaacctcaatgatagcatatcagttagctgataaccctcattttatctggacccctgacttgtgggaataactaaaatacattgtggataacagataccacttttagaaaagaacctcttgcttaattaacatattccctttagccaccacagctggtcccc

SEQ ID NO: 452492 - DNA, 616 bp, Homo Sapiens
ttttttttgtacatcaagaccacagcaaggtggttttatcaggatagaatgtactatccaaatttacaaacttctctcagaacacctagagaaagaactcttttctggtcaagagcctcatatcaaagaaagaatacctaaactagaagcatgggtaaaagggcctgcagtaatcaaacaggctctgccaggtcaggcaataaaggggagctagtgctcagcttccagaacatgaggtattctgaatatataccccagagcttggtacaccaagagcataataggttcttagatctcttcaaggaaatttataggcttcagaattgctctcccggatttaatccctacaacaaatgatgaggtagaaaagggtaggtatgtatactgctttttatatatgagaaaaactgaggcatacggacgtcaagactggcactcaatacttaactctacctctacccaagaggcacttaatagtgcatagctagagactaaagaaagtcatattcaaggttgctatgaggtctaccttgccaagtgctgaggaagccaagaagcatttcatccctcctttgaaacatttcctgttgattttaaaagggggaaaaaaaacccc

SEQ ID NO: 452493 - DNA, 981 bp, Homo Sapiens
agcgggaggtgtcagcaagctccaaaccgcggctgccgcccggagggaagcagacggggagtcggtggcggccgccgagtccgcatgcgcaggctgcaaaggcccttttgggccggtcccgccgcgctaggttggcgagtgggactatttgatcctttccaggttcgccagcgtggtgttacgagaggaaagcgcagccgcagcgtacgaatgggaaggccaaacacggtcccggggagtctgagggaagctgcagggcgcctggaattggggtctcgagtgagccggtaaaaaccgcctcccgctgagcgtcccggaacaaatactgtctgaactgagccgtaagcaagaaacggtcaggagaagctggggcgatctgatgattagaacatttcagggactaccagagagaagtgcgtaattgctctaaggcaggtaggtaattggcctggaaacttgggaacgccgcggccgccaccccgactttcagcaaaccaccgtgcccaggaaaaagagcgattgtggaagaccctgtgaagaagagaccaggaaggcactgtggcttaagagagcaaggcgttcctgaatgcagccaacatcaactggtaaacaaagaaactgtgagaacggatcctgaatcttgcgcttaccaggggaaattcaggagagatatgaacctgagcaagatgaggttgaagttactcaatgcggcattaagcctgttcacggccacttcctccggcgtcaccaacacacacactgtacaccagcagtatttttacacggggtatgtgtgttaagtactatcaggtggataattattacttcacctgtatttgctgccttgataccattagagaaactcatgaattataaatagcatagtgaatttgtgattccctgaagatatactaaggtggacttttaaaaaggcttctattccaaagggaactaatatgggaggaaatggtttcgagaaag

SEQ ID NO: 452494 - DNA, 874 bp, Homo Sapiens
  misc_feature (39)..(39): n is a, c, g, or t
  misc_feature (227)..(227): n is a, c, g, or t
  misc_feature (239)..(239): n is a, c, g, or t
ccttttcaaaaggtatttaagttatatcctccatttgcngcggaaaaaaggaaaagctcccataaggttcccaacagattgtatttgttctcattttaaagataacctttttcaaaggagtagctgccctcatatcgtacagtactatatccctgtcagatgcacacttcccaaggagaaatgtctcaattgggttaaatttacccctacttatactgtcaatgccnccaggtcatganacatataggattagttctttgttcatcccaaatgtctactggctgtccacatgtggcaaaaacagcttctttccagtgatgatcaatcccagtatacactgtctttcctaatattgtatgtaatggctcttcctcgtctccatagcctggcccatccatttttccactgcttcacagttttgtcatcaccaacagtgaaaaaagaagtcccacaaaagcgagtacatattcctcgtacaaagccttcatgtgcttgtattgtacggatacaattccgctgagttagattccaaattctaacctctccatcacacgccccagaaaggacagtagccagcttctctggatgctttgccaagcaattgactccatcacggtgaccatccagcgaagcaaggaatggttttgcaaatactcgttccagtttggtagcatttaaagctcttatatattctcgtgggacctcaaaaggatgtaaagcaggatcatagtttcttggaactctctgtaagtccaacttggtttcgcggacataattgtccggattccggctcagcatcttcaccttcatctcggttgctcttccggccggactccacgaggtgtccgctaggagttccgcccaccgccacccc

SEQ ID NO: 452495 - DNA, 677 bp, Homo Sapiens
  misc_feature (302)..(342): n is a, c, g, or t
agccccccatgttcagaatcaaagccctagccctcagagaagtgaagaaacatcatgcccaaggtcattgactgccaagcggtagaggtggggttgcatccagagagcttcccggtatgcctctgcacaatgccattccttggccagctccctccaccccaagggacccagactgcacacttaacaaacaggacacaggtgtctttgaacaaacttttttgtattattatttttacatctagaataaattatttaaattatttcacagcaagggagagggataggtaatttttatcagatannnnnnnnnnnnnnnnnnnnnnnnnnnnnnnnnnnnnnnnntgttcttgagctgatgtagtggaacttgcctagcacattcaggtcccagccagttggcagagcatgctctcatctccttattccataccctgggcgtcccctttctgttgactcaggaactttctgagaatgaggacagcactaggagatgagctttggcaggtatccaccttaacgctacaataattgtgcttcctgaaacaaaacttgagattgtatcatagaaggaaacaggaagtcagaaatcaaatctatgcttttaattgaaaccgtgcctgaaacagtttgaatgattgttttaatgttgtttctgaaattccttgtacctttgtgaa

SEQ ID NO: 452496 - DNA, 718 bp, Homo Sapiens
cggcgcctggcccgagagtgtcgattatgctcgcaggaaagtgtttctgtgttaacaagttgagaagatggaaactgaatcctctttgtattcagaaggctgtttcggaaggtcactgttggcaggcttctccttacagggattcagcagtgagggagcagagtatttgggggacaactgcttcttctggaggggcgagaatgagatggagttcaccagcagctctttatgtcagacttttagcaggattcagctttataaataagcttgtcgcctctgagtatagggtcttctcatcaacactctgaacattacaggaaacaaaaaaatttccttccttcaactttatcaagttggctatttatcataacaacagaacaaagagggataggtcttttataattgatgttgagattggcagtcatgacgattcccccagccatcattgcacacataccaacagtagcatcaatcatggttgcaatggcacctccatgaatgaatccaggtggtccttccaggtaagggcctccttgaaataagcaaaccatccttttctcaatgtcattgtagaacatcacgtattcaaagcccaggccatcatcaaagcttctggtgaagagctgggcctgtgacatttgttcttctttcataagctttgggtctatagaaaatgaggtggatggcaaatgagaaacaagggtgagagaaatgcccc

SEQ ID NO: 452497 - DNA, 844 bp, Homo Sapiens
tccttgccccaaaatttttaaccgaaaatgaaagaaaaaccctagaaatgcggtggttttacaagtattattagccccgaaccatcttaggcagcttgcgcgggcccgcgggtgcggcaggcttaaaggtcctttctcggatctgtctgtcaaagaaaaaattccagccccaaaattcagtggcggcctgggctgggtcgaagagcagccccgtcagagaagctggttccgcgctaccttcttgctcgcagggatgcatttcaagggtctcagcaccggcactcttccatttgttccagatccaagcacggactgcagcgtggggctggagtaagacgacagtctgaccactcccgaaagctttagtttgggcagttccatgacataggccggtcctcgtctcttgggacggtcctcctcttgctttagggactgtttctctgttcttggaagtaggggtgctgcagggcctggtgggcggcgattctctcatcgggatcataggccaccattgcgtgcaggagggagaggcattgtggggacaaattggttgttagtagaggtattcctgatccctttttaaaaggaaaatcaaaattcatagctctcgactgtttgaacttggtgaggatcttctgagcgggtgtgccgatgacatcgtggatttttgagatttggtccagttcatttactccaggaaagaggggctgcagaacagactccaaagatgtatatcacattcttcattcccacgccaccatctggcaagagaggagattccttactgccaaagtgaccctatcactaaccacccccttatttaccaactccttcaagccgcccc

SEQ ID NO: 452498 - DNA, 881 bp, Homo Sapiens
  misc_feature (67)..(67): n is a, c, g, or t
  misc_feature (310)..(310): n is a, c, g, or t
aaaacattttctgccctccatttttagttaccttagatatactcttctgagtaaaggggttttcttnccgttgcatgggtagaaaatatcctagtgactggttgacttgcaacacgttttccccaagtaatgctgatgaaactgcttagaagctatagggaagttgtagttggttaagccataaagccaaggagaggccaaagaatgaccactgtgcagttttagctcccactttgttggttccatataaaaccatttggtctcatggactttagctgctgatcagtgaatgactgatgagtaatagttntagtataagtttctcaagggaaagtctcaaactatatatggggttctcttgttatggggaggtcacactgatagtcttgaggtttgttctcagtctatgtttctgtttccgcagtgcggtcctagccttgggtaggacccttgtcctacttgagtggcgatgactacttacacagctcacaatctcctgtgtgtgaaacagtctcctgccatcagcttctaggtagccagttgcaccctgcgcacaacgatgggaccaatgaaagtttcataacctcacctcagtctttagtgataagaaacagaaaagtcactgtgcactatgacgatggcacagccagccacatctcagtacactgctgagtttctcagagcaacaaaatacatttagtaattgccagtgaacaattaatgcttttgcaaagttactggaaaagcgtgggaaaaaacactccctaccacgttcctttttctgaaaagcaacaaaaatcacatcttctgaactccagtatctaagtacaaatgattcagaaaatccccaaatcatcatactgttcagcagctaaagtcca

SEQ ID NO: 452499 - DNA, 649 bp, Homo Sapiens
  misc_feature (294)..(303): n is a, c, g, or t
caaggctttgactcagatttgtactttgatgtatgaaagtgaatatcaaacttgtttatagaaaagactatataaaaataagtctgtgttgtgtatagtgatacatgttttatgtttacccaatgcctgtactaaatcttgtgcttggctttgaattatatatgtgtttacctatgacttttttttgaaataaacagaacagtcatctaaaaacataaggttttggaaaggagatgctttttcaattcttaccatctgattaggtggaatgttttatagactttttggtgttgnnnnnnnnnngtttgataacaatgcatttttgcttggaatatccccccatccagaaaaagttggtgactttctctccaatggaatataatgggaccttagttttttccattacctaagaatttggaaacctcctccaagggcaaggaattggttttatacctttggtggtcccgggagcccccctaatggtaaagtgcccttgccccaagggtaaagtggctcccttgaaacggttaaaaaaggagttgagaaaaactttcctgggcctccattcagggatggaaaaaggtggggttcaccctttcccccctggggtgtccacaacacatacaaaaagttttccttccctttgccc

SEQ ID NO: 452500 - DNA, 942 bp, Homo Sapiens
  misc_feature (125)..(125): n is a, c, g, or t
  misc_feature (170)..(179): n is a, c, g, or t
agcatttttgaatttctaggttctataatccataccaggaactttttcatgttctggagccatatgttgaaattcattgttcctcatgtttcttttccaggcttttaatatccatttaacatgancggggtactatggttcattacttttcacaaatactggggccgggnnnnnnnnnnggttaattttgctacgaaaatgttataatacgttttgtatgatcagtcatcatcctaaagagttcaatagagtcaatgaaaaatagcagggttatagcccctcccccccaagtcaaaacaatatttgttgaagtaataagaattagaccccatcacaaatgaccttcactgagaagataattgtaacttaatcctgcagcgaaacatccatttttccttgttcttttcttgcacagttccatcaaatgaagatcacagcatattcataataaagttatataactgattcagcaccacaaaatgaattgggagacatgagcgtctgtcctgggttgcagggtcacaggttagccaggagagtgcattgtactgttctttaacaaacctgaggacatctgaagtctgatttgagtcaagtgggtgggagtgtttactgtgaagcagctcgtcagattgcactgaaggcacgtggaggtgcaaagaggccttaagaaaaaggggacactgatattgtgcttgaggacatgctgaccagaaccagtcaggtaatggacctgctttggcagttgatacaaagtaaccaagggccaatggttgctgaagaatattaggtacttcctcatgaggttctgttgatagtagccgatcagtactctgacccttgcccgcatcacctccatgggggtaatgagatcctggagaatgtacaggagaaccagttggagaagcaggaaggatattaatgatatcagggtcaagatca

SEQ ID NO: 452501 - DNA, 865 bp, Homo Sapiens
  misc_feature (20)..(20): n is a, c, g, or t
  misc_feature (29)..(29): n is a, c, g, or t
  misc_feature (58)..(58): n is a, c, g, or t
  misc_feature (88)..(88): n is a, c, g, or t
  misc_feature (137)..(138): n is a, c, g, or t
  misc_feature (300)..(327): n is a, c, g, or t
  misc_feature (356)..(356): n is a, c, g, or t
  misc_feature (370)..(379): n is a, c, g, or t
  misc_feature (403)..(403): n is a, c, g, or t
  misc_feature (405)..(420): n is a, c, g, or t
  misc_feature (521)..(522): n is a, c, g, or t
caggggcgaacaggcgttcnttggcgcgntaggggtgatatagactcgttgctatccntttggatactacttagtctttagttagttntgggtgctctttcctggggcgtcctttgcgcccagggcatgcgcttttnnttatgtggctcgtacacctccgtgtcccgggttctgatggggggtggtctctctccttgcgccttcttcgcttgcgggtagcaacctcgggacgctaaagactgttcgccccgtcgacaaaccccaaagtgtcaagttggggaggatatatagggacacagnnnnnnnnnnnnnnnnnnnnnnnnnnnngccgcggcaaacggcggggcaccagcganagcgccccgcccannnnnnnnnnacgcacgaggcgcgcgggggccgngnnnnnnnnnnnnnnnnaaaaaaaaaaaaaatttgtgggcccccctttaaaaaggggtttcaaggggtttatttttttccctttaaggcaaaaaaaccattaggcacgaaaactgccnnaaagaaattattaagctcagtcccaaacaggtccagagaatcgcattcgttcctttcactgaattggtcacacttgcattacaataacgctgacatgttagaggaggagtattagaagaacatcgaagttgacaaggtatgcaagcatgcaacaaactgtcaaaatattcattttgggagcactgcccagccatctgcaacatgatcacaaaaagaaaacaagggagctacagaaagaacagcctggaaggacaagtaatatctctacaagaattccggagcaaatgcagcaagagcagctagaatgttgagaacaatgaacttcgcctgcttcgtgggtccc

SEQ ID NO: 452502 - DNA, 276 bp, Homo Sapiens; identical to SEQ ID NO: 125470

SEQ ID NO: 452503 - DNA, 522 bp, Homo Sapiens
tttaggaaaatcaaaaattttaatcttatcatctttacatacaacaaacatgtcaagaccccctattgtctttgaaaaggtcccccctcccccgccaaaatctgtagaccataagtcttggcctacactgacctggtttgtaaaatatcttcctctgtgtacttttcccttcagcctcaggctcttggctgattcgctcacaacagaagcagcttggctttcctctggaagtaccaatttgaaagcccaccagcccgcaaacctagagtgtattctccacccctgggtcacagaacttcgttctccccggctctgtaacccaaggaccctacagcctctgaggcctaacacccaagctcttccttgcagaagagctgagatgctaaggagaccatctggagtgtcataataagcccttgggatttgctgatctcccacatggctttcttcaaccacctggcccactttcttcaaccacattccactttggaatgcgtgtctttaaggcaccaagtgatctcc

SEQ ID NO: 452504 - DNA, 457 bp, Homo Sapiens
agatcacttggtgccttaaagacacgcattccaaagtggaatgtggttgaagaaagtgggccaggtggttgaagaaagccatgtgggagctcagcaaatcccaagggcttattatgacactccagatggtctccttagcatctcagctcttctgcaaggaagagcttgggtgttaggcctcagaggctgtagggtccttgggttacagagccggggagaacgaagttctgtgacccaggggtggagaatacactactaggtttgcgcggctggtgggctttcaaattggtacttccagacggaaagccaagctgcttctgttgtgagcgaatcagccaagagcctgaggctgaaggggaaagtacacagaggaagatattttacaaccaggtcagtgtagccaagacttatggtctacagattttgcagggttaaggcccccgggggatcctctacg

SEQ ID NO: 452505 - DNA, 1088 bp, Homo Sapiens
  misc_feature (147)..(190): n is a, c, g, or t
agtatcttatggattgtttacaatcacaaggacatagatacctatcaggatgaagaacaggcattgcaaggaccctctgatgggacggtactgagatatctcggcttccgctcagcccggttttgactggttgaaaccggacattgnnnnnnnnnnnnnnnnnnnnnnnnnnnnnnnnnnnnnnnnnnnnccttcatacccagcgcaaaggcactggccgcacttgcaggaaaagtgcaacttaaagcagtaccttcattcatgaagctactttttaatttgatgtaacttttcttattttgggaagggttgctgggtgggtgggaaatatgatgtatttgttacacatagttttctcattatttatgaaacttaaccatacagaatgatataactcctgtgcaatggaaggtgataacagttaaaagaagggcagggggaaacttacgttgggatgacatttatggagggtcagtcccacatacctctttcaggagacaacttgcaccagtttgaccttttcttttctttgtttttattttaagccaaagtttcattgctaacttcttaagttgctgctgctttagagtcctgagcatatctctcgtaacaaggaatcccacacttcacaccaccggctgaatttcatggaagaggttctgataatttttttaactttttaaggaacagatgtggaatacactggcccatatttcaaccttaacagctgaagctatgccttattatgcatccacatgtatggtccctgtagcgtgacctttactagctctgaatcagaagacagagctatttcagaggctctgtgtgccctcactagatagtttttcttctgggttcaaccactttagccagaatttgatcaaattaaaagtctgtcatgggggaaactatatttttgagcacatgggaacaattatacttccctcgttcatattatgttgatacaaaaagaccttggcagcccatttctcccagcagtttttaaaggatgaaccattggaatttcatgccatccccatagaaaacctgtttttaaaattttaggggatcttttacttgggtcatac

SEQ ID NO: 452506 - DNA, 872 bp, Homo Sapiens
cttttcaacaagatccaaaagtgtggatgacgaactaggcaataagggacatgtgtgccacatactaaagggtaactaaaggaagatgagtacctcacaaccaaaagcagttaactatgcctggcataccaccctgtcatgtgggcagatccactgttccccatgctgggtaaggagttttcaagaaagggaaggcctttatgcagtaattctgtaactatattaaatttggtaatttaacattaaactttttcgtgagcagtgaatatacacatggtcatatgaaaactgccttggagaccgggttaattattaaataaactaaaaggggagaaatgctgatagataaaattatgtcaattccagggtgttcaatggaataaagaaacagcagcagctgcttcaaaagtagactatgatcagaaacctcagatggtaacctttaaaaattgtggaatccagagtctcaacctaaacctacataggagctacagccagggagttctttctaagttcctcaagtgattctgatgattggccaagctggaaacttctgaactgggggagaaagccaacctaggtaaatgtagagacttttagaattcaacatttgattatcatttactccacattttcccccagctgtctcaccttctctatttttctaacagtgaacaataaaagggcttggcaagtgaaggaaaaagtcagtagagtacctaaaatggatttgactatattcaagccactttcatatattaactagataaaaggataccatactgctatttgaaattcaatcacaaagcaaaaatgtcataattttaatgtattttaagggaagacggggttcttaacatgaatatgtaacc

SEQ ID NO: 452507 - DNA, 792 bp, Homo Sapiens; identical to SEQ ID NO: 125597

SEQ ID NO: 452508 - DNA, 1088 bp, Homo Sapiens
  misc_feature (21)..(21): n is a, c, g, or t
  misc_feature (973)..(1028): n is a, c, g, or t
ctgtttttgaacggcatctcnaaattgaaccatgtgcttaccaacagcatttcaccagcattttaccagttgcaaatctgcaatgtgctataaagtattccatggatgtttcatttcttatttgtcctccagccaacgctgaaagtaaagttttgcttggacttcattgctcctttcctgtttttccaagggcccatgcaaactcatgaaacaacttgaccattccctcttggagtcacatagaaaacctaacaaaaataccctggttcagtcctttcttcttccattgttcctaggaagtgggctggagtgaggtatcttcacatgggtccagctgcattctcagtgcaccgattttatgaagataccagagttgggagaaattcctcgggcatggcatggaagccagaaaagggtaagacgttgtcatagtagtggtggctgatgggctgctcatgcatattcacagagaagggccagaagccatagatggccacctcttcacagagacccagagctgcgctcaccagaaaaagtcctgtggacaggcgcttggcatggattcctctacttttccagaactttccaatgctacgcagaaagttggggttggcaaacagcactgtttgattggcaccaacatctgacagtgtataataaaccctcaaagatggctctgttcctgtcttcatagaaaaggcaggcatgtagatgtaactgtggttatagattttcatgtcgtccacaaatgtctttctggaccacagaaggttctgaaacctttgccgaattatgctgggattagctgtcactaactgacttttggatccaacatccttagtgtattcacttgacaaaggagggagattgcatcgcatgacaaaatttgcttcatctatttgacggccacagccactcttcttcagaatcccaccatttcccaccaccgcgcatttcttcaatggcagctggnnnnnnnnnnnnnnnnnnnnnnnnnnnnnnnnnnnnnnnnnnnnnnnnnnnnnnnnggggaagcaaacacatcctttctcacgtggcagcagcgagaagaagtgcagagcgaaccc

SEQ ID NO: 452509 - DNA, 847 bp, Homo Sapiens
tctggggaactcccggccacatcctcgaggtttccaagccccgtacccagcttgttcaggacttcattaaccagttttccgccctgtgtgtgtccttttttgctgagagcctgggaacagggaagacgggagcagcattcgaagggcaagggattgccagccgccatcctgtgactccgacagcaacaggccagccgggaagcaggacgctcctcctttatcccgcagcgctctgtggtgaccagcagaatatggctgaggagacagcgggggtgggttcaggggtgacttttcaggaccaggtcttggaaggcactacagctgcttccgccttggtctcctggatgttgctctagaggacaccagttgccatggtgggaagatgctcaagtggccctgtggagaggcctatgtggagaggaactgaggcctcccaccgacggccagctctgactcgcaggccatggagtggcccccggtacccgttgagccttcagatgatgcagacccagctgacagccttctgcaagtttccagccagagccttccagccaagctgctcctgaattccagggagacgtggattgcagcaactctggcgctatttcctatctggcaggtcaacagagacacagtggcccacactcttcattctcacacactgctgggggtaacccctggtcacccaaaaacccacaacaacaggtggaccttgtggcaggcttcaacacgaatctgagcttgaatgatgcttttctcatcgagcccggcccctcccgcggggccaaaagcgccgactcgcggggacggagggactcgctccccgctgccccacgcgcggcccgct

SEQ ID NO: 452510 - DNA, 1387 bp, Homo Sapiens
  misc_feature (210)..(210): n is a, c, g, or t
  misc_feature (328)..(328): n is a, c, g, or t
  misc_feature (516)..(516): n is a, c, g, or t
  misc_feature (744)..(765): n is a, c, g, or t
  misc_feature (1166)..(1166): n is a, c, g, or t
  misc_feature (1311)..(1311): n is a, c, g, or t
cgcgcctcgctgcggccgtgatgtatcatggaagggtttttcggcgtgagacatggacccccgtgtcttatgtataatttagggaccctttgtccctttaccctgtatccaggtgccaagagaaaaatttcctttacttaataaaggggaaaaatttggacgccaccatcaccgactgttgcgcggggggcgggagaacaatagagttgnccagccaagaaggagaaccgtgcgagaagaaccagataaaatagagagcataggaatatagtatcggtgaaagggtttttgaaggcttgtgtgggggggaacactcaccgcgccgtcntgggtggggaggatggggtgtgtgccgcccacaggggaggaatgttattgcacccccctcccacgggggtaaagccctttcccccacttttttgtcccgggggagacgtctggtggggctatcacaaagacataaccccggtcttttttttggggtggtttttgagacctcgtaacgccggggtgggngggggttttctctctattaaaatggggggtgtgggagggaaatattccacaagagcccccattagggtgccaatggcatcccaaggtatttttccctttagggaaaaccaagcttatggcccccaggggttcccaattaaccctactgggggccccgggcggccccaaaacggaagtgtcttagaaaagtttttttcgatgggccgaggcggcccgacaagtttctgnnnnnnnnnnnnnnnnnnnnnnctcagcatcaggtgcttttacttcagtgaatgaaaaataatggtcacaactcaaatgaatgggaatttaatatgaatatatgcaccttaccagagatgtttgctaccaatgatatcttagcaattccatattccttacaaagtcagtataattgttgtaaaaaaatcaactgtggttctgaatacccattcacagttgacctcaacaatgtatctgatgtaggagactgagtatccgtgacaggcagaagcatgtgatggtcctcagtcccaagtggaagagctaatggtaaagtcatatcagaaggcttcacatccatagtttctgataaaggacttttttgtatggaatcctgttcactcaaagtatgatcctctgcactggagtctagagttttatcntgcaccagaatgggacttttgttttgtgcttctttaaatttttaatatctgtgtaagaatttccacataattcgcagataaatggtctttctcctattccttttcatttcttggtatatctgtgcaatttaatccaaatcatttnaaaactattgattatctggcatatttcttggaaaccaacacaattctttaacaaatttaattcatactccaaacaa

SEQ ID NO: 452511 - DNA, 462 bp, Homo Sapiens
gtgatgcagcatcaggtgcttttacttcagtgaatgaaaaataatggtcacaactcaaatgaatgggaatttaatatgaatatatgcaccttaccagagatgtttgctaccaatgatatcttagcaattccatattccttacaaagtcagtataattgttgtaaaaaaatcaactgtggttctgaatacccattcacagttgacctcaacaatgtatctgatgtagggagactgaggtatccgtgacagggcaggaaggcatgtgatgggtcctcagttcccaagtgggaaggaggctaatgggttaaagttcatattcaggaagggctttcacatccataggtttctggattaaagggacttttttgtttggggaatcctgtttcactccaaggtttggactcctctggcactgggtgttctaggagtttttatctggcacccggattggggctttttttt

SEQ ID NO: 452512 - DNA, 1426 bp, Homo Sapiens
  misc_feature (17)..(17): n is a, c, g, or t
  misc_feature (68)..(68): n is a, c, g, or t
  misc_feature (79)..(79): n is a, c, g, or t
  misc_feature (92)..(92): n is a, c, g, or t
  misc_feature (129)..(129): n is a, c, g, or t
  misc_feature (213)..(213): n is a, c, g, or t
  misc_feature (237)..(237): n is a, c, g, or t
  misc_feature (435)..(461): n is a, c, g, or t
  misc_feature (1006)..(1006): n is a, c, g, or t
  misc_feature (1032)..(1032): n is a, c, g, or t
  misc_feature (1062)..(1082): n is a, c, g, or t
  misc_feature (1121)..(1121): n is a, c, g, or t
  misc_feature (1180)..(1226): n is a, c, g, or t
aaatcctaaaaaacccnaaccccggcaaccaatggaacttggaaggtccttgtggtccctcctaatanacaggccatgnatccacctgtggncatatccctccagatgaaagcctgaaagaacccgttnagggtgtttttaggccttggaactagtaccctactttaaaagatggccctcttggtgggacagacatttgtataagtcacaggnccatgtcatactgtgcttaagttncttgttgcatgtgagcatttaacaacctgtgatgtgggcagagatgaggccaagaacggagaagggaggagcatgaagagttgtatgtttttggagtgctggagtgacttgtgaatttctgaatattttcccttcatctaacattgattgaacatctcttatgtgcatagtgggagcttagtatttgctgaatgaatnnnnnnnnnnnnnnnnnnnnnnnnnnngaatgaatggccctcccaacaacaactcccgccccaccctctcccccgaccgcccctcggcacgcacgtcctcgcacccaactagacccctctccaccccgcccgcccctccaacacaccccatcccgcctgcgcctgtgaaaatactctttctactcggataagggagtgcacgatgccgggcggcgccccggcccctagcccacaccacgcaaccctcctccgccctctcacctcaccaattacggtggggtagagggctggggcggggtggaagggtgtgttttgtgctcgtcgcacagacctactcggtcgtccgcgccaacacacacccctgcccacgacatgcactctgtgtctggacgcctgtcttcccgcccccactccctgtcctgctccatgatatccttcctcgtccatcctcccgctctagcctcctccgtctcaccctccctcgttcttttctttcacgtcgctcgctcactcaaagcgaaacatataaagagatatatagcaccacacctgtgagcaaaccaaccccacangcgtcatcaacggcccaactggcttngtgtatgtgatattatcgtgaagcactctnnnnnnnnnnnnnnnnnnnnntttctctcctggctccagtcgcttatcaccaccaatctngctacgccgcaccaccgcccacgtgcgccaccctccctctcgctccctccgaccggccnnnnnnnnnnnnnnnnnnnnnnnnnnnnnnnnnnnnnnnnnnnnnnnatacacagatggtcttgcatcgctggagtctaatgtacttttagaaaaaataaaaccgttgagacaggtgaactagtagaaattagatactgcgctgggagcagaaaaataaaaccaaagagacgacccattccgcgagcgcacgcaccccacacaactgagcgcctcttctcccccgctatgggcgacacgagtctgct

SEQ ID NO: 452513 - DNA, 600 bp, Homo Sapiens
ttgtcttacattttttcttacagcaatcttttgagaaaagaatagagaatgtttaccaggtagaaaaaacctgattccttaacaagacttctcagtcacttgtttctctttccctttcacttttcctttgtgcttttgaaaacaaaggctaaagcaggtgttataaatttattcattcctgtgctagagagcatggaacacatctctgaagtcaactcttcttttggtgtatcacgagttgaatccttaataaatgactgccacaaagaaaatttctaacagcaaatctttttaggaactgctcaggttttgcctttgtcttgacacttcattttaaaatcttggtttctactgatgtgttttcaaaaaagctgacaagctcggtctgaaatgtagaaactgaaaaaagtgaaaggaagagaacatgcaatataagttaatcattatcattttaagtgccaccagttctgtttatattaatgcacttgtgaattgctgaatctcatttgatcaacccaattaaacattaaataattgcagccaattatgcaaatatcagcaacaatattaacagaactggtggcatcgataaacacgggt

SEQ ID NO: 452514 - DNA, 1107 bp, Homo Sapiens
  misc_feature (502)..(511): n is a, c, g, or t
gagcggaatagtgtccataccattgtgtgtggaggatttacagctaagctgtagttgcagagtacatgtacagtaatgaagttcactgtgtttataaattgaaaaggtaccaggtcttacagcattttatatatcacatctttacagaataacatgatggcaatatacaagtggtattgttaggtggtttaacttagaataaaatgagaattcttcagttatattttgtactatggtttagggctatgactaatatttcaggccatttccggtgaaagaaacttagttttacaagaaaaaccatttgctactgaatgcttaaactaattttagtgtttaatgttacatgcttaaatttttttcagttttaacagtggcatatttaggcatggaaatattattatgaaatttattttcaggatctgctataaggttgaaatttagcccagctctaggcattttacaaattatttttcaagcagtcattcttgattgtttgacnnnnnnnnnnaaattaaagattgggaatgtatgtgagagtatgcatatgtatgggtgtgtgtgtgtgcgcgcaatcaaactgtggtgtaaatagattctcagtgaattctggtattcagactctattccactagtgaaagaaccatttttttaaacttcccttgccttttttatttatttaattttcttggtttggagatgtcagtcccaaacaccagagtctgtacttttctataacacagctcagattaaggtagggcatatgccaaggaggttctcacctccctaaagaagggacttgaattttagggactttaattcacccctccttcaatacaactttcccccttcttgtttgcacatgccaagataactgcttttatgcaggctgtacccccttgaaaaatcctttctacagtgctgctcacaaaagagcccaagttcgcctcctacctgcattgctgacttgaattcacagtcgccgagtctacctagctttcttggaagcagtctaagcaaaatttctatttgtacgttcactaattatctacaaggacaaaatcagttgtatttacaaaactctacttcagtgtttgttttagtttt

SEQ ID NO: 452515 - DNA, 1034 bp, Homo Sapiens; identical to SEQ ID NO: 246329

SEQ ID NO: 452516 - DNA, 1492 bp, Homo Sapiens
  misc_feature (177)..(186): n is a, c, g, or t
  misc_feature (371)..(371): n is a, c, g, or t
ttctgggaccgcccctttcctttcatggtgggccccaggtgttttagaggccttaaaagccaccttggacccttaaaggttaaggcccccattcaaattgcccttccattggaataacccggggtaaaccccacccaggccaaaaggccaaggtaattcattcccttattttccaannnnnnnnnnaccactggaggctccagaaagtcaaaacaatttctcccaggttcccatccaggctaatagagtgttttagctggaaaccacttaggggctggtagatttcaaaagtcatgctatactgtccatcaatatgatccctaagcaaactcttagaaatgttttaaaaataacttctaaggcccctattntgattactactttataatcatctagctgaataactaaactagctcactctctacatcctgtctgaagtaaatacaggcaacaattttacaaaagctaccatggtcatttctagcacagacttgtaagaaaaggatgctggggtcagcaggctgagatctgggtcccttttaccgtctggtttcctacatcagcagggaggccaccagagatgcaggccaggagggcgctgccgccagacagctttgttcacattccttaacaggcaaaccccagcagcagatttctgcctgccagcctcagcaaggccctgtcccgtccctgaacacatccccttccctgaattgtcttagcactggctaaacactcagagaggacttgcagcaggagacaaaggtgcagccatccaagtgggccccaggcagccaggccctgtgttttcagcccaccacacaggggctgtttctctgattgacagcaccatgccaccctctgccccctagggtttctgtaagtactgtgctggcaggaggtgagcctccagggaggctgcagtacagtgatcctggaggattctgtgctgttctcactgatgactaggtctgtttagagcaacagcagaagtctcctctgtctgggaagctgctgggccgatggttagggaagctgcatgattctctgcagagctcgagctcacagggacacccatcaccaggaatgaagtcctcaagccccagctctgtccacagtgtttcttacaggaattggctctgagtcattgcataagctcctctggggtgatgaggcctttcctaataaggcacagggggaaactggtcattggggacaaggttgtccacagatgtgctgctccatcggctctaaaagccagaaaaaatgaaggcagggaaaaacgaaacatacgaagcaccagggccagagaggaagcagcttcatttgcatctcccagtgttccaattctgccactgcaagactagcgctgcagtagccaaagggttagggttagtttgccacagggaaggatgccgggaccacccttggagcgccagctcccactcacccctcgtgccgaattcgccacccaggcctcgctacctataaa

SEQ ID NO: 452517 - DNA, 1490 bp, Homo Sapiens
  misc_feature (195)..(195): n is a, c, g, or t
  misc_feature (635)..(637): n is a, c, g, or t
  misc_feature (640)..(643): n is a, c, g, or t
  misc_feature (646)..(858): n is a, c, g, or t
  misc_feature (891)..(937): n is a, c, g, or t
  misc_feature (981)..(997): n is a, c, g, or t
ctcccccagccctggctgcctgcctttgcagtttgaatctcagacctgctgtgctagcaatcagcgagacctccgtgggccgtaggaccctccgagccagctccagtcagcccggtcaagcatgacagcaactcaaactcggcaaacttccaagacgtggaggacatgcctgacagatgtgccttggaagagtcntgagagtccaggtgagccaaggcatcattcatggatagcaaaggtctgcccctgcaaggtgtcttaaatggaatctcatcagtaggagctgaatttggacaaattaagaaatccaaaagatgccatttgtttattactgtataaaagcattgttgttattggtcaagttattaggctgtagtggatttgctaatactttagccaacatgtattaaagtgattttaatacatgctgattacaatgcaatacatactgattgaaaatattcatattcatctaattttagaaaaatattgcctagatcattctctattcctgtttcttactttttctgttaatatttccaacagggaatgccagtccacagacacaaatttaatactgctttaaattttctcctatccttttagtccctgaattatataataaacaatgttannnccnnnnaannnnnnnnnnnnnnnnnnnnnnnnnnnnnnnnnnnnnnnnnnnnnnnnnnnnnnnnnnnnnnnnnnnnnnnnnnnnnnnnnnnnnnnnnnnnnnnnnnnnnnnnnnnnnnnnnnnnnnnnnnnnnnnnnnnnnnnnnnnnnnnnnnnnnnnnnnnnnnnnnnnnnnnnnnnnnnnnnnnnnnnnnnnnnnnnnnnnnnnnnnnnnnnnnnnnnccccgtcggggggggcgcggcgggccccccagnnnnnnnnnnnnnnnnnnnnnnnnnnnnnnnnnnnnnnnnnnnnnnncctgtttaccccaaacaacacccttcgtccggacccccccaccnnnnnnnnnnnnnnnnnccccccgccgcggtagacaccaaccacatccgctgtgtagtaaaaatcaccctccagccgagcggtgggaactcttcttgaagagcggtttttctctccggggggctattactaatgacgaaaaggtgttccgtcccaccgcgtgtggcgcgcccctcattaataaatcaaataatatcgcccgccccgcccccccggggcgggataacacctcatgccgagtaacagagggcgggtgtgtatttaaactctctatacatagatatctcccgcccgacacaaatgcgaaacacatttatttgtccaacaatgtgcgagggagcaaataaataatatgtcagcacccccgcgctggggacgagcgcctctccgatactttgtttgtcgcgccccctatacattcacaattaaaacacctgcgcaccccgcagcgagaaacaacaggggggggcaagcacaaaaaacacagcgttttacatgatgtggggcgccc

SEQ ID NO: 452518 - DNA, 1080 bp, Homo Sapiens
cgggcagtactggatgtggacatctttgtggtggacctatgattcctgtccatcatgaaaacacacgggagctggcggagtgccaagacgaggcagggaaggagtgtctgaagtcgtgccggtgtatatgacctgcttctgaccctcccgagcgaggatattgagaagaaagaatttgccaagatgctagtcacacaccaagtacagaggctatgttggtcggctgcagcaaaaagaccactcgcggcgtggcagctctcactggccctgctgcctcttcaagttgactgcagtccatcacccacggtcattattaatttgtttttgcaaaggccaggcaggtgaatctaatggagatggaaaccaccacacctgcttccctggtctctgatgttggtgttaacctctgcaattcctcaagcaaagcactccttctatcaggctcactgtcttgctggagggaggaagttccacaggctctcacttggttctttctgccgtaacaacccttactcctccggccaaggagccaatgtgagcattcagctggcagctaagaatgtgtatcccaataaacagggcagacctacagacccactggacccactatagatggacttgggccacagtgccttccatgacttcaataaacagaggggtgtggtgatcttgacaaagtcctggcgtcaatgtcagtgtccggatacacaccatgttcccgtcctcaaaaagcctctctgtacccctctatgttggtgacacaaccctggcaaatggccacacactcctttggggacagagtacgagcgtaactggtgcggagtgggtggcatgctttatattgggagagccgcacgccctacggcttccagcctcctcttcattttggcagctgtgagtctgaatttcactcaaatctggaaactgtggtgagacactgtgggaagcttgttgctccgaatggcataaacctgtacacggtcccctgaatcgttaccccactggggacaaacaaccccccctaacttgaacctttggtccaaaaaatacccaaccaatcccccagggtgggaataatcc

SEQ ID NO: 452519 - DNA, 1276 bp, Homo Sapiens
  misc_feature (74)..(83): n is a, c, g, or t
ctttcggccaagcccggcagatttcttttccggaaaaaaaagggatctccgaggaaagtcccttgggattcccnnnnnnnnnngccccctccattaggggggggtaaaattccccggggtactgcaggcccatttcattaagggcagggttaacccggctttttggaaattaatccgatcccctatagggagccccgcagatttgcccccttgtaccaagaaaagggggtcgggaaacagctatgcgccaggggccatttcaataccttttttcccccacccgacaaagatgcctcgagcgcagtggtgcgtatggctcattatattgctcgggcaagtttgccagggggccgtttccacacctgccctttattggtctcttctagcagagtggctccaggcccttcacgcctctcagacaccacccatgagggtttaggaaggtgccatcattctgtgaaggcccagagcttacccaagtcttggagcccaagttgagtcaccaaccagagggttgggagaggaaaaggaaacaggcagaggggaaaggcaaggctctgcagtgaaggggactgatatcaagggaatgctgaggtccagcagtgtctcctgaaggcatgctgcatcctaaggctcctcaggactggatggagtaggagatctgtgtgttgagcagttcacatctatatggcaactttaaggaggcgcttgatgtcaggctcaatgttgatggttgggaaggtgcggctgtagcgtcggaagggctctccctccggccctatgaggaacttctcaaagttccaggccacatctgagcggcgcacagggctccaaatgatgagcttgggatcggtcatgagggaaaatgggtcatcataagggtaggggagcttgtccttcaggtaggcgaagacaggatgctcgttctgcccattcacctcacatttttggacaagggtgaaggtgggctggtatccacccccaggacggacatacttgagactgttcaggatctcctcattctgacagttctcctgatgtccaaattggttgcaagggaagccaaggaccaccaggcgcctgggaaagcggcattgcagctcgttgagctgggtgaagtcccgggtggttgtgcctcagagcgaagccacattctcaatcagcacggccctgccccggaacgtattgaaatctaccttctccccatccaggctgatggcactgaggtcatagaaggacttggcaatgaaagccatggtgaagcgcagagtgagcc

SEQ ID NO: 452520 - DNA, 1229 bp, Homo Sapiens
ccacaatcataagtacttactcggtcagcacagaccctgcttttggcgaatctgagtccgttcactattttcctcaagaggcacctctataggctccatccctttggctttgatgaccatgatcctttgccgcaagtcgatgaagggctggatcaggcagagccggggttcctgcttctgactcaggcaaacaccattgtgattcacaaccatccagctccggtcatatagcagcccttggtttcctacaggccacctggtcacctcaaatgcagcacaggatttgattggatagagataaaggttagtgacaacatgtggcccaagggccccctccaggatttcctgcagctttctctgaaggagtcggctggtttctggcgacatcacacacaggtggggccacaggcacagcattcccagtagacgagttgttccaaaccctggagcctgtgagggcatcttcctgaggcgagaggctacgtctgcccatgacagcaggtataacatcagcctggctgtctgctgatggggctccagtctcccccggtgtcagcatgggcctgagggacaggccagtcccctgatgagtgcaggcgagtgtctatgatgaacctaagaaaggcctggacatcatccagcgtcgacatgtatccaaatgaaatcctcacagatcctgtgggctgcccatctatgaggtccatattgtccccacagacatgaccagcctgaaaatgcttcctgaccatctcgttgcttatgcccaggtgcctctggcaggccccagtgttacagaagcagccagttcgcaggtggatgttgtaaagactggccattttgtccacctgggagtaaccaatgatgttccctttgtcatccagcacattaaaattgatgatcgggccctgaacctcagggctgctgaactcagaatcgctgtaaatccgcaccacaggggctccattggggtactggagagaggacagggccatgtaggtatactgagccaaggtgaaggtgtgctgctttatattctccattccacctgtgaggcgctctagggtgtcaaatccatgttttagcgcgataacatcaaggaatgagatggtgccatcttcaaacctctgagctaccgactgcctcgggatgtagaagtcttctcctgctaggtacgcagaggctgtccctcctccaaagtaggtcttcctcagtagaggagccgcacgatt

SEQ ID NO: 452521 - DNA, 846 bp, Homo Sapiens
  misc_feature (387)..(387): n is a, c, g, or t
  misc_feature (389)..(390): n is a, c, g, or t
tttgttgttcttgtctccctcttcctgtcttgcatctttctgaactctgtgcatagctttgtttattccgcgtcatttgtcgttgcggctgtcattctctcctctcttgtcttcctttctctgctgcagtagtggtcccgcctttgttcccttcttgtctgtcacttgtcgctttttctctgcccttcttctcggctgggtcacctcgcggcccctgtgctcaaatggcagcttgcgcccgtccccctctgccatcacctggccagactcaccaggcgccgcggtgcgggcccctggcctcttcttccgtctggcctctctgtgcgtttggtcctcgcgtgcgccctttgcgtgccaccttcctgtttttcccccggtggcgtctangnncacaccacccccactcgccccagccaggtagtgtcaggtccacgtcctttggcttactcgcctccacagcttccctcttctctttcaagaaatctctgatgacatcatccccagcaaaagcttcctttatcatctgcctatggtttctctcctcttcatcttccagctcctctattgtgggaactgccaaagacttcacggagggagattgtgtggttaggaggttctgtaggtcgatcatttgctccttctttttcttctccttaggggcatcagggcgattatttggggtcctctctgactgctgtccttctaacacaggtctgggaagctccttattttgaaaacattcttcttttcccagctcttctagctcttccagcgtttgtactctctctggtctctgtagcaacaggggctcctcttcttctggggcaggttcctctctctggaccc

SEQ ID NO: 452522 - DNA, 927 bp, Homo Sapiens
  misc_feature (159)..(159): n is a, c, g, or t
gtggtttttttcccgggctgtttttcggaaaagctccggtaaacccaagttccttaggaagtaaaagccacctggtttattcccgaagcggatttctttgaggatttttttcacagtcgcttgttgggaagggatattgaaaaagactcctcatcaccnagagctgctttcctttctcctttggtgacagaataagtttcatttttaaaccatcaggctccccgaagggtcagtgtctctgtgttcacatagagaggtttcatttttttcgatttgtgtggagccaccatcctctaggggtagttccccactgctttccactgactttcttcctgtggtgctcctttttactctccgaatggcttgaagagccagaggatttctccccagtctttttggagggcttggagcctgctgccagtggggaagtgatagctttcaacaggtccatagctgtatcagtagactgtgggctggactttttctttttcttctgtgacgattccaaagacgaaatatctggtgtatcacaaatgcagactgttcttctatgctgaatcctccaaaataccagccctccacctctctcctccttcacactggtttatcggcactcagaacaagaaccactgtcctccatagtagtaatcatcagaggagtgcttcctcttcttcttgtgtgtgtccgtccccaagaagtaaagttcactatccttcaacttcttcttggaagaattcctgacctgagcagcaatttcttcctcttcccttaaaaaatctttgtaagaacgttttttctctcgttggcttcggccagctgcaagtcctatgtcctcaaaggtatgatcaccatcaaaacaatcttcactcggctcgcccggatcccgcctcaacgccgccgatcgccgccatcttggagaaggaccc

SEQ ID NO: 452523 - DNA, 1040 bp, Homo Sapiens
  misc_feature (219)..(231): n is a, c, g, or t
  misc_feature (383)..(391): n is a, c, g, or t
  misc_feature (560)..(560): n is a, c, g, or t
ccccgccggggtaaaaaaaattttctcaagaaatactccagcccacccgaagaggaaaaaattctttctcagagcaggaggaaagcattaaggcgcggcgtttttgtttaacccccccttttttacacctgtgtaaagaaattgtttatttttttccccccggaagaggctttaaaaaaatcctccggtagggaaaattttgttccccaactttttttnnnnnnnnnnnnngagaggggaggggttccctttcaacaaaaataccccccaaaggtggcagggtttttccccccgtccagggggtgttaaaaaaaaggaggggcccaagggcccttagttttataaaaggggcccccccttttggggggccccctttttctccnnnnnnnnnggggtgccgccttaaagcgttggccccccccagagggaaattttttaagggcgggccccccccttgtttgttggctaaggaaactatccacggcatgatcaatgggttcgttttttagtagaggggtgaaggttgaattttaaatttttttgtgtttaatttatggtgnggtttttggcaaacacgtattgctttatttagtgtttctctggattgcagaagtgtcagcagtgggctgagacccccagaagggcatagaggcagctgggcagcccccaggcccttgagggtaggagcagggagaagcagcagaaggaggtgatgcccctgccgctcctcccaaggccagccccgtccccacgctcccatgccagggaggggtcaggggccagaaaaggccctacatccttgagtggggcccgagtgtgcgggcaagctgtctgtcatcccaaggcctggactctggcagaggcgcttttcccacctggtggctcccagggccgattgctggtcaaggagccagatatactcttaagacatgatgtgggttttatggggctccctggctctgggagtggcagtgaggcacgctgaggaagggctgccatcttggttttgatcccgaggaattccggacccgagtaccagc

SEQ ID NO: 452524 - DNA, 1198 bp, Homo Sapiens
  misc_feature (448)..(506): n is a, c, g, or t
  misc_feature (742)..(742): n is a, c, g, or t
  misc_feature (744)..(744): n is a, c, g, or t
  misc_feature (746)..(748): n is a, c, g, or t
  misc_feature (759)..(759): n is a, c, g, or t
  misc_feature (763)..(763): n is a, c, g, or t
  misc_feature (881)..(881): n is a, c, g, or t
  misc_feature (893)..(893): n is a, c, g, or t
aaaagttttcaacatatttctaaattgtgtgagtttccagctgtagcttttgtctttgtcacattttaaaaaataataagcaagacacattggggacactggcagcagttgccaggttttagctgccaccgcttcagtatgagatatagctgtcccatcttcccccattcagggtaggagatatagtgacccagacttcatgcaaatggaaaaaaagttttaactgaaatatttatttagatttcagggtctagatggatgggaaagtagaaaaacatatgcaaatctcagtgttcttcactatgaccactctgagcagagatttggttttgtttccttctgcccccactcgaatccacgttgagaccatgcgccccccccaaccgtcgcaaacacaaccctttccgcgaatccaaactaatcttccatcgcagcccctatccgattnnnnnnnnnnnnnnnnnnnnnnnnnnnnnnnnnnnnnnnnnnnnnnnnnnnnnnnnnnnaatttggcctcgcccaacccgtcattcgcaaaaatgcgaaagattgtccttcccttcccgccgtcccactcacaccaccgtaaaacatgtgacgcaaactgcgtcgtcggctatttccatccgacacttcgcgcatggtagtaaataaataccagccgcccacacagcgcgaccccgagtacctacagcaagcacaccacatctcccgctcaagacagagaatcccttccttttcncncnnngaccacaccancganatcaaagcaatcagaagacataagctaagaaatgatgcaatgtcgcacagatccacacccatagtataagcgtcagcgagaaaccatcgatcagtagcacagctcagatcacatggcncgcctcgccacnaaccagatgatgagcccgccgccccctatcctcccaccaccctacgctttgcccgacgcgtagccgccgcccaccaaggcgtacacggcaacctaacaccacaccgcgcacgaagcaagagggcaacacaccggtatgaccaagagcagcggagatttaaataagagggcaacaaaagcgccgcaccattcgtgcctccgcccacaggccgaccgatatgaacaccacgcacggatatagcgcgcctaccactcccacaagcccctcaacactccgagtacggcacaaacgaaacaacaaacaac

SEQ ID NO: 452525 - DNA, 702 bp, Homo Sapiens
  misc_feature (52)..(52): n is a, c, g, or t
  misc_feature (62)..(62): n is a, c, g, or t
  misc_feature (76)..(76): n is a, c, g, or t
  misc_feature (116)..(116): n is a, c, g, or t
  misc_feature (379)..(379): n is a, c, g, or t
agaagggtgctcctccgcccccttggtttgggggccacatggtcctcacccngttttccacnttggttaacaaaanggaaacaaaacccaaacctcctgctccagagtggtccatnagtgaagaacactgaagatttgccataatgtttttcctactttccccatcccatcctagaccctgaaatcctaaataaatatttcagttaaaactttttttcccatttgcatgaagtctgggtcactatatctcctaccctgaatgggggaagatgggacagctatatctcatactgaagcggtggcagctaaaacctggcaactgctgccagtgtccccaatgtgtcttgcttattattttttaaaatgtgacaaagacaanaagctacagctggaaactcacacaatttagaaatatgttgaaaacttttattatagtccttaggatttccaagtaaatgctcccaaatcaagtattacaaagctgctaattaattagcaactgaaaattagccattcaaattatattggaaatatttgctgaattgtttttatgaaagcttcctcttggattctgtaaggatcagagtatctgaatccacaaaccagctagtttcaagaaagaattcttttgactaaaacttaccttaaaaccaattttcccaactcttttccttttcccaaatagtccaacgttgactatcc

SEQ ID NO: 452526 - DNA, 971 bp, Homo Sapiens
  misc_feature (248)..(248): n is a, c, g, or t
  misc_feature (298)..(298): n is a, c, g, or t
  misc_feature (810)..(810): n is a, c, g, or t
  misc_feature (819)..(819): n is a, c, g, or t
  misc_feature (867)..(867): n is a, c, g, or t
  misc_feature (872)..(872): n is a, c, g, or t
  misc_feature (888)..(888): n is a, c, g, or t
  misc_feature (893)..(893): n is a, c, g, or t
  misc_feature (918)..(918): n is a, c, g, or t
  misc_feature (935)..(935): n is a, c, g, or t
  misc_feature (949)..(949): n is a, c, g, or t
  misc_feature (958)..(958): n is a, c, g, or t
gggggaaaaaatttccttggaaattttttcccgcccaccaatgagcttgggagggcccttttccccagaagtttttggatcaaatgccaaagggatttttcatcttgaggggactcttcccccggaaggaggttcaaacaaatagtcacttgtggccagttcaaagcccatgcatgccgtgctccaaatgtcagcaggggtattatagccagatccgattagactttccagggaacgatattgcttgntttgaatatcttcagtgaaatgtttgtgcacccaacaagcatttccaagngtcagcaatcttcacccttgagcttttctgcattttttggctcaaggggattaacaagaaaatttccagccgtggattttcctttgttgtccagtggtccgttatgttcttgctcttgttcatcttcacagggtatctctgcccgaatgctttcttgaagttggctaatgtgttgttcactgaatgactgacctacagttgaggaagactggcacaccatggtgtctgacacctcagatgttataggtgtacaagagtctgtttcttgagatgtgctgctgtctccattttgggagcttaggaaactagattcctgattcaaattttggacatcacagtcattagcattatgtagatcctctttatgtctcaatgtttcattattactgttctgagtataattaatgacttcaatcactccattgcaattaatttctgctgcaccaccctctgtatcacgttccataaggcgtttgatcctgggccaatgggtacttgactcttctaagggnacaaacggnaccaaaaaaaggtatatggcctatgtgtgttgagtgaaagggaccggnaaccntttctcaccagggttnaaacnttttctagggacttttaccgagtgnccataaaacctgggctnaacctcttaacccnttttccggnggggcccagtttt

SEQ ID NO: 452527 - DNA, 933 bp, Homo Sapiens
  misc_feature (37)..(37): n is a, c, g, or t
  misc_feature (239)..(262): n is a, c, g, or t
  misc_feature (582)..(582): n is a, c, g, or t
ggaaattcaaaattattggattgccaggtggtaaccnggtccacatttggattccccccccattttagtttaatataatttgcaataaatgtacatattgttgtttgtttcataaagcatatcacttttaaaatggtttttactcctgtgattatgttggaatatttggaattttaaaggagtaaagactgtccagcatttggttttataatgtttgtcaccagatttttattaatgtnnnnnnnnnnnnnnnnnnnnnnnnagttggactttggcagcttttaaggaaagttggaggtgttttaggattgctatcaattttcagcattgtgctatttggaaataagtgttttgcttttgtctgatggtctgggctcatttttatgtttattttagaaaactgttgcatcaatatattatgtttcttggcattgttcagcataggtaatgtgtgcactttatgtgtacacataatcatatttaagttttttgcataaaataaatgcttctagatgtcatggcagtctttttaatctttttatcatatgctttcttgtgaattttttcatgttaaagagctanagtcataacatgattacagtcaactctccattatctatataaaatagtgactaagcctcaggtttttaattttgtgataacaaaataacgaaaggcatgtaagacctgaattctggaggaacatgaaaatttgcctttttctcatgtccagaagttctattcctggcccccactgtcccactggtagggtcattccgcaaaagcccctaaccaaaatgggggctccctccccatttcccttaaaccgtttcctagccatgggggcaaaaaggaaaaaaaccatttgggggggtaaaaaccttccgcccttggaaaaggggctggaaaaggggaaacatggggggaatgggt

SEQ ID NO: 452528 - DNA, 530 bp, Homo Sapiens
  misc_feature (84)..(84): n is a, c, g, or t
  misc_feature (101)..(101): n is a, c, g, or t
  misc_feature (112)..(112): n is a, c, g, or t
  misc_feature (208)..(208): n is a, c, g, or t
gtgacaggatgtgagacggttattagaagttgctttcgaagtaactgtggtcttaggttcggctgagtaaagaaaaggattttncttcgagttagctgctnttgtgattttnctcaggctgttttgtcattttaaaatccagtggtagatgtagcttagcgacggtagttttttgttttggctatactaagacttggaaattattctntccagtgtcagcgaatccagaagggtatcagattaaacaccgaattcagccactggacttttaaaagtacttaagatggtttatctcgggttttttcttcagttaacaaaatcataaatatggtgccttataacatgaaaggaaaattagttgtgtatttcacgacgaaagcgacggaccaaaagaaatttcctgccccaagaagcatgggatccaggaaggggcgcgtagatgcttaacggtctcttcggaaatcctgcaaatagaaagataattctagatccggaataccctgtatcctgggtggaaaccccatggggga

SEQ ID NO: 452529 - DNA, 1048 bp, Homo Sapiens
  misc_feature (403)..(457): n is a, c, g, or t
  misc_feature (459)..(748): n is a, c, g, or t
ggtccccgtgaaatgtggcgctccaaccatgcttgaaatccattttttgatccgtgccaaagaaagccatgtgtttttttaaagaaggccctgtgtggcttttttaaaaattacaaaaaattgtgggtaattgggaataacaacaatttttaccccaaaaggcgcttaccccttttcaaaaaactatctccggggatttaattgagggagaggaggccagaattttcaaaccattttattcgggcagatcctaaatgggttaaaaaatttttacccagggaaccagggcctttcccaacttttctttgaaaaaaacttttctttgtgaggagtaaacattagggaccaggcttcaattcgctggttggaaggggctacatttcccttaagaatgccgaattannnnnnnnnnnnnnnnnnnnnnnnnnnnnnnnnnnnnnnnnnnnnnnnnnnnnnnannnnnnnnnnnnnnnnnnnnnnnnnnnnnnnnnnnnnnnnnnnnnnnnnnnnnnnnnnnnnnnnnnnnnnnnnnnnnnnnnnnnnnnnnnnnnnnnnnnnnnnnnnnnnnnnnnnnnnnnnnnnnnnnnnnnnnnnnnnnnnnnnnnnnnnnnnnnnnnnnnnnnnnnnnnnnnnnnnnnnnnnnnnnnnnnnnnnnnnnnnnnnnnnnnnnnnnnnnnnnnnnnnnnnnnnnnnnnnnnnnnnnnnnnnnnnnnnnnnnnnnnnnnnnnnnnnnnnnnnnnnnnnnnnnctttatgtttaccctaccaagagcagacctgagcattttgctggccgtagaggtatataaaagaactctaagcttaggcatgcagaataggcactggatgaatgtagtgaggctattaggagtcttgttggctccctgatgtccttatcatgtcttcttcgcagactgtggatgcacacaagacagctaaaaccttgggcatcatttgaaaatgtttggctgcctgctacaatctcaggagagagaatccttcatacttatattggactggatatattgtcaatcaaattcttttttacc

SEQ ID NO: 452530 - DNA, 1153 bp, Homo Sapiens
  misc_feature (128)..(173): n is a, c, g, or t
  misc_feature (917)..(917): n is a, c, g, or t
gacaatagagcaccccccgggtggtgattaaacaagaagaaaattatgagggggttgtcccgaaaaaatagttcgtttgttggtttccacgttttttccctatacctatttgttggggacaaagggannnnnnnnnnnnnnnnnnnnnnnnnnnnnnnnnnnnnnnnnnnnnngggattgtggggccccattttcattccaccatggagttccacccttggaataaaaaagggtgtaaaattaatttaagccaattacttacccccttataacacaccttcaaggatacactccccccataaccaatcaaagtcactgtcttcttccctagcacattaacacaagaggtacaccaccacaagacgtagaggaccacatttactttacagttttaaaaaattaatatatctcccactatcaatagtgtagtatttatttcagatcccttatttgggggagggcatgctgtataacccagcccatctaaagatttgggcaagtctgccagaaatacataagaaagccctgcaatgtgataaacacataggagttttctactttcaagagatgacatccagaacaaagctatgcattttcagagtagggaatggacacccaggttaaaaacctctggactaaaaatatttcatagcacaaaaggtcagagttttgttttcctttaacccctttttaatgttatatagtcagtgagaaaaacagaatagtcatgtgtgcatcaacacatctaatttgaaaaggaacatttaagattcttacagaaaatctatcataaaaaacaagtcctttatactttcattcatttactcactaatttcagccactggctgtttctaaaccagcaaactaatcaaaggtctggcaactcactcctcatcccaccccattccaaaaaaaanagagaaacgcttctgcttaaataacccaaagtggtcttattcataaagtagctgcctcaactatagtgaaaactcttaacagggtgttgctcacttgaaattttaattttcaaaacatttgtcaaacagagttggtatttagaaagctgctgcccccaaatcatattttacttcaaacaatgttatcatacctaagttctcacaattaccaattattagtccactattagtataat

SEQ ID NO: 452531 - DNA, 1861 bp, Homo Sapiens
  misc_feature (806)..(806): n is a, c, g, or t
  misc_feature (846)..(846): n is a, c, g, or t
cttctgcgctttctgcagggctcaggctaaatctcgaggtgcctctgaaggttccatccgtacagccggcacactcatcttccagttccagtccagcgagcacttcattcagtcctggtggctgaccgatccgacggattaccccatagaaaggagggttctccttgacttcagccaatgagcccacttctagaccatgtgagttcccaggaggcatggccaagggtggactctcttggacgggtgcagtgtttagctcttccattacagactggggttgacagagaaagtgggcctgtggccgatacttcccattggtattgggcatcttggtgagactgaatggtaaaggagtggaatctgttctcggtggtcagtgagttcacaggaggaggctggagtggtggtgaagaacggtcaaagtctgtagatatctctgtaagagcttttgcagggtcttctgcaacttcatcaatgtaccatgtattttttgatttggattgtggttgtgagtcaacagaagacccatttaaggtataaaataattcagatctgtttctatttccagggtctgaggtagatcctgtagcctttggtttattatgactggatgaacctttgtccccaacacctcttgacataaaggcaagtttgggaggcctcctttcctgcgtcacactctctgggatgatatcattgatgtgcaatagaattgtactttcaacacacgcaaaactacaaagctgcactccatcaaatcttccatcccagttgccaatagggttatccatgtccacaccaacaanaatatcctaagctttcttttcctggcaaaacatcacaganatataactgttccagattctattgtttctccaaccttcaaagaaactctggagtttatttccaaaggaggaagttcgacctgcattgtgtccccaggacctgcgtaatcactttccaatgcagtgtcatcatcttctatgagttctagcttgtccaatgcaacaaacacgccacaatcttcatcacactgaaaaagctgtttcccttggtacaccccgtcagtgaaaccttgaccacgaccttcttccagcaattcaactccaaagaatattccggagactgtcctctctgctaacaggggtcctctgaagcgtacaactccaggaaatttttcttccccagatctcagctgtactttcacaggacagcccacgtctatttggaggcctttacttagtctgtttctgtttttaaacaggctgaacctctcctcacaattggtaattgccaaaagtaactctgtgaacttttcatttatctctacaacatccttttcatcaacaaagagaactgcatgaggttgctctagaatttttaatccaatctgatttttcttgccttttgcagaaggaatccttgaatgccccacagaacgatcttgaatatactgtcctatacttcccttcggtactttaaggagcttttcgtgtttgtttgtctgtaacgctgcattcttgaagaagcaagtaaaaaatccgctcttcccagtagggtgaagtgactttttcttggctccataagcctgaactcattgtgatattaacttcacaatactaattcaaaaaagggaaactactaataactttgtcataaaaccgcaaaagataaattcagtggcagtcccaaagcatgttttcagcaacgtggtgtccatgctgtcacagcagggcgcacctttcaactaaggaactccgggtggctgtgtagaaccatcctcaccctagaaatggggaaactccgacgcgcggcccccgcgcagccaaacctgctacctgggcccgcccccccctccgct

SEQ ID NO: 452532 - DNA, 934 bp, Homo Sapiens
ttttttttgcatcactttactttaattgcatgatttatcagaacaactattaacatacgaagaccattcagttcagctgcaggtataggcagtgacaagtatctaattcttagaagaatcacttactcccacaatctgtccagacacattaatctaaggacaagtttataaatagcaaacgtgattttcacattgcagtgttctcaagaatgtatatacaagtgtgtagtcctgttgatgggatgtttccccgagttctttctattgatgcgttcatgctcttgaccctggtagagacagttctttctttccacagagcagattttcttttgttcatccaccatttacaatactctgtggaattagtattacttattacatttatgaaaacggcaatatttggattgtaatagctcttcagtacaattccttgtgtcttctggtaagtctctgcactatcagagagcttttagttataatcattttcctgcaacaacagccaaactcaactattgagtttcagtgtgacacaccctctttgtagcttgctgggttaacccttggcttcaagtcctgatgatgtaatgagggtggggtgtattggcaatcagtacatttccttatcgcaatttacagtcattgaaaatcatgctgtcattaatcccagtctgacataccttttctaaaatgttcacagtgcagtgtttttgtggcctaacaaaatttttctcatatcattaaaaataaacatttttataaaaaatataacactttaaatgtttacgtcgacaaaaccagttagagtaacctacaccacatgcactatacagtagtaagcacaaaattccacagaatgaagcatcacaaagttctgctcagggtggctattccatctaggtgaaatagctgggattttcaattgcctttttccccg

SEQ ID NO: 452533 - DNA, 791 bp, Homo Sapiens; identical to SEQ ID NO: 150644
  misc_feature (92)..(100): n is a, c, g, or t
  misc_feature (569)..(617): n is a, c, g, or t

SEQ ID NO: 452534 - DNA, 989 bp, Homo Sapiens
gggagaaggaagaagcctcaaaccacccatttcctgctttttagagatagagtctagtggaaccatggctctaactgggtcaagtcctcctagctctgaagctaaggctgcagagctgtcctttggactgtatttcttcatgctttccagagttagagccttgatcacggaacatcattgtgtgcagaagaatactgtacctagtactaagttcttttcatctttgatttttctttagcttcatcagtccttccttcctaatctctaatcccctgaagcctaacacagttcctaatgtgttttgccttaacctcttttctcttcccacattggtacttctggttggggctctctttacttactgcttaggcacatagtcaccttctctggactccctgcttccatgctttctccttccgtccattccgccaactccttgtgatcttccaaaaattagctctggattagcctttccactttccgggaggaagcccccaaaccagccctccctctgcctcggggcacttttgggcctggtgggcccatggtgaatcccacaaaatttaacctcttcccctaattggggaaattttaccttaacttcccggttttggggctaaccgactgggtaatttgggggaaccctcccctggggcccccaaaagcttatcgccaaaaaagaatggcggaaccctctctttgggaattccctccccaagaaagccaccactacttaaaaagggggtctcccgtgaaccattgcctttttacacaccctccttttttgaaaaggggccttaattgtggcccccccctgtggtggaaaaaatcaccttcacacttaaattccggattgcgcccccccctttttccccggggaggccagttttgggacgtgaaaaatgcgagaattttcccttttcctccccctttgggaaaacctcttttaaaaggggttgataccctctaaggcgccaccctccctaatc

SEQ ID NO: 452535 - DNA, 802 bp, Homo Sapiens
  misc_feature (649)..(649): n is a, c, g, or t
aattttagaagcaaatgtgatctatttaatctgttaggagggcgctaccatgctgccattccagctgccctgcggtgaccccagtggcacttcacccgctcactcgtcagaggcctgagagggtctgtgaggctgggtcatgaggcgggtgggaggggacaaggagcatgcatcctggtgtttgtcatggctgtggtcttgctgaagaggcgggggtcagtgacaacggagaacaggcacctcgaagtgctggagccagggcacgacccagacttcagagtagcagctcagagtctgcttcaaggtgtggttggtttggaagtcacagtcatccagacgcaggtgctggtttttcttgcaggtagttctgccaatttccacctcgagcatatatttcaggcctttcactatctgaactagggcccttgtgatgcgggactccttgaacaagaacatgtcgttcgtgcagttgttgaacttttcaacactgtatctggctgcttggaggactcctgggtcattggtctttattgttttaggaaatcctggcttcacacgtgagttaaggtcctgggaacaagtatctggggaagggcccccagtggtgctcaagaccaggcagcagaaggccagcagagttccagccgcntcgcatggctgcccgggtagggacagtgcggggcagttgggggtggccgtgcagtccttctcaggcagcatggggcagttggaggcagtggttggtgcccgtgccgagccttcttgggtagatggcgcagggcaggtgggggcagtggtctgt

SEQ ID NO: 452536 - DNA, 823 bp, Homo Sapiens; identical to SEQ ID NO: 141344
  misc_feature (353)..(410): n is a, c, g, or t

SEQ ID NO: 452537 - DNA, 792 bp, Homo Sapiens; identical to SEQ ID NO: 150565

SEQ ID NO: 452538 - DNA, 991 bp, Homo Sapiens
  misc_feature (242)..(242): n is a, c, g, or t
ccaatccaaatttttccagggcaacactgggcttccagaaatgtgggcaatattctccccagcgttgttttgggtccgtcttcactttctgcatccagcagcttttgctgtaggtcagcaatctgagcactcctgatttccatttcagtctctaggctttcaatctgctttgtaatagaatcttctgactccggaaacttgaccacgcacttcagtaagggagaatgtacgcctccggagtntaggaggtggattctccccagattcctttttttctttgagttgagccacatcttgagccaggatctttctatcttcaaggaggtcattcagatggcgtttggcttcctcagtactgaccataacctcaatttcgtttccaagccaattcttcactcgagctgcagtgccttccattccacggctctgagtctctttccgcttatctgcaacctcccgttgtttctggagagcatccttgagacgcttgttggcagctgctgcctcctccgttttacgtctgagcacattggattgtttctggaagtttctttcaagtttcagcagctcatattgcctcttacggtctcgttcttttaactgtattacttctttgtctttttttctgcttccactgtctaaacttctcagcatcttctttcatttgacgcattaactgtacccgctggtttttcatcatccgtatctcctggttcagtttggagacagtacgctctgtggattcctttagtttcagaagtttggactgctcattcagtttcttcttcagatcagcaatttgaccctccagctcctggagacgtttgcggcggcgctcactcaacttggcttggttggcatccttctttgctgtctgaagttcaagaaccaattcttccttttccttttgcagattgatgacttctaattctagctcttttatgttatcctggtattggtactgaatgggctgcagttggctgtcattctg

SEQ ID NO: 452539 - DNA, 669 bp, Homo Sapiens
  misc_feature (529)..(558): n is a, c, g, or t
ttttttttggtttaaaagagcgttagtttaataattcacacacctgcaggatcaattatagcaaatgaaaaagcaagctacataaaaggaaattgacttgtaaacacactcaagcaaatataagtgggttttattatttttatgctcagaatgcaagaaagctttgcgccagaaccgttaaacattcatgaactcactaaaaaggaaacagaaaatgcccttagaagacgggcggggcgagggggaagacctatgaacatgtttatagaattaatgtctgtactgtaggcatacacaggtaattaggaaaatattctcaatgcatttaagatattttcactaaagggtttgagattatccaattaggctgtactcgaaagtggcaaatacttgaagatcattgatttaatttaaaattctgagtgctgagttcagtttcctactgaatataaccagtgccctgggctctgcatggcagttgacttgccaatatctcaattaaagtgactaggcacagtggctcacactnnnnnnnnnnnnnnnnnnnnnnnnnnnnnncaggagcttgagaccagctggagaacatagtgagatcctgtctctacaaaaaaatttaaaaatacatactttttagacaggtgtggtagatcacacctggtgcctggtggc

SEQ ID NO: 452540 - DNA, 871 bp, Homo Sapiens
  misc_feature (243)..(243): n is a, c, g, or t
gggcggcctgtttttttgtgggcccggcgcctgtcggtgggagaaacatcccgggtttcgccccccttccattttggtcccctggaggccggaccaatttctcttcaggggaagggccagggagggaaagcccggggccttgggttctgtggaaaatccaattaatgccaaggcccgggccgaaaaaggggggaaaatggtccatgggaaagggaaggccagggggcatgaaaaagccaactnacccaattcccccaataaaattagccacgtctttcctggaggttttccaggccagggagtagggttaggactgggagctccctgaaggggaagcgttgtgcattccttctgggtagctcccagtgcccagcacgggtggttccaacattaaaaactacccttcctttcatttagtcattttacatctcccattttaccaggccgtattctcaacactgacattcttggtggcttgtaaaaccaacaggagcatagaagagtcaaagctgctagtacttccttaaaatgttcccctttagagtgcagctgaaggggaaagctcctttgcccgctcatttttccctaattgtctatatacatcagacaccttcatctcttcaccctgtgacccagcccaggaaagaagcaatgactttgaggtaacaacctttttcccactgagtactctttacatttggaatatgcaggatttgcttgggagtcttaattggagtcaaacacttaacacacacacatggagttggtccctgtctacaggtagcacctctggggcacagacaacagctttgggctgctgttccatttacattcacagtaaaaacgctggacatggtcttgttcatgttcc

SEQ ID NO: 452541 - DNA, 814 bp, Homo Sapiens
  misc_feature (72)..(72): n is a, c, g, or t
  misc_feature (144)..(145): n is a, c, g, or t
  misc_feature (505)..(514): n is a, c, g, or t
tctttttaatggccccacatctcaaggtaatgcctttgttttataaaatgctcctctttgacttatttcttnccacctgaaacaattttcttttaaagactatctcccttctcgaaacttcatactttgtattagagtttgatnnttctgtcccaaggaagttgctgggcaccattttggctcattaccataaactgtccagaaaaatatgcttgctttggtgagaacgaaaacgaagtaatgagatttttgagactaacctagagattatgacattttataccattcttatgtacctatttcaataaacctaagacagtagctataatatgaaaatgtacaaagataaattaagatttttataagactgtctttatgtggattggccaaggaatgtcaccaacattcagaatatcgtttttatgaagaaagactcagtaaaacgcacttctaagccattaacaggatggaggatttctctttttcccccaacaccctcccgccnnnnnnnnnncacccaggatcaagcctactaccaacgacaaaacaaaagtatcataactcaaatcttaccctgtaaatgaaagaaaatgagtctaaacatgtccagttgcatttcatttcaatttcagttcagctcctgatgttaactggtaagactttcctctctttcttcttagtctgtattcttttgctgtccttgtttgaactgcctcctaggtggccgtcatacaactcagcaagtgatgtaaccaacctgaagttgcagggaaaggaacctagcaatactacatcccatacccttccctcttcc

SEQ ID NO: 452542 - DNA, 817 bp, Homo Sapiens
taggatggccaggtgaaagtcccatgaagtaaagaggcattctttaaaaaagcagatttgattgcataccttttagttatttgagattctgagaattctgataaaccccaaagcagaaagattccttataccccttggaagatgggaaaggtgagggaaatatttgaagcagggtcagaacatccactaagaacatagcacctcagtagagcttacattatagtgccagggtagagttattactgaatagcttaggatgatgaacattaaccttcctacaggagtagtagcagctgatttggtgaccatgattggtcaccttttagtgtaactgcaaactaagaacaattatggcttgacatatactccatgtagggaagtgatgggagaggcagcctctgtgtggtccatccttggaagcactgcatcgattttgctcccctctggttttaaggagatcttttagacctttccttgctaactgctttcagtaaattcttgatggccttcgattctggattcagacatctcttctcacccttctttttcattgtagcaatgatctcaacacgtggacaaaattggcttgcaggaataatttcaagtttttctaaagaccttggattaacaggttgattactaatgctgatgcaggtacagcgtacagttctagagagaggtactccttgaatgccacttagagtcagaaagataaggcagcaaatcagaatggcagtttgattcatggtgctgagactggaggttcctctgctgtaggctcagaatatgtctaagcaattgaggaatgtctcccccc

SEQ ID NO: 452543 - DNA, 577 bp, Homo Sapiens
gttatatcctccttttaaaccattgttgttgagtgtaagatgtccttcatgttttcttataaagtcagtgtttagaaatgttaccctttctaagttatatacagatcaaatgcttttttctttcacgtacatgcatcatttgcaactgctgttcgtacacagaaacaggactgctcaaatgatcctatttgtattttctgatgctatcagactctaatgtttttttccctaaaatattattgccatcatgctttaggaattttatatttttacacaatcatattttagtatggtgtctgtttatgtaactctgacttgctggaaaagttgaaactccaaataatctgaaactagaaaagaaatagcacataattactaccttccccttggcggctctcctccccaacccccaccccacaattttatgacttccatttggcaattgttgaattataactgcgactgaaacaaacaggttcatagagatgaattttctgagaaacatatatctacatgttgtataattggattttttttccatgtaagtgaacataaaaacatcttttccggcaaaaaa

SEQ ID NO: 452544 - DNA, 1060 bp, Homo Sapiens
  misc_feature (46)..(63): n is a, c, g, or t
  misc_feature (130)..(400): n is a, c, g, or t
ggcctgggtggcgaattcggcacgagggagagaactagtctcgagnnnnnnnnnnnnnnnnnnaaggtaaataccctctttagctgagtccaagactttggatattagattactgtacctaaaaagagtnnnnnnnnnnnnnnnnnnnnnnnnnnnnnnnnnnnnnnnnnnnnnnnnnnnnnnnnnnnnnnnnnnnnnnnnnnnnnnnnnnnnnnnnnnnnnnnnnnnnnnnnnnnnnnnnnnnnnnnnnnnnnnnnnnnnnnnnnnnnnnnnnnnnnnnnnnnnnnnnnnnnnnnnnnnnnnnnnnnnnnnnnnnnnnnnnnnnnnnnnnnnnnnnnnnnnnnnnnnnnnnnnnnnnnnnnnnnnnnnnnnnnnnnnnnnnnnnnnnnnnnnnnnnnnnagaaagagtaaaatggtaactatgcacaaaggatgggggaaaggtggctcacagggcttaaacatcagaggaatggagaggacaggacagtgagggaattatcctggaaggtaggtaactggattgagaaccacaaaaagcatgtagatttaagcagattacgagtcattttaaacagctgtttcaaagtaagagtaaaaaccaggctggagaaaatcttgggtaatattagagtaacatagtctaggataggaatccatcagttatggagatcagaggtaagatatagtcagggaaattaggattcatgcttgaagagtaatagaaaaacctaagtgaaacaggttattggaattttctttatgaagaataaaagtggaagaactgatagtctggaaaggtgaagtaatctggagtaggcagctacaaaaggtataaaaatttgtggagaaggcaaaaattgggggcagaaaatttaaattaccagggagtactgcagtcctctggtgggaggtagatcataaagaatctgtagaaccatttacttttcctcacagtcaactgctcttacacccagagcagtagctgtcaagtcattttattgaaaatacactggacttggacatcctgagtcaaactgccatcacctaaagggcctgc

SEQ ID NO: 452545 - DNA, 977 bp, Homo Sapiens
  misc_feature (755)..(755): n is a, c, g, or t
  misc_feature (833)..(833): n is a, c, g, or t
  misc_feature (912)..(913): n is a, c, g, or t
ggcctgggtggcgaattcggcacgaggcaaagatggctcatgtgtgagggcattgagtttgatttgttttccctttggtctgggttgtgtggcttttgggggatgcgtgtgagggggctatgtgttttttaattttttaaatatatattttggtgctgtgtgtggtaagagacttgttcctagtggatcaatgaaccatctcttctgggcagttttgttgaaaataaaggtttctctttgatttcaagaatgaccaaaatggcctctaaaagatgttaatcatctcaaatgaccttttgtctttggggcgttcttccccctgtgatagcggcagtggctttttctggtcacctgcagctggaaaggccacttggccctgtgctgagtgagctgccttcattagagcgaggcagcccttggccggtggggacgcagagccccagcaggtggtgcacgactgttggcggaaggaacgcgtgttcatcctcagtgatctgccctccagcatctcggcagcatctcatcctccatcgtcagctggctctgccgatgtcctgcttctgttcactcacagaactgtcccctgctccgtggtgggcaggagggaagtggtgcagggctgcgtgcattgcctgcgagtcgggacagttgactgcggcacatggccttgtagctctgggcacacgatgtgtttggattcattgccgcggaccaccgggcactgttgaccccactgagcagtgctaagtgttggntttagttggatgttcgtggaattgctgacccatccaagggcgtcctttggagccagtggagcctgccggcgcatctgnagggggcagaatgctgctagcactttgaatctgggatctcgccttattctcaagtagcaagcatctcgaaaacatgggnnctaaggctggggggccagcttgcaataccctggacccgggcgggtcattcgccccctaagggac

SEQ ID NO: 452546 - DNA, 674 bp, Homo Sapiens
  misc_feature (33)..(33): n is a, c, g, or t
  misc_feature (39)..(39): n is a, c, g, or t
  misc_feature (59)..(59): n is a, c, g, or t
  misc_feature (65)..(65): n is a, c, g, or t
  misc_feature (81)..(81): n is a, c, g, or t
  misc_feature (636)..(636): n is a, c, g, or t
  misc_feature (648)..(648): n is a, c, g, or t
  misc_feature (655)..(655): n is a, c, g, or t
aaatttttccatccataaaagggccaaggcccngtcctntactactccattggaaaaantgttanaaaataactaaaaatncaattcaatatttatcagtatcaaataaaactactatcacctttcctgaaaatacaaagaaacaacagatgtatctatacctatataaagtttaattcagaatcttgcgtcttaaagcagatgattattagttagcttgacaacagtttaaaactgatggtcccagttaaatctgtacaactgtatgagaaaatgaaaagcttgagttatcagtgtacgagagattttaaactactttatctctgtcagaaattcaaaactaaacaacctccaaagtctgttttcctcttacctttcagaaccatttcatgcaaaatctaaccagttttgctcgttattatcatatattagaaaataaaaggcaagcatgcatttggcaaaagatttagttgttgattatataaaaatgcccaacatgggtcacattgcaaaattaaaaccccaaagtgtaacaatgaaaacacaaacatttgtacagaaggtatacagggtattcgtttccctaaagtatgaagacattttgtttctttttcaaatacttaaatattttatgantctggcaatgancttaagnctgttgacatacttccact

SEQ ID NO: 452547 - DNA, 859 bp, Homo Sapiens
ctcggtcatgaaaattgttttattaaacttcctatgtttactgtaatcagatgtagccaaagaaacaggaccttacaaaagtaggtaactaaaaaaaacatgtagttacagtgccttggctcaagcagatgctgaataaatgtaatgtgaaccaatgagcaagcaaacatgtgactacggaataagagtgagttacattaaagtcagaaatatggtcaagttagagtgtccagtgaagtgataataattcagagatttgtttcacagattgtattttatttaagcatacttactccctgacttttaaaaactgtttaagtcatatgctcctaatagtgcttaaaaatctattgcaagaagttagttctccaagtacatacaatgtactcttcttaagtttggcttcattcattaaaccgaattattttgaggtccatctaggttgttgagagtatcaactgttctttttattgccgagtagtattccattgtataaatacaccaaatttgtttatccatacacttgatggatatgggagctgtttacagtttttagctattaccaataaataatagctgctgtgaatgtttgtgtacaagtcttttttgtggatatacagtttcatttctcttgaataattagaaatggaatggatgaatcgtatggcatcttcacatttactttgaaagaaactgcccaattgtcttccaaagtagttgatccatttcacattcctatcgtcagtgtatgagagttccagatgatccctccattctttgtcaccatggggactaatccctattccattacaggccatttctaaggaagttatgccaggggggtattctccatttaagg

SEQ ID NO: 452548 - DNA, 790 bp, Homo Sapiens
  misc_feature (76)..(76): n is a, c, g, or t
  misc_feature (121)..(159): n is a, c, g, or t
  misc_feature (211)..(230): n is a, c, g, or t
ggtaaaacttttgtccagaaagggctgtgggcagaccagccttctatgctactaaagttttttagccctgtaaatnaatgcaaacaaccatcagccagttttaaaatgctataggcctatnnnnnnnnnnnnnnnnnnnnnnnnnnnnnnnnnnnnnnntaagaatgctcatctaaaatgaagctgtataaccaaaacatctagaagtacnnnnnnnnnnnnnnnnnnnntgattagagaaaaccctctgatacaattttaatttcttgacttgtttttaaatgacatgaacttttaaattaaagtggaagaaaaggagctttacagttgatagtttcaactccctaaaataatgccaacaaggtaagcttgcatagaaaaaaaacttcaaattattactggctacatgcttaaaaaattagaaatgcaggtattataatcatagtgcaaaaccatggcagtttgtgatgtctattactgcctaaggttgagaaatagaccgtagtacctccagttatcacagtttctggtcttttaatcaattatttctgccaactagaagcaatgtgtatgtaaagatgggcagcacacatctgctgtgctattaattaacaaagtttgaggtcatcaccaccacctaaattggaaccaggactagggtcttgttgtcttcttgcctccatttcctcccgatgagacctgtctctatcttcaaattcgcgtgtccttctccgagcctcttcaaaggcactgttgtgcgtaatgcatcctcctgctgggctcgctcccc

SEQ ID NO: 452549 - DNA, 654 bp, Homo Sapiens
cggtccactcagagagtgcagagttgaaaggcaaatcctcctttagggctttgtggggcttggtgtgtgattcactgattcacttccagggcaactaagtcttctcttcaacctttgatgtctttaggtttctaaaacgaacatcctctcggaagacaaatacaatttgcaaggcacactagtgtgagaacgcagtgcttggtcaggaggtacaactgcagttcagactaatgttccaggctttgaatcttcatgccaaaagagtctctgctcactactctccaggttgtcttccagctggtttccatctgtaccatccagttgactgatttctgtgtattgtctgcttggagagggtaaaggattatagacattgccatagcagctggtgtaagaagaatgtgctggagtctcgtaatccgacagccctatggttaactgggtcctccagttcccagaagcatttgtagaagacactgaagagtacaaggatgcacgactgcttggagaacaaggtacttgcagccccgcaaaccccaggcatctctgtgatcccctgtctgagtcaaagctggtctgcgggctgtgtccctgatccttctgcccagaggcccgctggtaccagccacgcaagtgctcggcaactaaggcccc

SEQ ID NO: 452550 - DNA, 473 bp, Homo Sapiens
tgtttttttggcttccttgttttaagtttctccaagattttttctggagttgtagaagccaaaaagcttcaccacctgtttcacgagatttaccacccttatccaaaaaccacatcactcttcctgagttctaggaccttggaaagataccgacagagctcagcattagcctctccctctgatggaggtgctgcaatagctacatttacagcctctgctgtcaaatctgttacagcattttgtttggagccaggttttgcatggatggctatggtgacgcatcctttaggatcaactgccacaggacctaagggaggaagtggtctctctggttccttgctctggcttttacccttggtcgtcgcaccagccttcttaggcatctcggcgcgaagaagccgagcggagccccgagtattgggtgttgcccgaaggtgcctcagcccgctgcggagccgcagcatccccccgct

SEQ ID NO: 452551 - DNA, 1373 bp, Homo Sapiens
  misc_feature (242)..(242): n is a, c, g, or t
aggcaatttttcaatttgaaaaaacaattgttttaagggaaagccaattcccgagggttcatggagaaagggattgattttggaggccaggataaagtatttaaaaactggccaggcaccatactttcaaatatggggaaagaatttttgcctcaatggcacccatttccaggcagtaattagatttttacacatctcaattttctctcatattgaaggaaattacaggtaagttatgctcntaagtcagttaagaaccccttcttttagcttgtaaaatggtagccttttgatttgataattcctctacttttcacaatgaccgaataccgcagtagccacagcggcacccactcgtgcgcttgaatgtcaggaatgctttcctgaagagcttcttggaaacttgcttcagaaagcagttcttttggatcattgtgagtcaacagctgtatgtcaaattgtttagcaaatgcagtcaaatctggtggcatcacacagcaggaggcaagattaacttggttactatttggttttacctgtgcccactgatacagctgttccaactgtgttttgtctagatcagaggtacctatggcaacaatctttttgctctgaactaagttttctaattcctcccagtaaggctgtaaatgctccaaggaaagattaactccatcttcaataggaggtgaagcaatgatcacagaatccagctgtgcaactccaaggactgaacaggccatgtcaactgcacttctagttgatgatgaagagtttgattctacaatgaacagttttgcagaaactttcatttcttctctttcatcaggatttatcttttctactgcatgagatacagtgcattccaagacatctggaaactccctgaccaaatctgggttgatttgggaactccattcattcaaggtttttttggatacaatcatgaagctcctcgctgtgcgtggacgggcacttcttccgcaggcggccccagttcagcaggttccccgtctgcaggtgcagggtgcgggcccgcgccaggagcgccttggccgcgcggctgtcggtgcccatggcagcggccgcccaggggccgcgcagcgaaggggctgcgggcgggcgggcaggcaggcggccgccccacaggacgcggtgcccgaggcccgagagagacccgagagggagcgcgaggctgccggcgccgcgcggctggagcctggtctgcgctcgggcccgagggaggccggacggcggctgggcggcggcgggaaaggaaggcaccggtggctgcggctccggctccggctactgcggccgcagcgggagagctgattccaaactgagggagctgtttcctggaagacaatccc

SEQ ID NO: 452552 - DNA, 558 bp, Homo Sapiens
  misc_feature (18)..(18): n is a, c, g, or t
  misc_feature (23)..(23): n is a, c, g, or t
  misc_feature (149)..(149): n is a, c, g, or t
  misc_feature (268)..(276): n is a, c, g, or t
acccccaaatgtgattgncccancattggaattgggctatcccaaaaatgtttccttaaaactgtccaaggcaggcctcaataatcattgggggtaaatattaactgagttttgggggaaaaaatccggaaaatgtcaaaaaaggaagngccaaccggcattatatttagtattctaaaggacttgtttcaggtagttcaacaatgattctggtaagaccaactgctcacatacatacacacgcacacacatagattttaatggtttnnnnnnnnnccaaatttgttactttagaaaaatgaatgcagtgcattttcagcaatattatcgccacagactctgattgctcagtccacacacaagtaggagttgccttctatggtgacatggcttctctgcactaattcccatcaggccgaaaaatattagggcaggttaagtaaagaccgaattgttgcacaaaggaacatttactcatcagatcccactgatctcttctgtgcccgtttcctgggcaaccttcttggtgaagctttattgatttgattcaatgtttcc

SEQ ID NO: 452553 - DNA, 790 bp, Homo Sapiens
  misc_feature (245)..(245): n is a, c, g, or t
acaattaaagatttttcttcaaaaaaggtttttgtggggtgggtgcccccttgttgaaggggtttaccaaaggaaatttgcaaaccaggctcggaatttgggccacgggttattaaggaaaagggatcctttcgctggggaatgtttttcatcccgggggcctgtccagttctttttagctggctgcctgtagccgtgatggagggcattgtatgtacgggaatacctttggctgtcaagccctnccatgagatcctgaagatgcttattcagaataccagtattgagtctatcaaaaagatcatcctcgggctgcttgttctccataaatagttgtaggttcttaaaaactcgtttctcaacagggaccttgttatagtatctgatggagtccttcccgaggaagtcaaactctaccacatattcctgaccatccaactctgggtgtagattgatgtgctccacacgaagtgagcagcagcccacagtgtccgctgtttctccttcctccttttcattgcctgctctcagagcaagcttgtcgatgaagtacagggctacagctctctgccggactttcatctctttggacttccagtcttctcgatactggttccggatcttgtccacacattttttcagccgccgagcagtctcgtatttctgccagtccttctcacccttgattcgtgaactagggttaagcatgatgtatttaatggaaccttggatgttctctgtccaggaaaccagccaagtaaccttgttatcatgccggacttctttcccc

SEQ ID NO: 452554 - DNA, 1244 bp, Homo Sapiens
tggttgaatgtattttctaccaattgaattttgattaagaaaaaactaaaaggtccaatttggcaaaagcactttaggaacattaatttattggccacactagggaatctgaattagaatatgaaaatacaaacattgaacagtacagcaatatacatctatggttatgcataatgacttgttacccatagctatttagaataccctagctcatacagctattattgtaacagtgcttgctaatatgtttgcttcagccaacaaaaaagctctatatcttctatctacaaattcaatatagagtacatattctaactgagacaacatcaaacttaagccacagaaatttaaactgttactatagcaactgttgttgctagtctataccgtctctattttgtttaactactactttgaactccataaaagtaaaactcagaatgtaatactcaccatctggaggaagctgactagaaaattcggctggtaaagtcaagagtgcataatcttttaatgctgctaaccacaggcgactgagtgttggtagttcaggttgtaccagtgttattaaactatctggtggcagttcatcgatggtaccacagtcgtcatcatcatcgtcagtatttttaattgctctttttggttttgactctgcttcctttttaatattcatagcgaccacatatacctctgcccaagctttgagaacagccagtttttccatggtcgtggcactctctcggtacagctggctggaagatccttttccagcctgaactttgtccagagaagaaacaagaagattgtgtactcgacggagatcattgagatcactgacaactccacttcctatccatgtactacatacctggcaagctttcgctattatatctgatggtgtatcttgtgaaaaggctggtcttagagcagctcccacattagcctgatactgctccagtatcacatgacctggaaattctggctcaggcacagacgcaaacttcttgataatgtcttcaagcgcctggagcccagccattcgcagctggttgctatgatcagttgcagccatgaatgccatgcgaatgaggtcagagagatgaagtaccaagaggtcatttgtagggtttcgaagtttagcagaacgtgccaaggcaagatcaaagtgagcctggtctgcattctcacaccaattgatgattcgacacaggcaatcggcagcaaatactcgagtggccccc

SEQ ID NO: 452555 - DNA, 666 bp, Homo Sapiens
  misc_feature (47)..(47): n is a, c, g, or t
  misc_feature (68)..(68): n is a, c, g, or t
  misc_feature (85)..(85): n is a, c, g, or t
  misc_feature (106)..(106): n is a, c, g, or t
  misc_feature (558)..(558): n is a, c, g, or t
  misc_feature (586)..(586): n is a, c, g, or t
  misc_feature (606)..(606): n is a, c, g, or t
  misc_feature (612)..(612): n is a, c, g, or t
  misc_feature (637)..(638): n is a, c, g, or t
ccttccccaacaaaaaaatgtgtcctgctgtcctaaatgcctaggantttaaccctgaatgaaaaaanacctgaattgttagaanggaaatctgtaaataaacaancctcctccatcgccctaatgacggcaggcttggttcccaaattaattcacttcaagagaatggcaaactccccatcccattgctgaagcatcaacagggaacgcaggcagcctgcaaagcctccccaggaatctgaaaggacccaagcctgcgaccacgaggaaccagacagaaagtggcattgtgcagcatttcccgataatcatacttctcatactcggtgttgtctctgtcacagcgagaatccttgtgcttttgccagtctttgccatgcttgcaggtggtgaggagcacaacgtcctccccgttatggacgtgatataaggcattcctggtgtctgatcctatccctgtcaggtacctcttccccttgaataccagcatgtacttcctgagaggagggatggtgttgaacttcaaaaaccccctctcccctcctgtcctgggatganccttagaaaagaggggaatagaaacatnaaagttgggtcggaagtttncagtancgtcattggctttggccagcatcgnntggccgatgtcaaaccccacgtcctcgg

SEQ ID NO: 452556 - DNA, 830 bp, Homo Sapiens
  misc_feature (233)..(233): n is a, c, g, or t
ggtacccgtgttttcgatgccacagaagtgctcttttataatgttgacgccaatctacatttatattatagaaatgcactcagaagtaacagacacaccaggttaaaacctgattctttcccactaagttctggaaatttattctaacataatggtgcctttctgtaccaagaactgtaccatatcataaatttactgctagtaaactttaagccaccagaaatctttcagcntgtgacaagcacttgattgtaatgacagatttcagagtctgaatactgaaaaatatatatatccaataaaaaatttttgaagggggaataaaagcacataaatggcagcagaggaattgatgttctaagcctgttttattacatgggacatcacactacccttaatttcactgaaggtatctgaaatgggtgagatgaaatcaataggattttctgctaccattgtaacagttctatatgtagttacaaagggtgttattcctagtgatgatgacacctttcatgggattcaacttaaaaattaaatccttgcactttcaaagtttgaaactcaattcaaaatgagtccgtcttaaaagcctggctcatatggtcccattaagggaggctaacaatggtaatctataatacccaaacttgaagaataaagactttatggataaaaaggaataaaccaaaatatttgggctgttgaagtataagggcctgttgtaggacaatccctcctacttcctaatcccccccatacaatggcttaagatagccaaaacgtttattgtagaacgtttattattcctacaagcttatgtctcaccc

SEQ ID NO: 452557 - DNA, 768 bp, Homo Sapiens
agataggagggtaagttaaaaccaacttatccatgcctaaaagtcgtaaaggggccctgagggtggttccccaaggactaatggtttgctttctattccagggaaggaccggcctgtatttgggggggcaggtcagtggggaacccttgccccgggggggccaccagccattaactcttggggcaggtttcttcatcccagtattctttccatgccccttttggaaaatttcacgaataatccgttgtggatctttttccctgaaggaggtcctggggacaagctgtcagtataatttttgctagttgctcccacgactccagagcatgacgttttgcatgaagacactgcagcaatttattttttcctaccacatactgaagtacagtgctgatttcctccattagtagaggtctctgtcctatggctgccataccctgaagggcatttacttcagctacaagaaccctatgaagaagcttgacattgcagactgtctgtccccgtaaattcttgtgttcacagttagcaataacttgttcaatctgggcccgatcaaaaaaatccaactgcaaaggctcagggatctcctgaactgaagtcaatcgagtcaagaatatttagaatttttcgacgtacttttgtagcagtgtcaaagtgaaggaacccagaaacagacctgttttcatcttctattcctccttcaccatctgagtatggtttcactggcatgtcatccagtaagaggtgtaggagcctctgggtacc

SEQ ID NO: 452558 - DNA, 744 bp, Homo Sapiens
ttctttctcaggccggccgattttttctctttgaaaattattaaattacgtggaaattcatgagcaattttaacagcaccagaaactttctgtccagtaagcaagacagggatttctaacaatgacacaagagctccagaacttgccagtaagacaaaggcagtgtttccaatgacaaggcgtaggaacccatggataaaaatctaacagaacacatgctggaaaacggggtcaggaaatggtatcatccaccctcgatctgagtatgctcagtgatggcacaaagcatgtcctgtgagagggacttggagatacgatcgcttctatccagaaatgtgccctttgggaatggggcatatggtacctaagtgcccccaaatcaactgtttttcaacttcttgcctacgcagtcataaccaaggtttcaaggagaaggcaggcgcaggaagtatttagctttgacttcttagcagatgtaacaccagctcttcatcctctgctaaagacaggccggtatccaaaggctctaaagtgtcccacctggccttctttctgttatgacttgttggtcccacgtcttccacttcactgttgctcctcttcttcatcccctgcttcttcttggtatcactttcccatcctcatttagagtactcagaccatctcaattccacttttctgttcttatgagaatttcaatgctggctcactcctttctaatgagttgccactgtatggactccc

SEQ ID NO: 452559 - DNA, 804 bp, Homo Sapiens
tgttcccgttacagtactacatttccagaagtttagtgttagaaaaattctcccctcatccatacctttctgacacccccacccgatccctgctaccccagaactcacatgactcacatttctcattcctacactcttgatgtgagaaagccagtgaggttgcagactactagagggagaacaaaccttgcaggtgggctgctggtacaatccctgctaagtctcttcacctcggttcaaaaccagctcctgatggaatccacaagagtatgtttttcctttttaaagcatatctaaaaaaggcaattcccccctctaaaattattacaaagttaaaagaaatgcaaattagctacgatctattccaagcacagcaccgccagaagattcacacacactatttggtgtttcatgttggttttcctttcattcttttaaggcagtggtttccacaggtcagttctgagataagaagcatggttcatggcagtttgttttgcaactccaatttgttctctgggaatatctcaaatcattccctgaaattagtgcttttttggttgagaactccaacgactgagacagagcctctgggctcttcctggcacaggatggtttatagctggcgctcttttatcaggtcctcatgctcacgtagaagcaacagttcacctctctttttttctcaggcttctactcaaaagtcatcaagtttgtaggaacctgttgtttgttactttggcaggctgcactcaaatgcttaaaccataacattgcattcattctattgccagcttgaaaccc

SEQ ID NO: 452560 - DNA, 1134 bp, Homo Sapiens
tgggaggagaaaggggttttttgggacagctgaaggcagcgtagtttattcaggcttccaatgtaagtgaactctcgattacagtaagggcagatgtgagaggatgactcacaagcatttttcaagtcggccttctgctttgcagatttgtttttctgaagaattgctttctgtactagctgattttttttcttcaatgcatttaatttgagcttattcgacgacattttgctgagctcaacactaaagttaagccttttgggctgtcccattcgtcggaaggcatttttcccagagttatctaaaaccaccacgccatttttgggttgcacagtttgttttaatggtactgggtttttcttaggcgtgtacctcttcttgtcacttgcagaagcacaagccaggatatgtttgtgcaactccggcatattgtcgacaccttttccacactttgtgcagcgaatggcggtagtgaaagtctgtggaatattgtgtgtagtgaaatttgtgggctgtcacaccagatccccatggggttacggtgatggtactgaaatggaggtggtttaaagcttgggtaatgctgattgaggcccaatcgaacatctggatcttttgtctttattccagaagccattatttttatagtcgtgtaaagctcttcagaggaatcatttaactcctcttcttctttagaagtttctaaaggatcttctggcaagctctgcatatgctctacatgggccttgctgggatctgtaaagttctggggcctcagagtcccgctttcaaactcgtgatgtgtgcacaccttatctgggtggagatctcgctggtgctgctgcaaattgcacaaaaaagcaaattcttttttacaaacagagcacacaaagatattcccaactccatgaagcaaaaagcgatgttctgacaagtccgttttatccttaaaaagctgcacacaaaattcacattttgaggggccattcttcagcatggaatagataaaatgtttggttaggtctttaatgggaaggaaaaggtggattcacagacggttgcaaacaaagtttttgttgaatgtttcctgaacaacaacatcctgttcagcagcagactggggctcttccctcc

SEQ ID NO: 452561 - DNA, 849 bp, Homo Sapiens; identical to SEQ ID NO: 150594
  misc_feature (71)..(71): n is a, c, g, or t
  misc_feature (324)..(324): n is a, c, g, or t

SEQ ID NO: 452562 - DNA, 603 bp, Homo Sapiens
tactttcacagggctaggaataggtgttgcaaagatccagctcagttctggctattcacagagttttataatacagtgtaattacatctcagtccaatatacaaaagataaaagcaacaagtaagctcttcacttataactgacaaagtagtgaaagagtttccccagggggcagatttggcagatgagcctttactccatagaaagaattgaaagattagaaaaggcatagaaaaaggaaggtgttctttatgtatcatttacctgttctcttgctatcctttgagtagcctggaaggaatatttcacaatggacgtgctacaaaagcaatcgaaagtgaaaggcactttttcttctaaattgttgcctttaataatttcattaattcttgtcaacaatttttatgggcctgcttattaaaaataaaagatctaagtggaaacgttgattagacaaaggtacctcccctctgagaacacctaacattacaatatgaaaacggtggcttcaagaatctgagttcttttaattacctgtatcagatgagtaaaaagacactccggacataatgaatgctttcttaacacaacagaaccaccccc

SEQ ID NO: 452563 - DNA, 634 bp, Homo Sapiens
gacgtcatcgtcaactgtgaaagcatgggacacttcctaaagtgcggacactggaggttggttttctgaggcttctgcagaaggtcaatttcctgctgcttggcactgagaacagccagggcctggtcatgctccaactgcagctgctgccgccgttcagccgcctctcgcatatgcttcaggacctgttctaggttctccagcttggcttggagctggtgtttctccttcacggccaaatcgcgctctctggtcacgagggtgagcgggtggttgagatgcacatactctgccttcaccttgtcatgctgccgggcccttgtgggaaggcctgcatgatgggatctcaggagatactctccctgggtggcatccttcagttcattttccacaaagtttctctgctgagttcctggtctcaggagaggaagtgggaaatttccccagcggtctcccaaagcttgggtctgatcgaatgtggcctcagcacctgcaggcttcaggtgtggcgggtcatttccaagctttagaagcgagctgtgccaaggctccggaggttcacctcggagacaactgcagtgtaccctcgtgccgagttcaacacccaggcctcgctacctagccgtaaggtgtt

SEQ ID NO: 452564 - DNA, 1240 bp, Homo Sapiens
agcggacagtacactgcagttgtctccgaggtgaacctccggagccttggcacagctcgcttctaaagcttggaaatgacccgccacacctgaagcctgcaggtgctgaggccacattcgatcagacccaagctttgggagaccgctggggaaatttcccacttcctctcctgagaccaggaactcagcagagaaactttgtggaaaatgaactgaaggatgccacccagggagagtatctcctgagatcccatcatgcaggccttcccacaagggcccggcagcatgacaaggtgaaggcagagtatgtgcatctcaaccacccgctcaccctcgtgaccagagagcgcgatttggccgtgaaggagaaacaccagctccaagccaagctggagaacctagaacaggtcctgaagcatatgcgagaggcggctgaacggcggcagcagctgcagttggagcatgaccaggccctggctgttctcagtgccaagcagcaggaaattgaccttctgcagaaggctcaggttgaggctaagaaggagcatgaaggcgcagtgcggctgctagagtccaaggttcgagagctggaagagaaatgccggactcaaagtgagcagttcaacctgctgtcccgggacctggagaagttccggcagcacgctggcaagattgacctgctgggtggcagcgcggtggcccccctggacatctccacggcccccagcaagcctttcccacagttcatgaatggcctagccacctccctcggcaaaggtcaggagagcgctattggaggcagctctgcgatcggtgaatatatccggccccttccgcagcctggtgacaggccggagcctctgtccgccaagcccaccttcctgtcgagatccggtagcgcaagatgcagatctgagtcagacatggagaatgaacggaattccaatacctccaagcagagatactcggggaaggtccacctctgtgttgcccgctataagttacaaccccttcgatggaccgaacgagaaccccgaagctgagctgcccctcacggcgggaaaatacctctacgtctatggagacatggatgaggatgggttctatgacggagagctcctcgatggcccgaggggtcttgttgcctccaaacttcgtggactttgtgcccgacaacgagtcgcgttggaagccagctgggaacgaagcggatcgaattttcaacattccggtcggctgg

SEQ ID NO: 452565 - DNA, 842 bp, Homo Sapiens
  misc_feature (691)..(699): n is a, c, g, or t
gggtgtcccttcctgttttaattcctaaagatcctgacttttatctgaggaagtctaggtagttttccttttggatctggccattggtgcgtgtttcattcagatcacctctggaatctctgtggttgtgaaggcaattccttatgagactcttgcctcctgtggcttacgtgatgaattgttaatatggcagtaattaattagtatctacttaaatttagtggtcagaaatgtatttgaagtgccttaaagatgatcatggttcagaatatcttcagagaaagcaaaatctttaatattgcagggagcctagcaatacaagtacacatttctgtggcttgatttcttgaatatgctgagacccaatttggactacatttggcagaaaatgttggaaccaaaccccagggatttaattttaatttaacagttacccgggaagttggaacctgaggacaattctacccctgtcgtccaagtgagctctcccctttgcccgttatctaacttccagtgcttattatacaccttgcatcctccttatgcttctctccttgctcttttgtccccccatcctcttcgtccctcctttcccctcagaattctccgatcttcgcccccttttttcccctctatttgccccggcggaccgttcccttgtggccccccttaccatatcctttccgtcatnnnnnnnnnttcatcctattccccataccgttgttcccattcctctcccgtgtatcttgaccactggttgtctaccacgtcggattcgaatgtctccccttaaatttccgctaaataccgctactatactcctccccttcaacctatggtct

SEQ ID NO: 452566 - DNA, 1268 bp, Homo Sapiens
  misc_feature (93)..(281): n is a, c, g, or t
  misc_feature (589)..(589): n is a, c, g, or t
tatcatagtattatatatatttggacgatctacttgtgccagatgaggcagggcggactggctcatgcactccacttcctgtcaagcgatctnnnnnnnnnnnnnnnnnnnnnnnnnnnnnnnnnnnnnnnnnnnnnnnnnnnnnnnnnnnnnnnnnnnnnnnnnnnnnnnnnnnnnnnnnnnnnnnnnnnnnnnnnnnnnnnnnnnnnnnnnnnnnnnnnnnnnnnnnnnnnnnnnnnnnnnnnnnnnnnnnnnnnnnnnnnnnnnnnnnnnnnnnnnnnccctattctaataatttttaactagatgatccatttgacaatatttttagatgatctattttaagaatgtacatttattcatttttccttcaggaaacttttgccagaaactcacagagtttttcaaaaaggatgaggttacggttaccactttcacctctttttacagtttaaactttggaacttgtccctttgagtctgagataattatgattgaccttgacttgttaactctgcgtacttttttggaggacattccctatataaacttactgtaaacaaagaaatgaccagatttctcccctcanccaaatttacagattttaaaaacatttctgatgggatctcccagactatttcacttacaacactggttttccaccatccctttctagctcaagttctttttcctttcttacaacaggaaacaatgcaattgttctagttgccatttcctgcttcatgttgatctgcatgccagtgtgtctatagtggtgcttggctctttctgcctaataattccttttaatttatattggcactctatcatgactttgaactttaaagccaagcagataatattctgaatcactaattttccatgaagtcatgtgagaaacactttaagtgaaccgttccggatcagggtgacacgctgctttgctacctttccaactggcaccatgttgccgcctttgggacattctttagggccagtgctcctggactattttgcagttaattcttttatttttcctttccttataaaagaaccacatgcctccaatggtgctccaaacttcagaacaaaagtatttcagttgatagcaatcttacagtcaagcagcacataatattacaaaggattttaataatcttgagtaacagtctgttcacagggatgactatctcctagtgaaatcactttaagaaagcagtgagtcactggtgggtgttataataaacagccacactaacaggcagtcc

SEQ ID NO: 452567 - DNA, 898 bp, Homo Sapiens; identical to SEQ ID NO: 324341
  misc_feature (162)..(328): n is a, c, g, or t
  misc_feature (473)..(488): n is a, c, g, or t
  misc_feature (530)..(538): n is a, c, g, or t

SEQ ID NO: 452568 - DNA, 926 bp, Homo Sapiens
  misc_feature (803)..(803): n is a, c, g, or t
  misc_feature (805)..(805): n is a, c, g, or t
cttcagcgttttcccctggagggcgcctccatccttggaggcctagtgccgtcggagagagagcgggagccgcggacagagacgcgtgcgcaattcggagccgactctggaattgaaagaagaagatgtcacgaagaccatgtaccctgcaccagttaccagcagtgtctacctgtccagggatcctgacgggaatagactagaccttgtctgcgatgctatgagagcagtcatggagagcataaatcctcataaatactgcctatccatacttacatctcatgtaaagaagacaaccccagaactggaaattgtactgcaaaaagtacacgagcttcaaggaaatgctccctctgatcctgatgctgtgagtgctgaagaggccttgcactatttgctgcatctggtagaatgttaatgaattatatgatcatttctcttggcacctatgactttgatttggtcctcatggtagctgagaagtcacagaaggatccccaagaatatcttcccttttttattaccccttaagaaaatggaaacttattattcgcggtttactatagacaaatacttgaaacgatatgaaaaagccattggccacctcagcaaatgtggacctgagtacttcccagaatgcttaaacttgataaaagataaaaacttgtataacgaagctctgaagttatattcaccaagctcacaacagtaccaggatatcagcattgcttatggggagcacctgatgcaggagcacatgtatgagccagcggggctcatgtttgcccgttgcggtgcccacnanaaagctctctcagccttttctgacatgtggcaactggaagccagcccctctgtgttggcagcccagcctaaacttttaccaaagaccagcctggtggggcttcggcagaaactctggccag

SEQ ID NO: 452569 - DNA, 635 bp, Homo Sapiens
  misc_feature (578)..(578): n is a, c, g, or t
  misc_feature (603)..(603): n is a, c, g, or t
aggtggatcttagaggtccctccctatgagacatcacatcgagccctggtatagctcagatacggaagtggttggaccaaccttatgtataaatgaggcatttgaatgcatgagaaagctgagaatcaatctcaatctgatttatgatcataaccctaaggtgtttcttggaaatgtggaaaccttcattaaacagatagattctgtgaatcatattaacttgttttttacagaattgaaagaagaagatgtcacgaagaccatgtaccctgcaccagttaccagcagtgtctacctgtccagggatcctgacgggaataaaatagaccttgtctgcgatgctatgagagcagtcatggagagcataaatcctcataaatactgcctatccatacttacatctcatgtaaagaagacaaccccagaactggaaattgtactgcaaaaagtacacgagcttcaaggaaatgctccctctgatcctgatgctgtgagtgctgaagaggccttgaaatatttgctgcatctggtaggtgttaatgaattatatgatccattctcttgggcacctatggacnttggatttggtcctcctgggtaggntgaggaagtcacagaagggttcccaaaggatt

SEQ ID NO: 452570 - DNA, 393 bp, Homo Sapiens
ggttggtttttaaagaatcaccctccattgttgaaagtaaatgtactccttagggtgcgaatattagtgttccaataagcatgtgattatattaaggtggtggtagcggggaagataattctgattccattgggaaatcttaggttttcgtaaatttattgggaaaatagtttttcctgtactgctgaagtttctttttggtaaacagtatctttctaaaagaaaaaagcatgaaggagaaattgaggtgtgtatacatttcctcaaatgaccagcattgtattcgtgaatactgtgtatcttgcagtgaacagtgtggaagctgttcatttttcaatctgaagtaaaatactttccacgcaacccccggccaacttaacctaaatcttgtcc

SEQ ID NO: 452571 - DNA, 814 bp, Homo Sapiens
ttttcccttgggggaaccggagcttccatcggtacttggttctttcaaaattaataccttttaccactgtctttcctgagtcatccaccacgatgttctcttagtatggcaaggatcagaataatatttaaaattccccgggaaggcgctaagtaaaactggtgttgtatacatgtttatctgcagtttaatcacattcccatgtcacacctttttctccaaggaatgtaaaacaagtctgaaaaactggacctagaataaaacctaatgcttgacacatgcttatgtttgccatggaacttgttctttcctgaagggaagtagcaccagcagtatatgatctaacaactgctacatttcctgctccaattcccaacaatccacgagcaaccagcatgtagtatttattatgagaagctgggatgtggagatatgcatagaggcagttggctgccacggaaatcaagatggagacaataagaggctcttttcttggtctataattagaccataaaccaaatataggtgaagctaccatttggccaagactatatgaagcaataacccagcccaaaaaacttgtatcagctgtcggatcaatcttttggagatatggccatatggacatcatcactacagaaaaccctacactgctgagaaacatagtaagatataaaatcctaatagatctccatcggctcttataatgctcttcagtctctaaaatgtcccattctctgcttccaggtgtgtcgcctaagagcggctcctgttcactttcgttccgcaggccggccatagttacactcccgct

SEQ ID NO: 452572 - DNA, 1291 bp, Homo Sapiens
  misc_feature (22)..(22): n is a, c, g, or t
  misc_feature (45)..(45): n is a, c, g, or t
  misc_feature (66)..(66): n is a, c, g, or t
  misc_feature (85)..(85): n is a, c, g, or t
  misc_feature (1086)..(1102): n is a, c, g, or t
cggccggacccccctgtccggnccccccggatggatccaccacgnaccgtttgtatttttaaccanttaatgtgcccgccttccnggcctgaggttccacagggcaagagtaaaatccacagccctctcaactaaacagaactaaaattaagagaggtgtgaaaaatggcagggaacaaacactccattttcagaatatgtgttttctggaatttattctcctttatgctgaatataaaatatgtgatttcaccaatgctttaagagacaaacacatacaagttgaaatctgaaaacaataattatatggagcaaagtgcagcctgacacttaacaaaagctgttaaatgaaaagtatctctagaaaaagcaaaacccctatagtaaaatcaaacacaacagaaagaagctttggtacttttcaataacgggagacaaaaaaaagtttagtttattattaaattcatgtaatataaaaacatctatgtggaggtattgaattaaatctataaaacagaaacaaatctagaatatattagaatctgaggtgaaaaaataccttgctttcctcttctttgattgtaataaaacaccggaatttggaaaaacaagtattttcccaactaaattttcttctggtctgtactcacctagcaggatggcactccatattttatctaattttaaaatggcataagttgatttttagcagcacatttcctttgctccagcaagcctattacaggaaataaaaattctgtcttgaaatgcccttgatatgaaatctatgcctacaattcccatccacttctttcctagtattttaagactgtgattatcaaaatctaaaggcagctagttaaagaagggaacaagaaaatcattattatatgtttcaaaatcagctgataacagaatacaagtaaggaccccatattctctgagctaagtgtggtcccagagggcaacatcttggtactctgtggagcctgggtaccatgtaaatgccacacactgtgctgctgccccactcataacaagtacagcaccactcgagactggtctcctgtatttctttgctgatcnnnnnnnnnnnnnnnnntggggtggggagatggcacataactgtgatggtaatttagcattactacccactagtctgtttactataatcataataggtatactacggttaactcaaaaattataatataagacaaatctgggtagctttgtctagcaagtatggtattgatcctataaccccagcagttaacttgcaaagcctccc

SEQ ID NO: 452573 - DNA, 614 bp, Homo Sapiens
tttttaacttaacaaggatttattcacaggaatacatgtaagtagagaaaaataacagaaaagctaaacaaatgaaatgaagaggatccaaaccaactttcactctgtagcttttaacttgcaccctgtgtgcatatatctagggcacagagggcaccaacatgcgccaaaatacagtgtaggaaccctgcattacatccattaacttaaacatatctttaagatcatgctttggaccaaaaaagggaagcttagaaggcagtattttgagtgggaataaaccattgaaatatagcaatcatttttcaacttctaccattgtctttatgtgccaactaacatttatgcagccttttacagatcttttaccacgtaatttaaattttagaagttttgataaaatcactagtagtatataaccatgcagaaagcacatcacactgacagcacagaggctaagattttgcacaggtatatcagctttccacattgtgcaggttacacacaatacaatatcaatcttattcctaacagatcctaaataaagatatttcaaggcctacctgtaaactacagtatctttatatatctatgttcttaactaaaaataatat

SEQ ID NO: 452574 - DNA, 1319 bp, Homo Sapiens
  misc_feature (1287)..(1287): n is a, c, g, or t
gccgggaaatccaaaacccggattcctcctttggtttgatgggccgttccaggttggcttcttggaagcattcatgggctaggtgtggtgcgcgtcgggcctgccccgctggggcgatagcagggtcaactgagctgagggagagtgtccctgtcatcttccccatcagacacgtcagcatcactctcgaatgcttgtgctacatttgccaagacactagcttgctgggcacgttcccaatcctgctcattaagagtttgtaccttggaaggctcatctcgcagggctgccagccggcctttctgtgggcgccgcagcactgcactggtgctgtaggagtctgtgtggccgtctgccatggggaacctgaaatctgggacactgcccaagtggggtcggccatgatgaagtgaagcacctcttagtctcatgtggtctagttcagccctcagtgcttcaatgtttaggacaagctgatccttatcgtgttgtgtttcttctaactgcttttttgcactttcaacttctcttaaaagagagttcttatcttccaaagcagccattctctctttaagatgaagttgaagcctctcattagattctgaaagcagcttgtcaacagtgtctgataaacgtttattatgttcttcgttcattttttctctttgccttgcccgctgcagttcttgattcttctcctccaactgtgcttccatctgtcgtaacctttcttcaatgttgccgtgtctctcttcagccttggaaagcgctgccaccctctgggccagctccgcctccacctccgggagcgtctctgccttcctcagtgtctgttgcagcttttgctctgccaattccaagcgctcctgtaactggcggtttttatcttcagtctgtcgatgcatagaatctttatttgcaatttcattttcaagtttatcattgaggtcatgcacagatgtggcttcacgctgtgcagcgaggtagcgtttttcaagagtagtgattctctcttccatatcttccttttgggccatggcttcacggacatctcgttgcaattttgtgttcatttcttcagatttgatgagatcttttctagccgggtccagatcctcttccagttctgtcacatgactggaaagggaagccaggcgttctttcatttggctctgttcccttgactgcttacttatgatttcttggagctcaaaaactctagcaaggtcttcctcgtggctaaaagaacccatcaaagatctctgtccactcgtgcttggtgtattntcatagtcatggttgatgtccagcactccatc

SEQ ID NO: 452575 - DNA, 956 bp, Homo Sapiens
  misc_feature (105)..(105): n is a, c, g, or t
  misc_feature (351)..(351): n is a, c, g, or t
  misc_feature (590)..(599): n is a, c, g, or t
ggctactttagagtttccaggccacctttttccactgtcctgataccccttcaggcctcttatttgaaaaagggtctagtcccaatccctggtcaaaaaattaancaccctgattattaaagtgcagcccactgaaccacctaatactgctgcaaaaatcttcatgtactttatccataagaccacaaaaatgttcacaaaaaaactagatttcttcagtttcagcggggaacagacaattatctgtcattaaattcatctacaaatagaaaaaataatgcactgtatgtacattattaagcaaagtggaatatttattgggtcattttatcatgcagaaagtgaatttcntaaggtcttagctcaatgtatattcaatctagcaaaggctaaatgtaggaaaatagcaagggcaatttatttctatataacagagcatatactcccaatttgttgctacttcaaagagcacttttagactcatctaacttttacaggctctttcaagtgaagttcatggagactagttattaatccatataagacaaaagaagaaagaagaaatataaccaaagcaaagcattctgttnnnnnnnnnngtaataaaagctaaccacagaatatgtcagttttggtttgcagacaacccctgagattatataaaccaaagcgttaagacaccaaatagtcagaggtaaattactaagagaattacattcatacatggtgtcatagcacttatcttttagaaggtactttgttaccatccagaaagcgttaactgcttggattttttcaggaaatagtgaatattaagatgtttctaaaaaattatcttttccttttgaaaatgtatctagtttgaagatagtagaattacaataaactttcaatcacggaactactaattatactagaacagcaacgaatgacttttgagcctataggtaattacc

SEQ ID NO: 452576 - DNA, 1027 bp, Homo Sapiens
  misc_feature (498)..(534): n is a, c, g, or t
  misc_feature (697)..(715): n is a, c, g, or t
  misc_feature (757)..(817): n is a, c, g, or t
tttgttgtattagaaaccaaccagatgtgccacgcggagggggtaggtttattccgcgcccggttttttgtgtgattataagtagcggtggggcggcagaagtgatgggggagcaaaatattttttgtgtgccgcccccgcggttgtgtcgttcccacgggggtgggagaaaatagttatattttgcgcaacaggagcgagccagaaaggtgtgtgtgatgttgcaccattggggaggaggtttcgagggttgttatacaaatccccgcgttttgtgtgagagggatatgcgcccaattgcgggcggaagaaaaagtcttaataggggggtgtaatagaacacgatgttttaaaaaaagaggggggcacgacggcggggggggctataatttgggaagtatagaggagtccccactgggggggccgcgcccttgtgtgtggagagacccccggtgaatggcctccgcaagaactccccatttgggaaaatgtgtttannnnnnnnnnnnnnnnnnnnnnnnnnnnnnnnnnnnnaatttgttaaaatatccccaaccccttggtttatgtgcccagggttttttctttgggaaaccagtattgagcccaaggttccaatacactgtggggcgccccgccccccaaaaggaaggttttaggaaaattttttggggggggcgggggggccccacaaggnnnnnnnnnnnnnnnnnnnaaaattggaaggattgtgtggttttatgtgtgttaggtgtgnnnnnnnnnnnnnnnnnnnnnnnnnnnnnnnnnnnnnnnnnnnnnnnnnnnnnnnnnnnnnaagtatcagtttttattaaaaagtgcattttgattaatttatgatctaggtaagctgtaagataccagtatactctctggaataataactttacaaagatttaaaacaaacaaaattttaaaagcctttttatttccttcaccattattgttttacaatacaaatatcaccttgtgaatacacaaaaaaatcctacggaagataattccc

SEQ ID NO: 452577 - DNA, 156 bp, Homo Sapiens; identical to SEQ ID NO: 149741

SEQ ID NO: 452578 - DNA, 785 bp, Homo Sapiens
  misc_feature (35)..(36): n is a, c, g, or t
ttcttttgactgccagccactggtaaccggtaatnnggatattatactgtggaggaccccatatatttgagggtgcagattgtgggcccacttgtggggccctcttattatatttgggctcttcgggattatgatttgaatcaaacttgaaaaattgcctttgttcctgatattaaatcagaagatgaggaagaaccagtaaataccctgcaatggttgatcatacaacagtgtggcagacttgctcctgactatattttttccatcaacagccagatgtgattttaacggttgtacttggctgctgaggtccattatcactaagaatatcatagatttttagccctccaatctccatattagttatgctatgagatttcacaacagatccaactggaccacttttctgaggggagagatcttcagtgcttttggaaatacctaagtcaacagaacaatcactgtcatgtggttcagtcctattaggagactgggaagtttcctcagaatgtccatttaccttatttacggattccaaattaggatacttgtttccattttccaagtgctcagtttcctctttagaattaatgcttaaaaagcttgttccaagcacaatatcctgtgtttttgatctttccatgatctctggttgaaatgtatcattagttataagtttattaagattcatattgatatgatctaatttgtgagtgtcatcagctgtggctgttgagtcaacacttttctcaattagaactaatcgctcttcaacattcaaatcc

SEQ ID NO: 452579 - DNA, 690 bp, Homo Sapiens
ggctcttctgaactggaaataataaaagtgctgttcaccgtgaatttaaaaaaaatacacagtataaacacacaaccttggaaacattttttgaggcacaaaatccctgacacaccagaggtacatggaaagacatttaacataaagagatcctttatatcatgtcacatcacaacttttaagatttttcttggtaatactcatgcaatatgcataaccaatatggttgtgatttctagcaaaatcagatgagattgcaagcaaggaaaaacataggtaatcccggtaggaagaaaagctatttaagtccttccttcttttcctttaaagcctaagaaagctgtgacttcttccacacaaaaggctgaggtctaaagctcaaaactagtataacagtttactgtattagttggctgtcaattattgacagttccttcatttcacacaagggttaacctttgtttagtgatgtaaatttagtgagtttttttcatgcaaataaaaaatgtctataaaagtccaataaaggtataaccgattacatgcaaaactgcaacacatctaatttttaaacaatttgcacacattaatttatatcacatatatacaaaatatgtttaaacggaaataaaagcattctcttgaattaaattatagattttagtataaaaattttctcttcggagggag

SEQ ID NO: 452580 - DNA, 2033 bp, Homo Sapiens
  misc_feature (89)..(89): n is a, c, g, or t
  misc_feature (1407)..(1443): n is a, c, g, or t
agcagtcttactgtgcacagccctcagagcctttgcactcgacaacagagcgcagagagtgacgctgtcactgtgcagtctcagtctgnaaggtaaaaagcttatactgctctcagcacagtcttatgtaatattacatacagtagtgataagagaatttccaagtccatattctactaggcttcattcttcatctgtgcaaaccttgacaaacgaatggtcgaggagctggctggcggtccatctcatctttgggtcactctcaaggcagtgagaaaggaagtcctttccttcagggcttaatctttcagggattggtggcttatgtcccatccccactttatacataatttgaaagttgtgctcatactcatgccaaggcctcttgccagtcaccatctctatgacaacacaccccagactccagatgtcggccgcacgcccatggccctctcctttggcacgagtgatgacttcaggtgccatgtatgctgctgtccccagggtgctgttcacttcaccaggcatggtctgggcattgtttttgagctttactgaacatccaaaatctcccagtttgattaatccagatgaggtaaggaagatattggcacctttaatgtcacggtggactatgccatgctcatggaggacgttgatcgcaatggtgatctgctttgaatacagcctaatcacatgttcctgaagtcccagccttgacacctcttctaaagtcccctcatcgcagtactccatgaagatgtacatttcttctctatggagctccacaccaaaataccgaaccagattggggtgtttgatgccttcgaatattttcaattcgtctgcagtttccttgatagtcttatggtcattaggttgaaatcgaatctctttcatggccatcagctccccggtgtcgacgctgatgcaggtgtacaccttcccatactggccttctccaattttgtttcctctttgccatttgaaggtcaccttcctcaagccaacgtgcataacattatcataggacttaggcgtatcacaaacttgaccaatgatattctttctcctcattactcggtacctcttttcttcaaacaatcggactgacttctggatagcttctatgggtcctagtttagaagcagtatctttactctggctgattagtgtccgaagttcccaacttcttcttgtggacccacttgaatctcctcttggatatgctggttcatctcgctcttccgtggggtttgagtgacgactcagggacctaaactgcatttcagcagttatggaagccaatcgatcattttcaggaacgctggaacccctggtatcatgggcactgctgatggatttgggcagcacagagtcaccaccagagggggctgggccgactgnnnnnnnnnnnnnnnnnnnnnnnnnnnnnnnnnnnnnggctgccatggctccgcgcgtcggaaggcatgctccgagtgctgaatccctctggagtggggataatgaggtgtgggttaggagggtcactatggcatcgaggtaccttcataggacgggggctgttccgatgaatggctgtaacaggactgtgtggttttcctatgacatggccaatgcattcattcatcaaggcttgtaaactcaagaagtcatcttctggtaaagctgaaataaaggcaggttcaattgcttgtagaaaatcaaatccttgagtcgcccacctgggtcttgtacctctaccactctcacatttagtcaggacataattcatccacttccgggcaaagcttatatatttgtctcctatcttctgtctaaactccccagacatcaaacgaacaacttctttatgatactcaaatccaaaattgtacccctgaatcattgcttctcggtagtactgttgcaaggtgacagattcagattcatcaacctcagcatcaaattctgatgtgaacatgtggtccacgcggtcaatggcattgcttatcctgttgcatagctccaatgcatcattcttcagctcc

SEQ ID NO: 452581 - DNA, 666 bp, Homo Sapiens
taccatgcatgtaggtcagtaggtagagacaagcatctatctgatagaagcacatggagtgcaataggacattgtgagaaggaatttttcagggtattcatctactagtttaaaaaccccactctggccctcttgtcctttcagaaaacatgcaaataccaaggtccatacaaaacaataatttattccactgatcaaccaagactggttctggttggacagctaatctgatttggggattcactgtttcagaggacacagacaaaagctgttgcatcaaaactggactttaggagtaatttctattgaactcctgtcaatatgtttatttcctctgtctacagcagatgggagtcttctcttttagacaggggctttttgtttttaaccccaattgtaataaagggtgttctttttcctctttagagtttacaaaactataaatatttgtgtctccacataccatcttcatcttcacacattcactgtgctttcctccccatagtgggagctgtcatcaccaacagggtttactctcccctggagaggttatttaaatagctgtccataagccatccagatcaacaccctttcttccatacagaaaagggctaaccataccacagctggaatctctgaatatttcctattaaaaattttttctac

SEQ ID NO: 452582 - DNA, 822 bp, Homo Sapiens; identical to SEQ ID NO: 63441

SEQ ID NO: 452583 - DNA, 694 bp, Homo Sapiens
agagggggggcaatagggccggggtggattaccggccaagggaaagtggggggtttcccaccgacaggttgtttgctgttcctgggcgacggaaagttcttggcccggttaatccgggagaaccaaaatgggtggtttctgcaggtaatgggagcaaactttgtcatgttggtaaaaaaccaatcttcccggagtccatcattttccggggcatgatcccacccagaccgaatagctctcttccagtccttcagagtggacttgccagccagatgaacaaagtgcttggggctgatcaactgatcattgaacttgacacacttcacgtttattcctggacatacaaacttcttccagaggaggatggctttgctctccccacaagttatggggtaagcaatttccatatcctcatttgcttctatagtgcctgtatcaatcccttcttcaattttgtgtatcgtgtgagtttctactgctacaactgccgtgttgttctccgacccagcttcataaatcccttgttgcacaggctgtaactgcaaaatcacttgggttttagtgtcttcaggattctccccttcatttccttcagtaggtaccacagccacatcccccactgggacactcacttctgcattagccatctttcacatgaagtcagatagctgggactgcgtctccgtcgggcccc

SEQ ID NO: 452584 - DNA, 308 bp, Homo Sapiens
gggggcaattatgctcatattgttttatttattacatgtggggtaatgttaggcaaatagctataatacagagattgtacaatttaaaaactgtaataaatatggtccattaatagcagactccaaaattcttgtccttcttgaaaaaaaggttcagtgatttacgataatccactaagaaacatcttcagaatttcacagggagcagtgtctggaggcacagatttcccgcagagctttgaatattcagttatcaagactgaagctttatctaaacttaagtcattgcctaaatgaaggtaccgacc

SEQ ID NO: 452585 - DNA, 832 bp, Homo Sapiens
  misc_feature (792)..(800): n is a, c, g, or t
  misc_feature (832)..(832): n is a, c, g, or t
tagagatgccctttccgccatcgcggttttgcttggagtaaagaatcccgccgcgttgggtatcagagtatagtggggaacggagtgttataataaaaagccgtcggtgagtattggggccttgggttaggatatttgagaaagttttctgtggggcattgctataggttccataaaggaggattgtgggtgttgggtgggtgtttccctgggaaggggtgtgttggttccgggcctgggggatgttgaaaggtaaaattcgcggcgcgtgaatagaaatgttcggcatggggtgcctcctttttctttttccatttatttgggggggagttcctagagaggagttagtggttgaagtcttttctttagagggtttggcattagtttgccccagtaaaagttcatttaatgcctggactttctttgattgggagagtttttgatgtgtgggttcaaatctctttacttgttccaggttgtgtttggatttttttatttccttttgaggccagttttgtcaattggtgtgttttttcatcgaggtcatctaaattgttggcaacaatgcttctatgaataaatttgtttatagttaagttgcctaaaataccatgcaattcatctaatacgtataaaacttgaaatatattatattgcatctacttttctaaatcaaaacatgtaaaattccataagagatttaaacaaaagtcttccctaaatactaaggaaccaaaattttctgattgggtgttactggtaaattttattactatagagcataaaccctcnnnnnnnnnattaaaataattcctcacataaaatgaaatcn

SEQ ID NO: 452586 - DNA, 873 bp, Homo Sapiens
acccggccaggggggtttttatgtgggagcgaatgctcacggcccgttgattcagtggcacaggtttgtcccctgggcacaccatctttggaccccacgttctccttacccctatggggccccggcccccccaaagaaatggttttagaaaagtctttctcgaagggccagggggggcccaccagggttactatcattcaggtagcgggaaatcaaaacggggtcttcccgggagggttttgagaaggttccaaaaaagcgggggagggaaaggatcctccaagcggagaaccggttttcagggatgggggatttcaaaaggtttaagagctgagttccagaatctggggactgagcagtgggtgggaaaaggcccagggctaatatttgaaaccacgggagcaggaattgcgaggctgactcaagtcataaggcacctgacggttaacagggtggggtccttaaatccggaaccggatctgtggtaccggttgggttacctcgggagtcttaggtggagagttagtaggagttaactcattctttggggctggatgtggaaactcatgagtgagtttgggatatgaaggctcagatctagagtgaggtgccttaaggatgcgacttagggacccagggctaaagattcggataacttaggttcagtaccccctcacatcccaggcccgagttcggaacctttgagctgacctttgagtcagaggtcaagaggtcaaaaagacacctgggcagggaaaatggcctagttgtggagaaggtcctggaaccagagcaacaaaaaacgtctgtgggttggagaagactcagagatcagaggccggtgggcgccgcgataaccactggaaaaagccc

SEQ ID NO: 452587 - DNA, 941 bp, Homo Sapiens; identical to SEQ ID NO: 324390
  misc_feature (62)..(62): n is a, c, g, or t
  misc_feature (102)..(102): n is a, c, g, or t

SEQ ID NO: 452588 - DNA, 931 bp, Homo Sapiens
  misc_feature (27)..(27): n is a, c, g, or t
aaattaaagttaagagcaaccccgganttggtttgctttgccagttttccaataatcctcagtgtattgccaggatcccaggctttccacctttccctttagatcaaaagcgcaattgcccggtctgctgttgatgctgttttacaatatgggtttaagccttcaatggtgttcagttcaggtgtgagtcagctcctggtggtgtcagaagtttacatgattgcggatatcattgatttgcttcaccatttcccttatatgttcaccctcctctttcaggatggactgaatgcactttcgctggtaggcactgagaataatggtgggttttggaagactcaacaccttctccatcttttgctgttgataatcctttttcatagtaacctgtttgatggcattgcccaaatgtcgaagttgatcaggtatcagctgtaattctttcttcatgtctcgctcactatcagagagaactgggagctcagagtgaaaactgtgaagtagtttttttcatcctgttcatgatatcctcttgtttttctttagcttcctcatatttgtcagctaaacgctcagccatttcccgcagacttttcctctcttctcgacaataactgagatcttctagttgtttctttttttggtcacataataatttgaccctccgctgaatctcctcctttgccaagtcctgtttgagaatgtactgctctctgaacacctgggtggctctgctgaggagctgaaggcattcttcaggaggaggggctatgtccttttcagaagctttcaaaaatgctggattggcaacactacgttgcaaaatgcttctaatatgcttttcaaaggaatctggggtttcagccagaacacggaggggagactctgccacttcaacatcttctcgagtacaaagcaggggaggagaccc

SEQ ID NO: 452589 - DNA, 1454 bp, Homo Sapiens
  misc_feature (1064)..(1072): n is a, c, g, or t
  misc_feature (1364)..(1364): n is a, c, g, or t
ggaagcagtggtatcaacccagagtcgccattacggccgggctcgctctcggaaattaatactggctcaaaaactaagtgaactggctgtagagaaggcagccgaattgacagcaacccaggtggaagaggaagaagaagaagaagatttcagaaaaaagctgaatgctggttacagcaatactgctacagagtggagccaaccaaggttcagaaatcaagttgaagaagatgctgaggacagtggagaagctgatgatgaagaaaaaccagaaatacataagcctggacagaactcgttttccaaaagtacaaattcctctgatgtttcagctaagtcaggtgcagttacctttagcagccaaggacgagtaaatccctttaaggtatcagccagttccaaagaaccagccatgtcaatgaattcagcacgttcaactaatattttagacaatatgggcaaatcatccaagaagtccactgcacttagtcgaactacaaataatgaaaagtctcccattataaagcctctgattccaaagccgaagcctaagcaggcatctgcagcatcctatttccagaaaagaaattctcaaactaataaaactgaggaagtgaaagaagaaaatcttaaaaatgtattatctgaaaccccagctatatgtcctcctcaaaacactgaaaaaccaaaaggccaaagaccgggttccagatgtggttagaagaaaatagaagtaatattttgtctgacaatcctgacttttcagatgaagcagacataataaaagaaggaatgattcgatttagagtattgtcaactgaagaaagaaaggtgtgggctaacaaagccaaaggagaaacggcaagtgaaggaactgaagcaaagaagcgaaaacgtgtggttgatgaaagtgatgaaacagaaaaccaggaagaaaaagcaaaagagaacctgaatttgtctaaaaagcagaaacctttagatttttctacaaatcagaaactatcagcttttgcatttaagcaggagtaaaggaagaaagtgaccctagggaagtaatggannnnnnnnnactcatctttgaatatagactcgagtctttgggaaactcattatatatatatttttttaaagagtttgaagcaactgtttgtctttataagataatgtagtaattatattggtgtaggtaacaggacatatggtaaaactatcatctttgcagattactctgccctccaatgcagggcctttcaaagatgccatgggaattgtaattacggaattgaagctccaacccaatttgaatttggtttcttaaccttgaaaaaatcctttaaagcccagggtattaaaaacctttncgaagaagcacgccacataacccgcccccgccacaacgagggtgaaacacatgaccgcaaaccaacgcgaaatacacactggtccgggcg

SEQ ID NO: 452590 - DNA, 929 bp, Homo Sapiens
  misc_feature (394)..(394): n is a, c, g, or t
gcccctgtttgtttccttgcctgccaagaagggggcagaggaaatgtgatgtttccccggaaactgggtccctaggccccatagggtccagatttgctcagccctagttccaggcagggagactacctttggtgccagtatcctgggctgtctctttccctttcactcttggcagctccccaattgtcaaagattgggacagggtcctggtttggctagttctaacttgctgaagccagtcagcaccctcacagagccagctaggtactgggcccaggggcttccagagagttcttcagagcttctcagaggcctaaggacctcctaaccctagcaggcctcctggctcaagcacaacttgggaaggctccatcagcatctatgtggccctgtnttacctgttgtctctggagggtgtgcagaggcaagtccagggtaggggcaggcaggatcccttaggcttgcccacagcccagatagcaaaactgcagccagatcagtgtctatgagtttcaggctgaaccttagaccacataggccagcctgctggtctggctgcccaaccagaccaggtagacagagtctaggcctcagggctctcaagcacctaagagcgcagctgcatttggaagtgctcacagcaggcatgcttcatggttagcccatagatgggggtcatgtccaccttcacgcccagtggcacgctgaattcccaccggttgcagcaggatagcccaggaagagaaagacctcccagcgggcaatggtctcaccgatacacttccgcttgcccatgccaaagataatcaccttctcacttaacaccttgtcgatagcaccatcaggggtgagaaaccgttcaggtaggaactcagatgggttgacccatagcttctggtcatggttgatctgccactggtttacaaaga

SEQ ID NO: 452591 - DNA, 1035 bp, Homo Sapiens; identical to SEQ ID NO: 324401
  misc_feature (50)..(50): n is a, c, g, or t
  misc_feature (95)..(95): n is a, c, g, or t
  misc_feature (314)..(314): n is a, c, g, or t
  misc_feature (1017)..(1017): n is a, c, g, or t

SEQ ID NO: 452592 - DNA, 573 bp, Homo Sapiens
ttttttttaacattgctaaagcctttatttagcatcaggtagattatttcattataacacttgttaacttcaagacagcaattaaaatcacggactggcagctacctaggcccctgggagcagtatctcagtctggggtttgggtggataaatactataagatttaagatgaatgtgccccaattaaaggggcaaaactactgtacagtaggtctccacacatattttaagtacacaggtactttgcaaacttgaaatgcacaaggcctccttttatatagtttgatacttacatgagtgcaacttactttccctagtggcatttgccctggaagtggaagcatttaacaaggtttgtcattatgtaatggtgattaaaatctatatttctagggcatttttgtgaattgctagattttatacatattttcagttcaaatgtaaacttaaccattttaatgatactgactgcagaaaactgtaaaagtaaattcagagcactaagtaaatgaaatacttttccagtttaattctttagaattttcccccgcgtacctgcccgggcggccgctc

SEQ ID NO: 452593 - DNA, 810 bp, Homo Sapiens
gggaaaagttcttctaaggttaaattttgtatttaaaagttagttggccatttgatcagggaattttctacacacattaggcaaatgtatgcttttcatcctctgggcttacctctctcctctgcaatcctggaagcattgtgcatagttctttcattgtaagccgctatttaaattcccacaatgcaaaactgttagaccagtaattgtgctactgaaattgtcacaaaacgttattccttgatttggtttttaaattttgcttttgtgtgtgtgtctttaaacaggtaatgtgtatttaagtgttgtctaaacagttgatttttactttagaaaagatcatcttcaactgtttattgacttctgagttatatagttcatgccctgccaaggcattgttcgactccatgatactaaaacataatgaaagaaacaaactccagtatggagaagagaaagtttaattatttggttccatctagaaaagcaacaacttaaaggaatccttcactaggattgtcttatcacctttattagataaatcatgaagtgtccctgtgaaattgaagtgaaactatctctgtaggacttaagagaatagctaaaaggtgtgacttgcccttattgaactgatactgggcatatctgactgtaaggcagtaggttgaaggatatcattttatggaatgtgggagaattctacattggaaacaggaaaatacctgggggaatgaagattaaaaatggtacctgcctgttattttgccttgggttattcccccctctctgcctccttccttttaatttggg

SEQ ID NO: 452594 - DNA, 382 bp, Homo Sapiens
aatttcaaagatacatgaaaatcgttttatttatttaacaaacacaaacaattgaacaaacaatggaagcaagtccttttgcctaaaggaacacagagggtcatgcggatgttgctcctccaaggatttcggtgttccccaacggctagttttgggtctagttcttctggaagatcttattcttggggagctacaggttctggcgtttggggctctttcaggttctatctccattttcccctcaattcctccccattctgcgctccaatctctccggtcttccaaggcctgctcagtcgtcctgctgggcgggccctgaggatgcaagggacggaggaagtttcgtgcgtgcgcccttcctatagcgcccagtagaactccc

SEQ ID NO: 452595 - DNA, 1015 bp, Homo Sapiens
  misc_feature (800)..(800): n is a, c, g, or t
  misc_feature (921)..(921): n is a, c, g, or t
  misc_feature (928)..(928): n is a, c, g, or t
aacagcaacagcagcagcggcagcagcatctgagaagcaagtgcgaacacaacctgtgctgaatgatctgatgccagacatcgcggtgggtgtgtccacactgtcactcaaggacaggaggcttccagagcttgctgtagacacagaattaagccagtcagtttctgaagcaggaccagggcctccccagcatctgtcgtgtattccacagagacatacacacacttctcggaaaaaacacacactagagcaaaaaacagacaccagagaaaatccacaggaatatccggatttctatgacttctcaaatgctgcttgcagaccttctactcctgctctcagcagacgcaccccttccccttcgcaaggtggatattttggtcccgatctgtacagccacaataaggcatcaccaagtggcttaaagtcagcctacctacctggtcagacgtctcctaaaaaacaggaagaagctaggagagaatatccacatttcccctgacgggcatctacacagacaaaagaatgagccgatacacctggatgtcgttgagcaacctccccagcggtcagactttcctttggcagccccagaaaatgctagtaccggtccagcccatgtcaggggacgaactgcagtagaaactgacttgacttttgggctgactcctaacagaacctttcactttctgcatgtagctctgaagctcccgaagagagatccggtagaagactggcagacagtgagtccctgggccatgggagctcagagacaatacagatttggaaagggaagattncataagcagaggaaggaggtcaccaagcaagccggacttcctctacaaaaagtctgccctctgagagcaacctccaagtcgtctgtgcctgagatgtgaaacatccccattttatgatgtnaccccancaaacttacaggaccagtttcatcaaatgcccaggctggaataactccggttttcaccatggatttttggttcctaagttttttggc

SEQ ID NO: 452596 - DNA, 1334 bp, Homo Sapiens; identical to SEQ ID NO: 324409
  misc_feature (42)..(117): n is a, c, g, or t
  misc_feature (253)..(264): n is a, c, g, or t
  misc_feature (372)..(553): n is a, c, g, or t
  misc_feature (607)..(645): n is a, c, g, or t
  misc_feature (723)..(761): n is a, c, g, or t
  misc_feature (823)..(868): n is a, c, g, or t

SEQ ID NO: 452597 - DNA, 894 bp, Homo Sapiens
  misc_feature (11)..(11): n is a, c, g, or t
  misc_feature (448)..(610): n is a, c, g, or t
  misc_feature (697)..(706): n is a, c, g, or t
gaatccatacngcagttggccttttgtgtcctggaatcctttccattccagccaaggtttgttaaaattccagctgccgttattaacacggacttcctaagttccattccatgcctcactgttttaacagtattcccatggacatatgcccacttctttattcattcccattgcacatgtgccttaagatagttctgttttgtgcagttttaggctataaatattctagtgcatgtcctttggtggacagacacatgcatttttgctgggtttgggtaaaacagtatacatatgcttggcttttagtgccagctttcaaaatggttttatcgatgagcaattccaccagtagtgtacagttcctcttgcttacatccttgccaaaacgtgatgctttttcatgcttttcattttaaccatttccatggatgggtagcagtgctacatnnnnnnnnnnnnnnnnnnnnnnnnnnnnnnnnnnnnnnnnnnnnnnnnnnnnnnnnnnnnnnnnnnnnnnnnnnnnnnnnnnnnnnnnnnnnnnnnnnnnnnnnnnnnnnnnnnnnnnnnnnnnnnnnnnnnnnnnnnnnnnnnnnnnnnnnnnnnnnnnnnncagggaccagaaaactatgagtgcagaccaaatccagactgccacctgggattgtgaatggttttactgggaagcagccatgctcannnnnnnnnnaatgcatggtgtacggatgctttcacacaatagcaaagatgagcagttgtgacaaagctgaaaattttcaccatctggtgccttgctttataaagtttgccaacacttttgctatactcggtgctgttgtcacatacatgaactgcaaatatcttctcctccccatgatttcctgttcattttcttcc

SEQ ID NO: 452598 - DNA, 700 bp, Homo Sapiens
  misc_feature (152)..(152): n is a, c, g, or t
  misc_feature (186)..(186): n is a, c, g, or t
  misc_feature (644)..(644): n is a, c, g, or t
  misc_feature (658)..(658): n is a, c, g, or t
tcaatggtgcaaagttttgctgacctgtttctttcactcacttacatctgggctgttaactgtgtatctgagatttgctcaaatatttagctgaatacttttaaaataattttccatcaaatccaactcagcattatattcattcactgccnagaaaggtcacccctacagtaaaagttaagatgnatcccgaattcagaaatgcaaaaaacaatttgtttagggaaatatgaaatgttacacattagcttctttattgaagaggcagctcagacctatttatatatgcaaaagtataggatgacaaagtatgtaatgattctttaaccttctcaaatatttcacttaaaatatacattatgctaagctttaaggacagcgtaggaaatcttagtagttgccatcaaaattactataaatatgtatttcctgcacagaattatgcaaaatctgccatttaattcctgttgtgcagcatattcatacacatctagaaaaatatgattagagtgatgagcgacacaaatgttagccatttgtgattttaggaaaacttttatgggaaagtttaacacacatggcaggaaaatacacatatcttaaggtgcacagcttcaaaacacacttcaaatacttaggcaccncgggttagggaacnggttttttcccagcacccggttaatggcccccttttcggcct

SEQ ID NO: 452599 - DNA, 962 bp, Homo Sapiens
  misc_feature (11)..(11): n is a, c, g, or t
atcttggtcgncgggtttttttaacttcggttttggaggcaacactctttttttgcttgggataaagcctcttcaggctgtttatcaatgtaaataaaagtatactgttctattctttcttctcgagtcattttcaatgctttctctgcatgggcaatgccaatatcccactgagcacgttctctctgaggtcggggtttccgaatcttttgtttctcagagtgattgctggcttgtttggttgcctcagccagtaattcttcatactgtttatgacctttatactctcgtacccgtttttcatgaacccacgccctctctggctggttgctaaaaaactggacatgatattctcgggcacctcttgtgttaattttagtatgaacctcaagctggtggatcacttgaaaccatacaaggccaccaaggataggttcccaccttggaccacacaagatcgccaacctgaaacttaacaccagtggacacttccgttgttggaacagaagatagtattggctgaactggggcttcctcttttagtactggttcttcccttggtttttctgatacagtgtcaaccctctcatttggtctattttgttcctctggttctaatttggggattttgtgtgacttgcgctcttcagatcttgatgagtcatgcttgttgctttttttcctcttttcttttctgctttcatgctttgatttcgtgtgctcacttgcctgtacttcatttaaaaggtctccacaaagggaagactcaaacaattccctgccattctggatagttttggttatttttagtttaatttcaggtgagccagtcttctttggaatcacagtttgtggtaccgaaggaggaggtggtggctgtggaggggaaggtttttccagaatttcatgtggtcttgtgtttggaatttctgaatgataatagtcagtggggctaaagtttc

SEQ ID NO: 452600 - DNA, 343 bp, Homo Sapiens
gatttattttttggctgggctgaaggcttttattttggtttcccacaaagcagttaataagtagtgtaaaggatatatattaggtaaggacgcaggtatatgcattcagctgcccactccctttacatatcacaacatttttggtggcctcagcagttctagtaactaaaatgtcagaaaagtgtggttctgtgggcttccttatcaccctttttaaaaacctcagatatattagcacccagaagtaacttattttagatgaaatttgtttttaaggaagccacaccactcagtctaaagatctggggtcgtaggccttgaaactgctggctgtgccagctct

SEQ ID NO: 452601 - DNA, 1120 bp, Homo Sapiens
  misc_feature (301)..(491): n is a, c, g, or t
  misc_feature (512)..(572): n is a, c, g, or t
  misc_feature (678)..(717): n is a, c, g, or t
gagagccgacggacgcgaccggcgggagaatctactagcccgcccgcacctcgcgccatcgcccacggtgcgcgcgtcgcacgccatacgagatattcgtcgtgccgcgcacgcctctcctctcggcagcctgtaccccgtcaacaccctaggcttcccgtccgcgcgcaccagaggggtgggcgcggcctccgagcgacacacaccatcccgccctccgcctcccgcgcgccccccgcccgactctacccctcaccctcgtggcggccggagatgccctcccggcccacctgcccaccannnnnnnnnnnnnnnnnnnnnnnnnnnnnnnnnnnnnnnnnnnnnnnnnnnnnnnnnnnnnnnnnnnnnnnnnnnnnnnnnnnnnnnnnnnnnnnnnnnnnnnnnnnnnnnnnnnnnnnnnnnnnnnnnnnnnnnnnnnnnnnnnnnnnnnnnnnnnnnnnnnnnnnnnnnnnnnnnnnnnnnnnnnnnnntaccgtcggcggcggaatccnnnnnnnnnnnnnnnnnnnnnnnnnnnnnnnnnnnnnnnnnnnnnnnnnnnnnnnnnnnnntgtttcccctctcccctcaccggggcccggccgcccccccacaccgggaggctcttgcaaaaaccttcctgaggccccaacgccgggccgccacaagatacatttnnnnnnnnnnnnnnnnnnnnnnnnnnnnnnnnnnnnnnnntccgccgacccactcagcgggtccgccgcccgtcccccggtcctcttccccgcgaatatggcggtgagtttcctttaatcaaagacacccatgccaaatttattagctatcaaaagctacattttactaaaaacaatctgcctttaaaaatgttgaatcatacaatatgtacaatacatgccgctttccgttttggacttcactatccatttgagtccttcagctagcatcaagcacttggcttctgctgcctctgacttggagtaatcacaggctctgaaatctcaaaggtcttcacaatctcctcccagtcacggtaactcaaagctataattccttgatttctaacttgtgtgttatgttcaaatccctcattttcttcattaatactaacaggctctcc

SEQ ID NO: 452602 - DNA, 928 bp, Homo Sapiens
  misc_feature (228)..(241): n is a, c, g, or t
  misc_feature (252)..(252): n is a, c, g, or t
  misc_feature (274)..(333): n is a, c, g, or t
  misc_feature (346)..(402): n is a, c, g, or t
  misc_feature (414)..(416): n is a, c, g, or t
gggcgcgcctgttggaaaaagggcgagaaggagcgcctaggaggagcgcgcgggagttatttataaaaacggcgcttagtgcgccagcgaggttatttctttgggggggagttccaaaccgccgttatgaagcgccatgttgcttttttggagagacactatttggcccgtttttctgtttctaggggggcgcaccgcgccccaaagaagtgttttaaaaaattttcnnnnnnnnnnnnnnagggcaaaagnaaagaaatcgctaaaagaatgnnnnnnnnnnnnnnnnnnnnnnnnnnnnnnnnnnnnnnnnnnnnnnnnnnnnnnnnnnnnttgattaggagtnnnnnnnnnnnnnnnnnnnnnnnnnnnnnnnnnnnnnnnnnnnnnnnnnnnnnnnnnagtttggttgannnggctgcgggctaacgctttatttgccagccaaggccccgggcccgcctgggcttctgctcagaagatcctcacggagtccagctgcacgtccccgcccacctccaccaggcgcacgcgcgccagcggcaggcggtggcggaagtggtggtactgggcgtccccaaccacggccttgaagccgtcgtctgacgcgatgatgagcacctcgaagggctgcccgcgctggaaaggaacgcccggcccgcgctcctcgcggccccaggagccttgctccttgctgttgaagaccacctccgacgtgtccagccgggggttgaaatgcagggcggcatcggagccctgctcctccccgcacagcaggtttacatggaacctgctggcattgggaggaaccaagccgcgaattctcagcaccgtgccagggcggatgccctcgggcagcgaggacttgtgggggacgttggacatggctgggaccgggttgcctcgtgccgaattcgccacccaggcc

SEQ ID NO: 452603 - DNA, 870 bp, Homo Sapiens
  misc_feature (244)..(275): n is a, c, g, or t
ttttaaggctattatctcctttattcaaaaaataaatatttcactttgattcaacatatttcaaatcacattaagcacagagaagaaatacagtccctttggagattgtgaacacgtgttggaaagaggcatgatccaaacaatgggaatgaggtgagtgtggattccagctgtttcctgacccagaggttccatccctcttcaggtggagctacttatcgatttttaggagagaaaaagaagnnnnnnnnnnnnnnnnnnnnnnnnnnnnnnnnttcgcgcgcgttttgaagtctgaaaggcacatgaagtggaccataagatgtatgggcacattcactgataaaacatcccctattccctcccaaggaaaggcggagatactttaaatcaagtcaaagaccagagaagacagggtgctcctgtttacagctcagcaacatgaacatctctgaatatgaaagccattttttgtttgcgtccccctcccgcgcctcctctccctgccgatggggtccgcggccggctgcggggctcactcggtgatggtggggcgcgtggccacgtacacaaacaccacgatcaagagcacgaccacggccagtgtgggcagtaccactgtagtgatctgctgccgggcctcctgcatggctttcttccgctccttcttgtccttggaggtctccttcttgggcttccctttgagctgccgcatctttcctagaggatgctaggagggtgtgtccagagggattccaggaagggccacactcctcttgccaaggctggaacctccttttcttcaacttcaagaatcgttgattaatttcagcaaactgatttccagtacaggtgacttgagttattcct

SEQ ID NO: 452604 - DNA, 574 bp, Homo Sapiens
  misc_feature (17)..(17): n is a, c, g, or t
  misc_feature (45)..(45): n is a, c, g, or t
  misc_feature (69)..(69): n is a, c, g, or t
  misc_feature (109)..(109): n is a, c, g, or t
  misc_feature (142)..(142): n is a, c, g, or t
  misc_feature (199)..(199): n is a, c, g, or t
  misc_feature (216)..(216): n is a, c, g, or t
acatcagggattccaanccaacttacggaaactccttggtaaaangccttccctcgtggcctcgtcaanccaagctgaggaaaacataattaaattcctgcaaaaactnccctccttatgctcaaactcctcctgggcgtcntaaggacatcctgacaagtagctctcaaatggtcctgcgtttttgtctttcttgctnccgggcgggcttgctgnttctcccttcatctcctcaacccacttcttctttaattcagcctctcgattggcatgatcattggggtgaacaaaatgaggtgcagagggcactttggaggttgctttcttcccattttgctttgcaggctgagggtagggccaacttatcttcttgtggcccttggaaccttcacctggctttttatttttgtgtctaagtttcatcatgatgaccagcttgaaagcagataggttcaaatctgcttgctctcttcacttccggcggggatctgagaagcgagggcaacacgacaactcggttgagcgagcagaaactctcgcgcagctaggctccgacttccggatcccaggcccc

SEQ ID NO: 452605 - DNA, 758 bp, Homo Sapiens
gctttggcctgggctcccgccgcccccccaggggagcacgcagcttaatggtctcggcaccagacttccagaatcacatcagagtatgccaccaccttacggactccttgtaataagccttcctcgtggcctcgtcatccagctgaggaaacatagtttaattcctgcgaaacttcctccttatgctgcaactcctcctggcgctcttaggacatcctgacacgtagctctcaatggtcctgcgtttttgtctttcttgctcccgggcggcttgctgctgtctccctcatctcctcaacccacgttcttctttaattcagcctctcgattggcatgatcattggggtgaaccaaatgaggtgcagagggcactttggaggttgctttcttcccattttgctttgcaggctgagggtagggccgacttatcttcttgtggcccttggaaccttcacctggctttttatttttgtgtctaagtttcatcatgatgaccagcttgaaagcagataggttcaaatctgcttgctctcttcctctctattccaggttggcgggcatctctggtttcacatccaatagacgatcctaactgcccggccgtctaggtgagcgcacattgtgagaaaagaggagagaagtttcttacttacacttccggcggggatctgagaagcgagggcaacacgacaaactcggttgagcgagcctcgtgccgaattcgacacccagcctcgtacctagccgtaagattgtgt

SEQ ID NO: 452606 - DNA, 1036 bp, Homo Sapiens
  misc_feature (750)..(809): n is a, c, g, or t
atgaggttttcagctccaaagcaggctttgcttttcaggagtgactcagaggcctgatctactggcacactgcaacgattcaggtttttgacctgatgctgggtactggccttgaaagccacggttggcaactcattccgaaggtaatccagccatttctccacaacctccttggggaccaggtcaatcttgttcaagaccaggaccagcttcttgttgccttgtgctcgcaggacagcctcctccatttggaagcagcggcagcctaatgggtctctggcatccaggacttccagaatcacatcagagtattccaccaccttacggaactccttgtaataagccttcctcgtggcctcgtcatccagctgaggaaacatatttaattcctgcaaaacttcctccttatgctcaaactcctcctggcgtcttaggacatcctgacagtagctctcaatggtcctgcgtttttgtctttcttgctcccgggcggcttgctgcttcttcctcatctcctcaacccacttcttctttaattcagcctcttgattggcatgatcatttgggtgaacaaaatgaggtgcagagggcactttggaggttgctttcttcccattttgctttgcaggctgagggtagggccaacttatcttcttgtggcccttggaaccttcacctggctttttattttctgtagtcctagctctcaggaagctgaggcgggaggactggttgatcccaggaattcannnnnnnnnnnnnnnnnnnnnnnnnnnnnnnnnnnnnnnnnnnnnnnnnnnnnnnnnnnnctaagtttcatcatgatgaccagcttgaaagcagataggttcaaatctgcttgctctcttcctctctattccaggttggcgggcatctctggtttcacatccaatagacgatcctaactgcccggccgtctaggtgagcgcacattgtgagaaaagaggagagaagtttcttacttacacttccggcggggcctcgtgccgaattcgccacccaggcctcgctcctt

SEQ ID NO: 452607 - DNA, 1509 bp, Homo Sapiens
  misc_feature (504)..(514): n is a, c, g, or t
  misc_feature (650)..(668): n is a, c, g, or t
  misc_feature (773)..(832): n is a, c, g, or t
  misc_feature (850)..(850): n is a, c, g, or t
  misc_feature (940)..(940): n is a, c, g, or t
  misc_feature (1085)..(1085): n is a, c, g, or t
  misc_feature (1090)..(1148): n is a, c, g, or t
  misc_feature (1292)..(1292): n is a, c, g, or t
  misc_feature (1446)..(1446): n is a, c, g, or t
ctcttctcctgacacatacacacttggtagcaagtggaatgtttatgtccacctttatgaaagttctggagtcctgggtcgtggggtttgctgttccccaaggaggaacacactgggtgtaagatctgggtgtagagggcgtcttcagtagagactcacgcttgcgcagttggaattgcttgattaatacggagactggtgaagatcttttgtgccaatatgcatggtaaatgaagaaagctctttccagactgtttttatggattcatggagtgggctcatgttgggaccagctgactctgggaggaagactgcctctccatcgctgtcagagagcctgaaaggaccaacaatgaggtgttcttgggacccgccatggggatgattgcttctctaggctcctggatgttgctgcattctaagcttaacctcctggtctcatggcagtgacttgagcttttgattcatagaagaaagccagaggctctgcttgtacaacaatannnnnnnnnnnactgccacaccctcctcccgccctcagaccaccacccctctcggcccaacccctccaataaccgacgctatatactctggcgcgcccccctccgccccctcaacaacctttcccaacccccactctccgtttcggnnnnnnnnnnnnnnnnnnnaaggaaaaaagagcaactgctggccctaaaaagattggttttcccacacgggcaacacccccccgggcacagatagcggtacacgcccggcctcccgcctctctnnnnnnnnnnnnnnnnnnnnnnnnnnnnnnnnnnnnnnnnnnnnnnnnnnnnnnnnnnnngcaggaccaccgcctccncagcacagacaacccaacatcacacctccacacgagtcacggcgcgcgcctcttcccgcgccgcagaagcggtccagcaccttatctccncccgggggccgccacacaccacctcctcacttcccgcccactacgacaacccgcgacaggaccgaacccctccccgcccccacgcccctagcggagccggggaacaggcctcttgccgcgcgtaaaacagtcctttcccatagtncaccnnnnnnnnnnnnnnnnnnnnnnnnnnnnnnnnnnnnnnnnnnnnnnnnnnnnnnnnnnngagcacaccatcccccctcacaaacagaccgacgactcaaaacaagcgccggcagtgtaaagggaaggcctatactcccgcagctcggtaatcggatgcgaggggggtggttgttgtggaccccccggcgagcgcagaaatatnctggtaaatacacatcccgctcctacgagaggtagggggagcgcgagcatggcaaagtttggggagactgctagcgtacccccagaggtatctaccagcggcccggagccgctgcaggcgtcagcatggatacacactcacccctcttctgctnccccccggactgtcggggtcgatatatttcgtgtacgtgttggtgacccgcacccagcttgag

SEQ ID NO: 452608 - DNA, 820 bp, Homo Sapiens
  misc_feature (770)..(770): n is a, c, g, or t
  misc_feature (793)..(793): n is a, c, g, or t
cacaccatttcactctcattgaccccagaggtagcttcttccatagtggttggatcaagtccccgagtggataatcacctcctggggaggcagaatctataggagagcgaaccatcacaagtgggtaacttccgggggggtgtttttactgcttgacgagcctggtatgcagcatctgtagccttcctctttacttcagcctcctcttcttccaatttctttttcgttgcaatgtcattgcaaagctcatccagtctgctgtccatgtgtccagcttgaattagttctgcatctctctttagccgtctatatctctcctgggtttcctttatcactttctttagttcttcaactcgctcagcagtcaatttccgaacaataacatcttcaacagtttccaccacttctcccttttcacctcgtttccgttttggtgtctcagtggtctctaaaagctccgagtactgggaagcacaatgtttttgagagaaccagtctggagggcggccaggttctgcaaagggcttgattgctctgctaactgatacccaattttgatcgccacttctcatgacagaagatgctaaacatagcttctctcggatggaccatggctctgtggggccagtgcttagcagcttgtgtttgcccgttcccgtcgccatcttggccccgaagtccccccgctctcgacgattcgagctcgccgattgcctgagccatacttcgtaataatgtatgtaacgaagtatcgccgccacacggccggntaaagcctccaggggtcgcccantactaggtcatattcgtcgtttctttc

SEQ ID NO: 452609 - DNA, 1324 bp, Homo Sapiens
  misc_feature (105)..(164): n is a, c, g, or t
  misc_feature (167)..(167): n is a, c, g, or t
  misc_feature (233)..(233): n is a, c, g, or t
  misc_feature (961)..(1012): n is a, c, g, or t
ctctccgatgattgtttcttggtgttttattttggaaattatagcctcaagggctctacgcggaggtgctatgcggagttttccccgtttcagtgcgtgttgtcnnnnnnnnnnnnnnnnnnnnnnnnnnnnnnnnnnnnnnnnnnnnnnnnnnnnnnnnnnnngcngagaggtccggggcgtagggcggcggacccccgcggcagagtccaggtggatacgggcgctgggtnggggcgggaggccgggttgtctttgtgtgtctatattgcgagccgcggcactattcaaggggcgcagagagagcgcgacgagaggcggcgggctgggcgatccgtggagggggcgtatgcagaggggatgggtgcggccgtggattgcgctggtgagtacgggggttgttgtgtcccattgtgttgggggcgcgcgaggaggttgtgtgtgtcggtgcgccgcctgatttatttcgctgccgcgcatggtagccgggaaagaatggtgtggtaattgagcggaggcggggtgagtcacgggtgttgggtggtagagggttgggagggggtgggggtttgtcaggtgttgcgtcccaacacgcgcatgggggggatgtgttccgacccacgctgattgcaggaaagtgattaacaggaaaaatcgcaacgaagatacgtcgggaggagatgggccgggggtgggaagggaagtcaacattttaaaagttcgcttgtgattcccttttgataggtggcggtcgaaccccgcacgagccccccttccggggatgctccaccaccctcgggtttccccccggccttgctttttgggagggaagccacaccgaggtccagggccgggggcgccttgggaacaggctttgatcgtgtttcctccccctctcgggagcggtgttcaatatggatttttttaaaagtcttttctggggtcgatggcgaccgacaannnnnnnnnnnnnnnnnnnnnnnnnnnnnnnnnnnnnnnnnnnnnnnnnnnnctgaggggagcgtttatttcaagctaccgatgggacaaacactcccaggcttcccaggtgccactgtccggggcggcatcctcacttccagcggcctccaacgcggcccttccctgcccccttccggaacttctgggcgtggctgatgcggttgtacagcacgttgatctcatatttctgctgtttcagcttcgccatcaggtcgaactttctcagactccagctggtggatccagtccgacagctcctgggctttctcccggagctgttccctcccccatgtagtcaatgtccagaggcttcttacgctcc

SEQ ID NO: 452610 - DNA, 1506 bp, Homo Sapiens
  misc_feature (50)..(50): n is a, c, g, or t
  misc_feature (91)..(91): n is a, c, g, or t
  misc_feature (230)..(230): n is a, c, g, or t
  misc_feature (254)..(254): n is a, c, g, or t
  misc_feature (287)..(287): n is a, c, g, or t
  misc_feature (344)..(344): n is a, c, g, or t
  misc_feature (438)..(438): n is a, c, g, or t
  misc_feature (440)..(489): n is a, c, g, or t
  misc_feature (613)..(642): n is a, c, g, or t
  misc_feature (697)..(759): n is a, c, g, or t
  misc_feature (812)..(821): n is a, c, g, or t
cacggtgattgggcgtggtgtgctcgtgccggggggcggcgcgtggatanaaacgggcggacctctctccactataccttgggtgggcagnatttgtgatgcgccctgtatgaccggtgatagtcgctcttcgccaggacgcaccattctggatcacgtgggatgtaaacgggcgaggtgtgaagaatattgggaagaggtagtgagggacgggggtggcgttagatatngggtcgtcggcggaggcgcgcgangctcggggcgctgtgcaatatgtggagggagtngtgtctccccggcacccggggtcgggctcccggtggttgtgctaggaccgcgcgcanggggggtgagatatatattagtgcgtatgtggggagaggggaggggaaacagaatattgtggggagggaaagaagagagttgttttatcgaggngnnnnnnnnnnnnnnnnnnnnnnnnnnnnnnnnnnnnnnnnnnnnnnnnnncctatgagagtgacctaaccgaaatatatcagtgatctccctccttccgttcctgtcgccgcacccggtgggcgtgtgtggtgtaggagaaaatgccttgttatttgcctcttcacctgctccnnnnnnnnnnnnnnnnnnnnnnnnnnnnnncaggtgtggttaaataaggattatatttgttggggcgcgttttgttagtttatannnnnnnnnnnnnnnnnnnnnnnnnnnnnnnnnnnnnnnnnnnnnnnnnnnnnnnnnnnnnnnggtttggtcaatgtgtatgggtgtgggttgtttggtgagtttgtggttccccnnnnnnnnnngagaatgaaatatgtaaatgtttaattttaacaagcagttacaaatcgtaacagacaagaactcttggatctaagagaccaaaatgtaatttcttacataacagacaaagttacaagttataatcgttcactaattacagtgaaattccggactttgacacatcaatcaatagatgttccaacgttccccctagagatcccagttcaagtcttaaatatttcatctgctgaagtttcctcagaaaaggctccttttcccaggattttttaggtttctacttttgccccttctcccactaaaagaagaataaaggaaagttggggaaatcagagaatcctgaatctgcgtgcgtggtgaagttaaacagagtcaccctctgggcctggtagggataactgcatctgcctagcatcaagactatccaccgcctggtctaaccccagaccccgttgtgcacctgcccttaagcaccaaaaactgaactgctcaaagagaacctgcagtcgatatgaaaactagtaaatgactgcaggcttgacaggagtctcggtgatgcctgaaaatccacaacaggaaatctaactatcctccatacctcctggccattcatcaaaagcagaccgagtcacagccataaggaggccggtggctgaagacgaatgccagcaccacttttcctcattt

SEQ ID NO: 452611 - DNA, 604 bp, Homo Sapiens
gatttgggtgggaggagagtcccaaagccgccctaggttccatggacccgagggtttgttcctaggggaaaccaggctgatgggccccatggttccaaattggcctgaatggggcggcgcgcgccgcaaaccggaatggtctgggagaagctttttcgagggcccgagggcgagccgaacagtgggaggcgggtaaatataggaggggggccccgttagcgttataattttatttcaaagaaagcagaagcagagcaaaagcaacctttgcatttgagggaggagattattttacagttttggaaaagaataagaacaattgtatcaggagacaaatgattatgacagaaactcgcatccgacagctgcagtgaatccacgaggacacagaccatgctggtggccacagcagggccacagggtgaatccacaagggaacacagaccatgctggcagccacggcagggccacagggcacggtctccctgtgttaatgtttaatgtcagccttttcatatggacagaaatcacgaagaaatcctgcaaaaatggcatcaatatgaacaaacccttgttataaaaagcaaaatattgataggaaccc

SEQ ID NO: 452612 - DNA, 457 bp, Homo Sapiens; identical to SEQ ID NO: 320181

SEQ ID NO: 452613 - DNA, 794 bp, Homo Sapiens
  misc_feature (511)..(566): n is a, c, g, or t
ccaaggggaaaggcctgggagtggaattacaccccaaaaaggttggaaaatttagggaaggaagactgttccctatttaaacggaacataggggaaaaaaaggggattcgtcatgtccaaaaagtatagaatggggttgtaaattaaggaccccaattcataaatgggaataattagggcttccataaccgcatttgtagcaactcattcacagctatgaggtgggcatttaaaaaaaacaaacccagcctggaatcccaaagaaaagcaatcaatatatttcagaggagctgaattaataaagtgctttattggttaaaaacaaatacacaagaatgccctaaagaaatttcagtattaccccttctgcctcttttatgtgatcctgggtcatcttcatcttcagtgaccatatcttgatctaattccttttgctctgtgtctttgctctcaatgctagtatcaaaatcttccctttcttcctccccaatagatatatctgccgttgaannnnnnnnnnnnnnnnnnnnnnnnnnnnnnnnnnnnnnnnnnnnnnnnnnnnnnnnctccttaagtttttcttccttccttttacgaattctggcagctgcttcttccctctcttttcgatgttgttctgcttttaattcccggaactcctgctttgcctgtcgtaatatatcaacataatcttcaataaaatccctagttgaaactagggtcagtagctttccacagagagtatggagtatcttcattttttctcctggtgtcaaatcatacactgaggtgcc

SEQ ID NO: 452614 - DNA, 1398 bp, Homo Sapiens; identical to SEQ ID NO: 97838
  misc_feature (41)..(41): n is a, c, g, or t
  misc_feature (92)..(92): n is a, c, g, or t
  misc_feature (97)..(97): n is a, c, g, or t
  misc_feature (138)..(138): n is a, c, g, or t
  misc_feature (152)..(152): n is a, c, g, or t
  misc_feature (240)..(240): n is a, c, g, or t
  misc_feature (367)..(367): n is a, c, g, or t
  misc_feature (390)..(390): n is a, c, g, or t
  misc_feature (417)..(417): n is a, c, g, or t
  misc_feature (434)..(434): n is a, c, g, or t
  misc_feature (436)..(437): n is a, c, g, or t
  misc_feature (446)..(446): n is a, c, g, or t
  misc_feature (577)..(577): n is a, c, g, or t
  misc_feature (716)..(716): n is a, c, g, or t
  misc_feature (721)..(721): n is a, c, g, or t
  misc_feature (843)..(843): n is a, c, g, or t
  misc_feature (996)..(1004): n is a, c, g, or t
  misc_feature (1193)..(1291): n is a, c, g, or t

SEQ ID NO: 452615 - DNA, 453 bp, Homo Sapiens; identical to SEQ ID NO: 324459

SEQ ID NO: 452616 - DNA, 464 bp, Homo Sapiens
  misc_feature (18)..(18): n is a, c, g, or t
gaatgagcctcaaggccncgtaaaaacctcccagttccacatagagccctggacataatccttttttaattttccttccattaacagggatacttttggccatttggtttaagttccatgcctgaataatttcacccatatgcattatgttcaacacagaaggtatggtccaaaacacctgtaatatcattctcaagtatccacactaaactgttgtgaagatccggatctactaactccatgtcatccaaggtaattgacttcccaagcaattgcttataaaaaggcaatgtgaaaccaccatcaatataatgtccatgaaacacagccattcccattattcgtccaacaaagtggaaataggataaatgttccggattaactgcagaatcaggattgatctgcaatgtataaatatcatctcttgaatactggaagaggccatagtatggattcaacatttc

SEQ ID NO: 452617 - DNA, 461 bp, Homo Sapiens
  misc_feature (124)..(133): n is a, c, g, or t
tgagatgcacttggcacttaggccaatgtctagcaccttccccaatcccaagaacataataggcagtccaacaggtgtttacttatgaaatgaaaataatgatttacaaattttattcaatctnnnnnnnnnntcagaatgtgtagaccatacataggagagagggcatccccccaaaatctgatgttaagtgaataaaatcaatgtcatgaagcagaatggtggttgccagaggctggggaaaagagggaatagacagttattgtttaatgaatacagtttcaattgtataagatgaaaataattctgaagatggatggtggtgatggttgtacaacttatgaacatatgtaatatactgaactgtacacttaaaatagttatgacaaattttattgtatatattgcaccacattgaaaaaaaatcaacatcatgaatgagattaaaacgaaaggtcatt

SEQ ID NO: 452618 - DNA, 750 bp, Homo Sapiens
  misc_feature (42)..(69): n is a, c, g, or t
  misc_feature (504)..(520): n is a, c, g, or t
  misc_feature (536)..(547): n is a, c, g, or t
ggcctgtttttccaatggggtggggttactcaaacaataccnnnnnnnnnnnnnnnnnnnnnnnnnnnncgaggggaccccctgtgtccttaaggtggggggacccaggggcccaggggctccaccacctggccctttcagtgtttccaagcaggggaacatccccccctttgggtaacccggggggggaccccttcccatgacaaccccccccaacgacccttcatcaggaaggccgctgcctgattgagatatgccccccaggaggacaagggaggagtggatgctggaaagacaggggcaggggaccatcaccagggaaagactttatttttgggaggacaattgaacctgggggtgggtctgtagtggagctgctgtttcttctcctgtatccaactgttctaactcttgggttttctccattttcagctctttcttttcctggccttctcattgctggttccttcaagcttcctctctattcttccgtcaatatattcnnnnnnnnnnnnnnnnngagatggagtctcggnnnnnnnnnnnngtttgcattttgtcctggcccctgccaggcatatctctcctggtggctgccctgccctgtggtcacagttcttggtccgcctgcagaatcttataattattgttgagaatgtttagcttctcctccagctcctgagccaccttcttcagctcctcagctgtctctgactttgccccctcatgtaagtgctttgattcgtaccc

SEQ ID NO: 452619 - DNA, 265 bp, Homo Sapiens
caatcatttaatattgtttacactgcattcacagtttgtgtgttaaccacttatgtaatttatcaaatggcatatttggaaatgtaagggagaaacttggtttaggtaatactctatgtatcagttacccattacatgatttattttcatcattatttgcaacgccacacatcttgtagttttctgtgtagtctctgcatgcagtctacttcagcttctagtgctgtacatatctatatcttctgggtgggactgcccgtgatcc

SEQ ID NO: 452620 - DNA, 809 bp, Homo Sapiens
  misc_feature (281)..(299): n is a, c, g, or t
  misc_feature (456)..(464): n is a, c, g, or t
  misc_feature (736)..(744): n is a, c, g, or t
cccattcaaccccaaaatgttaaaccagtacaccagggaatctttatttttttaggtttaaccactgcataaatttctaagtgttgttgcctagatatatactaagtaatggatacattatgctaagactttcagggaaaaatatgtggaataatataatgaaaattatgaagcatcagatttttaaaaaagcaaaaaagaattgaactttttactcaaatataaatcactttaaataggaatcatactaatttgaaataaggaatattgtgtttatctcnnnnnnnnnnnnnnnnnnnatacacgcacatacatctatacttctaagaaaatacgtatggcttactttttatttcaatgtcattttgaagaatctttgcttttttacaaaggttaggaatatgtattgtttaaaccaagttaagatttgatacttcaaagtacactaaaagaacnnnnnnnnngtgagagaaccattagatcactcagtttcctgacagtaacagaagaaaacaggactaagaacattcactgaagctttcagtgtgggcagtctgtcagtaaaaaggtaagtagtagggtcagaggtatggcattccacataccagctctaccaagaatgaaagagcatacggactacagaaacggacgtgtgtccgtgattaaactttttggcatcgctgtattaatcccttttgatgtatataagttcagtatatgacaaatgtttcagttnnnnnnnnnaaagaatccaatcacaaccaagacacacacacaaatcacttctcagttacacatctgcatttccc

SEQ ID NO: 452621 - DNA, 506 bp, Homo Sapiens
  misc_feature (477)..(477): n is a, c, g, or t
ggagcagttttcataatttaatgaaaaagtattggtaaaaaggtgacatttgaaaaaggactgagcttatcttggaaaactggactatataagacaaaatgaaaaaaattaacaaagaaggttaagaggtaatacttcaaacaacaaaatgtagcaaatacattttggggtaattgaaatttacaactgaaggctccttcatttacctaggaatatcctgtaaaaatattacaactatatttccctgacgaatgatattttagtcaatactctcccaatggcattacatatggaatttggctgaagcactgttttgatgtttgcttttcctcccactcagaattgaaaggcatgaagggacaaaggctaccgcactggcctctggacataaggaatttataacacagctccatcataatttcattaccatgaaggtatccaattaatatctactccagagaactccaaggaaaagcncagaaacctagtggcataaatagggggga

SEQ ID NO: 452622 - DNA, 582 bp, Homo Sapiens
cagtgcagagagctagggaattttacaaacatttccatggagaacatgactctgaaaaatctgcagatcactctcagttgtaagatctgttcatagaaatattggtgtagcacaactcagaagactgtgggctttctattcccccagatagtttaacatttctattcaaatgtcaagacaaaccaccagagaaccatgactttggaatatagttgtctattctctgagagtctttctttggcgttaaaaaataagcaaagaaacagaaggtgtacaaaagaacccacccaatggaaattaaacaactggaaaatacaaaaccaaaatgaaaactcactgcacaaactcaacagattaggtatgacaaagaaaacaatcagtgaggaccatggaaggtcaataaaaattaatcaatattaacaagacagaaaatagactggaaaaagaaaaaagatgagagcctgaaggacccatgggagtgtaaaacaagatctgccactcatgttattgaagtccctaaaaaagacaagactggggggtgaaaaaatatttgaagaaataatagttgaaagttccccaaat

SEQ ID NO: 452623 - DNA, 858 bp, Homo Sapiens; identical to SEQ ID NO: 150654
  misc_feature (34)..(34): n is a, c, g, or t
  misc_feature (154)..(154): n is a, c, g, or t

SEQ ID NO: 452624 - DNA, 138 bp, Homo Sapiens
ctttcatccatctttaaacaaattcaatgaccatctagagacagatgtgaccaaagtgttacaaatttctatgcattttctatgaattgctctgtgcagttcacacatgggttcattcaccccgcaggctgtgaacta

SEQ ID NO: 452625 - DNA, 811 bp, Homo Sapiens
gatcccattgtagatgttcaatgaccaatatctatctgcttccatttctgggcattgccaatgaaggagccaaggctccctccaataacactgtgtggtctccgcaatgggggcttcttgaaagatcctgtgtactggtggaggaaggaatgcatactgtgagacgttggaggcctgccattcttcacaataggctcattatccttgctgctgttttcttcaatagtcatttgttcagccaattcagacaatgattcatcaatagtctgacttcctcggagtgtgagggatagccttctcttaaattttttcatcctatcaattgaatgtggcttgaaaaatccagcaagagcggggaccgcgggtcccgaggcgaggcgaagagaggcgcggggggaagctgctccgcggacgcccgcggcgaccggatgcaagtccgggtctcagcggccggcagacgtgaggcgcttccgagcgcaggcctccgccgccacagccgccttccggctctcgccgcgggtccggagcctcgggaggggccgcgggtgtctcacgcgttgccaagtccctcggtcaacatggctcccgcgccgacgagccgcgcggacggcccactaatcccctcggagcagccgggcgcgagcgcggcgggcgccgacggcgggctgagactgtctggccgggcgctggctccttctccgcggctctgcggcggcccgcggggagctcaggagactgcgggcggccgcgttcgctccttgcgtgtgcgtcgctttcacactcggcggctgcggattgacgcccccccgct

SEQ ID NO: 452626 - DNA, 154 bp, Homo Sapiens; identical to SEQ ID NO: 324493

SEQ ID NO: 452627 - DNA, 1182 bp, Homo Sapiens
  misc_feature (170)..(170): n is a, c, g, or t
  misc_feature (190)..(190): n is a, c, g, or t
  misc_feature (1065)..(1077): n is a, c, g, or t
attgggggaggaaatcccaagcccttatttcatggcccagggatttccttagggaaaacaagctatggccccaggtttccctttccctaactggggccccgcgcgcccaaaacgaatgggttttagaaaagctttcttggagggccgaagggcgggccgaacatgtttcntttttctttttccctttccncccccccggctttttggaaaagtattctcaaggtaaatatttttttcctttggaaaaaagaaatctttttcccccccctaacctaagcaagtggagctgccactacctaatttatctattgttttgctaagaggtagataaaacaaaagtgaaatggggcttctatgaggaggtccattagagggtgggtggggaggggctgggatcgcccagtggaactcccccaactacaaagacggcctgaatgagtccaaggaccgcgccttcagactcccccagggcaggggatcctgcttcacctcttctccttctagagccaactgggcccccattgaagactgaaaaagggcccaatggaggtgtaggatctcaaagaaaccctgttgaagaggtctcagctctggtttccccaggcttcctgactttggggctgtgtggtgggttccaggccaagccccaggtctcactccagccagccccctctagaagggaagaggccattcctttcctcaccatctggtccaacaaagctatagaaagtgagagagggacaagctggaggccaaaggggtgacacatgggcaaggaaagcagaaagtggggacctcatggccagccctcccagcccaatcgatatgggggggatcctggcaggcctgcctgttccccaaggacaaaccttttgtggcacaagcctcaactcacttgtcctggctgggattcatacccttatgcatgagtccctgcccttagttccaatcttactgtaaggattgaggtagttaatccattatactcgtagcatccatcacctgcggttaatcaaaacacatgctcccgaggagcttcctgctatttcattcaagaaaacaaannnnnnnnnnnnngtccatccggagtcaaccatactaaggcgccagcaaaggcgccatcagactgtgccccaaagccctcgtgccgattcgacacccagcctcgtacctagcctaatt

SEQ ID NO: 452628 - DNA, 743 bp, Homo Sapiens
  misc_feature (94)..(102): n is a, c, g, or t
aagtttgctgtatattttatttcaattttaaagcttttttcagatttgttcagtattcatagtctactgctcatagctcaagagctcgcaattnnnnnnnnntcagtaaattaacattaaaaactttggagtaggtgaagggcttccatcagcaatatacatttaaaaatggcagcatgcatctgtccttcctgcccttgcttgtcacacctcaatctatggacactaggtggaaaaagtagaacactggtggtcttcccacttcttttggtcattatgactaagtcagttggcacacaagtgaagatctcccatagtctgtttccactgaatgccgtttaagtcaaacaaggttgctgacccctcttggctaggctcaattctcttgctccagaagaaggaagatagggataaaagagaagaactttttcagtggaccagtaggaagacaggcgaggtatagcaagtctagtgcaaagacaggtgatcacagtgttgtagagaggtagctgtgtagtgaagaagccagctattcaaaagcttcatcactatcattatcttcatctgaactgatttcagcatattttggcttttcattaactgtgctacgcttgcgtttgttcattttcacacgttcacaaagtggcatggtggactcaatttctgccaggagttcagggggtaattcttttaacactgattgatctatactacctttatttgactttgatggtttattcttg

SEQ ID NO: 452629 - DNA, 876 bp, Homo Sapiens
atcttcctctctcacggacaagcaacagtatctctagcccattagaaatccaccttcctcccccactgtcctggccctgtttacctgcatagaagtgatagaagggccagccagacagcactgtttgggatataggtaagcagtgaagccacatagcctcgatagaagccgcgaagtccatcagcctgcaggatctgcctgatgatgtccttggtttggccaaaggcaactaccccttgtccctctgggttcccccgcacctgaaagcggcccattttctcacccttgcgttgcatcatcaggtgctgggagactacatcaatgggcactgtgatgctctgggccacaagggaggctgagccaccagccaccagtgatttgactgtgttactctggctgtagtcagctacaaacttccgggtgagctcataagtggtgacataacactggccagagatgagggtgaaggtattgaccaggaaccctcggtagaggccagtgataccatctgctcgcaggatcttgatgaaggcatcgaaggtcccatggtagaggctcttccccttctgaacttgcaaccgggtgcggatgagggtgaatgggtagacactgacacggatcatcattgtcattgccacaccaaacacgtagaacttcttcttgtccaggtgttcccactcgatgatctggatgttgcgtttgtcctccatggtgcctgaagaccttctcagactccggcggctccaccgcgtctgaggcgaactccaagcccggacctctaggccgcagcccccagtctatccgtcgttcccagcgaatgccgtctgccggtcgcatcttcctccatctcgactgagctaccggtactgccccgct

SEQ ID NO: 452630 - DNA, 453 bp, Homo Sapiens
  misc_feature (45)..(45): n is a, c, g, or t
  misc_feature (93)..(93): n is a, c, g, or t
  misc_feature (114)..(114): n is a, c, g, or t
aaggatcgttgaaattgaacaacgcttggtgatctctcagcaaanaaccccctgcccgtgggcccaatcctacttgaagttactcggacaaanaccccaaagtggggcaacaantcccagagaggctgtgggaatcttcagaagcccccctgtaagagacagacatgagagacaagcatcttctttcccccgcaagtccattttatttccttcttgtgctgctctggaagagaggcagtagcaaagagatgagctcctggatggcattttccagggcaggagaaagtatgagagcctcaggaaaccccatcaaggaccgagtatgtgtctggttccttgggtgggacgattcctgaccacactgtccagctcttgctctcattaaatgctctgtctcccgctaaaaaagacaccgccaccacccgaaccaccccttgtctggccgccctcggc

SEQ ID NO: 452631 - DNA, 834 bp, Homo Sapiens
aaaaaagtgctctgccataccttcaaggggcatgtctttcccattaaaagaaaatgatggttaaaccattatattaagggcaaaagcttatcttcccatataaaaactgtgaatacggaaaatccaatatccaataaaaggcttttaatgcttagacttcttgtcacctgatgctgtcaacttgatcagctcatgcaaccttggtgttccaacacgacagtactcttctgaatccgatggcagaaagtaagtctaccaagaactgacagctccgatcagcaaacagatactgggcatttgtcttcttgttttccagtggataaaggagttgactgggccttcttaactgggtaatggacacattacccagaacctgatgctcactatgttgcccccagtcatctggtaacaacaactgctgacatgtttgacaaaactttctctgagtcaagggcaactcaataaacttcaagtacctttccacacactgcgttcgggacaggggaggctgacatcttcggttatgagcttctcgggcagcaagtctagctcctgacaacttttcatcttcccactgaaaaaaattacagtcttttctatctctacaggctgaacaggcataaaacctccgagtttcttctttcccttgggtcacctttacaaacagaagagtgggtccgtgagggcacagcggggcggggacggcaggatccaaaggaagcaccacctccattcccgagcttccccggcaccctgcgctgccctctgcctccacggcttcaaacccattcctggaggccgccatcttcccgccgccgtcccgaaagcctcccc

SEQ ID NO: 452632 - DNA, 927 bp, Homo Sapiens
tagttatgacaaccaaaaatgtctctatacattgccagatttctcctagggggcaaaatcgcctccatttgagaaccacaactctaaagtcaagatatttttctctgaagtgatttctgcttggcacgctaccctcatcatcttactcatcttaagcccgagccatggatcaactaggagcccatataaatgaggctcagtagggctgcacataatcaccaaacaattctttattcagtgttttgcttgtgtttgcatgttgctatgatggacaggtccccctcctccattcttgccctctggagaagtggttcctgcagtgtagagatatgaacagggtatggtaggattggggaaaggggagagagaagcagtagatacactccttatcctccccaaattttaagctctatttctgtgccctagtcctagacacacattagactcagggagttttgtctgaagaccaggtcccactgccccctggctgaagagtctgctttaaatgggaaaacaacgtaggagcaggggtttttaggcactttcagtattctcaggtgttcttcgttctggcccttccagggtaattaggaaggcagaacaagacagatgagctcctgcctgctctgagacaagaagggtggggtctcattagctttgcaacaggaaacatcctgttttatggtagtggggtcaggaatgtaggaactggtatccattctgccaattccaccccccattcaagtttgcttatccctatcctgttaaccctttagatctctagtataacactcaggctactgaggtattttagagcaacaagctgggttactttcagagcaaccagcttgactggaactgagagtaaattgggaatgtatgaccaatcttagaccatgaaaaatggcagaaaatacatggaaatct

SEQ ID NO: 452633 - DNA, 821 bp, Homo Sapiens
  misc_feature (640)..(648): n is a, c, g, or t
agcgggggatttctctgtaggtgaggcgggaggctggagggagctgagcccccggggagggggcccgatttcgcctcgccgcgcctctggctgctgggccgtgggtttttctcttgtcctgggagtaaggaggacgacggcccctaacccctgaattagccttctatttctattagtgacttagaagctacccggcgcctcatctgggctcacctgagctgaggatcaggaaggggagggggcacagtcattgcctcgcgggcgcggcgggaccccagcggacggctttgtgcggactttcggcaccgttatgccgccctagcccgacaccacctggggctggcgcgccacgttactgttcagggccagacgcaccgccctgcctgctccggggagccggacctccgatcccggggatgggggacccccgagacctcagaccccacggaggggactctgataccctcagacccccacgcggggaccccgaggcttccgacccccccagggtggaccccgagatctcagacccccgcaggagtacctccagacctcaaatccccattaaggcacggaaagagactccggatccctgagggaacaattcccctgaaggggcatcccaggaatccgggccacnnnnnnnnnaccccgacctcccatttcgggcatcccccggaagcccgatgggcttggcactaccccattggccccggccaccccccgcttggagtttaaaggggttgggccctcccgcttggtccccccctggcggggaacccgggcttcaaacctggcagcccccgcggatctccctggcc

SEQ ID NO: 452634 - DNA, 1181 bp, Homo Sapiens
  misc_feature (116)..(124): n is a, c, g, or t
  misc_feature (131)..(162): n is a, c, g, or t
  misc_feature (182)..(196): n is a, c, g, or t
  misc_feature (279)..(310): n is a, c, g, or t
  misc_feature (357)..(449): n is a, c, g, or t
  misc_feature (492)..(504): n is a, c, g, or t
  misc_feature (515)..(516): n is a, c, g, or t
  misc_feature (519)..(676): n is a, c, g, or t
  misc_feature (1084)..(1084): n is a, c, g, or t
  misc_feature (1099)..(1099): n is a, c, g, or t
  misc_feature (1132)..(1132): n is a, c, g, or t
  misc_feature (1141)..(1141): n is a, c, g, or t
  misc_feature (1147)..(1147): n is a, c, g, or t
gttggcgccgtgttttttccccccggggggggagagagattattattttccaacccgggtttcaaagaggtgggttgtgttaacccccccgcgggggaaacacgatgtcttcccannnnnnnnnttttgtnnnnnnnnnnnnnnnnnnnnnnnnnnnnnnnnagttttggtgtatttttttnnnnnnnnnnnnnnntttaaaaaaaccaacggcgggccgcggggggggatatatattttaaaaaaacccccgggggggcccccttggtttaaagacannnnnnnnnnnnnnnnnnnnnnnnnnnnnnnnggggggggttttttagaaaaaacggcggttgggcccccccggggcgnnnnnnnnnnnnnnnnnnnnnnnnnnnnnnnnnnnnnnnnnnnnnnnnnnnnnnnnnnnnnnnnnnnnnnnnnnnnnnnnnnnnnnnnnnnnngggggggcccccgcccccaaaaaggttttaagaattttttttnnnnnnnnnnnnnccccctccccnnttnnnnnnnnnnnnnnnnnnnnnnnnnnnnnnnnnnnnnnnnnnnnnnnnnnnnnnnnnnnnnnnnnnnnnnnnnnnnnnnnnnnnnnnnnnnnnnnnnnnnnnnnnnnnnnnnnnnnnnnnnnnnnnnnnnnnnnnnnnnnnnnnnnnnnnnnnnnnnnataaaagtattttttaataaatcaatgtatttcaatgttgtaacatgatagcccaatgctatatcaaggtagcaaaagtgaagattcctggtattttgatataaacactatgaatgacagtacacttgcattcaacttcacaagaaattatcttcaggtccatgaagattctttgacagctgtaacacttttcaaacagtaaagatgtacatgtattgaaagagaagacaacgaaagcctactaactgatctgggctctaaaccatactgaagagaaagagatacaatggttgtatggctagcttgctgaaaaaacatctaaatcttttaaagaaagaaaatacagcatatatcaaagttacagagtagcttaccagaaatggagtcataaggagacacacagattangaacccctggaagcnagtgaatgtgtttctacccgtttttgtgatggnaagaagccntgggtntcgagtccctgcagctggctgtgggtgttgaatc

SEQ ID NO: 452635 - DNA, 503 bp, Homo Sapiens
  misc_feature (416)..(435): n is a, c, g, or t
  misc_feature (442)..(442): n is a, c, g, or t
  misc_feature (457)..(457): n is a, c, g, or t
  misc_feature (468)..(468): n is a, c, g, or t
  misc_feature (480)..(480): n is a, c, g, or t
ttttttttcttataaaagtattttttaataaatcaatgtatttcaatgttgtaacatgatagcccaatgctatatcaaggtagcaaaagtgaagattcctggtattttgatataaacactatgaatgacagtacacttgcattcaacttcacaagaaattatcttcaggtccatgaagattctttgacagctgtaacacttttcaaacagtaaagatgtacatgtattgaaagaggaaggacaacggaaagcctacttaactgatctggggctctaaaccatactgaaggaggaaaggaggatacaatgggttgtatgggctaggcttgctggaaaaaacatctaaatctttttaaaggaaaggaaaatacaggcatattattcaaggtttacaggggtagggctttacaggaatnnnnnnnnnnnnnnnnnnnnacacacnggtttaggggacccnggagggcggtngattgtggtttnctaccccgtttttgttgttgggg

SEQ ID NO: 452636 - DNA, 473 bp, Homo Sapiens
ccaaaggacaatttcttgagacccccacacaccttcagaaccacacattctgttcatgttaaaaacaagaaattaacaacctctaaagctaaggacaatgattctgtaaagtgcaagaatggttcattgtttccgcttttgtggatttcatgttaagaatactttaaaagaaagggtgggcgggagtaaaccaggaccccagtcatatatttgatcaagaaatgacccgtatggcaaaggtgagacgtggaccagccctcaggtgtctccaactctgtgcacaccactgaggtaggagctctagaagaaacgcagaccctctcaggggggttaaggtttcctcttggcaaatgagctgggggcctgagacagtcatacccacgggctgcatgcaactttgcatgcaacttcacgaaattctagagctgtatcacatcagcgatggagaagggcaagatccaagacaaagccgc

SEQ ID NO: 452637 - DNA, 397 bp, Homo Sapiens
gagggtgagcaaagagctttttattcaaagaaagaggcaaattgcacccaatctctctccctgtaagatctcatctggttttgacatcagttgcaatgctttcagtttgaggctaagcagaatgttatgctgtgaatggtcaccacagagagaccactgtgttgctggtgtggggaggcgaggctcagggttggacaggttaattacctacataaccctgggctgtggcccagcccagcacctcccagaacagggactgacatgggctgagggtctaccttgggagatgggggtcagtgaagagggggaggcagggtcagcctctgtgcaagtaaaatgccccctcaccccagccttcctttccagagcaaccaattttgaaaacagaattgccttt

SEQ ID NO: 452638 - DNA, 166 bp, Homo Sapiens
agactttttttgtaaggttcggcaattttctacggaagtccagcccgctgtgagtccccgcctggctagcgctgcccctgctgctgctgccgcgccacccttgggaaccacttcccgagcttatgtgtatataaatagttatttattaacatcattggtcattttt

SEQ ID NO: 452639 - DNA, 587 bp, Homo Sapiens
  misc_feature (116)..(125): n is a, c, g, or t
aatcactgccaattacttttgaacagagaacatcatatgtaattagaggaggcgggatattgttggtgcagctatatcattcaaaattggcagaagtcctgaagctggtggggctnnnnnnnnnnttggtggaacggcgtatgttgagacctggaatagcttctctggaaggtgctctaaggcagggggtagagtagtacataggtagtcaaatgatgaggctgagggtgtctaccaataacacaacgccacagagcttccttggcacacttcccgctgctgctatgtgggatcctgtctggctcgcttaggattctgcaggtcaccaggtggtgaggccttgcttgctgagatgctccggagagaatgcaagctctgcgtctgctgcaggcgcagggcgagctcccgctcacaggcctcctgaacagtctccgtcttctttatgtcccagttcaaggcaacagccagtgctttggggtcttccttggtaaccaactgcagcaagaataaaaacgcctgagaactgggccttctgtgcgcctcctcgtgccgaattcgacacccagcctcgtacctgccgtaagtca

SEQ ID NO: 452640 - DNA, 144 bp, Homo Sapiens
tcagggttatggagcccttttctttcccagcttctcatctgccaattttgaatgatatagctgcaccaacaatatcccgcctcctctaattacatatgatgttctctgttcaaaagtaattggcagtgattggccgggcgcagt

SEQ ID NO: 452641 - DNA, 498 bp, Homo Sapiens
tttgcgaaaatactctgtttattaaagaccaggcggagggaggtaaggttgtgggttctgtatgggaaactgagtcccagccccagggagggagaaggaggacggaccagctggcagcctgcgagaggtcacaggtcagtggccggaccccagtcatagccgtcttcatcggaggactccgcatcatggactcgcgtaaactttttcttcagggcttcccgttcataggttcgcatgctgtcctgtcgccactgtccctgggggtggcggctgtccacctgggccccctgatgagccgagattctcccacgatccctcagggctctgggactcatctgcctgcacgggctccgaggaccgggccagggctggagccgggggctcatcatccacatccgtgtagggccccccctcgccgtctgtgtagccctcgccatccgtgtacgcgccgccctcgccgtccgtctcgtagtcgctgttaacgcggctgtcgcagcc

SEQ ID NO: 452642 - DNA, 747 bp, Homo Sapiens
  misc_feature (48)..(65): n is a, c, g, or t
  misc_feature (73)..(233): n is a, c, g, or t
tccttggggggcccccgccccacaaaaaagtgtttaaaaatttttttnnnnnnnnnnnnnnnnnnccacaggnnnnnnnnnnnnnnnnnnnnnnnnnnnnnnnnnnnnnnnnnnnnnnnnnnnnnnnnnnnnnnnnnnnnnnnnnnnnnnnnnnnnnnnnnnnnnnnnnnnnnnnnnnnnnnnnnnnnnnnnnnnnnnnnnnnnnnnnnnnnnnnnnnnnnnnnnnnnnnnnnagatgataaacattttattacactaaaaaagtcatctgttaactgctgaactgcagggggaccacatgtgaggctacttcagaaaaatggcatcagataacatatatagatttctggcattataaaatggctagattctcccctaccttccctcattaaatattaatcagtggcttaggtcagttctagtgggaacacttaattgctgacttcacataaaaccaggattagcctaatgtgccaatggtatgagtccattcctgggccatcttcccaacagccagaccgctgtggcttggacaccggaggcaacatctggggggcctcagttccactcctctgtggtgagcttgctcttcctaataactggctctggagtcacatcaacaatggtggcattgccatctggggcccacatgagccctttggggcgtgctgcatccctactgggctgcggtggggctctgaggttgggaccagcagcctgagcctggttccacttcactacacagca

SEQ ID NO: 452643 - DNA, 462 bp, Homo Sapiens
aacaatttttccagatcaattttatttaaaaaataagttgacagaaagaagcaaaagcaacttactaatatgtcaaacaaaacacaagtaccaaacctaattcagcacaggtaacataatataaatcaacaaaaattcgattaaatatttcacactagataaaaagtagggtgttctatttcccctacaaaatatggaagctgacttttcaattacattgttttacatgctctaatcacaagtactaccatgtgactattcactgtgtgcttaggtaactatggttatattttcagaaggcttgaagcaaaatactagtgactcactattcagatgtacagagtcaacctgaggtacactgcctggcaactatcttaatatagtttaagaaattacgtataaaagtgaaatgagaaccactgaaactaatctatcagatatatgacatcaccatcaaacacc

SEQ ID NO: 452644 - DNA, 321 bp, Homo Sapiens
  misc_feature (193)..(280): n is a, c, g, or t
  misc_feature (292)..(292): n is a, c, g, or t
tttttttacaaccaacaaatgtttaatatgcagcaaatgaaaaaatcatgtctaggatactcaacccaagacatgagcacatcatgtacaaattcattgtaaacttacaaaataagtttcaaaatttctgcaagccctcactatacaaactcagaatcctctttatttttgagacagggtctggctctgtcannnnnnnnnnnnnnnnnnnnnnnnnnnnnnnnnnnnnnnnnnnnnnnnnnnnnnnnnnnnnnnnnnnnnnnnnnnnnnnnnnnnnnnngtagctgggganctatggtatggccaccaagcccgggctga

SEQ ID NO: 452645 - DNA, 185 bp, Homo Sapiens; identical to SEQ ID NO: 63937

SEQ ID NO: 452646 - DNA, 1234 bp, Homo Sapiens
  misc_feature (32)..(32): n is a, c, g, or t
acaagttttgtatttgggaggggtgtttgttnttctttagagatcatacctactttcctgcctttttgataagtaaggcatgaaatgaaacaaaagttttgagctgtaaggtgcctataaaggatgtcactacagcattcacaatgctaggtgtgtaagatgacatggctgttaccatgtactaaagaaccccatcatgtgagagatcgctcaaagtcattaacacaaagcagtgaaaatcatccagcaaagcagtgcttatgagagactagaattcagagaaatgcaaggtacgaacttctctctaatccaagggtattctgctgtgatcttctaatcagtgatgattggtgcttatgcacaccgacatcttcatgggagagaccaggctgattgcaaaataatgacaaccaaccagtttacctcaacataactcactctgcaatgtcagacatgcagtgtagagcagtcacaaagtcaagccatgaatacagggatggaaaaacattccagtgagctggtctctacaatttttaagacacttcatcctcccaattatattctttgtcataaagaggaaaaacagcaagattattaaatccaaaaagtcacagatgtcacaaggggatgaaataatttcctcattttttttctttatcagtgtaggaaaagctgtctttccatagcccacactcataatagcacttcaactaggctcctttgaaaatgaaaagtgaacaagtttcctaatgctggccttataagatctaaagagatgattaaattcaaaccaggctgagctcttactctgagctatttcagccactgatgtttgtaaaatataggaagaagattccaataggcaatttgcattggcaagcactggactacagaattcatcactgttttctgaaaaaatataattaaaccttaatggaattatgacacttttatgaggtttataattcacagccacctctcatcatattttgttcttctttccatttttaccatttcaaatattgcaatattgcccaccataaaccactgaaaatgattatttatgtatattccatttatttctctagggggtctaggtaatttgaatcaggagctccaagtaccatttaaaaaggtgagtctttaaaaaccatcagtgttttaaacacttgattagaaaaaagataacagctccttgtagtgatctagcttatgtgctttatggtatctttcc

SEQ ID NO: 452647 - DNA, 587 bp, Homo Sapiens
aggccgtgtttgagttctggctcatcttttttgctaatttgctcttatgcatatcacccaacctcgctaagccagtttcataatcagcgagaacagcacactgacatgcagggccagctcaggcgctaccacgagctacacatccgtccattcgtttaatcttcacagcagccctggaggtcacccaggcatggaatgcacagctctgccagacagaaagcgctttggatgcctgagaaacaacagcttgtccgggctactgatgcgaagagaggccatggtttcctttttctctgctctgaatggcagccttgacgtcacaacagctaggaaccactggagggacaaataacaaggcgcaagccagaagcgccctgctctgtcgcaggggcagggccattttcatccagttctgatgtcttctgtggccgctgcgagtcggcgggagtagagacaaatgactggagctttaggcgtaaaggcggtctctctctaggctgatcaaacagccctttgcccagtgctaattgccttcacggaacctggataaactacagttcccgaattaaacttgtttctgatgaact

SEQ ID NO: 452648 - DNA, 1160 bp, Homo Sapiens
  misc_feature (340)..(348): n is a, c, g, or t
  misc_feature (387)..(395): n is a, c, g, or t
  misc_feature (516)..(524): n is a, c, g, or t
  misc_feature (722)..(722): n is a, c, g, or t
  misc_feature (936)..(936): n is a, c, g, or t
  misc_feature (1002)..(1002): n is a, c, g, or t
tctttgtaaatctgaatgaccataatagaaatacatttcttgtggcaagtaattcacagttgtaaagtaaataggaaaaattattttatttttattgatgtacattgatagatgccataaatcagtagcaaaaggcacttctaaaggtaagtggtttaagttgcctcaagagagggacaatgtagctttattttacaagaaggcatagttagatttctatgaaatatttattctgtacagttttatatagttttggttcacaaaagtaattattcttgggtgcctttcaagaaaattaaaaatactactcactacaataaaactaagatgaccagaacgnnnnnnnnnggagcaacatatgtcaatattacgtgaactaccggtagnnnnnnnnntcgtaccccgcttgatcccagcccgacaactaatagacacgccccccctgtgtggggccgccctccggcttcttagaaagatatttttttagaacacctcccgttctggcgcgccccgcgnnnnnnnnngtagggcaagaggaccaagttggggcaattgtcgctgccgctccctaaagggaaccccccccggttttcaccgcaaatgcaggcgcgcccggtgaccatcttccccccccgcaacagacaaaatacagcggccccgcgggggtgggacaaaaacccgcggtcgcctggtctttgagagaacacaaatacaccccctcntcaatgatggagggagagtattctctcagcggggcctggcctcgcgtcacactgggggcggccctctgctcgcccgcccatgcaggggggtgcgcgccacccgtgcccagaagcgcccccattatcttgtcaaccagtttctccccgcccccgcccccgcggtgttccgctgccgttttaatccaacgcgcagtggtgttggccgcatatttanatgtccggcccagttgttttccgcgcgcgccccacatgtggaagaacctcatctcccccgcacacncggctgttttaacgacaatacttcgcgaaaccatgcccgtccgggggcacgcctgtaagcgccactctgctgccgcacttctcgcacgtatgaaataacttcccgcccaccgagagcggaaaaacccgggggcagcacagatatcttctctcgtcctt

SEQ ID NO: 452649 - DNA, 432 bp, Homo Sapiens
  misc_feature (346)..(346): n is a, c, g, or t
  misc_feature (387)..(387): n is a, c, g, or t
  misc_feature (406)..(406): n is a, c, g, or t
ggtttaggaggtccaaggttttttattcacttgttcatacaatcacattagaataaatgcatcatataaaagttcatgctgtcagtgctgtaaccattaagtaataacgtttcccactttttctgaatggtccaccagtataaatattggtattacaaacctataaatgacaaaggaatattcttatgttttctgagttatattatgaattataagatgagaatagacctgccaatattcttcacatttgaaagtttcctaccagcataaattccccgatgttcaacaatgtttgagccacacacgaaggcacttcccacactcctcaggactcttaggggtatancactgcatatgttttctcaggtgcactttaaggggctgganctgtatctaaaggtttttnccacatttttttggcctttaaagggt

SEQ ID NO: 452650 - DNA, 922 bp, Homo Sapiens
  misc_feature (190)..(440): n is a, c, g, or t
  misc_feature (656)..(657): n is a, c, g, or t
  misc_feature (874)..(874): n is a, c, g, or t
gggagctggtgggcgggccggatgtagccgagcgcggacagggctagtccggacagagtcccagagccatgggagcgaaaagagactgctgcggattaaggaggcctttcggttggcgcagcagccacaccacaaccaggcgaagcaggtagtggcgctgaatcgctcctgccgcgggagatagagtttnnnnnnnnnnnnnnnnnnnnnnnnnnnnnnnnnnnnnnnnnnnnnnnnnnnnnnnnnnnnnnnnnnnnnnnnnnnnnnnnnnnnnnnnnnnnnnnnnnnnnnnnnnnnnnnnnnnnnnnnnnnnnnnnnnnnnnnnnnnnnnnnnnnnnnnnnnnnnnnnnnnnnnnnnnnnnnnnnnnnnnnnnnnnnnnnnnnnnnnnnnnnnnnnnnnnnnnnnnnnnnnnnnnnnnnnnnnnnnnnnnnnnnnnnnntgataaattgaccatcttataccaggaagtcaaatgagaagacatcagtaaaaatattctggccaactcatgttttatttatcatatcttcatcattaattgcttctcataatgccacagtttgtcatggtatttgtggcagcaggcaaagtccttgttcagactttgattaaattgctgtggcatttttctattaaaaagatctcctgtttcacnngaccagcggcgcaagagaacacgaaccaagaggacgaaaggagaggcggaagaagggagaagaagacagagggggacggaggtagacggataaaaaccccggccccgccggaaaagagaacccttggtggggccccctcgggcccctcgaaaaaaatttttcaaaaaaccattgctttttggggcccccggggccccccaaaagagaaaaaagggangaagggggccacaaagggtgggtcccccaagaagaaaaaccccggggc

SEQ ID NO: 452651 - DNA, 812 bp, Homo Sapiens; identical to SEQ ID NO: 324548

SEQ ID NO: 452652 - DNA, 438 bp, Homo Sapiens; identical to SEQ ID NO: 322628
  misc_feature (345)..(385): n is a, c, g, or t

SEQ ID NO: 452653 - DNA, 728 bp, Homo Sapiens
tagatgttgtgtgttgtttgctggtttcgacttcgaaacactaccgtctggttttctgaatctgtggactttgctaaagtagtttcatcccaatgtacaggaaatacaggaaattataatcagcccacacatcaaaaatgatagtatacccgttagcttcttcaatactaacatatatagcttcatggtagcatgtataaaaatgttcagcagtaccaactgccaaaccagtgtcagtggatagtacagtcagtcctaaagaggcagcaccccattaaaagaaagttgcatctattttgctcagttgtagccaagtgaacccatgctaccaatttcagatagaattgttttaagcttatttaagaaaaacaacagcctattatcaaaaagtaaattactgtttgaggctacttcaacgtgaatggagtctttcagtgttggtgctgggttttcatgctagaggttaaaattttaatctacttaagtaaaaattttttttgcatacccaattaaagacataaggcatacactgacattcaacatattccaaacaatatggcaaccatctgactttttagtcacacagttaacgtcatctttacaaacacccaaccagttcagtcaatttggcaattttggaggaaaaggtcagtatgatggtttcattgacaatctggcaaaaacactaaaatggttgaaccaatgatctatctactttacaaccatcc

SEQ ID NO: 452654 - DNA, 279 bp, Homo Sapiens
gtgttcgagctctgcctctcgttgtttgtcgcttttccactgttgctcccccagggtcacagggtgggctagaagtgtcttcagatcctcctgcttctctaaagtaacagcagcttcatactctccatctctgaaatcctcaggaaggaattcccctgcctccccattgccattcttctttccagtgaccagttcctctactttcagtaccatcatgttggctgaaggagtcttgtatgtttttctgtcgtggaaggaatccctggagttggccctccc

SEQ ID NO: 452655 - DNA, 950 bp, Homo Sapiens
tggaacgcgccccgccttgccagtgggaatttcatttttgggcacatggcccgcagctgggaatgggacccccccctgggagcccggccacgggttggggggggctgtaacccctggcgtcccccgtggggcatgaccaggggtgcccccgagaatggggttgggggattagaagtggccattacttgggcagccccttcctggatgaatgccgcccaccagttggggggtggcgggaaggattctaaccacctgttggtgctccaggggagagtgggaggccctgagatccggcaaaaggttttggtaaggcttgttgagccccagtgcctggtttgagtgggctgatacctacctggcccaatcctggttgtggagccatgttcaaaggttgaccatgctgggccactgacatcatggctggccttggcatcccagactgtagttgctggggctgaggcaatcctccttggctccagggtggctgttgctgcatccctgtcggtcccttccctggctccaaatgcccactggggcctctggtcatgggagttgggtttcatacccatgggggccatgggagtcatcgggggcatctggtgttggattggcctttgaaaaatttgcacgtgggccatctggcgctgcgtctccgctgctctctgaatctgcattgccatttccactgctgcaggtgggggccctggaaggggtggctgagcagtctgaggaggggttggaggggtcacctggcctgctgccttaccctgggacacagggccagcagcttgagtcctgggcaagtagggtggcatgctattgggaggggtaggctgaggctgagaagtgggctggggcgtctgcggggtggttggctgttggccagttggtgtcgttggagtggcaggagtgggggaagggagcctcgtgcggaattcgccacccaggcc

SEQ ID NO: 452656 - DNA, 1320 bp, Homo Sapiens
aagcagcctgctgagaagtgggctgtggcgtctgcggggtggttggctgttgttcagttggtgtcgttggagtggcaggagtgggggaagggaggccctgttgctgcccaaccacaccagtccgctgcatgctggccatcctcctgcgaagcatttgggcctgctgtagtcggtgctgcagctgttgctgccggagcttctgcttgatgtttaggcagaacggcaccgggcatttgttctcctggcagtgcttggcatggtagcagcagagggcaatgagctgcttgcagatggggcacccgccattggttttccgtttgcaacccttggtatgctgcacaacccgcttcatcttctggcaggatggcagtgagcaattggcattccgacactggcaagcatggaccagagactggatgcagcgctggatactcaggcggcgagaatcgcctgggcttctgggtggctgcagcctgctggttgttgctctcatcatctaagccaaggcctagtttctccattttgtggtcatggtttttagtgttatagcaggtgatacacaagtcataatcctcacagacagtacagtgccagcgtgtctccacatggtgcttgcattcattgcaggtgtagacaaagcggtcctggctctgcgtgtgcagctccaccagcatgcacatggtggaccactgggctcttcggagtgaagagaactccaggtgcttgtcccttgccagcgtgagaaacgcatcccgaccatccatcagatcgcaggggatgagaggatcaggatcaacaatgggaggcagggagttggcagcagggccagcaatgaggcggatcacaaagaagacctctttatgcttctccatggtggcatatagtttctgtgagaggtcgttagatacattgggcatcccgggtttcttcttgttgcccctactcaggctgctcttatttttgctggttttcttattattcttctttttagcatttttgctgtctcccttggtcacatctgtgctttcattgctggtgttttcctctcgttttctctcttcttcctcctgttccagttccttaatgctttcttccagaacattgggccagaaatcaccctcgaaataaggcaattcctttgcacttgttaatctatcttcagtagcttgtttaaaaatatccttgtagtcatggacaatacgctctgatacagccttgtcaagcatttttttgtaccattcctgcagtcgcttgggcttgggtatcttctggtcaggaggatggcaatggaagcctcgtgccgaattcgccacccaggcc

SEQ ID NO: 452657 - DNA, 459 bp, Homo Sapiens; identical to SEQ ID NO: 145453

SEQ ID NO: 452658 - DNA, 1358 bp, Homo Sapiens
  misc_feature (96)..(96): n is a, c, g, or t
  misc_feature (1298)..(1315): n is a, c, g, or t
tgcatagggtgaggggctgaatcgccggctcgtcggggcgcgctatcgttccgacggggcgagtatcgctaagccgcgtgcgcggactaagtgtgncccatgagtgggtcgcggactacgatctatccgcgttcgttgttatcgtatatgttatattcagtcgtgctgctcatacacgtcacgtcaatgtctgtagtgtgtgtaactgagtaatgctagagattgtggagggttgtgagggggggatatggtagattgtagtagatgggatcggagggtgagtagaatgtactggggtctggagatgcgaaatgaagcttaaggtagaggggtcagtgtgggtacttatggagaactagaggttgagttagaagaccggatggggtggtggcgggtgatccggggagcggttgatgcgtgcgagggtagtgggatttccggacagtatataggacgaggggtcttgtgagtgatacatcgtaattgggattagcgtaatcgatgtttgttagtatgtgtagggatgatgtaagtgaggagaggggtggcacttataaggtaggagaggggcggtgctacggaatggcttatagtagaggtgttaattgggtcctgttactgattggtagtaggggggaagagggttggtgagtaagtgtggtaggatagatataatagtatgaagcgtagtgtgggagttgtaaggttgatatgcgaaagggaggtaagcagatagataggggtggcgttatataggttgggaaggtgggggaggtaataagtgattgtgaggccactagttgggagagggaagtcccgaggtggttgtggggcgcgagtacatcatgggggagcataatggtggttgtggaggtgaggagacaggggccccccccatgaaggggctgcaggcaccatgagttatgttaacaaccccagtctgtactacagaaagggctgcagccacatgagaattcagtccacacaagccccatggccgtgttccccacttcagccacagggctcagggagccccatctggcgctaaggggaactgctggggtgtgggtgacacctggcctttggcgttctgccttggggaggtttctggttttgttacggggtggaagaataggacctgggggtctcggatgcaacctgcagaccccgtggctcacccaaccccaggttctgcctcccagaccagaacgggcatggcctggtccttggcaccgaggtgcctgctctgtaaatatcaagggattaccactttaataataaagcagaacttgaaaacnnnnnnnnnnnnnnnnnntcgagactagttctctcctcgtgccgaattcgccacccaggcc

SEQ ID NO: 452659 - DNA, 1234 bp, Homo Sapiens
  misc_feature (108)..(108): n is a, c, g, or t
  misc_feature (155)..(155): n is a, c, g, or t
  misc_feature (275)..(275): n is a, c, g, or t
  misc_feature (376)..(376): n is a, c, g, or t
  misc_feature (461)..(469): n is a, c, g, or t
ggtggtcggagcgcagtcgattctaactcgttacgggcagcgaggggtgaacgagcagcgttacgtgtagcgtgacagcggatctgcgctctggtcgcgcgtcggccnaggcacacgcgcacgagtcgcgcggggcgcgcgagtcactccgcagnagtacccgacgccagagccgggcgccgtagtgaccgtcggtcactcgccgcgtggtgtggcgccggaagcgcacgagacgggcggcgacgtcagtggccggacgtctggtggagcgccgncgcacagccggcatccgcgcgtgtgtgtaggaccacgtttcgcccgcagaagatcggcgtgacgcggcatcatctctctcacgctcgtgccgggcactgtntcggctctaccacacatggcggctgtcgctgtcagcgagctcgggtgccctgcgcgcgccgctcgcagggggcatatcccgcgcnnnnnnnnnccccgcggaagggagagggttcggcaaccacactccgagaccttcgcagggcgcgcgctcccatgatgcggcaagcaggagactagaaggtgaggcactagatacaagaggggggcggggcggaacacgcccgcccgaggcgcgcgatagagacgcgcgagcacggcccggcagcagcggcttcgcgccaccggcgcggagagcccccttatcgctcccccgcgctcccctcacggacacgcccctccttggtccggtgggggggtccaggcggcagtgtagcagccagcgccgcatcgtcagactgaggtggggcctgcgggctccgccactaagaccactggagaataggcgctagcggttcgcgacggccgggggagtgccgcaaccaacccggcccgcggacaattgcgggggtgagagtgttcacgacccagtgcccccccgcgttcagtggcccgtcgcgcgcgtaaggcgaataaattgaagccatttgtttcctccagagaaaaatgtctggcgcttggaattttcaagctgcaagtagatgtgcaccttttccaaagatctttcttttccttcgcttcctcacactgggcacagcaaaacatctctgccttcttttcacgggaagtgaccctcctccccatgggtcaataagttaacgccaaatcgcggcaaaacggcgaattccatctctgaggctctagaagctcaatcttctgggcccctggctcctggcctcgggtcctgctggtgcccccc

SEQ ID NO: 452660 - DNA, 523 bp, Homo Sapiens
  misc_feature (19)..(19): n is a, c, g, or t
  misc_feature (28)..(28): n is a, c, g, or t
  misc_feature (42)..(42): n is a, c, g, or t
  misc_feature (74)..(74): n is a, c, g, or t
  misc_feature (86)..(86): n is a, c, g, or t
  misc_feature (111)..(111): n is a, c, g, or t
tgggattttggttaccccnattcctacngaccccaaagccgnacccctcgaaaaaaaagatggaaccccgccanaggatgggctcnttagcctgaaaataccttctgaagnaaaaagatcctataaagatcagatggaatacatgttgccagaatccatgtattcccctctcttccagcagtgaactaggcctacatgagagcaagggcttgctgggtacttcactatttttgtgaagtgaagttcaaaagtgatcagaaccttcaaacagccttagagctaacaagaagatgtctgattgatgatagagaaatgcctgtgaaagtggaagctgtcattgcccttcaagtattgatcagcaatcaagaaaaagctaaagaatatatcacaccattcatcagacctgtaatgcaggctcttcttcacattataagagaaacagaaaatgatgaccttaccaatgtaattcagaaaatgatctgtgaatatagtgaagaagttactcctattgcagtagaaatga

SEQ ID NO: 452661 - DNA, 329 bp, Homo Sapiens
  misc_feature (276)..(276): n is a, c, g, or t
  misc_feature (281)..(281): n is a, c, g, or t
ggttggcattatgaaaatatcttttaatacatttatttagcaagagaaaaattatcagaaaatgagaagcaccatttatagttcacaagaaatgcaacatggactccaatagaagtagatatcaataactgatacttcctctgtttatgaccccaaacatgctaaaatgctaaagtaatgcttgcaaagaatatgaatgacaaatgttatccagcagctttttggtttaaaatgattgccaatgactagcagcttcaatgggttaacagtaggganggaanaacccttcagtacctaacaacggctgctgtctggctcccaagtgggct

SEQ ID NO: 452662 - DNA, 471 bp, Homo Sapiens
atagtgcatgattattactgttattatttatttttaccaattttaattaaaatattcacttatgaccaccttatacagttctttggaagattgtttcatagcacaagatctaaaagagaaattatatttcatgttagaagagaagggaaaaaatagctttcatatagaaccagataaaaaagaagaccaatgaagtaatatgttaatattttacttggaaaatacataaaaggctgataaatgataagataatgctatttaaattaagcacagtgattggaatactatttatagagcagtataaaacatgttctccatatgccttctccatggacctctaagatgttagaagagacattagtaggtgaaatgtaaggataggtagttcctttttcagcgaattgagaggcagggaaacacagtggcaaacacaggcaatatccattgttgcttaagaaagtgaagattttc

SEQ ID NO: 452663 - DNA, 422 bp, Homo Sapiens
  misc_feature (329)..(329): n is a, c, g, or t
  misc_feature (351)..(351): n is a, c, g, or t
aagattattctaaaatacaacgtttattaaaaaaacatgcgatcttgccaataggcaattccatgagaacaaaagattttttttcccacctacaagtctttttagagaaacaaacggaactatttccagatgaggcggggtgtctgggaggggctgtgggtggtctggggctggtgactggtgaggttgggtggccctctgggggtccgggaggcactttccgttttgcttctgttggagatgttcccgtcggatgctgaagaacaagcctgccggctgggccactcccgacctggggctgtggcacccgtttggccctcgcccttccntgggccttgagaaaggggagtnagaaggagccacttgtcctgatatggggcaaaacttcgggggtcactggtctcatgcttccaaggccccgt

SEQ ID NO: 452664 - DNA, 286 bp, Homo Sapiens
tttgttttttagcatccagaatacagggtacttgaaatcatttctgtaatatgcttcccaaacaggttttggaaggtagtctaggagctgtaatcacttattgctgtgtgtcttcaggcagtgttctctgtcagaggctcggagaaggttctcttgcttcttgtagctttgtgaggatccacctggcatcctctggggtcttgaagttaattatttttccaaactctctggcatgaaatacagacttcactcgttcctttgcttcaatgcgcaatcttctcccatg

SEQ ID NO: 452665 - DNA, 858 bp, Homo Sapiens
gcacgtccttaatattttacttccacatttacatttcccccaagtgacaaagaaatgataatgctttgcatacttaaaaaagtctctaagtggttatataatatgggtgtccgcttctacacattgccctttcgctcagcactgtgtttttgaaatttattcctgttgatacatgtagatgctgtttattcattttcactggagcggagcaagtatgccaaagcttgtttatctgctcttctgtcggacgtttttcttatcacaaatcccaccgcagtgaacactcctgtgtgtttcccggtgctcacgcttgagagtttcccaaaggcgcttgcctgggccctgagagacggcaagcttcagcttcactgggtacagcatggtcacaggctgctcactcaggagggcttagtttttcaggtggggctgactgtgacagccacacaagagtcacagggcatagacatcggaagccgtggcactcagctgggaaagccgaggtcctttcaccaggactccgcagatggtgaagacagtggaactccagagccctgactctgaggctagagccagggccaacccctcccggccctcgtgactgccttgtcctgagtcatggctctcacttcctcccacccaccaccccactcttggtagaattttgtttgtgcttctccgggggtaggggctgatttcccctgagggcagagttcctcccttttcccactcaggatttcagggactcagggagtggtccattcctggagggaggaagtgaatggcattcccaccctgggaccctggctgcagggagcagcggatccctttggaatttagatccgcgggaattccggaccg

SEQ ID NO: 452666 - DNA, 417 bp, Homo Sapiens
  misc_feature (314)..(314): n is a, c, g, or t
  misc_feature (372)..(372): n is a, c, g, or t
gcccgattctttccttttatttgccaatttttatgagtcagtgccttacaacttccaaaggtaaacatgaggcttctttccttaagcatcatcatgaactcttagatgttcatttattcaacacaaactaaaaaaggaatgttaagtcttaagatatcattaatactaacttgcattacttgtttatgaaggattaatatactaaatagaatatatgctcacatttttatatgtagatattaatttacaagtaattaacatgctaaaacattttataattcgcttcaataacgtggtataggataacacaaaanttaactctgggcctaccttagggctacatgatcacaggccaggctgatgtaattaaantggggaggttttattccttgggggctttcctgggccttttatttt

SEQ ID NO: 452667 - DNA, 733 bp, Homo Sapiens
  misc_feature (376)..(385): n is a, c, g, or t
  misc_feature (418)..(431): n is a, c, g, or t
  misc_feature (456)..(539): n is a, c, g, or t
ccgccggccgaattcccggggctggaggccccctcccggttttccatttggcgcccaagggcccatatggggacaattgtctatatccgcggtgtttttcttccaggggggagaatattattccgcaagggcaagcaagggtgtaggagactctctacacgattccaggtttcattcggccgggtttggggatgaatattccattttcggcacctacgtggtaacccatgtgcatacagttcagaagatgagtgtcagccccccggcgttatttgttttggagcctcgcatggactccggttgatagatctcagtaaggacctccagaactccatcctggacttgttcttcaccgggtcggttgccaccagggcgnnnnnnnnnngttattaatccaagcggctagtcaggaccaggnnnnnnnnnnnnnncaggtttgacgcatgttcactttcnnnnnnnnnnnnnnnnnnnnnnnnnnnnnnnnnnnnnnnnnnnnnnnnnnnnnnnnnnnnnnnnnnnnnnnnnnnnnnnnnnnngcattgtcataagctgggttttatttcaaactcaattatacaatgtagcaatagtaaatattaaaatgtaatgctaactcaaaacttgtagaatgccttcactgaattttggtataaagagtaaacaaaacttattctgcaaaaggattaggaacctttttatgcaaaaatgagtattttattttgtcagcact

SEQ ID NO: 452668 - DNA, 665 bp, Homo Sapiens
  misc_feature (248)..(380): n is a, c, g, or t
  misc_feature (382)..(382): n is a, c, g, or t
  misc_feature (386)..(387): n is a, c, g, or t
  misc_feature (391)..(391): n is a, c, g, or t
  misc_feature (399)..(406): n is a, c, g, or t
  misc_feature (416)..(416): n is a, c, g, or t
  misc_feature (444)..(444): n is a, c, g, or t
  misc_feature (447)..(447): n is a, c, g, or t
  misc_feature (474)..(494): n is a, c, g, or t
  misc_feature (501)..(552): n is a, c, g, or t
  misc_feature (561)..(578): n is a, c, g, or t
ataaaccaaggggaaatggtattgcccaaagtgcaggggagataatgagaaaacaatggacaaaagtactgaaaagacaaaaaaggatagaagatcgaggtagtaaaggccatccacattttaaagggttatttgtcttttatataattcgtttgctttcagaaaatgttttagggtaaatgcataagactatgcaataatttttaatcattagtattaatggtgtattaaaagttgttgtactttgnnnnnnnnnnnnnnnnnnnnnnnnnnnnnnnnnnnnnnnnnnnnnnnnnnnnnnnnnnnnnnnnnnnnnnnnnnnnnnnnnnnnnnnnnnnnnnnnnnnnnnnnnnnnnnnnnnnnnnnnnnnnnnnnnnnnnanaaannaaanaaaaaaannnnnnnnaaaaccccanaaccccaaaaaccaaaacacaaaccccnaancgcgcggtgcggggcggcgctccccannnnnnnnnnnnnnnnnnnnnccataannnnnnnnnnnnnnnnnnnnnnnnnnnnnnnnnnnnnnnnnnnnnnnnnnnntcccttttnnnnnnnnnnnnnnnnnnaatatgccatcttttttgtcttttgttccaccctccccccctacgaaaatatcgccgcgcggggcgccggacttcccgtctgggttt

SEQ ID NO: 452669 - DNA, 653 bp, Homo Sapiens
  misc_feature (477)..(477): n is a, c, g, or t
  misc_feature (485)..(485): n is a, c, g, or t
  misc_feature (495)..(495): n is a, c, g, or t
  misc_feature (531)..(531): n is a, c, g, or t
  misc_feature (610)..(610): n is a, c, g, or t
  misc_feature (626)..(626): n is a, c, g, or t
caaaaagatgatattttgtttattaaaattaaaccacaatctgtctcctgacatacaaataactgagaagttaaaagatgttgcaaccccaacctaatttcacaagtgttgttttcatctccaatcttgaaaggtttgtcacataaacagtttagtgaggtcacagtcatgataatatgcgaatcttaaactgattttgaaaaggatgcatcacaggttcacacttccacatctatacaactttattaacaagtaaaatacatgccagcatgttttatatatgggcaaggacattcctatgataatgaatggcacattatcatctaacaattgacctttatcaaatatatgttttcatatgactatttgaagaattaaataataaacaactaataaatgctaaaataacatttaacagcagttaaaaatataaaagccattcagtttagtatttacgataagctggaatcattcaantacaactnttaaaaaaantactattcctcttctacaggccaaatgggttcattnggaaaacactgtgggcaataataactgggctcctgcccttaccccagttccatccctcaaggggcagtgggagctaggntggttgcttcttgggnaacgtctacattttacacgggtgagct

SEQ ID NO: 452670 - DNA, 420 bp, Homo Sapiens
attttcaaaaagatgatattttgtttattaaaattaaaccacaatctgtctcctgacatacaaataactgagaagttaaaagatgttgcaaccccaacctaatttcacaagtgttgttttcatctccaatcttgaaaggtttgtcacataaacagtttagtgaggtcacagtcatgataatatgcgaatcttaaactgattttggaaaagggatgcatcacaggttcacacttccacatctatacaactttattaacaaggtaaaatacatgccagcatgttttatatatgggggccagggacattcctatggataatggaatggggcacattattcatcttaaccaattggaccctttattcaaatatatggtttttcatatggacttttttggaggggattttaaattattaaaccac

SEQ ID NO: 452671 - DNA, 525 bp, Homo Sapiens
ttttttctgttaaattttattatagtaacaaagtgactatttttaataataaaagcagagtgcctgtaggcaagttggatggccctatctcaggccaagtctccttagtgtttcagacctaggctgaccagaatagtcttctagaatgtaacatttatccaccaggtgtcattatttaccaatctgacaagccactgggctgtctccgtgcattcaatggttggaatcaaggctacagaccagaataggagatgaatgaaaatagatttagaaaagggcgttgtggctggaatgcagcttgcagtgtggagggcagggatgggagggtaaagagggctctttgaaagaccagtgtcactttcctgatcaagtttcttaagctgatacttccctggaaggagtcagaacttgggtttgtaggagtagccctggcctccagctgcattgtgctagactcaggtttgaagccccaaatctaagtagtcccccctttgataaattcccggccgggtgcagtggctcaca

SEQ ID NO: 452672 - DNA, 512 bp, Homo Sapiens
tatgctgatacatggattaaattttctttccactaagtattaactatagttttaagcattgattctgcttaataactaaaatgtaaagaccttaccttgtagggttgtaatttctcattaacagaaatctgaacttatacaagtttaactgaaatttatctttatttcaagatatcagaagacatttacatatttgcattttctgtcttgctactatctgcgtatatgtaacagcttttctcaagggcttcaagatagggaattgttttatgcctttgtatcacaggacctaaggggaccaaaattatttgaaggatgggagtgggggacaaaactaggggtctctggcagtccctactccatgttaccatccattaggctcacctctgtagggtattactaaagtccatgagagttaaatccaacgtgcaactttaatattgcaattccaaaaaataaagctgtatacaactcttggaataactcaccaaaataaatagctttttaatata

SEQ ID NO: 452673 - DNA, 835 bp, Homo Sapiens
  misc_feature (332)..(340): n is a, c, g, or t
  misc_feature (454)..(466): n is a, c, g, or t
  misc_feature (475)..(562): n is a, c, g, or t
ggagtgccgccacgtttttttgtatcccacgtggggtcccagacaacgcgtaggcagtggccgcaggggccgggcaagggagcgtgccgggataaccgcgcgtgcgggaaaaagagggggtggcgtgaagacacggtttttaggaggggggtttcctatttctggcaaaaatggtttggagagagtgtcaaccccactctttggcttaatgtcccaggggcgggggtaaatagtaattgcggcgccgcctggcttcccgttggtagatgccccggacggcccctcggaacaccctatggggttttttcaagagctccggttccccccggcgnnnnnnnnnggtgggaagcccagcccttatctagcgccggggttttcttgggaacaactatggccaagttccctttctttctggggccgccgcccccaaggatggttttgaaaaatttttgannnnnnnnnnnnncggcaaagnnnnnnnnnnnnnnnnnnnnnnnnnnnnnnnnnnnnnnnnnnnnnnnnnnnnnnnnnnnnnnnnnnnnnnnnnnnnnnnnnnnnnnnnaagtttcacctatttttattagaaggaatcttgaattcaacatggctttttaaacttctttatttcaaatacacatgaacggtcgtggcacagagaaacagtgatgaaggcacaatcaacaggaccagttactaggttttcaattatagcagcaaatctgaaaataaataatcttcctttaaaaatccaacaagtacctaaaatattactacggataggaatcattcagccaatgaagacattttaaggaaaatatatacaatacatttaatg

SEQ ID NO: 452674 - DNA, 231 bp, Homo Sapiens
ggattagttgagttgctgtcacgtggtcacgatattttgctgctcttatcaaatgatcacacatcttctcatcttctcgtttgtctgcagaatactgggcacacagtgactaactgagatttagtgatctgctgtctcaataaaacatcccacaagaatttacttctgtgaagtcaatcatgagatacactcagaagtggtaaacattcaagtagagacctgaacaatccc

SEQ ID NO: 452675 - DNA, 284 bp, Homo Sapiens
tgaggtttcaccgtgttggacaaacagctttatttttataaaaatgatgggcaagaagattttaaaaatcaaaagcaattatactttgggcctttatgtagtcccaggctactcaggaaggatgattaagccccagagtttgaggtccagcctggggcaacactgcaaggaccccatctcaaaaataaaatgatggaagggacaaggatatttggcaagtgggttaagctcattcagagtattcctaacaggaattcatgtacaactatagatctattcctacc

SEQ ID NO: 452676 - DNA, 432 bp, Homo Sapiens
  misc_feature (363)..(363): n is a, c, g, or t
  misc_feature (417)..(417): n is a, c, g, or t
gatagcaaaagagttttaatcagtagagatcttaaactcaatacaaggcaagaggaaaggacataaaaatcgagcgtgggcttgctaaattcaagatttaaatatattgcctttctttcactacaatcacaactcagttaggtagatactttaattcacattttacagatgagaagattcagagtttaagcttcccaaggacagaaaggtaagtcagtgggaaattccatgtacattccattactaaatgccacataactgtttggataacataagaagagtgggtcattatatgataccaattagaagatattagggatggtggaggcagtaatttctgggataagaactataatttacagnataaccagacatcatctgatctgggtgaaacctggtgcattcccacaattaggntttttcacactttct

SEQ ID NO: 452677 - DNA, 713 bp, Homo Sapiens; identical to SEQ ID NO: 324630
  misc_feature (46)..(76): n is a, c, g, or t
  misc_feature (107)..(127): n is a, c, g, or t
  misc_feature (142)..(308): n is a, c, g, or t
  misc_feature (312)..(322): n is a, c, g, or t
  misc_feature (347)..(362): n is a, c, g, or t
  misc_feature (368)..(529): n is a, c, g, or t

SEQ ID NO: 452678 - DNA, 617 bp, Homo Sapiens
  misc_feature (32)..(32): n is a, c, g, or t
acaggttttggatttattccatataaaatgtngtggtctcagaatatttctggcagggtgacgtttcgaagaagccactgctgggaccgacttccattgcagtctctaatgctgggcacctggctatcctcttctgtggctttatccaggcactgattactgttcacatgctgcagggttaatttcactgggtcatactcccagagttggttgccttttaggtggtggcatttgagcattgtaactgggccattaagtttggaaacatccaagcaaaggtcatctgttctaatttctttgttggcagtataagagaaaacctgattaccccccataccatggcaattaaaaattccaactttttcattctcttttctagccatgttatctagacactgattcgtttccacatttcgtatctctcccaatgagaaatagtgacgtggaatttgagaatcaggatatatattctctaggtaccaggaaaaaggtttgcattgtagttcgtgtcttagaccaactcttgacgatatatctccatgatgctacctttgtacacctggaaaaagaatgtgaagaaatgctggaattctccatcacacttctgccagacgctg

SEQ ID NO: 452679 - DNA, 446 bp, Homo Sapiens
  misc_feature (397)..(397): n is a, c, g, or t
  misc_feature (423)..(423): n is a, c, g, or t
caaactacaatgcaaacctttttcctggtacctagagaatatatatcctgattctcaaattccacgtcactatttctcattgggagagatacgaaatgtggaaacgaatcagtgtctagataacatggctagaaaagagaatgaaaaagttggaatttttaattgccatggtatggggggtaatcaggttttctcttatactgccaacaaagaaattaggaacagatgacctttgcttgggatgtttccaaacttaatggcccagttacaatgctcaaatgccaccaccttaaaagggcaaccaactctggggagtatggacccagtggaaatttaaccctggcagcatgtggaacagttattcagtgcctggggttaaagccacagaggagggttngccagggtgccccagctttaggagantgccattgggagttcggttcccc

SEQ ID NO: 452680 - DNA, 1433 bp, Homo Sapiens
aatggcttggggtgtaagtaagtttaaggccggaggggtaatccactgtttggaaagaacagtttgttaaaatttgggaagggttaggtttgaatattttagggttcaaaggggaaaaaattttgaaaggaaaactggcgggtttttccggaaggttgaaaatagaaattttacaactgagcaagggatccattggtgttgtaagtgcccttccaggggggaagagaagatgcccagtcgtagttggtctccccacagggctaagcagggagtccctccttgggggacagtcctgccactattttcctctgctcaactggaaagctgcacataagtcacagcaagtcagtttcaacattctaactcagttaaacactctcctccataagaagtgaaagaggaaaaatacaaataagctagcactgagactagatgtctagagaagtcggagggactacaagtggtcaggagattcctgaggcagcagaccacaagatgtccccattctggtctgagggtctgcatgccgctacccccaacactgctttcctttactatttcctgatccaaagtggaggctgcttccttccaggaggctgtgagcctctaggctcttgtaatgacagttcaccattgcctaagggaagaaatacggacagttacagttctgggccttcacgctactccacctccacagacagaaagtcaaatgctttgtttctgaaatcatcatgtattttgcattgaagggaataaaaacaggacacagaaattgtttctgatgagcacatcacgtttaactttgtgaatttcagaaagtgatcacaaggctttattctatcaattaacatgagttgatctacactgacaaataagatggagcttgatcttactgaaattaattaggtgattctttgaattgtttttactttaacaatgattggaattaacgccaaaggtagttaagtccagtacacttaaacatggcccaatgacacagcctttaaacttgtcaatattttcctcttggtggtattgaaaaccagtgagcagagagcataagaacagaacttcaagaccgtggcaggagcttgtatttgtacagcacaaaccccagggcagttactgatgtggaaaatccaatgatcttcagcaggccagaaacagagggcaggttcctttcccagaaggtgtgggtgatttctaccgctggaacgtcctttgattcaggttcttgtacccagatgtctttctcggtcaccttcccgagaccatttaagacctccctagctgctcgttctccagcctcaactgccccttccatgtagccgctccactttgtggcagtctctgtgcccgcaaagaaaatcctgcccacgggttgacgaatcacccttccatattgagtcatgatcccaggagggaagtaggcc

SEQ ID NO: 452681 - DNA, 467 bp, Homo Sapiens
  misc_feature (365)..(365): n is a, c, g, or t
  misc_feature (394)..(394): n is a, c, g, or t
  misc_feature (407)..(407): n is a, c, g, or t
  misc_feature (424)..(424): n is a, c, g, or t
  misc_feature (433)..(433): n is a, c, g, or t
catttttcagatttcactttaagaaaattaataaatacagcaaacattaacaacactgtgatgggacgatcatcagaactgtggtaactaatcagcaatagctctcaacctttgcacagcaaagttaggaaatttgactcgttaatcaatatgccatatgcctatctttaaaatacaaaaaaactaagatttatacatcttagttcattagttttaaaaagcatcttcattttaaaagttggcccaattaattatagatttagtctttcttgatgtccacaaagtcttaaaacccacagcactggtaactatcttggcattaaataggttctatacacttctaaaaaaatcatctcagttacaangctttacactatctaaattggcctcccanttccattacctgngttttagacatccaacntctaggggntactgttagaaccccaacctaccaatcttccgtt

SEQ ID NO: 452682 - DNA, 441 bp, Homo Sapiens
  misc_feature (20)..(20): n is a, c, g, or t
  misc_feature (32)..(32): n is a, c, g, or t
  misc_feature (74)..(154): n is a, c, g, or t
agaggttgtaatgagccttngatccggggccnctgcactcccagcccgggagacagagcgagattccctcctcnnnnnnnnnnnnnnnnnnnnnnnnnnnnnnnnnnnnnnnnnnnnnnnnnnnnnnnnnnnnnnnnnnnnnnnnnnnnnnnnncatgatcatctccaaagatactgcgaaagcatttaacaaaatataacactctttaatcataaacacttaacagactacaatgagaagagaacttcataaggaggagctacagcgagtataacacttaatggtgccgttttggaaggattcccatagaggcggaaggaagacaagtgtggtgagaaagtactcctattcaacacggcatcacagggtttggccaataccatgagataggaacaggcagtcagaagagcaaggattcaataggaaaagatgattatctt

SEQ ID NO: 452683 - DNA, 505 bp, Homo Sapiens
gactacttggatctatattgtgaatattggactttgttgttaaacgtttgggtggaaatgaatttgtatcgttttatttttgtattcatctatgattaggggtttgtaatgggttaccgagtatatagtgcgactatgagaataatgaaaagggaattagtacatgttggttaattatacctgcaagacctttgtaattgtattttatggaattgtgtcaaaagtagcttcttctgccaaccttccaccattcaatttagggattgatatgtatgtacagtgagatccatgtaggctaaagtgagtttcactttgtagttgatgctacttgtaccagttctatcattagtaagtcaccgtttaattctgccaaaatcagacaaggatctttctggttagtgcaaacaaggttttccatcctgggcttcagtcagacggccagtgctcagtaggacatgcttgtgatgaattcgcacactttccagttccccacctccaatccgct

SEQ ID NO: 452684 - DNA, 554 bp, Homo Sapiens; identical to SEQ ID NO: 64106

SEQ ID NO: 452685 - DNA, 635 bp, Homo Sapiens
cactgcatcagataaaattcaataagcttaagttacgcaagtgaagtagtcatcatctccttcttctattggttcaccagctgctttccgtttgtctgggtgatgttttacaaccattgctttatgagctgctttgatctgtctctgtgtagccttgtatctcacatggccaagtccaagaactgcataatgatcttggttcttccagtctttgggatcaagtgttttcagcatgggaaactcttccaactgcaattcttcatcttctgattcctcggataactctttcttatcctccagttcctgaaaagaggcagaagcatttctgtttctcctcttaacaaaagcttcaaaccatcttcccacaggttcaacttgacagagtgtagaggcagaggtcagagcgtgggtgatggcggtgccccggccgtccgcggcgcttggcagaagcagcatgatggcgccgggtctagcccggtgggcgcagcggctcacgtcccgggcggagggcgcttagggtcccctccagctctacctctcactccgagcctcgcgccttggctctaagacgcccaggaaccggcgcatggagacgacgagtaagcacttccgggatggatctttcgtggtgtccc

SEQ ID NO: 452686 - DNA, 428 bp, Homo Sapiens
  misc_feature (288)..(288): n is a, c, g, or t
  misc_feature (301)..(301): n is a, c, g, or t
  misc_feature (372)..(372): n is a, c, g, or t
  misc_feature (412)..(412): n is a, c, g, or t
caagttttagagaactaaatttgcatttgttaaaatcaaaaagtaggaaagatgttctttacaaataattttgatcaagtatgtgttcaaagaaagcaggataaaaaggctttttctctaacattctgtgttgtactgtattgttgttcaataggaattagcttctgtcatttgctaaaagaatgagtagtggggaacaggatatgttggaaatttcataacgggtaacagaaccattctcttgggtaaaccataggcaggggcagctgtgctgtaaaccatatgggngttccataggccngggggctatgtaggccaggggggcagcttttcgcccccaaccaaaagcttccccttgtttaggagttcccnctttccctctggcccccgaacagctttgggacttttcttncaggacacagcttttt

SEQ ID NO: 452687 - DNA, 365 bp, Homo Sapiens
  misc_feature (78)..(191): n is a, c, g, or t
actgggctccagtgatcctcccacctcagcctccccagtaggtgggaagagaggtgcacactaccacactcagcacannnnnnnnnnnnnnnnnnnnnnnnnnnnnnnnnnnnnnnnnnnnnnnnnnnnnnnnnnnnnnnnnnnnnnnnnnnnnnnnnnnnnnnnnnnnnnnnnnnnnnnnnnnnnnnnnnatgagcagctgtacccagcagagacacatttctaaatcaagtttttgaggaagtcccccacctccttcaagttatatgatatacaaagctgacattcatttaactcttacagagtatttcatgattgattcttacttgtctcatatcaagtggaccataatggttatgttgttt

SEQ ID NO: 452688 - DNA, 523 bp, Homo Sapiens
  misc_feature (355)..(355): n is a, c, g, or t
  misc_feature (443)..(443): n is a, c, g, or t
  misc_feature (458)..(458): n is a, c, g, or t
  misc_feature (478)..(478): n is a, c, g, or t
ccaagggtgtcgtcggacgtgttttgtttttcttttcggctgatcttctaataagaacatctgcctgttctttgggactggtccagcaaataacaggaaacattttgtaagaaataagtataaactccgatgagccatggcaaaagcagtttttttaagcttagtcaagtggaagcagcgggagtggaggaggatcagagaaacctctgtagttgtgattggttccttgtcgcctccactgcgtacccgctgagctgggctttgggcaggtgagcagcacagaggcttccctcctcgtccctccccacaccccaccatcgccacagctccctccgccgccggtggggcacccagnatggggaggaagctgaggaggccactgttcacccaaactggttggtccttcgggcaatgctgggaatagggtgggggctctgggcaancccagggaggagganggcctggctgagttccaggnacatctcacaccacaagggaggatctagctgggtgccctccctgt

SEQ ID NO: 452689 - DNA, 431 bp, Homo Sapiens
  misc_feature (409)..(409): n is a, c, g, or t
tagaattgtgttttcactatgttgccattgtatgtctcaaattcctgggttctatcgatctatttgccttgtcctctcatagcattgggcaggtcattacgccatgagccaccacacctgctggtttttgttttttaaatggaattgaaaggaactagccttggctagttgcagaattcacacatatggggctatggcaacagcagattctggagtctcagggtcttttctttctagataagttacagggcaattgcttttcagagtacttttacatttctattccattcttgtcagtaaagacaaggatcccataagctgatggagaaactgaggcctctagaaactaaacgctgggaatggcacccgggtgctgaattccagggtctccacttttctgccacaggancacatgccccagcagccccttg

SEQ ID NO: 452690 - DNA, 925 bp, Homo Sapiens
tgcctttgtccaggggaatatggggtggggttctccctttctagggtgccttcttgcttgggcacaaggggtggggaccgaaactgggaaatcagaaacaaatctcctggggcaaagctggagtggtgggaacgtggatgtccgcacagtgtccctgctcaggacaaaaggcggtgatgggagctggtataaccatgtgacttttatgctcaggcaaaggagtggtggctggaacttgatttctgggtggcctgatcagagaaagtgtaagagccggcacctggaggtgcagggggccttcttgcttgggcaaaggtgtggcggctggagcctggacatgccgggaacctccttgctcaggcaaaagggtagcagctgaaacgtggatgcccggaaggtcttgcttaggcaaattggaaacatgtagaccctggccatccgggctgcctccctgctttgacaaaggtatggcagcttgaacccagacagcaggacccagggggacagactcctgggcacatgtcagtgggaaggccagctcacataccagcacgtgtccaaaggcaggcaggagccctggctctgcctgctcctggggcagacagggggatggctggggttgggccagaacccgaggccggcggcgcggggcattggaagatgcccgagtctccgcccgctgcatctgctggatccgctcgctgtaaagccgggccagctctcgcactcgggacgccgtcctttctgaactcggggctcctgccttcccgctcccgctgtctccacccagatccgaatcctccaggatcagcagtggctctgggaagcctggccgggccagctgtccctgttccaatgcctgccaggcgctccggatttctgagcaagagcggaatgcccctcgtgccgaattcgccacccaggc

SEQ ID NO: 452691 - DNA, 1590 bp, Homo Sapiens
tccccgcatcaggcgcacttctgtcacctccccagatgaaatcagcttatctcctggggatttagacaccaggttgtgtgacatttgtatgtgcagtatctctgtatttgaagaccctgtggatatgccctgtggacatgacttttgtagaggatgttgggagtcgtttttgaatctgaaaattcaagaaggtgaagctcacaacattttttgccctgcatatgattgcttccaacttgtacctgtggatatcatagaaagtgtagtttcaaaggagatggacaaacgatacctacagtttgatattaaggcctttgttgaaaataatcctgccattaaatggtgtcctactccaggctgtgacagagcagtaagactaacgaaacaagggtcaaatacatctggatctgatacactcagcttcccattgctgagagctcctgctgttgattgtggaaacaggacacctcttctgctgggagtgccttggtgaagcacatgagccttgtgactgccaaacatggaagaattggctgcaaaaaataaccgaaatgaaaccagaagaacttgtgggagttagtgaagcctacgaggatgccgccaattgtctctggttattaactaactccaagccttgtgccaactgtaagtctccaatacagaagaatgaaggctgcaatcacatgcagtgtgctaagtgcaagtatgacttttgctggatttgccttgaagagtggaaaaaacatagttcgtccactggaggttattacagatgtactcgctatgaagtcattcaacacgtggaggagcaatccaaggaaatgactgtggaggctgagaaaaaacacaaacgatttcaggaacttgacagatttatgcactattatacaagatttaaaaaccatgagcatagttatcagctagaacaacgccttcttaaaacagccaaagaaaagatggagcaattgagcagagctctcaaagaaactgaaggaggctgtccagataccactttcattgaagatgcagttcatgtgctcttaaaaactcggcgcattctcaagtgttcttatccatatggatttttcttggaacctaaaagcacaaagaaagaaatttttgaactaatgcaaacagacctagaaatggtcactgaagaccttgcccagaaagtcaataggccttaccttcgcacaccccgccacaagatcatcaaagcagcatgccttgtacagcagaagaggcaagaattcctggcatctgtggctcggggagtagctcctgcagactcaccagaagctccaaggcgcaggaatatgctgaatttcagtatcggaggaggcacagacaacgtcgtcgaggagatgttcacagtctactcagtaatccctcagaccctgatgagcccagtgaaagcactttagatattccagaaggcggcagcagcagccgcaggcctggcacatccgtggtaagttctgcatctatgagtgtgctggacagctcctccctgcgtgactacccccctgccagtcgctctggaaacaggactctctttcagctctgagttccttgggatgaagaccatcc

SEQ ID NO: 452692 - DNA, 483 bp, Homo Sapiens; identical to SEQ ID NO: 147837

SEQ ID NO: 452693 - DNA, 967 bp, Homo Sapiens
  misc_feature (47)..(147): n is a, c, g, or t
gcccaagtagctgggactagaggcgtacatcgctatgcttggctaannnnnnnnnnnnnnnnnnnnnnnnnnnnnnnnnnnnnnnnnnnnnnnnnnnnnnnnnnnnnnnnnnnnnnnnnnnnnnnnnnnnnnnnnnnnnnnnnnnnngtgtgagcaggccaggcagatttcttattagaactgttttatgacccaaactttttgtttctggccatgtgttaggagtatgtcactccccactggtgtgcagcaggtaaccccttctctcaccagccttcaaacaatgaaagccagtccgtctcaatcttttgaaaggactagactatcacatattcacacatgaaagagcaaattgttaattaaaattataaattctattaactgtattcaatacatacaaaaaggccagtttttattctaaaataaagaacatttattatcacaagttggataaaaacacacagcttttacaaaaatgatttttgatagaaaaatatgtttgaatacactgtgatatttgtaggaacaccacactattgctgtatctccagctaaagcttcaaggaaactctatttcttataatcaaaatatccactatttaccacaacccgtctttggaaagaagttcatagtgtattctgaacaaaccaaagcatttactcggaagttacattcccatgcctggcagtcacttgtgtatgtttaatacagttacacatgatgtaattacagaatggcggcgctggaagggaccttgtagatcatttagttggcaccctaattttacagagggggaactaaggccagagttgagagatgtcctcaggatacctgagtcccattccagtgttcgttcagtaattcataaggaagtcatcataaaggtttaaaaagaaaacgttaatgactcgctccctttattcttctgtgctgagagtatcattctggtttattcagattaagacc

SEQ ID NO: 452694 - DNA, 1253 bp, Homo Sapiens
agcggggtgtacctcgctgggaacgcacttcctgggacgctgagagggagacgctccaagaggctcctcagtgtgggcgagtaaaatgccctgcgtgtgagaagcaggctcagattattgctactctgtattcagatcttcatgtgtctcttctaagctgaataaagctgttttggaactgtcaggtacctcaaagctctgactgacagtactccacaagcttgcctgccatgggctgtcgggatgtccacgcagccacagtcctttccttcctgtgtggaatcgcctcagtagcaggcctctttgcagggactctgcttcccaactggagaaaattacgattgatcacattcaacagaaacgagaagaacctgactgtttacacaggcctgtgggtgaaatgtgcccggtatgacgggagcagtgactgcctgatgtacgacactacttggtactcatcagttgaccagctggacctgcgtgtcctccagtttgccctacccctcagcatgctgatcgccatgggtgccctgctgctctgcctgattggaatgtgcaacactgccttcaggtcctcggtgcccaacatcaaactggccaagtgtctggtcaatagtgcaggttgccacctggtggctgggctgctatttttcctggcaggtactgtgagcctctccccatctatctgggtcatcttttataacatccatctgaacaagaagtttgagccagtcttttcatttgactatgcagtgtatgtcactattgctagtgctgggggcctgtttatgacttcccttatactatttatttggtattgtacatgcaaatctttgccttctcctttctggcaaccattgtactcccatccacccagtatgcatacttactcacagccctattcagcacgctctcgcctctctgccattgacaattgacattccagtagtttcacacaccacttaatggggaaatagttaattgttaaagaaaacttcttgtagcctcacattccccttgtgcaaagagctcttttggacctacatacattttcctttgtttttgaccaatcaatgaagccaaatttatatgtcctagtagaatgaagtgctgctagtttttactgagaagtatattatcttaaactgtgaactttttcaacatttgcttcttatactggaaggaattttagccttcatatcgatatctagttaattatttaagtggaagagggctgatcacaattgaggtaa

SEQ ID NO: 452695 - DNA, 453 bp, Homo Sapiens
ccaggcccctcatcccggtcttgttgcgggggagttctctctcctcaaaacattttaattcgtttttccacagccatataaatttaaagtatgaaacaacaataatacaactatagaatctaggttctctttcaaagcagcggcatataaaacatagaaaagctaaaacctcagcacaagcttcaaaagaacaaggactgagaggattttgatgaagacatgaaatgcacaaaatacagtacacaaaaatactagaatgccataaaatataaagctacacatttcaggtagaaagcattgtaaaatatataaaatatgcaagaaatcaaaaccaaagagatttttcttagagtaccatgaatacactggaactggcaattagcatttgaagatgggaacaagaaaatagcagtttcccatttaaaactttatttctaggctttaggatttccc

SEQ ID NO: 452696 - DNA, 450 bp, Homo Sapiens
ggtggaaaagtatagggatttttgatctggtcttttggtaagaaaataacactcttcaaaacaaattcttttcaactgctagttagtataattggagaaaagcataaaacagatctggttcatatctttaagggcaatgaaattccatcagtctttgaactttattaatgatattttttcagtctacatatagaccactgccacttcctcttcattaagagctcttcatagtagctgtataacaatctacagaaagttatttttccatttaaaggcagaggttaattttcattgttcatgcagcaaaatgtaagtatgctacataattctagagaaatttgaagtagttaccaaagaaacatagccttagcttctgtagtattctcaatgatattaaaatagcaataattggtgtgcactcatcagaaatgaagtgcccatttaaggacc

SEQ ID NO: 452697 - DNA, 954 bp, Homo Sapiens
ttctttgcttcacttttatttttgtgtttcttcatttttttcttggcagcaatatcaggattagttacaaactccagggccttcctctttttccggagtgcccttttctcattagcctgtttctgtacagaggcaaaggctaatgagaagctctcaagcccaaccagctttttgagtaattctatgatttcctgggatagattcttcagcaaaggatcttgctctgaataggtgctgttgagttcccgaaacaaaggagctatgatcattgggagatacggctttaccttgtctatcccaagatccattgctacggcgccgaggaacttaaagatgcatgttctctttaaggggtttctcggcgaataagcagcttccagttttgcaatccgggacagcttctggatcaaccacagcagcgtggccggcctgccgagctgttccttcacctcttccttctcttctccgtcagactccgccttctcatctgcacaggccacaccatcttctaaagcttcttgttcttccaggtcttcttttatcttactttgcttatcctcacaataaagttccagtaaatacaagactttggctgcgaacaacaaattcttaacaacctgttctcctagagactgatccaagaatttggaatgcaattgatggcaagaggcgagagagatacttttcatcttttggtcaaggtcactggctaggaacttgattgctacaggttctgggaggtgttttttggtctttttggtattccatttttgaataagctcctctggctggcaagaggcaaagagtaatccaaaaatctgggctgctgtgagccacacccagttgtgtggatgtctcaggtgagaatgcacatgactccagattttactcaaagtctcagcgggtttggtaaactgaatcctcgtgccgaattcgccacccaggcctcgctac

SEQ ID NO: 452698 - DNA, 244 bp, Homo Sapiens
cattgtgttaggacagcatataaatgtaataagtatcacactgtatataaacatatcaatgtttgtcctgtataagaattactaaattacaaatgcaatttcatttaaacttctaggttaagtttgagcctgaaattttaatgaagtgcaatactgagtgtgcctcattatcttgcagctgtaaacatattggaatgtacatgtcaataaaaccactgtacatttttatacagtgataaagtct

SEQ ID NO: 452699 - DNA, 521 bp, Homo Sapiens
cctgtgcacaggtcccatttattgtagaaaataataataattacagtgatgaatagctcttcttaaattacaaaacagaaaccacaaagaaggaagaggaaaaaccccaggacttccaagggtgaagctgtcccctcctccctgccaccctcccaggctcattagtgtccttggaaggggcagaggactcagaggggatcagtctccaggggccctgggctgaagcgggtgaggcagagagtcctgaggccacagagctgggcaacctgagccgcctctctggccccctcccccaccactgcccaaacctgtttacagcaccttcgcccctcccctctaaacccgtccatccactctgcacttcccaggcaggtgggtgggcaaggcctcagccatactcctgggcgcgggtttcggtgagcaaggcacagtcccagaggtgatatcaaggcctacccgcaacagaggagatgcaggcagacagagtggggaaaatgtaaatggggacagtggccaacacc

SEQ ID NO: 452700 - DNA, 436 bp, Homo Sapiens
  misc_feature (365)..(365): n is a, c, g, or t
agggttcatatttattttccaattacttttattgatcttacagaatagtgtcttggtctctctactgcattcaacaacaccaaaaatctacaacgctggtgtcaacagcaataattactaaaaattgagcaagcaatttatgactatccgcaattatggaaaatggattcaaaaggcatctgctgcaataacaatagtatttatgtgtgttaagacacaaaaagccaacataactttagtacctcaggcatttttctaattgtgatatttatacaaattttggaaattgatgagtacactgaccagtcaccgataatcatgaaaaagaaaatacacataagtgcctatttgggctaatactgtgntttaactctaggcttggacattgtgtggtactgtaatccctttcaaagcactggaaatcactcacatttgc

SEQ ID NO: 452701 - DNA, 1212 bp, Homo Sapiens
  misc_feature (548)..(598): n is a, c, g, or t
  misc_feature (619)..(669): n is a, c, g, or t
aggggaatattttttcctattctcgcctaaaaggggtggtttttggaaaacagcggtgtttgtgtttttaccccaaaaccctgtgggggaaggttctctccccctccgggaggttaaaccggggcacaaattatgggacaacttttctttaaacccccgttttggcggccgggggggaaatatttttttaatgcaaaaggccggcgaagggctcttgtattgcccccgcgggaattccaaggttcaatccacccccctttttggtatttgttttccaattttgggcaggaaccccgggaggtatttttctttcggtggatggggaagaacgggcccgggcggggggcgttaattttattatttgaagcctagaatttgcctttcctttcttatattattgcagtgaccgccccccacaaaaacacattttggaataatttctttacacgcccgcgttggcgcccgggccctttgttattggtgaggaatccaatgccttagttcatgccccaggattttctttggaaacagcttatggccattttccnnnnnnnnnnnnnnnnnnnnnnnnnnnnnnnnnnnnnnnnnnnnnnnnnnngtgggttgtttgcggtcttcnnnnnnnnnnnnnnnnnnnnnnnnnnnnnnnnnnnnnnnnnnnnnnnnnnnccatgaattcaaagccttttaatgatgtgaacacttactccccatttcttttttacattgttacaaaaaatttacatacagttttctgaaagtggcattttgttggttgttattatactgatgacacatattaacactttgtattgaagaagtatcataaaaatcacagggcattacagatttttgataagaagtagtaatagcattgtcttttaacagctggaggctcccaggcatactctttggtgagaaatgattaattttatattttcattttgatgagaatcttttcttgtttttaccagttataaaaacaaagctttttctttgttgtgatactgtgcactaagacttagtttcttgagctgatgctaaataaaatgagatccaataggaatattccgggaggtcgtgagaagtttttagaaaggatggcatctacatatatatggagctctgaaaactgttggagagtatgacctgggactgaaactgtggagcacatagccagtgtcacaggctccgagagcagagagagtttgc

SEQ ID NO: 452702 - DNA, 939 bp, Homo Sapiens
ctctgttgtaactgaatgatgaaatgaaagccggccagcaagaggggaggtggcaggtgactgagtggacagttctcaatactcatgattgaaagcttgctgcagagtgccagctcacagggaaggctatgcaggttggggttgtcattcaaatacagttcttctaggttctccagtgtaccaatttcttcaggaaggtgagtaagtaggttctctccaaggcccagatgtgtgagattagtaaggtgaccaatgcctctgggaagagtggtcaactggttgtttgtcaagactaatttctgtaaatccttaagatatgcaatttcatttggcaaggattccaatttgttctcttctagatccaactctcttaacttcctaaggtttccaagaccatggggaagcttctttagaagattgtttgataagataagaacctcaagagaaacgagaccatacacatcctcagggatctttgtgagctgattagtggctaaattcaattctaccatactggtccaagttccaaaatccaagggaagtgatgttaactgattgtccttcatattcagcttacttaatacttttgctctggagaaaattccaaatggaattttgttgattcgattgtgttccatgttgagggaatagatggtagaaaactgagatggaccacccactggatacaactggaagcaatttctagctaaggtcaaactattcagtttcacaagacttgataaaagactctctggtaaagtagaaatgttattgttctctaaatttaattcttcaagtgcactgcattttgctaatgatctgggtattgctgacagtctgttatatctcagaccaagacgacttaaactggacaggtttccgtcaggagccccgactccgccatcctcctcgctcgccctccttcctcctcctcccgct

SEQ ID NO: 452703 - DNA, 724 bp, Homo Sapiens
gcatcccacctctgctgggagtgactgcaatttgttactgtataaataaagttctgttaattgagtcaactctttgattgatgatggcaatatgtgtatagatctcttggataagtccaaacgcattgaattctcttcccggcatttgttgagctctttaatcacctctgcattgctggatttttttctagtcccaggtgctgggtttggccgtttgatcgtattgtcaactgaaaatgccacccctggttgggcagcactggagtccttctttccatctttggcatctttccctttggtcttaggttctttttctttgctctctttcccaaaacctccagaggcttttgcctccttttctctttccttggctgatggtactttgggatctttttctttagagtctttttcttttcctaaactactactcatggtgactcaagcctggacaaaaactacatgaactccttttattttccagtaattgaattcaaagatgaagagacaaagatcctacacaatcaaaaaagtactggcttgaagaagtaatcagcatggagtaacatccatctgttacatgttggatctaaaagcactatgcccatttctgatcattcattccaactggtaaaatagtgctggtcaatcaatgattcattagagttccgtcaggagccccgactccgccatcctcctcgctcgccctccttcctcctcatccccc

SEQ ID NO: 452704 - DNA, 1103 bp, Homo Sapiens
  misc_feature (571)..(607): n is a, c, g, or t
  misc_feature (660)..(749): n is a, c, g, or t
tgaaccttttgcgggtaaaaaccctgccccttctttccctcaaggggcgtttctccacaaaaaaagttttacgcgttacaacccactccctcgggggaggtttcccccccactgttgtgcttttatccgcgggccccacatggggcccccgttttttgcgcccccccttttcttccccgcggggggcaaaatttatgttacggcagagggggaccagtgggttttgatatccccccgggcggggagttaagcttgtccttcaccccccgccttttgtggaacggggcttcccccacggcggcgcgagaacggtgttttatgggggcgcctcccccgcgcgttccctgcgacagaaaaaggcccccgccgggggggcgccgaaatccgagaatcacgagcgcctccctggtgccccctccttattggacgcccccccgaaggaccctccaaggctcccctctggggtttggttccgcaccgctccgggtttcccccccggcgcgttttttcttgggggggaatcccaagccctatgcgcaggccccggctcttcctgcggaacaacgttatnnnnnnnnnnnnnnnnnnnnnnnnnnnnnnnnnnnnnacaaggaatggttttaaaaattttttgggggtccaagtcgtgccccccctgcnnnnnnnnnnnnnnnnnnnnnnnnnnnnnnnnnnnnnnnnnnnnnnnnnnnnnnnnnnnnnnnnnnnnnnnnnnnnnnnnnnnnnnnnnnggtgatgaaaaaatgtttagtttatttaaaattcctgtttagagtcaactttatttactggctcctgtaaccagtgaaacattctgaaatgtattagataatggttgtatgttttatatatttcatatcgaatatagtaagtgatttaatcaattaacaaaagtcctttatttgtgaacaatgagagagactgacactagctttgtatggttttactttggaaaattttacaaatttaaagtaataaatgtattcattttcttactctgcagaagttcaattttaaaaagaacattactgttctaaaatttcaaaacatacaacatagtctgtgcttgtaacattttcagattt

SEQ ID NO: 452705 - DNA, 574 bp, Homo Sapiens
tcatgctattaccgacgtacacaataaattaaacagaatccactgtaaatgtacattttttaacataaaaagtcagttactgttacttcatgatcacatgaggatcgtcacagctccgtgtccattagcacattaccctccttgtccttaactcttatccgaccggatctgtacttcgtttcttgatgaccgtttgcatatacggttttaacagtgccatctgggtattcccgtctcttgaactgggcagtatgtagttctctttggccattattaaactctatgagtttgttgccatcacgttgtactctgacaattgtaccatctgggaaaatgctttcttcttgtccatcaggaaataagtttttaacagtctggtcaggaaacgtgatttcttttcttccatctgggtaatgtttttctatttgtccacttgagaaatgtaagacttccagtccctccgggtatgtcgtgtgagtggtctgggcagctgcatagtagtagatcactctttggtctggcatgacctgcttcacgtcaccattaaagaaagtgacagtgatggtcttccccc

SEQ ID NO: 452706 - DNA, 1383 bp, Homo Sapiens
  misc_feature (80)..(80): n is a, c, g, or t
  misc_feature (123)..(123): n is a, c, g, or t
  misc_feature (140)..(140): n is a, c, g, or t
  misc_feature (262)..(262): n is a, c, g, or t
  misc_feature (292)..(292): n is a, c, g, or t
  misc_feature (390)..(390): n is a, c, g, or t
  misc_feature (437)..(471): n is a, c, g, or t
  misc_feature (519)..(519): n is a, c, g, or t
  misc_feature (683)..(683): n is a, c, g, or t
  misc_feature (685)..(685): n is a, c, g, or t
  misc_feature (718)..(718): n is a, c, g, or t
agtggtacgtcttgtgagcagccggggctgcttatttctcacccggagcggcgccaaccaggatagcgcgtccatctacncgggcggagcccgcgtggtgccactacgggaggtgcggtgagnagacacaccacccggtnacgcggccgcgtcgttcgtatcacgcgagcgttgttacgatcgtcgacattgctccgtcggttgatgcgcgtggggggcgtgggctcgtttccccatccccacgtttttggcacagtacganatacaaatagaggggggattttggcacacngcggggggggtgggtgatacccacagtctcgacagcggtggtgcatggttgtataccgccggcccacaataacgaaggcgggggtcggcccagacaanacagcgaggggcggagagaaccacgacgccgaatcaaacaaagtgcnnnnnnnnnnnnnnnnnnnnnnnnnnnnnnnnnnnccgcctcgggccaacagtgtgtgggggcggaacagaaacaaacccaancgggcgagtgtctcgtgagcttgtataacgtaaattctttctcctcccccggcaagacgggtggaggtggggcgttaaccggcgcgtctgaacacgaaagcatggggtgttcggcagtcactccgctgggtgagacgagctgctctctttttgtgtcctgcgcnanccccgtaccatcacacgggtttggtgtgctacncacgggcgcggcgcgcgggtcgtttattgtagttgatgggtgcgaggcgggcgattcccggcgacgccgctttgcgcgcccctccgtgccacccacgcgggtattcgtctcgttacgcgacaacgcacctatgcccgcggtccccctgttctgcccgcgtaccgcacccctgggggccgcaccggcccccgcacaccggcatgggtttgcgaaaagactttttctggaggggcccgaggccgggcccaacaaaggccgcgctcgcgccggtggcgggccgagaccggagggggcggcccgtgctctcgttcctacccctttcggccattgcggttccggcgcggcagtgtccttcgcgtaagtaagatttgctacatatatgtatacacttttatttgcagaaggaatccaacacagcagtcattattactgggaaaaggaattaggatgataggataaaaggaggctttcatttttcattctctttctgtaccattaacttatttttgttttaactgggcagcctcccaagccaaagtaggttcagagaggtgccacttggatcattaacttttaagacagcatatatattatatgttggtagtttttaaggccagggagcatttatcagtgatgagcatattgggccatttttttcctcaaca

SEQ ID NO: 452707 - DNA, 494 bp, Homo Sapiens
ggtctctccccaaaaatatagagagctggaggtttttcttagagatatgaataaagggtgtgagtgtgagtgtatgtgcaaaaatatggataaaaccttgaaagtgctgaatggcctgtagcaagaagtgatgtcttctcatagatgggtggcaggggctggtggccgggagagagagcagtgggacttgggagcactttttgtgggtatgtaatggagattccaccagcaacaagctaaaccactcacaagcgggcccagaggaagtaaatagaacactgtggttgaaccatccttggccttctgcagcaaggatctgcagcctggaaggggcacagaaacaaccaaagatgaaggctctcagagctgaggagaggccaggtcagaatatccgccgtcaagaaactgcagcacctctaacacaggggaggctatgaagttcatggttctggatgtctgctcctggttcaaccttgtcctgccacacttagtat

SEQ ID NO: 452708 - DNA, 594 bp, Homo Sapiens
  misc_feature (473)..(473): n is a, c, g, or t
ccttgaaaaccccaacttttattcttgaaagacagctggattaactggcaaaagccatttcgttgaaatttcaagatggtataaaaatgcttccaggatatagtcagcatattcacgttcacttcagttccattcacagatggatttcagcttccaccgggtgcactgcttgaatcactcatccatcatttgccaactctgattgtgaggtactgatacaatggatcaagttcttaaaaattttaaaagaataaatgatgctggaattctggacctgaggatctttagtatttgaacaaatccacagattaaactgaaggtaaattaagacttcagttttggttatttccaacttttctgtgaggatgtatatccattaaagctcaggcttatagccacactgttacttttgtaggtaatcttcaagttttatggtttaaaatccagccaaccagtggctgtaacagccgaanttagccataattcactggctcacacagtggagatctggctctcattcataccaaagcatttcttggtaatgacctccatatttagagatcaggggaacactttagtgagcagccagctgtg

SEQ ID NO: 452709 - DNA, 710 bp, Homo Sapiens
  misc_feature (26)..(26): n is a, c, g, or t
gaatggcatctagattctaaaatganaattctgggaacctttggcctctggaatctgtatccccctaaccccttttcctcttatacccatcatgttattaccttgggttctttttcagtgtatttacaagaaattcatgtaggtctattccagtggagtccgtatattcctggctggagtctctggacagcatcttccttgggatcttttctttgtttttgtccttgtcttccttttcagagacatcttttgtggacttttcttcctccttgtcagaagggcaactgatgtgcaattgaattatatcctgggtttctaatggcccatcagcaaatggggtggaggactcctcacacactgccaggctacgcaccaactttagcttggaattagacttggctcttttcctggcatgaccatggttagatgtccgcctctgtgtctcctgacgcaaactggtatcttcacattctttctcaatttcttccttacttggagtcttagatataaacttgtttttgtttacagattcttccaccagttttttttctgattctttcattatttccagggtctcttgagtagtgttactgttagacatgttcttcaatagaatacagtggcctctatggactcctcgcacgggccttggcggggagggcgcccacgtctccgcccgccgcccgggcccacggccgctcggctgcccc

SEQ ID NO: 452710 - DNA, 1125 bp, Homo Sapiens
  misc_feature (861)..(937): n is a, c, g, or t
  misc_feature (1011)..(1011): n is a, c, g, or t
  misc_feature (1110)..(1110): n is a, c, g, or t
ttcagttggcaaattttacaaaggttttaattacatacctctttaaaaaaagaaaacctaggcaacacagacatatattaaaaacatcagtttcaaatttcttccaagtttgcttttaaatgaaggtttaaaaagcagatcaactctagattttgtagtccaacttgctgtgaaatactgaaactaactttcctttaagaaatcttaaggaggcacattttctagtgggtgatacccttcctccaaaaccaaaagtagtaagaaggtaaggggtatgaacagcaaagttgtgtaacattttcttatttctataattttacttattctggatacttttagaaaataaactcatgttttaactaagactgttaaccgagtacaaaactatttgttgttgcatttgcagatacagtatcctacaaatatgtgcagcaagcccatgaagcacttccaccgtcgatactgatatttcagtatttaatatatacaaaatgtttctattgaacagaaccaaggtattcacaataagctgcagaaaaacccatgcaattaacaaagaatgaaatttataaattaaaaacattgtcgtctatacataatgtacaatcatgcatttaaaaatgaatactatacgtctcataagaataaattttcagtcaactgctgctgcatgaatatttgctaatgcaaatgaataaaatcttagtaaattctgcattaatattttaaccgccagaagttgaaacttttctcatttttcttgaaagctgtccaaagttgacatatgcaggaaaaattcaaattctttcgcatttcatttgaggtttttaaccagtaacaaacttcctaaacctcagtccnnnnnnnnnnnnnnnnnnnnnnnnnnnnnnnnnnnnnnnnnnnnnnnnnnnnnnnnnnnnnnnnnnnnnnnnnnnnntgttcaattttacttaaagtattttacatgtttcaccagaatatgcacgggtttaagaaagcatgaaataaaangtaagttctgttactagttttgctttcacatctcagtaagataattaaatttcctgaaaaaccacgcatagcagccaagaatacatattatgaaaaaanaaaggatcttacata

SEQ ID NO: 452711 - DNA, 349 bp, Homo Sapiens
  misc_feature (184)..(193): n is a, c, g, or t
gttagcatccatatataacattttattaagaaaatgaacaaaatacattctttctccatatgtacattacatacaacataattctacaattgccatttttagcagatcactcatttatttattcacaaagtagaattaacacatttaccaaagctgggatctgaaaattatttgtactataagnnnnnnnnnntcctaaaaagtccatacagattggataaaagataagccagagatcatgaggggaatggggaagattgcagaacacgacagagcccaacaatgatttgaaacaattgatgtcagaagagatctgatacccataaagcacttctgtttaaaagctccc

SEQ ID NO: 452712 - DNA, 366 bp, Homo Sapiens
  misc_feature (30)..(30): n is a, c, g, or t
  misc_feature (40)..(40): n is a, c, g, or t
  misc_feature (53)..(53): n is a, c, g, or t
  misc_feature (75)..(75): n is a, c, g, or t
  misc_feature (83)..(83): n is a, c, g, or t
  misc_feature (169)..(169): n is a, c, g, or t
tctggttgttgctaataatgttaacctgcnatttatattnccagtgcctcttncatggcgaagccaggggggaanagttattnttttcttgaagtacaaagagacgggggaacttttgtagaggactttttaaaagctattttccattcttcggaaagtgttttggttntccttggacctcgaagaagctatagagttcaatgttattttacagttattgtaaatatagagaacaaatggaatgactaatcattgtaaattaagagtatctgctatttattctttataatatcccgtgtagtaaatgagaaagaagtgcagagcaggattaaagaaaaccactaaaaccgactgcgctccacactg

SEQ ID NO: 452713 - DNA, 769 bp, Homo Sapiens
  misc_feature (95)..(95): n is a, c, g, or t
  misc_feature (685)..(685): n is a, c, g, or t
  misc_feature (714)..(714): n is a, c, g, or t
  misc_feature (719)..(719): n is a, c, g, or t
tgtcttaaagcattcaccattacaacaagcagaacaatggagtattaggcattcatatctggtaagcttcaggaataaaaaagcaaataaccccntgacccacccccatacgaaaacaacagtcacactggaggatcaaaacattagccaattcttcagttaaacatcgtagaactctggatactcaatgaattgccaaggagaggagcacctgccagtgtgttttcagattgtatagcaagcatttgaataaaatggccgtttaaccctaagccactgacgttactctgaagccgaagcccaagcaccggaattttcaatgctttatgttccatgtttctgtcccttctttattcctctcagcattacttaatctgcaaatcaatacacagaaacttaaaggctaaactcgctgggtgccccagcttcctttcaaatcaggcacacaaatgtgtggaggatgctactaaagtcaaaaaggaaagaaagacaaaatataagggaaaagtttgcatacgaaagattatctacccttttctttttttacctactttcttttaaagaagcgttagggtaaactacaaatacctgaggagttggttaccttttaatgttggctgacaaatgtatgaactattatgaaaattcccatattgggcccaattgtatgtttctaaaagtaaanatgacatggcttctttgattggggaaaanctganttggagtaattccttatttatctgaaagcatatgcctagtcttgaccgct

SEQ ID NO: 452714 - DNA, 1106 bp, Homo Sapiens
  misc_feature (50)..(50): n is a, c, g, or t
  misc_feature (245)..(245): n is a, c, g, or t
  misc_feature (291)..(291): n is a, c, g, or t
  misc_feature (445)..(445): n is a, c, g, or t
  misc_feature (664)..(676): n is a, c, g, or t
  misc_feature (695)..(705): n is a, c, g, or t
ccaggcgacattgggcacgtgtgggggatatgtacaaactggcgccgcgngtcgttgtctgcatataacaggcggtagaggtcgggggtgcgcgtgacatgaggacagagcgcggggggagcgcgtgcggggtgatcgtatattatatgttaataatagcgctaatctacagcgctgtgtgtgcggtggcgttggagtcgtctggggcgcgtgagattgttatgtgcctcttgcggaggtgtgtntatctagaggtgttgatcgaggggtcatgcggcgagtgcgggtgtntttcgcgaggagcgagggtgatacgaagagcgatataagccgggtgctgttatttattatggagatacgttgtgtctaggagcacgaccacaaacaggcgggaccgcggcgagctcgtctttagtaaacggcacgcccagcgcgcgccaaacanagcgagggggagcattacttatggaagtgtattagggacggggcgggtggagagcgaaagaaatcagacgagggcggaccgacgctgtgagtataagagggtggtagagaaacacagcggtggattttgtttgccgggagggagagcccgcggaagtgttcgcccgcgtcttggtgtggcgtttatcccccacggggggggcgcccggcgcgccccccnnnnnnnnnnnnngggtgtggttggagaaaannnnnnnnnnnggggggtggaagaaggggggggggccgccaaacagggcggagagccgtgggtatgggaaagaggggaataaaggcggtcggggtagggtggggggtttcggggccccctaaaaaaggtgggtttttaagctggggagtaaaggtgtccttcgctcctttcgcgctctctcggagggttttcagagaggtctcagtgcatccattttctcagatcctctcctttcggggcaaggatctggggccctgaatgagccttggagctcgaagaccgcggctcgggctctcggagggctctgcgcggtggccgaggaagctccggggttacggcggtggttctcctgggctggacgacgtgaggggagcaagcggattttcccagcaagatctccatgtacagcccc

SEQ ID NO: 452715 - DNA, 1471 bp, Homo Sapiens
  misc_feature (19)..(19): n is a, c, g, or t
  misc_feature (34)..(34): n is a, c, g, or t
  misc_feature (48)..(48): n is a, c, g, or t
  misc_feature (60)..(60): n is a, c, g, or t
  misc_feature (117)..(117): n is a, c, g, or t
  misc_feature (176)..(176): n is a, c, g, or t
  misc_feature (231)..(231): n is a, c, g, or t
  misc_feature (583)..(598): n is a, c, g, or t
  misc_feature (761)..(769): n is a, c, g, or t
  misc_feature (798)..(798): n is a, c, g, or t
  misc_feature (904)..(913): n is a, c, g, or t
  misc_feature (1111)..(1111): n is a, c, g, or t
  misc_feature (1336)..(1336): n is a, c, g, or t
cccattatttgaagtgatncctctggaggcatgnccccacactaaatnccaactgctctncctcagctgtagccccaacatcagacttggcacgtggtgacactaacacacagcacncaatgaatgagtgaaggaaataaaagtcaccccgttggtgagaggtgctatccctgagnctcagtgcaggaccagtggatgaaaggcaaggtaaagaggcccaagataggctgntttcccccgttcaaggtatagtctgcctttaagggagttttagaaccaacatgcaagacattgaaagaaatcttgcaagagccattattgacttagatccaaaacagcctctctcatgtctaaaaaggcacagaattttgcagatctgaggaagagggatgcattacctttttgcttcttttcaattgcttagcgtttctaatcatacttaatccacactaatgtgcgcaattataataaatggtaagatatccccaggccaacgacatcgtggccaatttggcccccctaatctaacccccccatacgggacctcattccccatatctccggcaatcgttcctgggttggnnnnnnnnnnnnnnnntcacaaagaggtttttccaaaaccctctcctgttgtgggccgcccgtgcccccccttcacgggggaacgcggccaattcggcccgccgttatccgtgttcctttcgaaaagaacagcccgcgccgccaattacaacaaagggggcggtggggggtttctcttnnnnnnnnnaacaaaaaaaacgtacccgcgcgcggggngggaaaaaccatagtgagctgtttctctttgtaccacaaacactctcctcaccatatgggggcgggtctctcctccccgaggcggcgcgctgtatatacgctgttnnnnnnnnnntcgctctcttctctaccacagccgagggagaagtgaggctctctcctgatacgcgacgagacgcccgcgctcctagcctcgctctcaacaaccgcgtttctcgcgccgccgtttgcccgcgcacccgactattgtgcggttaacgcccccacacactctcacggcagaaataagacacacccgcgcgccgtgtgcttnttacgcgctctccccccccatatatataacagcgcgcctacttttgctttcgccgaacaaaaccgcaggggcgcgtgtgtatcgcccccgctccgctccaccatagccaatgttaggcagcgcgggcgggaggtcgcgaatatcctcctcgttgatatatatgtcggccggtacatacaggcgtgttttgagtatgagacacacgacctgtcgtgggcctcgcgnaaatttctcgtgtgcccgcggacataacaaataatatatatttctgtgttcgccccaccccgcgcgcgcgacgcaatcgagggcgtcgggtgttttcgacccaccacaagcatgtgcgctctctcccgcccatct

SEQ ID NO: 452716 - DNA, 700 bp, Homo Sapiens
cttgtggtgtttgtataccacttaaatgtattttattaagtagctcaaactcattatgagtactatttcttaagacatttaaggtagtatacatttttgctaaatggtgaaaaacaaattaactaatcatctaaatggcctccagattccatgtgtcctctttttcatgctttcactattgtcttccccaaattatctcctttcagcattcccataaatgcagctggcatgttttcaaatccttcaatgatatattccttgtactggattttaccctctaagacccatttcagcaagtccttcagagctttttggcgggcatctccttgccagcggtagacgacaaaagcttccatgcgaagctcctgatagataacaatctctgggggtgggcctgggggaagtgggccggttctgttatatgtagagatggctccacatatggcaatccttccaaatttcttcatctggccgataacagtgtttgaaaactctccacctacattatcaaaataacaatcataaccatcaggagacgctttcttcaaggtttcttccaaagactctaccgtcttgtagttaaagacgacatcaaatccaagcttttgaaggtaggcaaccttttcatcagaccctactgctccaacaactttgcagcccttgagctttgcaatctgcccacgggtgggagcatcgggtg

SEQ ID NO: 452717 - DNA, 467 bp, Homo Sapiens
  misc_feature (452)..(452): n is a, c, g, or t
ttttttttgagaattacgaatttgagaaagagggtttatttagcacatctcagagttacagctcttacagaaagacacttgtctaggcacagcaggtgtgttcaaatttatatgaatgactacttgagttcagacgggattacgtttttcttgcttttgacttatattatttcacacatcttgaattttagagtctaggcttacacatcgtccagtttcttggcatggcttgcttaatctgagctttcaaacttcagattaacctgggactgaggctaagagtttataatgaaacccaaaactaaggcaagcttcccctgggtttcagtttaattgttgaagtcttcataacttcctggggcatagggaacatgtatctgggcacattgtaggattaggtggatttttttgaaaaaggccaaatctgccatatatacattagttggactccntggggcttagccatt

SEQ ID NO: 452718 - DNA, 172 bp, Homo Sapiens
atatttaaaaatcactgtcaattttactaggatttagaatataaaacctttacatctcttttacaataaagagaatttagagctcacttgtcaggaaaatatttttcattattaaaaaaaattgttataaagttatttcttctgatatggagtttcaaagcatctaacatcc

SEQ ID NO: 452719 - DNA, 810 bp, Homo Sapiens
  misc_feature (82)..(105): n is a, c, g, or t
  misc_feature (107)..(114): n is a, c, g, or t
  misc_feature (117)..(156): n is a, c, g, or t
gcccgccggcgggcccaaaaccgaaattgggttttaagaaaaagctttcttcggagggccgcgagggccggcccgacaaagnnnnnnnnnnnnnnnnnnnnnnnntnnnnnnnnggnnnnnnnnnnnnnnnnnnnnnnnnnnnnnnnnnnnnnnnnatttttaatagtgtacatttattcaaaaagtatataaaacaacactgtaaattatataatctcacataaaaacactagaacttgatttgaataacaaaacaatctactaagaagtattgctcatgaagatttttgtgcccacctttcctaactcagaggccctcatttatgtcgcaacagcaaggtggcagggaatcaaaactggcacacattctatatccttcacagcactgcagggcaggacaagactccgtggcaatggttttggcctggctgttcttggcccaccacaccttgtctgggttgtgattttttacagccacagcttcaggttcctttgcagcttttagcgcgttgtgtattttgaagtaaagacagagcacgacaactatcagcaggagcaaggccgccaggataccaccagcgatgacaggcataatcactgcataaataatggctcctctgctccaggaagggcaagaaacatttcaaaaagagctccaatcatgtgtcagacatccccttgtcaggcatcctccagggtcttccaactgcagcttcccatctcaccacttctaaggcaactgaccatagacgctccccatccgcccagcaaccgtggtccatgctgcctgcgtccaccgccagcgtccc

SEQ ID NO: 452720 - DNA, 861 bp, Homo Sapiens
  misc_feature (299)..(405): n is a, c, g, or t
  misc_feature (415)..(430): n is a, c, g, or t
  misc_feature (479)..(493): n is a, c, g, or t
  misc_feature (534)..(546): n is a, c, g, or t
  misc_feature (604)..(613): n is a, c, g, or t
  misc_feature (719)..(728): n is a, c, g, or t
  misc_feature (786)..(794): n is a, c, g, or t
ggatttcctttcacttcaggctcattttcttctcaacctctggctctctcaaggagctggagggtggcagaagtgggacaggagaagttttccaagaggttcatgggaggcggaggtgactggctggctgtcttgcatcagtcccaggcctcggccaggggagccagcctttggtttcgtttacttgcctacagtgctgtacgcaataagatgatgatcccaaaatatggtaaagtgaacccatctgtctgcattttctactctgagcccatttgttaataaacacttatttttatatnnnnnnnnnnnnnnnnnnnnnnnnnnnnnnnnnnnnnnnnnnnnnnnnnnnnnnnnnnnnnnnnnnnnnnnnnnnnnnnnnnnnnnnnnnnnnnnnnnnnnnnnnnnttgatgaccnnnnnnnnnnnnnnnnttgatgtgaacaaacaacagcaagctaaacaaaaagtggtgtgttccgnnnnnnnnnnnnnnngaaactcttttaaaaccttttcgggggcgggggcccccccnnnnnnnnnnnnnggggatacatctgttttcccaaaaaacaccgggaataaaggaggttggtgaacccccnnnnnnnnnncccccggggaaaaccccgggattttaaaacaacccaagggggacctggggggtactattgggttgcctccacgggggatccccagggggctcttatatattttctnnnnnnnnnnggggcccttcgggggaggaggggggaataaatataaacatcctcccgcacaagaggannnnnnnnnacaaggcgttagataaaacctttaaacccccgcggggggttctccaccccccggggcccccgctggg

SEQ ID NO: 452721 - DNA, 866 bp, Homo Sapiens; identical to SEQ ID NO: 150742
  misc_feature (55)..(95): n is a, c, g, or t
  misc_feature (131)..(141): n is a, c, g, or t
  misc_feature (198)..(236): n is a, c, g, or t

SEQ ID NO: 452722 - DNA, 1530 bp, Homo Sapiens
  misc_feature (967)..(967): n is a, c, g, or t
  misc_feature (1116)..(1179): n is a, c, g, or t
  misc_feature (1304)..(1312): n is a, c, g, or t
gtaacctactgggctccctcagccctatacctgtggggctccccagcctgtacctgggtcttccctgacctgtgtggtttgaccttataaagaagcatcctgagaagccctgaagacacagtgtgcctgacttgaggtcagatagcttccgatgcaggcgcccttggtctgaccagaagtgagggaggaagacaagtggtatagggactttctcttgaccctgattttattaaatattttttcattctggaaatatatcaagcctcatttttatttgagccttggcatttctccattctttttgttttatctgagctctgtcaccattattacatctgctactaatggctaggaacctcatggggagggcaggaaaagcacatcgccacatgcaagccttttcctgaaggccttccacaccccacaccccatactccctggcttttcatcaaatgatcttttaaaagtgaatctttggagggctggtgagatggctcagtggttacgagcactgactgctcttccgaaggtcgtgagttcaaatcccagcaaccacatggtggctcacaaccatccgtaacgagatctgattccctcttctggtgtgtctgaagacagctacagtgtacttacatataataaataaataaatctttatacaaaaattacacccaatagaacaccaataccttgcctggctgcccttggcccccggaaaagtttccccaaatattttcctttggccccgcggcccccgaaagcgaacggtgaacagggtcaatatcccgcctcccttagccacatttctggcacatggactaaggcgccctggaatccccccccaacaaaaacacacatccccgcgcgcctaccctataccatcccccccacccaaccatcccttatatgccactcccctccacgccgcatttaccgcggcctttctacatcccagaggacgccacancgcgggcgcttcggatattcaaatattcacatccacccgcaccgccccctcgtaaatcccttccaccccatccgtgccttaccccatctttgacacaccctctaccctccccgtgcacatgtccttcccacccaagcctagtttcgccnnnnnnnnnnnnnnnnnnnnnnnnnnnnnnnnnnnnnnnnnnnnnnnnnnnnnnnnnnnnnnnnttctcattttaataaaccggtgccatattacgccaactcccgccccaaatacatagcacaccaccccttattactagcacgccgcatatccccttccgccccccattatccccttatctcaccannnnnnnnnttctccgtgtctgtgttcccaaacttcttgttatgtttcgccgacaccgctataagaccacgcatggcgtccaccccgcttctcgtgcccactcttaatatggctccgcaccccgcagcgtatatccttctagaatacgctcctccacccgccctaccccttatatttaaatttaacgcccacactctctttctgttattccgtgcgccacaccacct

SEQ ID NO: 452723 - DNA, 857 bp, Homo Sapiens
cttaggttcatggagccaggtatgttcttagggaaaaccaaggggggggaccaagttttcaactgaccctaatgggggcccccgcgccccccaaaacaaatgggttttatagaaaagttttttgagaggggccggagggcggcaccgacaaagggaagagggaaaaaaaggggtggactataaagcgaacgggggaaaaaggtccattgggactgcaatccaggtggctgtttttattggaggctgggaaatgagaggggtcccatccctcaagttttccctgttggtgacgagggggctgagggggccttttccagtgaggattcgttcggtgggggggacttacacaaaagtttgtctctttgggtggtagggtactcctagcctgaacctcggtgcaggtgccaccaaactctgtcctgagtgccgccacaccccttccgtccagacacaccaccttggagtttgtgtcttctactgtaccaacacaaaaaagacaaaatggtcatccatcacaccctattatctaagcttcaaactacattctgcctctgtttgtcatcctctatcaggaggcagaagtgtcctgttcctataatgcctaaggtgttctaggttgaatggctttggcatttgggactcaacatgccattggtttcagctctgctcgatcgaggttcctggatagccctgagtggttccatcaatgtttctagttgcccagggccaggtgctggctttggactacttagctctgagatgtgcctgcccgcctgtttgctggtgagcatcattgtctcatttaatgttcagttttaaaacgaatcctacaaagcagtcttccctccctcggctcc

SEQ ID NO: 452724 - DNA, 810 bp, Homo Sapiens; identical to SEQ ID NO: 150745
  misc_feature (190)..(205): n is a, c, g, or t
  misc_feature (587)..(619): n is a, c, g, or t

SEQ ID NO: 452725 - DNA, 836 bp, Homo Sapiens; identical to SEQ ID NO: 150746
  misc_feature (117)..(260): n is a, c, g, or t
  misc_feature (267)..(276): n is a, c, g, or t
  misc_feature (366)..(416): n is a, c, g, or t

SEQ ID NO: 452726 - DNA, 622 bp, Homo Sapiens
tatattgtcaggcctgtaattagttttggactggtagttagaagaataagtggaattatgtgaagggctattagtgttagttctcgtgtgtgtgagggttggaggttaattatatggttggttagtttgccgcgttgggtggtaataattatgtatattgagtatatacctgtaataataatgttaattcctataagaataatggtaaagtttgatcaagaaaataatgatatggtaatgaataattctcctattagattgattgaagggggtagagctagattagctagacttgctatcagtcatcatgtggctataagtgggaagaccatttgaagtcctcgggccatgattatagtacggctgtggatccgttcgtagttggagtttgctaggcagaataggagtgatgatgtgaggccatgtgcgattattagtattgttgctcctatgaagcttcatggagtttggattatgattgatgcaataaccagtgctatgtggctaactgaggagtaggcgattagtgattttaaatctgtttggcgtacaggagattgagctagttataattattcctcatagggagagaaggtgaaggggttgccatatattttggtaa

SEQ ID NO: 452727 - DNA, 715 bp, Homo Sapiens; identical to SEQ ID NO: 150747

SEQ ID NO: 452728 - DNA, 972 bp, Homo Sapiens; identical to SEQ ID NO: 150748
  misc_feature (644)..(667): n is a, c, g, or t
  misc_feature (932)..(932): n is a, c, g, or t

SEQ ID NO: 452729 - DNA, 590 bp, Homo Sapiens; identical to SEQ ID NO: 150749

SEQ ID NO: 452730 - DNA, 787 bp, Homo Sapiens; identical to SEQ ID NO: 150750
  misc_feature (111)..(111): n is a, c, g, or t

SEQ ID NO: 452731 - DNA, 499 bp, Homo Sapiens
  misc_feature (91)..(91): n is a, c, g, or t
  misc_feature (212)..(212): n is a, c, g, or t
  misc_feature (222)..(222): n is a, c, g, or t
  misc_feature (225)..(225): n is a, c, g, or t
ggaagtccataagtagtttattgtcttcaagactacagtgtggattcctctcccagagaagggtctttcagaggcaggggattgtcacccnaggtgcaggccgtctacttgtcattttcatacatggctggattctttccttttcgacttgctcaaactcctggttgccccatgtgtagatcaggtagaccactacaaacggcgcgcgcacngcgagggatngcntcagcgagtgcggcgcagcacgttggggatgcctttgctgaaatagcttgggaaggcgcgctgctcaaagggcgacaatctgtaggagatcacgttgccgtatccgcgccaggttcccaaactcgcggcccatggtgacggcggccctgggacagaagatagacgcgtggctcagtctcgcgaaaaacctcccacggcctaacaccgacccccaggatcggtcacctctacctccagagctctgagccggctttcgcccgtcacttccgggccc

SEQ ID NO: 452732 - DNA, 1071 bp, Homo Sapiens; identical to SEQ ID NO: 150751

SEQ ID NO: 452733 - DNA, 454 bp, Homo Sapiens
  misc_feature (101)..(101): n is a, c, g, or t
ccaaaacttggtcttgtgcttgtcaaaaaaactttcaccagggccctccaatgtaacatgttgtggtaacaggtcgatgtcttgctgggttgggtgctccnagcttggggatggtgatgggctctccccacaacagtggtgatgggcttggagtaaggcaccagcccccaggtgtcggaggagaagaggcctcgaccatggaagatgcatggggcgaaaccaatgtatttctggaacttcttctggacccatcggccccaggagccctcctcgaagatcacctgcttgtacacttcattctctccaaaggagtagatgggaaccaggtcagctccatgacgcagggccagtttcacaaaagcccttcggttccgcagggtgactgcattcttgccaggcatggagctcagagactcagccgcacccccgaccacgatgatgatagcattgccac

SEQ ID NO: 452734 - DNA, 649 bp, Homo Sapiens
  misc_feature (245)..(245): n is a, c, g, or t
aactgctcacaggtctttattcactaatggggtaacattttccctttcccaggctgcctttcactgagggttccaccgagctagtgtcctcttgtcagagggaaggtcctggtggccaggtttgcagaaggacttcatccctttctgggagttgctggtctttgttgtcagaaagaagatagggagggacacaggccatcaatactcagagctccacgatatccccagctggggccgcagggtangtagggactgggggtatcccccagcctcagcagcctgagggcttcaggaatcaggctcccgggatagcgccagagaagcagctctgggcaagggctcctgagtggtggcagggcttcgggaaaagtcacaggggggctgcagtaggggtggtcattatgtaggctgagtcgggagaaatgggtggccatgttctcctcagacaggaactgcttgtgcaaaggttccctgggggaaagactggcgtttaggccgcgagttaccccagtggtggcccgtgggtcccgacttgggggacctcgctccaggggctgttgcaggatcattacggctcagggtcctgcagatagaggggtgggattcaagcagcagaggcggagcctttgagggcgtggtacagcgcccc

SEQ ID NO: 452735 - DNA, 532 bp, Homo Sapiens
ctcagttactcatcagattcctggtccatcgagcgttgatgaaactgaaccacgtgaagactgggatgacgacattagttctgcttcttgggaaatgcagccatagctaacagatagatggcataggctgtgccaccaagcgtcagagccattgtggctctgtagaggagggcatcagatgccccgcctttcagatgaactggcatcccattatcctcctgaaacagcttttgtttctctggaaccttgttttcaaaatgccttcgtgaagtggtgctgatggtcctctgggcaatctgacgaagggccagcagattccgcaacatcttggctcggttgttacccaccaaccgcgactactgaacgccaaaaatcgaaagccaccagaccggaaacggaactccctcctagcgctgcgcgcgcgtcgagcaagagggctcgttccgggaagaggaggggctcgcgctcccgaccatagagagcggaaggcgagccagagcgacttctcgcagcggcccgtctagcctccccc

SEQ ID NO: 452736 - DNA, 552 bp, Homo Sapiens; identical to SEQ ID NO: 150752

SEQ ID NO: 452737 - DNA, 638 bp, Homo Sapiens
  misc_feature (71)..(71): n is a, c, g, or t
ttttattagcatggaccattggatacggcagcttccagcatgccgagggagtgagggaggcagggagccgncagagcagggctctcacttcttccactcattcttgtcatagtcccacttggcggagaagccctgaatggggttggccttcatgtccagcattcgcttggtctgcatggccacccagtcacgatcgaaagtatgagggatggggccatacacatagctcttctcccaaatcagaacgagcgcagtgaagccaatgaagaacatggccatgcccacaactgtcttccattcattggtgcccctgttcatctcggcgaagctctcgttaaactggatgcggtacaactgaactttctcatccctggaaaggctgctccagtcggccttctccttctccttcagcgccttctggctggcagacagcatcgtgacatgggccacatcaggcaaggggtagtcacgccgatcagcgtaagtggggaaagcatagtcttcactcttcacaacactcccatgtgctcgaaggcacaccgaagtagaaatggctctcttgccaatcaggctcagcgctctggaagccaacattctgccaccgctgcccaggcgaccgccgcgaccgccctctaccc

SEQ ID NO: 452738 - DNA, 587 bp, Homo Sapiens
ttctggtcgttgtgattttgctggaggttttgataccactgggctcttctgaatggtctggacatcagttggcgagagaaaggcactgaagaaattttcagattcatcgaccacagtcctccgaactggctttgtgattgctttaggagaggctattggtggactctgaggttcagtgtttgatttcaacccccaggttgaagtatcccatcctccactgacaggggaacttattcccggctctccatacggaatggtctcggcccagatgctcggctcctcttcctggatgtccagaaccctgtcaatagacttctgggcctgggacagggcctgcttagcgaagctggagagctgggaggcgttgaaccaactcatcgcccctcctcagccggcagtggcggcggcagcaccaagcgggaaggcctcaggcctggggaagggtgcagaggaacggcttcgctccccttttccactcggctggttctgtcagcgtgtggccattaccccgacagcctcccgcgagcccgggatgttaccctcggccgttcccgcacagctgagacgaagggggcccatgtgcgcat

SEQ ID NO: 452739 - DNA, 503 bp, Homo Sapiens
tcaaaataatttggtttcatataactggagtagtaattaatattttaacttcatcaactagatgtatctcctcagtagcatagtaactggtacatccagaaatctgaaatccgagttacttgatacaaattctactttatctaaccattagttattaaggaggtaaaatcttgttctaatttgctattaaaatcttattggttaaatagaaataagaaaaagtataattaagtttcttcatcctcaatgtcaactttatattgtaattaaatgtgtagcaaccaagctgacaatagtgattaagaaattaaagtacagaaatattttatttggggactcaaaatgaacaaaagatagataagattaaaatttcacttaaaaagctgccatctcttcctctcttgccctcccaccaccaataactttaaggggaagagaagctggttttttccctaaacatgtctttaaaataatgatacactgtatttattaattcttgatgc

SEQ ID NO: 452740 - DNA, 461 bp, Homo Sapiens
  misc_feature (431)..(431): n is a, c, g, or t
ttttttttgtatttaaatacttttattttcatttcacaaaaaaagcaacagtgtttgcagctacacatgcctttcagtcagtgctggtcatatgcaaaacaagttatcagaaatataaagaaaaataagccttttccctttacaagtgaaacaacacaatttgcatatacaatattatatatacatattttcaaaatgtttcacaaaagacagattatgatacaaatttagatttccacccacaagctcagactcaagggatttgaagatctctatagggtgtttaaatataaaaatgtaataccctttacaagtttcccaggtaactactttcccaaaggtatttggaagggggctattcttcacaggcaacctgggggcacttgggctttaatcaggcagctggtaaactagggtttgtctccatgtgnggtttgttggttatgcaatgctcccatttg

SEQ ID NO: 452741 - DNA, 470 bp, Homo Sapiens
  misc_feature (353)..(353): n is a, c, g, or t
  misc_feature (387)..(387): n is a, c, g, or t
  misc_feature (398)..(398): n is a, c, g, or t
aatgagaattatggcaaaatgggagcatttgcattaatcaacaaactcacattgagacaaaacttagttttacagctgtcttgattaaagccaagtgttccatgttgctgtgaagaatagcctctttcaaatactttggaaagtagttacttggaaacttgtaaaggtattacatttttatatttaaacacctatagagatcttcaattccttgagtctgagccttgtgggtggaattcctaaatttgtatcataatcctgtcttttgtgaaacattttgaaaatatgtatatataatattgtatatgcaaattgtgttgtttcacttgtaaagggaaaaggccttatttttnctttatatttcctgataacttgttttgcatatgncccagcactgnactgaaagggcatgtgtagactgcaaacactgttgctttttttgtgaaatgaaaataaaagtatttaaatac

SEQ ID NO: 452742 - DNA, 223 bp, Homo Sapiens
  misc_feature (53)..(53): n is a, c, g, or t
  misc_feature (71)..(71): n is a, c, g, or t
  misc_feature (167)..(176): n is a, c, g, or t
acctcaggtgatccgcccacctctgccccccacttttaatttgcaaaatgggnctgagttaagaataaagncagtttgttctcaggtttcatctttttaataagctctgtgaaagacatcctaagcactgtatgagacacaacagaatattttttcttccagtattnnnnnnnnnngacatttgcaaacattttaaagccaactcttctatataatcagtttc

SEQ ID NO: 452743 - DNA, 415 bp, Homo Sapiens
  misc_feature (15)..(15): n is a, c, g, or t
  misc_feature (24)..(24): n is a, c, g, or t
  misc_feature (41)..(41): n is a, c, g, or t
gtggaagcccctatncaggaaatntttacctaaaacccatnggtatagaataggctaccattcctgaataataatgtaaaatgaaaacagaaacagcctttcaaatttgaagagaaaagtttcccctgacccctagtcagctaacaaagccctatttcctaacagtgaacttccctgaactcaagcagctgctcatgaagctttaagagttcacaggcatttcatatttcaatagttgttgaaacatggaagataaaacactgagaggatatttatcaaacacaaatttatatcaagattaactttttcaaccagcttacaagcagacttttccctttctttgttaaaaaatgaatggtatgaaactatatgttaaagatgtttctataataccttacatttacatagcgcttta

SEQ ID NO: 452744 - DNA, 368 bp, Homo Sapiens
tcttgttctgccttactgatttatttcttaagttagagtacacatcgagtctggccagaatatagtgccacgtagctatgcctattgctaggtcacattaagaaagtaacttcatattgccctttcaactgcagtaacaccatcctggaagaaaaatggaccctccagtcaaagctgtctatatatgagagggttttagaggaagtttcccccaaaagattctttgttctgtaagtgaccccttgatgcaaggagtgtttcccagccctagaaataggaagcgcagccacaggcatggggattttaaaatcacgcttcagagacagacatcttggtgtttcatgttgacaccaaactgaccgtccccc

SEQ ID NO: 452745 - DNA, 571 bp, Homo Sapiens
ttctgattacatgaatttttattgtaccatttcttatggtggcaaataagcaaactgtgagtaaacgagggcagctgaataaatttacagtatacaatattagagaatattatgttgcaattgctcatcttactctgaccatcataatcattctttttgctgggtccaggaccatggctaactcatggcacaaaaagctagtcctggtttggtctgaatttgagtcctagttattctggtgacttcaaggctacccaagcacatgggcaaaacacttaaaaaatatgaaagattatttaagtaaagcaaaatgaggaacagaagaagacagtttagattcatgtacacatacatatattttatttgggtatattacctcagaaaatcaacaactgtcattttcaatcttatctcaagaccaaccttcagaaatgctagtaagtgctacagtaatattaacattatattgagtttaaaagaaattaatatatttaaaatcagtctaaggttttaatgctgtatacccattttcataatcattcaaaaacatcaggccgggcacggtggctca

SEQ ID NO: 452746 - DNA, 413 bp, Homo Sapiens
gccacagggtcatatatgcatctgaagagtacgaagatggagttctgagaaaaaagggtttatgactatagaaaataaatctggttcttgaaattatgttcaaagcaaagcattaaaacagtaatgtctcatacactgaaataaagcaattagaggtaataaattataagtacagtagttcaaatatggttgtaagcattagtgttgctaaacaagttaagttcgaaacatgttaaatctgttatattttttcaaagggatgtacaaatgagagccttcatagaaatctaaaacgataccaccttgtgatcttcatatagaatatgctgaaccttgaccatttttgatttataacatactttggttaatacattatgttccatatgaagatcacaaggtggcatcgataaaca

SEQ ID NO: 452747 - DNA, 789 bp, Homo Sapiens
ctttccagggggggatttgtggtcccggagaagagattggcggaggggaaagactgagtcgtctttcctttgcccgcttctgtggactgttcgaacgcccaggggtgggccaaacccgtttcttaggaaaccaggaatccagggaaggcagaatggcttcctttgggtggaagaggaaaattggtgagaaggtctcaaaggtcacttcccagcagtttgaagctgaagctgctgatgagaaggatgtagttgacaacgatgaagggaactggcttcatgccattaaacgtaggaaagaaattcttcttgaaggctgtgctgagaaaagtaaacagctgaaggatgaaggagccagtttggctgaaaataaaagatatcgggaggcaattcagaagtgggatgaagcactacagttaactccaaatgatgctaccctatacgagatgaaatcacaggtgctaatgtctcttcatgaaatgttcccagcagtacatgcagcagaaatggccgtccagcaaaatccacattcatgggagtcttggcagactttgggacgtgctcaacttggtttaggagagataatcctggcaattcgaagttttcaagtagcccttcacatctatccaatgaaccctgaaatatggaaagaagacctctcttgggcaagaacgctccaggagcagcagaagggtaggcacagaggattaaaacaaagtgaagcaccagctgaaagtaacacacttttcaccaaagtcaattcgcagactatgactttgcacagtgatgaga

SEQ ID NO: 452748 - DNA, 843 bp, Homo Sapiens; identical to SEQ ID NO: 150766
  misc_feature (137)..(137): n is a, c, g, or t
  misc_feature (686)..(709): n is a, c, g, or t

SEQ ID NO: 452749 - DNA, 462 bp, Homo Sapiens
ttttttaatttaaaggtttagtttatacaattgataattctgcaaaccacaatatgtcaataactacatactgtaataaaaataaacaaagtcatacttaattctataatgcattaagaataacctaaaaaaacaaattgtgaataaaggcatatttaataaattagggaacatcttaacttctaatagactgggggaaatttttaagttttctatgtacacaaaggcagtgggaacaaatgaaaaaaacaaattactacattgttgcagcacattaaagactggatggtgtatattattcacaattacatcctctttcccatagcctggcagaggaaagtagttaccaagcacaggaacaatttcaacatctcactggagtctccaaaagcaagcagatactgcaggatgtcattaagcaacttactgtcacttcacaccatatgtggcagtaagaaactt

SEQ ID NO: 452750 - DNA, 372 bp, Homo Sapiens
  misc_feature (139)..(139): n is a, c, g, or t
  misc_feature (163)..(163): n is a, c, g, or t
  misc_feature (244)..(244): n is a, c, g, or t
  misc_feature (259)..(259): n is a, c, g, or t
  misc_feature (267)..(267): n is a, c, g, or t
  misc_feature (273)..(273): n is a, c, g, or t
  misc_feature (310)..(310): n is a, c, g, or t
  misc_feature (318)..(318): n is a, c, g, or t
  misc_feature (329)..(329): n is a, c, g, or t
gtcaattcttgcgtaaatcacattctgtattcatacaaaaactttgtttttctctgacaaactgtacacatagaaacaaatttccaaatggacaggaacttaaatttgtggagatgccccatgtcttgtgagacttaanaaaaagaaaaagatcccagctttnatcttcacaaaacaacatgggagttggggcaatgagggttgacaggacagggccagccaggctggtagctggcagcagtcncttcatcttgaaganctcattgngggttnctgggattcaggtgcccagaaaatagttcagggctanaatggtanaggcttccttntagtttctctaggtgagtccacaagaaagttcttacatactgt

SEQ ID NO: 452751 - DNA, 494 bp, Homo Sapiens
  misc_feature (14)..(14): n is a, c, g, or t
  misc_feature (28)..(28): n is a, c, g, or t
  misc_feature (55)..(55): n is a, c, g, or t
  misc_feature (170)..(170): n is a, c, g, or t
tacatagttttatngaaggctaaaaatnggttctaaggtaatgtaaaaatataangcacaaatatacttgaatattgcttaaagaattgtgtgaatagcaacatatattatggatatatactttgtgatatttttaaaaaataattttttcaaagaatgtataagctgcnatatataactcaggagattccatgtctttctcatatttcagaggaaagattataaaatataaaatttcttagagaacacctctttgtcagagataaacaagaacaaatactctaaacttatgtgaacagttttgagtttatgaattctagaaactaaaatcaagaatacagaaaaatgaaaataacattttacttctgcgcttctatgtttgggaaacattgctctgataaaaaatagctgtcattatgcagtgtgtatattcaaatatgagataagactatgtacacatccacttttgttaataaactcaatattgaatacgt

SEQ ID NO: 452752 - DNA, 702 bp, Homo Sapiens
catattgggactttagcgcagtaatgcgaacatccaattcatctttctgctgatctaaggctccattcctttgtttaagctcctcattttctttagttagctgatcttttacaccagctaagtgtgcaatttttgactttgctgctacaatagcctttctggttttttcttccttttcagttatctgttgtcggagctgctcctcctgtgtggttctatcttgaagatcctgacgaagtcgtgaaagttcagactgaagttgcacagtctgttcctggagatttcttgcttctgtctctttttcagataatgtcttctgcagattctctacttgactttcaagtgattttgattttgtttcagcttggttgagcgtttctttgagttcctgcatttcctggactgaaacatgctgctcctgatggtctccagaggactgagccgatgtctccataaccttatcctgttgtgctttaagttcttcatattgagtcttgtacctacgtccaattttcttaacttgagtaatagttttgactttttcttggatatcaattattttggcatctaagtccttctggatggtttccttttcagttcttactttatttagatcttccttcagactctgaattaagttctggttgttagtcaaagatgcatttgatcttgcaatttcagctttaagtctaccaatttccc

SEQ ID NO: 452753 - DNA, 365 bp, Homo Sapiens
ggaaccgggttgcctccatggaaactcagggtttctgcacaaagaagacttagtctatttcttttttccttagctctgattttggcttctttgcttgtttcttcttttcctgaaccatgtattaacttgaaaaaagttttttcttttgattcacacatatttatttgagaaaagaaaagcaatgttgtttccatcttctctctaaaatgaagagatgtctaatttattacatccttccctagttcatttattaatactattccatacatatacatagtagaataaaaagttatcacaactcttacagtaatgtttacaaaaaagcagtcaagagctgcgtttctttctgtctctgcagaaatccc

SEQ ID NO: 452754 - DNA, 625 bp, Homo Sapiens
  misc_feature (174)..(271): n is a, c, g, or t
  misc_feature (309)..(318): n is a, c, g, or t
  misc_feature (365)..(496): n is a, c, g, or t
agggggccaagggtttttattcccctggggaatcaggtttatcaatccccttggggagggttccccttggggcaaaaggtttaagaatttcccccatttttccaaaaatggccgggcggggggtaatttgaatttgagctcccttgggctcccgttgaaaaatcccgtaaaggnnnnnnnnnnnnnnnnnnnnnnnnnnnnnnnnnnnnnnnnnnnnnnnnnnnnnnnnnnnnnnnnnnnnnnnnnnnnnnnnnnnnnnnnnnnnnnnnnngggaacaagtttggccctgtttcctttccttttggggnnnnnnnnnnaaaaaaaggttttaaaaaatttttggggggcgggggggcccccaaannnnnnnnnnnnnnnnnnnnnnnnnnnnnnnnnnnnnnnnnnnnnnnnnnnnnnnnnnnnnnnnnnnnnnnnnnnnnnnnnnnnnnnnnnnnnnnnnnnnnnnnnnnnnnnnnnnnnnnnnnnnnnnnnnnnggtggcagcaaagttttattgtaaaataagagatcgatataaaaatgggatataaaaagggagaaggaggggaagggtggggtgaaaatgcagatgtgcttgcagaatgtaaaagatgttgacccttcc

SEQ ID NO: 452755 - DNA, 592 bp, Homo Sapiens
atcttccccttgatcttgtcttcagctttccaaatgattccgagacttgtttttcatagaaaggtcaaacatgctggcagtcatgttgtttctcataaacctggatgtcaacctcaatttctcctcgcctccttgtcgttctttcgtgggtttggatttcaacttataccactgcgtcttcctgcggccctggtcgcggtgcagatcccgcaggtccacctcggcgcggcccaggaacttgtcgaggccgagcagcgcgcggtgcagcacggtgagctgcagggtggcggcggccgcgggtccggaggacagcagcgatggcagctcgaaggtggccttctcgctccacacgggcgcgcccatgctgcgctccgacacggaggtggcgtacttctccttgcccacctggatcaccgcgtacgcgtcgctcgtgcccccggggcccttggcccgcaggccccgcgcctgcagcaccgtcacctgcacgtgggttggggaccacgacggcccccatgccccggccatgccgagaccattagggacatggtgacgataacactccagaagcgaggagaagatcgccgcgactccc

SEQ ID NO: 452756 - DNA, 652 bp, Homo Sapiens
tcgatctaaggatccccgggtttatcgatgcaccttccatttggggaagggtgacattgatttcgtttagctgcttaagatatgtacttgcggttgtcttgtgagacatgacatctgaagctgaagaggagtccctctcattgttgtcattgtcccaccgggactgaaagtctcccagttgaggcagcattttagctttgatgtctacagggcaatcatggatcaggaaatttctgcaaattagacttggaaaacaaggtcttgatccttcttgtcttgggacgaagactaatcatcactttggactgaaggtgtagtgctggagactatgtgggaggcagcacctgatgcactatccatattcttccccttgatcttgtcttaaagttttccaaagggattccgaggcttgtctttgatgaaaaggtcaaacatacgggcagtcatgttgtttctcataagcgggatgtcaacctcaatttctcctctttatccttctctcctggttgggatttcaaggtataccaccgcatcttcctgctcccctagtctgggtgcaggtcctgcaggtacacctcggcgaagcccaagtacagtagcagcagcacctcaaaggtggcctcctcctctgacactgaggcatcgataaacg

SEQ ID NO: 452757 - DNA, 819 bp, Homo Sapiens
ccggagtgaatgggaaggtccgttaatggcctcgccaacccccaatagaagcccagcccttttttcccccctgtgggggggatatattttgtgaccccggggccctgaaaccactgtaggggaccttccggccgaaatatctcttgtacgcttttggtcacggatcaaagccgttaactgtttctttcagtggcagcatgtcgcaaaagaatctggttttggctatcggttcccatcggagacagatgcagcccattggcatctgacaggaacgcgaagctctcgatccagaagatattccactggacccacagaacccaaacccagtttatttacaaggggagtaaaaagtcagggctggccattgtgcaatggagactcgaatgcactggggaaggactgggtcctcacggggcgcccatacaagagacccttccagcagaagcacgataacttcctcagcatgaacttttacccaggagtgttgcttccagttacagccatcaaattctacaaagatcgctaggtcctggggcaccgccccgctcatggcccgcaccgtgccggcccgccaggctcgagtgcgcagcgcaggccccggatctccgctcgccgctgccgccgcgggagccgaggccgaggctgaggccgcagtgtccgcgaacagcagcagcagccgcttgcccaccggggaggccgccgcgtccgccatcgccggggccggcctgacccgcgctcccgcccgccgcctcccaccacctccgccgccaagcgcccgatccgcccgcaaggcctccctccgcgccacccgcggccccc

SEQ ID NO: 452758 - DNA, 1081 bp, Homo Sapiens
ttccttctcatctctctcgctctcttcatcccgtcgtatatcctcgcttgcggcacttctcccagcacacgttctgaaatcgctcttcaggtccctgttcgccccctctcaccttgggggaccattttctggttcttcctgcggcgagtggctggccctcctccggctgttggggctataatggctgtggatttggggtctgtagtggtcgtgtaaacaccttttcgccgttttcggtcttgactcctttgtcccgggggccttcgcatcagggcactcccctctcgttagtccaccattgttctcagctccgaagaatgagcacccctgtccttcccccccagcactacagtggaccacgaatggccgggttgccggttcttggtgccttccagcatgctgtttggtatgcgacggaaccgactggatctcctccaagtaggataaaaatcttggacatccctctggacagccgtgatctggctagtcagtatattgtaaatgcccctccgtcctttcttgcccagacaaaaggtgcttgaccttcaagcccgtggttgcatagcaaacagaatccgttcgaaacttcgtggtgaccttgaacttgccataggtggctgagctgtgctttgaacctagtttgggccagtatcggtggcttttggttcgtccaccctcctcctctgcagtgaccatggcaatcacattcactccctgctcccacaccatctgccagaagtcgtggcacgtgtgtggcaggggccctgggtggctatgtagtgccattctgccccgccaaccaccacctcgatgtgggaggcattaatgtatcctgtgttattttctttggttggtatcagctctactcgattctcctcataggggacaacttcacggattcggctgcgctcggcgttttctggcagagctgctgtgctgaaaatgccattcgcctttttctttggaatttgctcatattctgtgaacaccattccctcttctagtttcttcttcacggttctgaacctctagtccatgggaacccgggtggcatcaactcgattctcttcccgccctgaga

SEQ ID NO: 452759 - DNA, 943 bp, Homo Sapiens
gaattagataaagtcgggaatgttttttctgaagctactctcttcacggtggataaatccatagacttctttataatttatagtagtaaagatatcgaagcaggaacaggctcctggaattcaatacttaattcatggcactagaggttaagcagaagacgttcacatttcctttggtccacggggcttaacccctgcgcagttttccccttcttactatgttgcaaattatcacaatcatattcaacttctggctttccaatatctctacaaaatgtgcatatccagtccccacttggaaagctaagtagtgttggaacatgacaagttagatgaaagacctttggacatttttcgcagcacaagagatctcctccgttttggcagacagcacaccagtcttcatttgggtcatcatctttattgttgccatctcctccaatccttgccgacctgtgcatgaggcttcgaattggggactttccattaacaaggctgctgagccctgactgtttgcagctttcattcatatctgcaggttcagttttcacatggttttccaggcttgccaatgcatccaattcactttctagatgcaggttggttgagagaggtggtgtcaagctactctcaggactgctcaacatgcaagcactcctcctgccatcctctgttttttcttgttttacacctcctgaaaagctacatatttcatcttcagtcccaggttcttgcttgaccttcacctgatcagatttgaaactaagacttgtcttctcagcagttcttcctgatgacccacagctgcctcgactgccagtactagaagtactttgggggtctcacaggtgtgtgagaattggataaaccctgatgatcccggagaaaggggagagggacctggagaaggattcatggtgcttgtagctgtctggctaggtct

SEQ ID NO: 452760 - DNA, 751 bp, Homo Sapiens
atttcttcttataccacagtgggacatatattcatatttgtttgtttatacataaaatgccaatggaaggaaggactaaaacttgtagtaattatcttaggaaggaaactagtggttataaagaacggagctaggagggcagtttatcacagcatactgtaccttaatatattttgattttttaaaaccatataaaagtattattttttcaaaaaattagaaatgttatctatcttttgaaagctaagttcatgcatctcctttttcatgaatcttcactgataacctctgataactagagtgctttgaattgtttctgtatattgctatagcagtttctttaggccatttatgagtcttttacctattatgaattctttttagtcagagccatcttctacatagctctctaacaccaacagcaaatgaggatagtaccatataaaaagtagcttgttcaagagaaaactggatgcataatgatagaaatccttagtggtttggccttgagtcagggatagcagaatgactttggatttgggcataaagaaaactttttgaggggaaagggaaagggtccaattgccttggatttggatggggggttacctttaggaagatatggattaggcaaaactttaaaaaggggtcaattccctttttaatggggagggaaaagtaataccctccggaaaaaaccttaggtttttttaaaaagggagcccccgaaagttcccttaagagggggagg

SEQ ID NO: 452761 - DNA, 845 bp, Homo Sapiens
  misc_feature (516)..(628): n is a, c, g, or t
  misc_feature (654)..(731): n is a, c, g, or t
gagtaggtagacatatttattataattacacgattgttaacaatgtgtactgccatccaaaaatgaacatttattgctactttgttccctagcataaaagatgcaatttacttacatagaaaatattttatatgctttgatactgccatgtgtaaacattcttatggatatgtttgtgaactaaaattgacaaatacatattcctatgttaccaacttaagatcataaaccattctcatgtctgctcattaaagctaaagggtctattacatgtgaatctcaattattttttatagaaacatcacacttgattaccattttctgcatttcagtggttgctgtttgtattgaaaacaaactgagaaattgagaaatcaaatgtagtacctctcttaaaaagaggaattgttaacaagtaggaactaaactgccaaaagttattttccataatgactagagtcagtcatcacatacacaaattattatttatttatttttttcttgagatggagtctnnnnnnnnnnnnnnnnnnnnnnnnnnnnnnnnnnnnnnnnnnnnnnnnnnnnnnnnnnnnnnnnnnnnnnnnnnnnnnnnnnnnnnnnnnnnnnnnnnnnnnnnnnnnnnnnngtgcacgtcaccatggccccgctaannnnnnnnnnnnnnnnnnnnnnnnnnnnnnnnnnnnnnnnnnnnnnnnnnnnnnnnnnnnnnnnnnnnnnnnnnnnnngatctgcccaagcttggccctcccaaagtggtcaaggttattttaaataaagggttgggaggaaaaagaaaaagatgaacctggaatgcccttatttaggaaatactaaaacaa

SEQ ID NO: 452762 - DNA, 819 bp, Homo Sapiens
  misc_feature (261)..(520): n is a, c, g, or t
  misc_feature (718)..(718): n is a, c, g, or t
gtgtaattagaaatggaaatctaggtaaaggaagctttaaaatgttgtattttttccctgaaataaacttttatgatttaatgtcttggaaaaagactcacatgaaaagtggcttttatatttggtaggataaagccattgtcctttaataccatagcaaatagaagcaatttttaatgaggttactgaattgtttagtattcctaatatggcatccaggtcatcttttcttttctccaaccattattaaaataacttgannnnnnnnnnnnnnnnnnnnnnnnnnnnnnnnnnnnnnnnnnnnnnnnnnnnnnnnnnnnnnnnnnnnnnnnnnnnnnnnnnnnnnnnnnnnnnnnnnnnnnnnnnnnnnnnnnnnnnnnnnnnnnnnnnnnnnnnnnnnnnnnnnnnnnnnnnnnnnnnnnnnnnnnnnnnnnnnnnnnnnnnnnnnnnnnnnnnnnnnnnnnnnnnnnnnnnnnnnnnnnnnnnnnnnnnnnnnnnnnnnnnnnnnnnnnnnnnnnnnaataaataaataataatttgtgtatgtgatgactgactctagtcattatggaaaataacttttggcagtttagttcctacttgttaacaattcctctttttaagagaggtactacatttgatttctcaatttctcagtttgttttcaatacaaacagcaaccactgaaatgcagaaaatggtaatcaagtgtgatgtntctataaaaataattgagattcacatgtaatagaccctttagctttatgagcagactgagatggttatgatcttagttggtacataggatagtattgtcat

SEQ ID NO: 452763 - DNA, 1049 bp, Homo Sapiens
atattgataaacatttttattctaatattatagtaataattcaagtacaattttctttgaaaagtcaactctgttaaaacaaaacttgttaaatatctttcatcaaacataagcatattcttttcaatcccccacagcagtcagagccatgtagcagagttaagattttttttaagcctactacattttgttattgctaaaaaatctgaattagttgtcaaggtttcaggaggcagtcattaattaacttttgaaagctctatcagatactctgacataaaatcatgaatccagggtatcggtgtctggcaacgatgtgtccactaagtagaccactactttccggtcccaagggttagcattttcaatgactgtctgcaccagtgccaccagaggtttcttctccacatgatttcgaaacaccatagaagcctccctcagaccactgggttgcaatttcactcttgcaagttgagctgtgactgcttggaagggcagctttcggaacatgtccactaggggctgtacttttcttatgttgactaattcgtgtttgccataatccagctcatacacagataccagtccattggtcaggattccttttaaaagcaccctgtgccacttattttccacttttgcagcatacacttggtctttctccactgctatgtggcgctcttcagacacgctgtaatatagaatcatctcttccatcagaacttccaacttatgtatctcctgccaaggctggatgacgaagtagcctgggtgacaggccacaggcacatacacatccatgtgttcccctggctttgataagtggacaggaggtggcagttcctctgtggagaaagcgctcgtatggtccaccatggactttttgatgacatctgtgaggttctttctgaaattctctccagtgttgcccgacatgggcatgttgccatttttgctgttgggagagtcagctccactggatatggcactcaaaaacacatccttctgatgcttccacaagtctgcatttgtaatctggcgattaatcc

SEQ ID NO: 452764 - DNA, 1275 bp, Homo Sapiens
ttgttcccttttaagaccacagtggtagtttttttccaaagagaactaataaacatattaagctatatggtaatttttctaacacccacattggtttcggtcagaagaattttactggaacctggaggtatcccattcttcataataataaaaaagaaatgtagtgtataaaagctccaggttacattactaagcaacgacatttccgggagtgaatatacttcctgtattccgcaagctgcttcaagtacatattcgacggccatctgtgcttttcaacaaaactgcgttcttccactgaaagatcctgaaattcaggcttttgactgaagatgaggtagttagtagcaatgaaatgaagtagccaggttgaaaggcaatcagagtggtgaaacttggcctttttaagcaggtcaactatatcaaggttcatggatgccagttccctgcttggcatgctctgcagctgggtaatgatgaacagctcacagatgtgctgcagtctggacacttggtacatctcggcacagatcaggagacacatggcctggaatatgccagctgggcagcaggagtctgtgtacaggtattctaaaaatgacaagaaagtctctttggaaacaccataaacgggaatcaggacactcttttgcttccatgtaattaccattaaacatggctgccatcacttcacaacgggccaccaggatggccctgtgggctggcactgtcgtaccttgaatttcgaagacaacatcggcaagcatcggcttattaaggaaaaacttgagggaagtgttataaaaccacaaaggttttctggcttgataggttttgcaattccttaggcaattaatctttcctggtgtttttaaaatgcatttaactttctcgattacatttgaaacatccccagaatctttcaacttcttcctgatatcttcttccaattcttcccactgaaaagcacctgaataaatgaagcgaaggatgtctgataaacaagaacagaagagggcgtctttaacaatgactcgtaatggtgggttgcctgaagattcatggctagcacctggaaatgcagtatctctgtttatagcaaaaagatcctgggtagttcggatgatactggaatcctgaatgtcagtgggactcttcacattgaaaagcagcatgaaaacatggcttacagcgcagagaacgatcttgtgggcctctacaactttctttaaattggggttgtaaaataccacgtccacacactggcagcagaac

SEQ ID NO: 452765 - DNA, 523 bp, Homo Sapiens
  misc_feature (449)..(449): n is a, c, g, or t
  misc_feature (468)..(468): n is a, c, g, or t
  misc_feature (473)..(473): n is a, c, g, or t
  misc_feature (488)..(488): n is a, c, g, or t
  misc_feature (507)..(507): n is a, c, g, or t
ttttttttaatctaagcatttcttaactgagaggggtctaaatatcactaaagcaacaggacatctttaagggaaaacagctgcaaaacagctttgcattctagagtgaaagccttagttttagcctatggtatattttgttcccttttaagaccacagtggtagtttttttccaaagagaactaataaacatattaagctatatggtaatttttctaacacccacattggtttcggtcagaagaattttactggaacctggaggtatcccattcttcataataataaaaaagaaatgtagtgttttaaaagctccggggttacattactaggcaacggacatttccggggagtggaatattacttcctgtttttccggcaggctgctttcaggtacatatttcggacgggcccttctgtggctttttcaacaaaactgcgttcttccnttggaagatcccggaattnggggnttttgactgaggtgngggtagttagtagggcctngattgagtaggccggg

SEQ ID NO: 452766 - DNA, 637 bp, Homo Sapiens
  misc_feature (113)..(235): n is a, c, g, or t
ttttactagtttactcaaaataataccatactccacacaccacactgctaggtacttttccatataacgatcccaagtgcccattccacatcagcccatatgagggttctcannnnnnnnnnnnnnnnnnnnnnnnnnnnnnnnnnnnnnnnnnnnnnnnnnnnnnnnnnnnnnnnnnnnnnnnnnnnnnnnnnnnnnnnnnnnnnnnnnnnnnnnnnnnnnnnnnnnnnnnnnnaaacggataaactggtataatatattcttaaatgtgcttttattatttaagggcatggatcattttttccccactaaaacacagatgcaatttaatatgacaaaccatatttattgaataaaaatgtgctgtcaaaaacactgttgtcatatgcattggattcgtagggtatactttttaaggaaatactagttattatagctcgtaatagcagttttctgcttacatgatctgttttcagaaacaggtcatgtaaatactgagtacttttagcatcacttgcctcaggatggcccaaaaccaagggtgttcgctcaaagcactaagggcagtgagcacagaatgaggcacaactgctcagttgatttaagaagctttgagcgtggaatcaggaagcctgcc

SEQ ID NO: 452767 - DNA, 1348 bp, Homo Sapiens
  misc_feature (214)..(222): n is a, c, g, or t
  misc_feature (402)..(402): n is a, c, g, or t
atttttccccacaaggttctattttggcccaaaggcacatgttatgaaaaggggtggaaattaaagtgggggggattttttcattatccaccatcccatccgccttattttttcttggaaagaaccagggtcccccaaattgcccagggaaactggaatggtgggaggtccacacccagggcttttatactttccactgaaaaggggccttcgnnnnnnnnnaaccaactcaggaagccttgggacccttgccattaaatagggtaggttgcttggggaaaagtccctttttatttcataaacggagaccagggcccccaggtaacatattttgcatacttcctttcaactcctcccccactccagtcgatatccagtgacatctgttcccattactcaaanggaacctcccaattcacttgtgcacaagttgcagatctacatgtcacttgagggggcttgcactgatctggtggcccagggggctgtagtaatatcacatttttctgaaaatggtccaaaccccattttgttagctgcacgtagtctgaagctgtatgtcttccaggaagaaggctgctcactgtacattctacttcagaaccttggtaaacttctctaggttcatctttttctataggagacatttccacactgtaacaggaaatgggtgatccaccatcaaccagagggggtccccatcgtaactgtatttcttttgctttgggtctaccctgtaatctgggagggaggcatgggccaggaggcacagctggagtctgcacaagtaaagattcagagaccgcactctgtcctccatcactgatgcagtaaactcgtaaacgatagaaacagcctggattcagtcgatcacaaagatgttccctggtagcaccactgtatatcatttcccatttgtttccgttagaaccttctgccatctccactacatatttattgatggttgctccgccattgtcttttggtggatcccaggttattttaaaactgtgtgaatgtatctttcctttcactgaaggctttacaggtatgcctggtttatcagggcaagtagtaaattttactacttcacttggattacttttaccttctgagttgtaagcaataaccttaaatttatacttagtactacgtctgagatttttcactgtgtaagcaagatcttctccatcatatttaggcttaaaaccatatcctgaagtttcttcctccatctctaaaatgtaagaaattccttcatctgatggtgttcctgagggcttactccattgtaaggataaccaagtaattccagccttggttaatacaggacttgctggcatagaag

SEQ ID NO: 452768 - DNA, 1368 bp, Homo Sapiens
  misc_feature (34)..(35): n is a, c, g, or t
  misc_feature (37)..(37): n is a, c, g, or t
  misc_feature (304)..(304): n is a, c, g, or t
  misc_feature (309)..(309): n is a, c, g, or t
  misc_feature (347)..(347): n is a, c, g, or t
  misc_feature (416)..(416): n is a, c, g, or t
  misc_feature (559)..(559): n is a, c, g, or t
  misc_feature (634)..(634): n is a, c, g, or t
  misc_feature (939)..(947): n is a, c, g, or t
cgtcgaggagatagtaacggatgtgcgtgagacnncnaaacttggtggcgtgataataaatacgtgtgcgtaatgcggtgttcgtggtgaaaaattaatagaggtttaagtcggctgggatatcgtgtatcagaaacagaatgtgcgctcagccacggaggagtgattcgttacatgaatactatatcgaggtacaacattgtgtgacatgacgcgaggcgggtcgtgtcgtacacagagacgtaagaacgaggtcaggatgtgtcacttgctaaataaagaagagttattagagtactcatanggtcntgctggggtgaaggaaaagataagctaggtggtttacnacatgctcggtagtggatacggggcgagcggtgaatagagaaagtgtgggggagagtagtgaggggaantgtccggggagtccctcaggagatcgcgaacgggagagacagagagactgcgtgctgagatccgtgtgtcgtgacacgtggtgcacgatacgtgagggtgtacaacaacgcgcggtccggatgcggtgtcccgcgcgtccgtngtcattcctgcaaggcacacgggcggtacaatgtgatcactgcgcgaggtgactgcgtacaggtgaaagagcggnggggagagcgcggatgattactactccagtcaatgatactcgccgagactcgctcatctcagcctacgaacgcacagcatagatagctaggaaggatactgaacaagcactactatagtcagggatcctacatctcttttccttaaacaattcctcctagaagcgccaccaagatttaagcagagacggataacggagacgcttgaaaataacagataaacgcgtggaaattatatttcagggcagttaattgttggtaaggaatgtgagtgcgataagtgggaattttgataggagtgggtatnnnnnnnnntgggtgaagaaatgtagagcggatatcgatggttgattggggggatctgagggcggagcacaggagaagccagggatgcgccagataagaagaaagatagtgaggagagctctgtgcggcagagggaaagaatgcaattggcagagttcgcgagggaaggttgtatttggaggtcgcaagcgggtgtatagaattctcaccaatcagcatccacgttgtagggatcagccattactcaccactcccaggtcccaccatacgagtcccaactgggcaggtgcagagatagaagagccattaggttccccagacacgagagggagcatctgcgccggtcccacttggagtctggccaccaggcgcatcggtggcggaggcggctgcgctcggcccgcggctgcccggccgagtgtccgcccgt

SEQ ID NO: 452769 - DNA, 838 bp, Homo Sapiens
  misc_feature (50)..(67): n is a, c, g, or t
  misc_feature (106)..(106): n is a, c, g, or t
ggtggttcagcatatcgtaaaatccactcttttcatatttacttccatannnnnnnnnnnnnnnnnnggcttactctaggggtccttcttcatatgtttttgtttnaggttgcaatggaggtgaaatagtggcttgtatttgaggagatctgaaatttaggcctacttttaggttgctgctcttcaaaattcctgactgaatccttcaggaagtgcatcatctgaaaggtttaaacagagccaatccaaggcagaatgaaggtcacctccatataagagtgtattggtcatggcatcttcaatgtcctttgtcttaaatgaaaatgcttgtaaagccatgtataaatcctgcaattttttggcagtaagtcttccagaaatcattcctttgtcattattttgctttttatgctcattgatcactccaataattctttgctctagtttgttattaattaccactttcaaaatagatttatccagatttgcaggaccactagaatcatttgtagaattaaaactataaatttttggaccttgcttgacacggggctccctggagccggcagcggcagcggcagcggtggccggcctggacactggcttcttgctttgggcctccccggcaattccagcctcggcagatttggctctggaagcagacacggcggcccggaccaccgcggccgctggagccttgtgtttcttgttcttgccgcccatgttgcagctgtggcagaagatccttcgcggcccaggccccgacggtaccactgcacagccgagagctcttcacattccccggctccggggctgccaccctgcgcttcgatccgct

SEQ ID NO: 452770 - DNA, 937 bp, Homo Sapiens
  misc_feature (387)..(406): n is a, c, g, or t
  misc_feature (830)..(830): n is a, c, g, or t
  misc_feature (840)..(840): n is a, c, g, or t
aagatgaagttgtaaagattcagtccctgtcaaggatgcaccaagctcgaaagcgctatcgagatcgcctgcagtacttccgggaccatataaatgacagtatctaaatccaggcttttattcgggcacactaagctcgggatgactacaagactctcatcaatgctgaggatcctcctatggttgtggtccgaaaatttgtccacctgctggaccaatgtgaccaggattttcaggaggagcttgaccttatgaagatgcgggaagaggttatcaccctcattcgttctaaccagcagctggagaatgacctcaatctcatggatatcaaaattggactgctagtgaaaaataagattacgttgcaggatgtggtttcccacagtnnnnnnnnnnnnnnnnnnnntaaggaacagttgtctgatatgatgatgataaataaacagaagggaggtctcaaggctttgagcaaggagaagagagagaagttggaagcttaccagcacctgttttatttattgcaaaccaatcccacctatctggccaagctcatttttcagatgccccagaacaagtccaccaagttcatggactctgtaatcttcacactctacaactacgcgtccaaccagcgagaggagtacctgctcctgcggctctttaagacagcactccaagaggaaatcaagtcgaaggtagatcagattcaagagattgtgacaggaaatcctacggttattaaaatggttgtaagtttcaaccgtggtgcccgtggccagaatgccctgagacagatcttggccccagtcgtgaagggaattatggatgancaatctctcnacatcaaaactgaccctgtggatatttacaaatcttggggttaatcagatgggagtctccagacagggaaagggcagccaaactgcccctatgatgt

SEQ ID NO: 452771 - DNA, 1346 bp, Homo Sapiens
ccggggtttaaaaaagggggatataatttcccaaaggttgagatgttttctcccaagttgggaccagttcttagggggggaaaatgtttccccccctgtcctgtttgccatggagggtcccgggttttccaaaaacgccgccccttccaaactaatttcggtagggggtccaggtaaccaaacccacaggtgagaaagggtctttctggaactgctttcttcgaacagcaggatacctgaaagggtggtgttgggtaaatgtaacacaggcagagggtgagcctctgtattaaccacccagtggtctaaaggtaaaaggtcatcaccggagaccagcagatacaaatattttaatgtttcagcaagaaaaaagctctgctgtacatcatcatgtgtaggagtagaggaatatacatctttgactccagaaaacgcaccattaactcggcaatacttttcaatggccagtgctgcttcccagccccactgcctgtatcttggatcgtgagtgaatcgccataggtaccaataggtttcaattacttctggacggaggatataatacttttcagcctgccggacagccacagcctccactgcaccatcaaacttgaatgattcaggacctagctttaatgcagttctgtcatatgactcatgacaagtacgtgcaatttctgcccctagctctaaataatgaccagctttatctgctctggaaccatctgctcctagtgcaaacattcccccagcaaagcaggccaaatgccccatctttttttccaagtgcccattcttccattctccaataaaggtaagacctccacgagtctttttaataagatgtttttctatagcctcaatagcatcatcatacatctttcttgcctcatggtctgttttatctgacttcaaccatgctttcagtaagtattcataaaaactgtctcccaggccaccgacagatgtatgatactgaccccagcgccctgttctggggttcaaataatttggataaagaccatttggacgatccattttctgaagtagtttccgaatgtgcataacctttttgtagtaagtcaggtcccctgtcaagtagctcgaggtggatgaactccatatgtagtgtaccaaattcagccagaatagttggtacctgcagatgcccagccccagtttcgccctactccacttttcaaattcaccattgcccaaggaatcccagtaggtgtgttaaaggcaggaaggagtttttctagccaattgcactgctttaatcttgaatatctcctctccatgataggtaatatgctgcaagtaggcctccaataatcgaatgttga

SEQ ID NO: 452772 - DNA, 379 bp, Homo Sapiens
ctccacccgacggggtggcttctctatgtccccatctcagtgtcccccatctttccccctaggtgcccccaacacaggcacagctggtgacgcagaacaggtgaggatgggctgtgcttcggctcctggggtgggcgtggggactgcatgggcctgggggactgagcagcatccccggcccctccccaggcccttcgccgcagcagctcactctccaagatccgtgagtctatcaggcgaggaagtgagaagctggtctcccggctccgaggcgaggcggcggcaggagcagccgggtgagtgttgatcaggtcggcaaagagtcctgacatcagcagaatccacagcccaccccacccccaccccgtcgggtaggagc

SEQ ID NO: 452773 - DNA, 827 bp, Homo Sapiens
  misc_feature (642)..(665): n is a, c, g, or t
  misc_feature (690)..(690): n is a, c, g, or t
  misc_feature (697)..(697): n is a, c, g, or t
  misc_feature (783)..(783): n is a, c, g, or t
  misc_feature (805)..(805): n is a, c, g, or t
ggggagcagggactgtaactacagtaggaggcaactttgctggtgtcattcctgctcggattgactttgtgctccctcccatccacagctatggtagccagtatttccccagcagctctctagtggggaagagtggctagaaccaggccattctcagtcgaatttaggaagaccaagactcatgttcctgacaggacggtcattccctcatggcatcactgactcagttctaattcctcccctcctgtttcattttggtttgaacaacctgtgcctgcagctgtttcttccaccttcctggagctcacaattggagcttcatgttcagtcttgagctcctaatgtttccagacagggcaggggataggacagccataatctatgaaagctgtgaaacaaaccctgggttatatagacctcagatggtctcatctgaaggctttgcccacttcccagtgagcagagggtttggggaacaaagaggtagctgaagagtggtggtttttccctgtatcctgattttcagaaagggctttagtctctgagctgtggctagtagctggctggctgaccaggggacggggagtctaattagggtgtctgaccataaggacacctttcgtgtttgggccttccctttcnnnnnnnnnnnnnnnnnnnnnnnncatgttacacacacaaatctgtatncccaggngttgcctcctgcagtcactgggggctcttccgtggtgcaccattcatgagagcagttcagaagggctttggtcaagatttcttccnagctgccctccctcctgggatnaagtttcccttcaactgttcca

SEQ ID NO: 452774 - DNA, 799 bp, Homo Sapiens
  misc_feature (126)..(139): n is a, c, g, or t
  misc_feature (748)..(748): n is a, c, g, or t
  misc_feature (762)..(762): n is a, c, g, or t
gggcaccagtaactccagctagtaattttgctaggtagctgcagttagccctgcaaggaaagaagaggtcagttagcacaaaccctttaccatgactggaaaactcagtatcacgtatttaaacannnnnnnnnnnnnnagccatgtagaaactctaaattaagccaatattctcatttgagaatgaggatgtctcagctgagaaacgttttaaattctctttattcataatgttctttgaagggtttaaaacaagatgttgataaatctaagctgatgagtttgctcaaaacaggaagttgaaattgttgagacaggaatggaaaatataattaattgatacctatgaggatttggaggcttggcattttaatttgcagataataccctggtaattctcatgaaaaatagacttggataacttttgataaaagactaattccaaaatggccactttgttcctgtctttaatatctaaatacttactgaggtcctccatcttctatattatgaattttcatttattaagcaaatgtcatattaccttgaaattcagaagagaagaaacatatactgtgtccagagtataatgaacctgcagagttgtgcttcttactgctaattctggggagctttcacagtactgtcatcatttgtaaatgggaaattctgcttttctgtttctggctccttctggggcagttggctacttctgttaattttcctgggggctttattcacctcagtncatttctttttttnaaatgtccggtggacgggcagtggttcctttttgctt

SEQ ID NO: 452775 - DNA, 767 bp, Homo Sapiens
agtccctttggccccaatataactgttgttctttctgttgatgtagggttatgaagagcttgaccacctgtggcctcagtttgattcacgcctagagtttggaactcgtggggaatggtggctcaaagcagagagacagacaagaatgagggtgtaaggctccaatttcccaatgccatccgccttagaagtacaccatcatcagttgtcaaagggtgtagtgctaaacaagctacgaagggacgtggaaaggaaagggttggaagcacattggctgatggagattgaagaatatgacttccttctccatcatctgtcactcccaataccaatcgaagaaggcactgggcatgttttctctctttcagtagcacttccgcatagcccggaagacgaagaaataatccaaaagcagccaaagaatgggcaggtatgggagacatggtctgtactgctgacttgataggtggaggttcagccgcaacagtttctggtgcttcataaactaactcccctgactgttcaatggtcacccattcaaactgatcgctatccttcggcttttcctgagtggtagatgttacaactggagcactcacctgttgaattacttctggatatagcatgggtagtctttcagcaataagagccagtccacccattcctgcaaaaacttgtaatggtgactgaattggacaggtttcaagcaaagattcatccagtatcccatccatgcattcatcacctggagtgagagcctcatctcc

SEQ ID NO: 452776 - DNA, 892 bp, Homo Sapiens; identical to SEQ ID NO: 324794
  misc_feature (71)..(81): n is a, c, g, or t

SEQ ID NO: 452777 - DNA, 748 bp, Homo Sapiens
gtttttaaaaaaataccagtcattactggaaagggtatttaaaaccaaaccaaatggcgcctattcacttgaaaaatcacgtacaactctggtattcatagatccactgtgggttattagcggaaatcaacttctggaagagacacctaaaacatctcttcatggctgacagacacatctgtagtaggataggacacagttctaagccagcatagcaaatctgatgttctggatctccagggaggctttccctcaaggtctctaatcaactttcacagtcaaattccataccatgataataaatacaaccaatttaggtcatggtaccaaggatcctgctgggtcacagggcacctgattataggaactttataaattgtattgctgggaaaaaccacaagaggacaactgtttggtttcccatcttttgatgcagcaaaagaatgatatagctcacctgggttttgtttattaaagattgtgtgggatggcatttataatctaatcatcttaagtccatgagtacatctccttgggtccagctgatatgcctcttctataaatcatgtgctagtggcagctgtaaacacagctacagaatgggagcatttagaggacagtaccctgcccattttcaactcatggaaatgttgttttcaggaaatatatatggcaataatattcaaaacatctattcctctgaaattatggaagttaatcctaaacctcacaactttaagatacagcc

SEQ ID NO: 452778 - DNA, 950 bp, Homo Sapiens
gaggctggctgtacaaacggagcgctgctgatcgacgaacagagatcctgtacaacactcaaggggtcgttgtaaagccagactcgtagaacgacttaccaccacgttccaccctctgctcaggctattgagcccaataaatggtctcactcctacggacgtttgctccccacggaacaggcgttcctgcaagccatcgcatctacggacgcgtagtagcctagagtccgatattaaaagactaggtgggccgtcgtactacacaactctcggagactaggaagtggtcctggcagtaggggcacagacgtacatcggcttcatcatgtcttccattgtactctataaggaaggtctgtttctctaacaactttttatcgaacagcgaggaatatcatgagcatgtgtttcagcaaggagcctgccccagccgaaatcgagcaagagtactggaggctagtggaagagaaggactgccacgtggcagtgcactgcggcaaggtggacaccaacactcacggcagtggattcccagtaggaaaatcagaacccttttcgaggcatggatggaacctcaccgtcctccccaataacacagggtccatcctgcgtcacctcggtgctgtgcctggagtgactattccctggctaaatattggcatggtcttttctacctcatgctggtctcgagaccaaaatcaccttccatacattgactacttacacactggtgctgactgcatttggtattgcattcctgctgaggaggagaacaagctggaagatgtggtccacacccctgctgcaagccaatggcaccccagggctgcagatgctggaaagcaacgtcatgatcctcccccggaggtggctgtgcaaagaggggatcaaggtggcacagggacccgtgcagcagaagtggccccagtttgtcgtcttgcttcccgggg

SEQ ID NO: 452779 - DNA, 873 bp, Homo Sapiens
  misc_feature (161)..(200): n is a, c, g, or t
  misc_feature (740)..(740): n is a, c, g, or t
gagagaatgggatagaaaaagcatggaataagcaagaggccactgagacaccaaaggctaaactgcaaactgcagtgtggcttccaaccaagcaagagctggtctcatctgctcatggccaccctgtcagagccatttgctaaacatgttagtagatccannnnnnnnnnnnnnnnnnnnnnnnnnnnnnnnnnnnnnnngagagtagtcctcattcagtgcatagcagtggaaggctaggacaatttagattccttaggtaagagcacaggaggatgctatagaacagtgactgttcattccatcccccaaatgacagcggtgagccacgtgtcagaggctgcaacacagactcagaaactattctacttgcttttttaccactggtgtcagagagacagcttgtaatcctaatatttggtgccagcaggaagaacttcagagcttttgttcttagtggcatatgaaggtaaattcaaatgttttcttcttcggctttaaaacagagcttaaattcttaagcacagccccaaagcatgataataaagtggcttaccctcctgggtgtggagttacacaaactctccctcatctaactcacgtcgggaatcatgatgtggtttcatatgcacgcacgtgttggggaaaccctaggctcatattcgaatctagtgttgcagagcctgagggactctcgtgagatgctctgacctccacatgccagctcatccttcctctgntggttcccagtctgatccttccatgagctacatcagggccaacacctttccatgaaggaagtgatgtcggggtcgcagtttagcctcactcttgagtcttgagtcacacacactcggtggacatgtcttagaa

SEQ ID NO: 452780 - DNA, 515 bp, Homo Sapiens
  misc_feature (1)..(1): n is a, c, g, or t
  misc_feature (203)..(203): n is a, c, g, or t
  misc_feature (260)..(277): n is a, c, g, or t
  misc_feature (329)..(329): n is a, c, g, or t
nctgagccaccacgccctgctggtttattttattttttggcatgaataccacagctgggatgtcatcttctcaatgcatagtggagatatgcaatgtcagtctgtccaactcctggtcctgttagttcaggtggtggcagcggctgccggggcttctcccctacatagttactgttttccctttgtcatccataaataccttnggggagatacttccagactaagtgaatgtctgtttcacttcccagtttttacccacnnnnnnnnnnnnnnnnnngagaatggaggtcctcacttttttgcccgagggctggtaattggcaattggncggcccattcttcaagcttcaacttggcaacccctcccggcccttcccaagggtttccaaagcacaattttccccccctgttccttcaaggcccttcccccaaggttaaaccctgggggggaatttacacagaggggaaccgggccggccccaaacccaattgggcgcccccaagggggtaaaata

SEQ ID NO: 452781 - DNA, 743 bp, Homo Sapiens
  misc_feature (323)..(323): n is a, c, g, or t
  misc_feature (408)..(408): n is a, c, g, or t
gttggctattctggagaattttattctttttggcttgggacccagggggttttctctccctctgagtcatcgatgagaccgtaacccccagtccccagccctaggacagcccatgctttccagatgtatttctgtgaaggtggggtggaggcgcctaaataatattgtgccccgcccccagctgcccaattctctctcgaacctgccatcgtcccgggcttcagaatccactgggcttggttcatcatggtttaaggtgaaattcggggcgaaggaggcaggacaggtaggcaggaaggaggcggccggtcccgacaggtgcngtgcgcgaggggttgcacgacgttcctgccccttcctttgggtcccagaggctcgataccggccctggggacccgccctgtgggntttccttcgcagccctgggttacaaatgccaggatttctcaggctcagactgagggttttacttcacccttcccagagggcacgcagcacggatctgtggatggaaggggctgattggccggcggccccatcaatcgttgcccggctgtgctgacgtcatcctcgggtctgggaaggactgcccccgagccggtgataggcctctccccgcggctctccctttcactggcgcatgctaagggtgtgtggcagatccatctgcttcgcctccatcccatcctggggagaaagtatttgctgcagttcagcaattcggagcacgtatgttttttgcg

SEQ ID NO: 452782 - DNA, 781 bp, Homo Sapiens
  misc_feature (74)..(74): n is a, c, g, or t
  misc_feature (322)..(345): n is a, c, g, or t
tttctggattgggcaccattgctttcttgttaagtgcctggccggtagtaagacggccatccattaccgtatancctcccctggaatcccgctagtaagtcccatcaatcttgaaacaccccatagggactgactaaaataatttgttgcacctgaggcccctagttgttttaaaagagaagtaagaagcttcacaccaggccagcggacatggaaatcaaactcctccaataaagataacagaagagtgacattttcctgctgcttaatgaaaatttctgtaaattggcttcccaaatcttcactctgtcttgtggaattnnnnnnnnnnnnnnnnnnnnnnnnattagatattatattatatagtgtgtccaaagcataacctattatttcagaatctgaacgatctgtttgtaaaacatgaataagatgttccatagcttgtatacccacttccaagtggtatttcttagataatgatttgagagcacgaacagcatttcttcgatcatccaataaagtagatgaagctactctgtcacaaagcttttgaatcgtctcggcttctgtgtgctggggtccggcactctgaccccccattaccccgcggaggaaattcatcttgccgttcagccaccaggtttaccggcccctccggaaaaaaaagaagacaacttcccccgccctccgcagggcctggcccccaatcccgcactctacacactcctactgctgccaccaccgcctccaactcggcggccactccagccctctaagcccc

SEQ ID NO: 452783 - DNA, 1047 bp, Homo Sapiens
  misc_feature (175)..(175): n is a, c, g, or t
gcaaaacccatcaaatatttaaaattcaagtttcccgttttaatttttttcaaaaccggttatccaaaaaattgttcattttccacaggacccccataggtgtgtccatctgctgtctcgtattctgggtttgcatcaataaaggagaagggtttttttacatcataagacttanttcagttctgtttgcaaactgcagtttttctctaacatactggctggcttgagtccactcacagttccaaagtttggacttgctatacactgactgctggcatatggttcatgcagctttggcatcgcagcacaggtactgttcattatgtgtgcgcctctctcatcggatgttaactgaccttccacagtaacaagtccatgagtaactttattttctaaatgatttcctgaagattgacatacctgatttgatttacctaaaaccacatcttctttgacttcagatgtatttttgcccacataaaccttgcttgaacaaactcccgctaaatcagttggtaactttggcataatttcgggcacatttgtgttttcatcagtatcttgaataattaagtccattgcctgttcttttcctttagggcttaattcacaggcatttattgggttatttataagtatgtgacacgctgatgatgtcctggaacgtcttcggtgcattttaggactcatacttggctctggactaggtaatttggcatatgaacctgtaagacttttgataacattattttcggtaacaaaagtgggaataactttaaaatcagaattagactctagaacagtgggatggccagttcgtataggtatgtccactttcgaaaagctagctaaaactggcatactcatgctgcttgcttgagtggaagcaccttggagaagaacatttgatttattaaggcttggtttgtcaggaataactgagacacagtgtttgcctgtcaactggcctttctcttttacacagtcagccacttcaacagcatcatgttctttgtctaaatgactctcattaacaattctgttcat

SEQ ID NO: 452784 - DNA, 986 bp, Homo Sapiens
  misc_feature (432)..(471): n is a, c, g, or t
  misc_feature (773)..(773): n is a, c, g, or t
gggtcctgtatcctttaatttcaggtctcaggatgtttagaaagctaaaaccccctacccctttctggctgaaaacttgccttatttggtatcttacacattaatgttactagcatcaggagcttactgttttattatgattcatcttcagtaatttttagaagcaagaagaaagccattgtgtcctctacaattaacaaaacttatctctgatatacaaagggatataaatatatacacttaaatagagaaaaagaggttgattgaattgtgcctttgagtgaacccagtttttaaataccgctgtgtttgtttcgccatggcttctgggatgctacatggctcttgcaccttttactcctctgctttatgaagtttgagttgtatttgtgcatcttaaagtaggttgaggcttgaggctgggctttcggnnnnnnnnnnnnnnnnnnnnnnnnnnnnnnnnnnnnnnnncttgtacttaaacctgcttgcttcctaccacagattctttattttcccaaacactacaaaaaaacttttaaaactttgccatttcatctgtttacactctttgccactgattagcagtatttaaatcttgcaagaatattttgtgctttcctttagaaacacaagagtatagatttttctcactgaaaagtgaagagttacgcattgcagccatgaagggatgctaggatcaattatggcagtaccttttttcccctcctgttcttgagccagttgtctcttttgttttgggtcccacttangattaaacggatgtaaggtattttcctgtgcctttattttgtggcattctattggaaggaggtgtaacggcagaatagcatcgtggttgggggttttccttccaacactgcaagtgatattgccaccatgtgaacctcaaatatgcaatcccaggtgtgttgggtttctcggtggactgggagtgttcatctcttcatgaattgtgagcactg

SEQ ID NO: 452785 - DNA, 527 bp, Homo Sapiens
tgatattgccaccatgtgaacctcaaatatgcaatccagttgtgttggtttctcggtgacttggagtgttcatctcttcatgaattgtgagcactgaccatgttcttcagttcttaattatggtgagttgacaaataccaactactgcttttctttaggtggctataaatttcttactgtcaggaggaaatgacattatattctgttccactgaacgtcagagatcagcaggcactgtactgggtagagaagtgcctatacttctctacctaagagggcaggagggaaaccctacagctccttgtgagcctatatattagtatatcggcctgggagaggacaagggaataagaccacttcatagtgagggctgggccaagctgcactggtcggaccagggcagtggctgacctaaggaaggacaactttgctttgctttaaaagttaggatttttaaggcatgctttaacacagggcagctttcaccttttttcagggcctcgacatgtattgttaaatttactgtt

SEQ ID NO: 452786 - DNA, 1362 bp, Homo Sapiens
  misc_feature (25)..(26): n is a, c, g, or t
cgccgtacggtttcattcccctggnnccaaggggagccacacaggggccaaacacccgggccaggtcttcccaccttttttcaaccattcaaccaggacctaaggcaattaaccctggggccctcggccgtgccgggcgctttaaactcttcgaccatcaccacttagcggattatttttttacacccccaggaaacaaaatgatctttcatacccaggtcttttccttcaccatacggatctcgtgcaggcattcaaaatttatgggttactgaataagcccatgacggcaaaaatcgcgcaactctccttttgccaaaaccagaaacaaacatccctcgttttgactcctgtccagtttccaaaacaaaaccaaccaaaaccatacactacacctttgttattgcacatctttcacacaaaacttgtgtatgtatcatatacatatatatttttaaatatgctacacctccaaaaagactatggcactttacagcatatatgtttaacaaagatcattacaccccagatgtttgaaaactatacacaaacccttatacaattcatgcaacattgtttgaattattagcacacaggtttaacgaatccacagaatccaaggcaaatatttctgcctcagagttcattgagaagcgcagcccatcccatcccgtcatgagactttctttaagccaatttcaggcaaaataaataagactttcctggtagtaataatggtcctatttattagaaaaataagtgtgagccaacaatctatttttaacatttctttctagcatattcctcatacccagtggtttttaaacagctgtgtggaagagcatggtttagactagcatgattttagatggtcctttcatcccaagcctggctaatggattcaaggtttaaaagtcccaacattacctttttactatttattaagtcagtgtttaggtagtttttagtggtttggggttgtgtgtgtgtgcatgcctgtgcttttgtcttctgttgcattcagattaataacataaacactatcgagtgagtttattatggccaagaagtcacactcccttgtgactgttcccaggttgatctagaggtacactgccaccttagccaaagagcaggtgatggacatgctcggaggatcctgtgagcttaggacttaacttgtaaggacactgagattgtaaacctagtgtcagaaaatggtttctctatccaagaaagaaagaaaagtgagtcttctgataagtttatggaaaaattttgtgtttttcatcaaggtttgagacttggttagaacattataaatgtacacacagagacagaagctttgtccagtggctcccc

SEQ ID NO: 452787 - DNA, 857 bp, Homo Sapiens
  misc_feature (13)..(13): n is a, c, g, or t
  misc_feature (35)..(35): n is a, c, g, or t
  misc_feature (51)..(51): n is a, c, g, or t
  misc_feature (59)..(59): n is a, c, g, or t
  misc_feature (70)..(78): n is a, c, g, or t
aggattcccagcnacggggcccccgagacctccgnctctggcgaggacgtncgacctcntctgggtttgnnnnnnnnngggggctactaattggctggggaatcccacgctctctgtcaaggcccccggactcccttcggcgcccccggtaagccccaggcctgccctcaccttccgggggccgcgggcgtccaaaaggaatggtttataaaagctttccgagggcggcagcgcgcccgacaagatattgtattgggccgaccgcccgcagttcttaataccctcttttattaattttccaagggggcgcaaaaatcgaaatttattttagagttaaagctggtacaccctttttttcccctcctaaaattgcacagtacatccgattattataaacatcaggctgcggttctgggagtgagcttgtgtcgtgttagtgccatctccctgccaaatctgacctgtacccccatctcagctgggaaggagtagctgggcctccctttaatgcagcggcactggtttgggtcacaagagctggtttgatcaacccctgactccccctggcgggaggtgctcgtcacatctgggagctgagcagaggtgccgggggcttgggaagctggagaaatgatggatctttctccaggagaaacaattcttatcttcacatcagccccgtgctccaaatgaaaagcgcgtttgcatagctgctcgagcccaggctgctaagctcatgaagtatttgccggggctctcggttgcataggaacgtacctcgagtacagtactgcggcgggccgggctgggcgccagaaaaacaacggattaatatttgcaacgagaaattacccacc

SEQ ID NO: 452788 - DNA, 1053 bp, Homo Sapiens
  misc_feature (11)..(11): n is a, c, g, or t
aacgaacaaanctgtcagccactctttcccattccatcagcatttttcttggctgcctctcaaaaggaaggtcaagtcttcgaagaaaataatctacaaccccttgctccctctaacaacaaggggactcggtagatggatgaagacatccgtggacacagatcacttgttcaggctcaacatggcagaacattgatattttctccttcactgatgtgtcaagtggatttgagcacctgcatacaaccagatctggggaaagcccaagtcctctaagttcccgaacactattctgggtaggtttagtcttctgttcccctgttgaacttggctggggaactagactgacgtggatgttacaaaagttctctcttttgaccttgaattggaactgacggaaggcctcaataaagggcatgctttctatgtcccccacggttccaccaagctcaataacacacacttgaggttccaggccatcttcatctacaggtattaacgcctgtctcatcacccagctcctggattgcatctgtgatatgagggacaacttggacagttttccccaagtaatctcctttccgttccttgttaatgacatactggtatatctttccagtggtcagattattgtccttggtgaggcggatgtcaaggaaccgctcatagttacccaggtcaaggtctacttccccaccatcatccagcacaaaaacctcaccatgctcataaggagagaatgttcctgcatcaatgttaatgtaggggtcaattttgattgaagttacatgtaaaccacatgacttgagtattgtgcccacactgctggcaatgattccttttccaattcctgatataacaccaccagtaaccagaatgtacttcattttactctttgacctgcggccggcttcagatcctcccgtcagcgacagagctgggccggcgacgcgcgcggagccccggacagccagtgaacaaccccgaccgcatgcgcccgtcagtctttcacggaggcctcgtgccgattaaccacccggcctcgtacctagt

SEQ ID NO: 452789 - DNA, 1313 bp, Homo Sapiens
atagaatcgagccggtaccgtcggacgtgtatccttcagtcagtggatacaattcaaaagcttgcaactcttggcttcagctctggttctcttcctcttagcaaatccatatcttttagtaaaagtgcctttgagcataaatttctttggtttcaatctcttggtgcttgtgaattctttcaagggtactcttttcccgaagaacgagagcttcagattttgcttgacaagctttttcaaaatcattctggaacatggttaactccttttcatacttttttttggcttccattttaattttggctatctcggtatctttaaaaaacttcaacttttgacacatttctgcccgaagttgctcttctatttctctcttatactcatttagctttatttctaaagattcgaacttgatacgctgagggtaagcatctgcaaactgatcatcaataagctgaagcttctcagccagagaatctctgttaaatgtcgaacttgtctgagtttccatattacaactctctttagcttgatgatattctgccaattcttttaaaaaatgcataagaaaacctttttgattttctttatcagatcctgaaaccagtgatttgtagagactggaagtagggttgattttaatgagttgtaatagatcctgcatagtaaataccttttcttttgccaaaccactttctggaaagaaaacagaaagtgaatattcatagccacatctttgtaagtgatctgccactaaagagttagaggcgcctattaagagggagctcccttctactgaaatggaccgaggctgcagttctccactcaatacagggtgcatcaactcatgaattagctggtttcgaagttgtgtcttgagtgtatccagtataccccgatccttaaacgtctggtatagctttttgcgcagttcatcttgactcaacacatcagccacggtaaacatgttggactgcgccatcatcaggcgtcagctccctccggagcccgcctcgctcgccccgccgcggcccgagtttagtgcccagcccgggcggtggggccaagacgagggggaatccctgccctcagaaccctgcctctgtcccgagggttcgggaggaacaaaggtgctgaacgttctctgcctcgcactcccaactaggttttctagcaaacacgcgagcttcctttcttcgcggttctgaggcaagggcgaggacccaggcacgactcaaaggcggctggagggcggggacccagacactagggactgaaggcagcgaggcaggaccgcctcacagccagtcccc

SEQ ID NO: 452790 - DNA, 850 bp, Homo Sapiens; identical to SEQ ID NO: 150804

SEQ ID NO: 452791 - DNA, 828 bp, Homo Sapiens
  misc_feature (137)..(137): n is a, c, g, or t
  misc_feature (170)..(170): n is a, c, g, or t
  misc_feature (424)..(464): n is a, c, g, or t
ttcatattaagagcttttgtatagcaaaaaaatagccttggcttaatattgtctgttccaggagacatttcttgcccgttttaacccatttttttctgtgtcactgggatttaaatgcgcagcaaatcaactcaaanctgcaaatgatttttccatgtcaccttggtccntcatatatcatggctagagtagagaatggctcataagccagaggagcttgtcttatgatttccatgcacatcaatatcgcctcttcacgttctcctcgagcaaaacgaatgttggcttcacccatgagacctctcagagctctgggaagtttactccgaggccttttctctgttcatcattttcttggtttcacgattgagaaccatctccaatacaaatacatcgcccgcagtgggttgctcaggtgtttctnnnnnnnnnnnnnnnnnnnnnnnnnnnnnnnnnnnnnnnnnatcatcttcattctctccaagcatggaagcaaagaccttgtgaactgacttcctcactccatctgatgtttctccttcattgacatctttgtcttgggatttggtagagttaattcctgatgatgatggaacttcagagtcatcgggattttcttcagctgataacttgcctttttcctgaagacttttcttctcgcgggtttttctctcttctctccgccgttcgaactcctcaaaggagattttcccttccaagtagtcgatgagttccggactgaaccctgacatgtttacagggtctgtctgtgcaaccccaggaaccgggacagagaaccggaagagcagcgccttccagaagcccgct

SEQ ID NO: 452792 - DNA, 840 bp, Homo Sapiens
gggatgagagcttgagcctgagtgacagtgattttgacaagccggagaaattatattctcctaagagaattgacttcactccagtttctccagcaccttcacccaccaggggattcggaaagatgttcgtgagcagcagtggattgccaccaagtccagttcccagtccaagacgattttcaaggagaagtcagagtccagtcaagtgcattagacccagtgttcttggtcctcttaaaagaaaaggtgaaatggagacagaaagtcagcccaagagactcttccaaggcactaccaatatgttatctccagatgccgcgcaactgtctgatctcagttcatgttcagatattttggatggcagtagtagcagcagtggcttatcctcagacccgctggctaaaggcagcgctaccgcagagtctccagtagcatgctccaattcatgctcttcgttcatcttgatggatgatctctcacccaagtggtgttatcaaggagaagaaattcctgccttgaccagatgtgtggagcatctacaaatgaatgaatagttatttacacacaaaccactgtgtacaaaagcgtccatggagctgtcagtgtctcgagtggtattatgaggcctcaggtgccttggggtacattgtcatgctataagggatgtatatcataaggtatggtgggagaggggccttatgtgaatgattgccacatactgtttctgttgctgctttttttcccgattcctttttgtcattggatttgtttgttttgtcatgtggtgaatggtgttttagttattgtgttgctgccagaatcagaatccagctcttggtc

SEQ ID NO: 452793 - DNA, 1047 bp, Homo Sapiens
  misc_feature (273)..(335): n is a, c, g, or t
  misc_feature (925)..(980): n is a, c, g, or t
gtaccaggtggctggggaggcagaggagaaaggtttcccatagaaactgagcaatcgctatgtcctgagtggttgaagccaagtcttaggaagcgggtttagggatattcccattgtggtcttggttgtttgttttcattggactgtgtgtttcagtctcttctggacataagtaaacctcaatgggcccttgggtacttgccaaatgtatttgtaggctctctattgagtcaggcacttcaagtcttgtttctggaggggctttcacaactnnnnnnnnnnnnnnnnnnnnnnnnnnnnnnnnnnnnnnnnnnnnnnnnnnnnnnnnnnnnnnnctttgattctctgaatcctcggttaacagtttgaggtccagggtgcagctttggatcagttcatctaatttcttctcttcctgactgagctcggtcacttcttttgacaggccttgacactgggccagcatgccccccatcctcagacagactgcagcccatccattggacgttgtttttagacttcttcttaatgaggtggatgccttccagaacgttggtgatatcataaatccttctcttttgcacttttagcacttctgctgccttgttcaaatccaataccccatcgggtgactggctcaggagctgaatgaacttcttggtgagcagaccaagagacgtatcataccgcgttttttctgagggagattttggagtttttggactatctggacttcgtagtgcagctcttcctttgcccttgggggtttttaaaccatctgagaggtactgatgaccgctttctcctagctccagccttcgctttgccatgacccgctctcgactctccagcccgactgaggaggaacttgacactcagggtgttattggtccaaatgcttaaaccatggccaggccaatgcagnnnnnnnnnnnnnnnnnnnnnnnnnnnnnnnnnnnnnnnnnnnnnnnnnnnnnnnncgcttcagcccccaacagaatccggtgcccccgcggcgtcggcggcccccgagccgtcccggtcccc

SEQ ID NO: 452794 - DNA, 744 bp, Homo Sapiens
caatcaatcaaccatttattgagcccagatgtggtacagccccagccggagatgacccagaggtggggtggggaggagagagatggggaagctgagtccggggccacaggtgcagccaggaggtgcaggtgagcagcgctcagaccagcctgtcagcctcagtcctgagcttacttctggtgatggagggagatatacagaaaagatcctgcagcctgcaggtgtggcacagctgatcttgggccaaggatgcacagctgtgtgtgtgcctggccaccggcaagggcacgtgggctcagaagcacaggtgtgcccacaccctgcgtgcctgtgtgtggcgcagcagctcccgacgcgcgcaggacacacacacagcacagacagaccctcccatggccacacggacaaagatggcttcactatagacaccggtgcagacaggatgtgcactgctttccaaggcctttgcgcaacacagactcagggcctgtgggcatcagcaccgcccagacccaggcacacgtgatcctcagccaaggtggcctgtccagtcctggtgctgttggatggaaaggctaacctgggaggtcaggggctgtggtatatcagctgggctccctcggacgctcctgcagaagtggccaggacctcaggaacgcacctgctcctggtcagacatggaggggctgccgtgatgcaacttgcccgtgcctttgggtgctgtgagctggctgcgtgccacgt

SEQ ID NO: 452795 - DNA, 804 bp, Homo Sapiens
  misc_feature (340)..(557): n is a, c, g, or t
  misc_feature (572)..(586): n is a, c, g, or t
ctaagaatttctttcagtaggtttagggggcccaggaaaaggggttttaagtaaggaaagatctaaacccgtaagagtttcgaatttagggttttagaaaaagggaggcccccaaaggaagctcctgttgtcacttaggaaataatgagtaaagaaaagaagttacaattgtcggctgtagatgtgaagactaattgaatgttgagagtgagggaaaaagggggaccaaggggactcctggacctcaggccatttcctgcataagaacagagaaaaaggaacaactggtatatgcctgtgggagtaaggtggggtggaaatttgaagttcaaggatgagnnnnnnnnnnnnnnnnnnnnnnnnnnnnnnnnnnnnnnnnnnnnnnnnnnnnnnnnnnnnnnnnnnnnnnnnnnnnnnnnnnnnnnnnnnnnnnnnnnnnnnnnnnnnnnnnnnnnnnnnnnnnnnnnnnnnnnnnnnnnnnnnnnnnnnnnnnnnnnnnnnnnnnnnnnnnnnnnnnnnnnnnnnnnnnnnnnnnnnnnnnnnnnnnnnnnnnnnnngactccgtcttgagnnnnnnnnnnnnnnngaagaagttcaaggatgagactgctggccaggagttccctggctgacaggccataagaactaagatcagaacccacatcttgtaacttttaagtactgtcctccttccactgggaacgttgtaacttaacaacagcccttcaggtctatagtccaagggcagagcaggcttcctgctagatggggatttgtaagatagacgtgactgagctggtgacc

SEQ ID NO: 452796 - DNA, 787 bp, Homo Sapiens
  misc_feature (196)..(243): n is a, c, g, or t
atagcatccacatcagacagccgtggtataaccagagtttgtggtttactgattgtagctgctctttgtccactttcatatggcacagtattttcctcaacatcctggctctgggagagtcccagaacccaaaaacccaactgtgatgaggcagtatcttcagcaccaagggaatgtgtagtattgcctgaagtannnnnnnnnnnnnnnnnnnnnnnnnnnnnnnnnnnnnnnnnnnnnnnntcctccacagcaggagcagattccactgacattcccagaacactgcttgtcctgtttggctgaggtaactgctcaatgacctgactgatggaaccacatgtgtccaagttagaagaatccacagggtctgcaaccttgttttctttcaaatgttcattgaacccactattaccgtctcctcgttcttctccagctgtttgttcaggattggacacaacatccaacacaggattttctttgtgcgtctggagattaggaaggtgtcgagatagcatactgaagtgagaaccagaatcatcctctagaacctggctttcaggctgagaatcttcaattatcaggcaaggagtatcttgctgagagaaatctgaatccaactgacttccagtagggtccatctgctccccaggcatcccggcgggaggtccctcgcgctcgagctagaggtctctgcacgctccccaagtccctccagatcgatccctaggtcgccgctgtcgccaccgccgccaccggccgcgaactccccctttcccgtcacccc

SEQ ID NO: 452797 - DNA, 801 bp, Homo Sapiens
  misc_feature (33)..(33): n is a, c, g, or t
ggccgttgacctccccacccaggccccgagtgnccttgagcctggagggagggaggcaggatggcagcacagaggcaagggcttcctgccttcctggctgcctgcagacgggagtggagacgttcagagcaagccccagcttctttcaggaggggggtagagtccaggactagagctcttctcttgtggctgacaccttctctgagcaggccccctggggtcccccacatagcaatgcctccagagcccctcggccttgttggtgggcttcatagatctggtcttctccaaactcccccaagtagtgcaaacatgtcctggagagcctggtaggccaggggccccctgtgaccatcacgctgatgcttggctctggcccctcgctaagtcctgggcctgtgagacgtttcacttggtccacttctcgaactccgtagtcctgccagttccgggagcagctccggtccaggacatccgtgtagaccaactcgctcagctcccgccgccccccagagtttgaggtatgaagtttggtctctgcctttgccagattttgccacatctggtaagccacagctctgcaggcatcacagcgcaggtgagcgggcatgtgggctgagtacatctcctcatcatccagttgtggggctgtggctgtgagtggcgccctgtccccgaggccccctgggatggcccaggctcccagcagcagcagcagcagtggcagtgacagcctcatggccccaggagccagttcagcaagtgtagtctgtggttgaggtgcagatgtgtgtgtgctcc

SEQ ID NO: 452798 - DNA, 819 bp, Homo Sapiens
  misc_feature (494)..(494): n is a, c, g, or t
tttacaaaatttttgggcccatgccctttccgggtctttggtggtattaagtgccaaataaataggccatgtatcatttcatgcaggagggtcttttccaaatccttttcttggcctcaacttcaaaaggggtttcgctgagacggatggaacacattccccccttccctttcatagctgcatatcccagcacacagggtcattcgcacgctccacttcaccctcgaacggcctccagctggccccagaagaattggtcgttaaactgaacaaaccagtgcctgcaagtccggtgtggggtccaccaaactccccacgacggcgtccactagcgacagggactcctgggcatgatcgcgctccgcctcctgcaagttccactcctcctgaagccgcagtgccaacatcaagtcatcatccatcgttgccaggatcacaggcggggtccgccggcgtcaggctggctccccagttacgccgcgacccccaagccngcctagccgaggaccaggactagctcctaggagatgccggctctcgagacggcccgtcaatcccgcgagagttcgcggaaacgcgcttgagaacgagaacggagcttaccccaaacgccgaagccaagattctagggctttaaaaaaagcagtcagcatgacacctcctagtgggcgcagaacctgggctcacagggctcgggccctacgaagctttcaggaagctagtttcagcctttactctttgccggttatttcaaacctcaacgtcacgctcggttcatgcgcagtaccgaaatttctctcggcctctccctcccctccc

SEQ ID NO: 452799 - DNA, 807 bp, Homo Sapiens
  misc_feature (430)..(445): n is a, c, g, or t
  misc_feature (784)..(784): n is a, c, g, or t
gggaagcagtgaaacaaaattggggtaacaaggaagctctgttgtggcaaacatgtctatgaggaatattaaaactaagcatactcccacaggctttaaactcaaaccatgaacatttaaattaagttgttccttattttgcctatacccatttttatctttcattgtcgtttttgcttgacagtatggtgacagagtatttttatttggaaagtcctcagcaagatgaattagccaaaagcaataatggttcagattaaacaataaagtggaattgattcaatcccaggctcaactaagaacagtcgctctctggatctttcattttagacgatagataagttgagatgttgtaatatttatggggggttaagcctgtgtcagttatgggatgaagacttgtagtaccagtaccatcagtggtcatacnnnnnnnnnnnnnnnnactaaactaatacagttagacatttccactctatcgtgattatatttttatgatgggaaaataaaaacacttccatgtttttataaatagtctctgcaaagatttcagatgttattggtatctcggtttggcagtatctgaaaaattgagattgtctttgaaatgtttgtgctacttttacttaagtaaacccccactgtgcaagacccaggccggcttcagctaataccaaggtttctgtgtgcataatagtttacagagaacttaagagtaaggactgcgggattaaaaacaaaactttttttaactttaaaatttttagtttttgttcaagtaccnggggttattaaagtcaaatttct

SEQ ID NO: 452800 - DNA, 762 bp, Homo Sapiens
tccccgtacgcccaaaggtgatctctttgaatcatctgaggaggaactagtacgaggggcatggccccgagcctgggtgttgactgaatgcctgagtccccccaagcctgtttcttcctcacggcccgggagtgggggtgactggcgcagcaacttctctcgttcctggagagaggccacaatgtggcgcgacagattgtcgtaacggactggtgagggctctcggtgtgttgggccagttggcaccaaacgtgggtgcctctcagcttcccgttgctgggccagcctggctgacaggaagggagaggtatagcctaaaggtgggtctggctcaggccctgcctgcactgactcaaaatcagggctgtctgaaggtgtgagcaagctgtcataagataggcttccattgcgtgtctggttggccaggctcttataggaggtggaggtggtgccctctgaacgaatggattgcaactggcccagctcaaagcctgtgccctgggctgacttgaggctggaggagcgtgagccactggatagtggatcgaagtgaaaacttttgccaaaggtaggagaacggaagctctctggttccaagctgggctctgagcggtagctggggtgacggctgctctctgcaattgaggttggctccttcaagctgtccccacgactcaacttggcgctggaggaatgcggcatggcagctgacgtactgctgctactgtaacccggccgatacttgtacatggtaggtgtccc

SEQ ID NO: 452801 - DNA, 977 bp, Homo Sapiens
ggcctgggtggcgaattcggcacgaggctctcccttcctgtcagccaggctggcccagcaacgggaagctgagaggcacccacgtttggtgccaactggcccaacacaccgagagccctcaccagtccgttacgacaatctgtcgcgccacattttggcctctttccaggaacgagagaagttgctgcgccagtcacccccactcccgggccgtgaggaagaaccaggcttgggggactcaggcattcagtcaacaccaggctcgggccatgcccctcgtactagttcctcctcagatgattcaaagagatcacctttgggcaagactccactgggacgcccagctgtcccccgttttggcaagccagatgggctaaggggccggggagtagggtcccctgaaccagggccaacagccccatacctgggccgatcgatgtcttacagcagccaaaaagcccaacctggtgtctctgagacagaagaagtggccttgcagccattactgacacccaaagatgaagtacagctgaagaccacctacagcaaatccaacgggcagcccaagagcttaggctcagcctcccctggcccaggccagccacctctcagtagccccacgaggggaggagtcaagaaggtgtcaggggttggtggtaccacctatgagatttcggtgtgagccttcggcacctcccctccccaacgcctctgcgcctacaccaaagggccccaggtgggccaccttccttccctcaaggggctcccctcccgtgcatggacattttttaaaccaccgattccaagaggatgaggagtgttttcttaaatgcagtaggcttggggagtcggagagttggggccctgagactggggtagcaacccccccttttatcttttaagaccttcccttccttgatccctggaccagactcagtggacatttgtgcaattgctcgccctggagggaaccagat

SEQ ID NO: 452802 - DNA, 1190 bp, Homo Sapiens
  misc_feature (246)..(246): n is a, c, g, or t
  misc_feature (258)..(285): n is a, c, g, or t
  misc_feature (916)..(974): n is a, c, g, or t
tttaagtaagagcaatgtttactgagcgatacaggactgagtactatgaagggtttacaaggatggaaatgcaccccgcccccgccctggccacccccgacacccagagactacagtacttaggagttacacacaatggccgtaactggtggctatctgttcataacaaacaaaccatagcatatttatactgtatcacatcgagtgattatagaaatccatatatatattgcttgtataaaatcntttttttttgtnnnnnnnnnnnnnnnnnnnnnnnnnnnnggaaagtatgaaagacatgtgcagttgaaagccctgccaggacagccagtctgtaaacattcggtgagtatgtgctttggaagggcgcccgcgcctcagtgcccacagcaaactccagcagggctggcgagggtgcgcccggctgccgcctcctgggcagggccgcgctggaccgaggtgggtgggggcatcagggccccgcagcacgcccctctccagcttcgcatcagggcgaggggcagggctgggggcaggtgggttgcagtttcattctgagttccatcctcagccgcgttttggttgcaactcatggcttttcctggctgttcggaggttccttggatgggtgccctggtgaggaggccagagaagagcccagggctgcctcgttgggcgtctccctggcctcggtgcctctgtcctgcctccttcaagtggggccccaggcaggacaaccctacccgagggtcaactttggtctcagcgcttggtccctcctgggtttcctcagcccgctcttcctcctgggtggctgatctgagtttcacaaaaaagctcggctgatgctggctgtgctgaacctcattgtacagtttttcatgcaccaaaggaagggccatctggggccccnnnnnnnnnnnnnnnnnnnnnnnnnnnnnnnnnnnnnnnnnnnnnnnnnnnnnnnnnnnagcccatggtcacttcttctcgagctgctcgagcagtgggttgccttctgactcgggggtcttgacactgtcggtccggacgatgcaggtggggcggtgtcggttcagcatcaggatgagctgctgccgctcctgcttcagctcctcaatctgggtcttcagctctgcgttcatgaaatccagccgctcggattcccgcatccggagaattccgga

SEQ ID NO: 452803 - DNA, 940 bp, Homo Sapiens
  misc_feature (779)..(779): n is a, c, g, or t
tagataatgtcagagtatactttgaactataacagaaatatttgaaatagtttcttctaaaaatatacttgtatcattaatatgatatcttttattttttaggttactttttaattggtccatgtctcttccctgcaatatggttttgaagaaagctgttgacagtctactttgctcaatgtgtcacgtacacccaaactatttttctttgctcatgggctggatgggaattacccctcctccagtgcaatgtcatcatagactgtccatgacagatgatagcaaaaagcaggatcttagttcatctttaacagatgactctaaatatgcatcaagcacctctcgcattaactgaatcacatttggctacccttgcttcctcttctcaatctcctgaagctattaaacaattactagactcaggtttgccttctcttcttgtgaggagtctggctagtttctgctttagccacatttctagctcagaaagcattgcccagtcaatagatatttcccaggacaaactcaggcgccatcatgtcccacaacaatgtaataagatgcctatcacagccgacctagttgctcctattcttaggtttttgacagaagttggcaatagccatattatgaaagattggcttggtggttctgaagtcaatccactatggacagcacttctgtttttattgtgtcactctgggtccacttctggaaagcataatttaggtgcacaacagaccagtgcaagatcagcttctctttcttcagctgctacnacaggactgactactcaacagcgcacagcaattgagaatgcaactggtgcgttctttctacagtgcatttcatgccatccctaataatccaaagctgatggcacaggttcctttgtggaactattttccgaaatcttcctcaagaagggaacccttccaac

SEQ ID NO: 452804 - DNA, 836 bp, Homo Sapiens
  misc_feature (791)..(791): n is a, c, g, or t
ggtgaaaaaatgttcttcctgatagataaaattaatgcctttaatcaggacatcactgctctcatgcaaggagaggaaactgtaggggaggaagacattcggctgtttaccagactccgacacgagttccacaaataggagtaccataattgaaaaccattttccagaagggcctaaaattttgagtagaaaaatcccgaaatttgaaaatcagtatacgctggtagagagctgccaggctttgtgaattacaggacctttgagacaatcgtgaaacagcaaatcaaggcactggaagagccggctgtggatatgctacacaccgtgacggatatggtccggcttgctttcacagatgtttcgataaaaaattttgaagagttttttaacctccacagaaccgccaagtccaaaattgaagacattagagcagaacaagagagagaaggtgagaagctgatccgcctccacttccagatggaacagattgtctactgccaggaccaggtatacaggggtgcattgcagaaggtcagagagaaggagctggaagaagaaaagaagaagaaatcctggtattttggggctttccagtccagctcggcaacagactcttccatggaggagatcttttcatcacctgatggcctatcaccaggaggccagcaagcgcatctccagccactatcccctttgatcatccagttcttcatgctccagacgtaccggcagcagcttcagaagggcatgctgcagctccctgcagaccaggacacctaccagctggctcntgaagggagcggagcgacaccaagcgacaagcggaaagtcctgga

SEQ ID NO: 452805 - DNA, 952 bp, Homo Sapiens
  misc_feature (176)..(206): n is a, c, g, or t
  misc_feature (230)..(239): n is a, c, g, or t
gtgtttaaatttaaatggtatgtgtacttgcttcacattgtctttctaggttggcgttcatgattcaagtatttcaagagtgatatgttctctttttggattcatattccaaacgaaaaaactgaagttataagggaggcaactatgtgctcagacagtctgtcaatgacccaccnnnnnnnnnnnnnnnnnnnnnnnnnnnnnnnaaaaatgtatttattgcaagttgnnnnnnnnnncgaaaaggtcaagttagtgctgctgttccaaaaaaggtcacgaggtcagagttgaaagttctaagttcagattgaatccgaccctcctcccagaaggtcaccaggtagtaaaggagcagggctgcccatcctatggggatcttccaccgttgggactccccataagctagaagaatagtttgggggcccccacaatgaagcgccagcaagatcggccccgctgctgccaccagcgctgctgctccactgcccgagcccagtggacccaccaaaaagattcagagcaggtcccacgggatctgactggttctggccggtctccagcgactgccaccccgcagctggcgcacttggggttgctgcaggtgtagggggctgagcttgtgccagaaagcggctgacttcatcatcagtggcaaactcagcaaggatggtagtgtttcccaacacacacatgtgcagtgcagtttgggccttggccgcctcctgtttggtgctgtatcggatcagggcagtgccctgggttagattcagatggaatgtcagcagtgggccatgctgcatgcagatcgttctcaaggttgacccatcaatctgtggggtgagattgtgaagaaccagccagtaactaggacgaactgagccaccatcactccaggtagaggccgaggcgagccgtgagtcctgtgtcccccaccccctgactgatcgcc

SEQ ID NO: 452806 - DNA, 761 bp, Homo Sapiens
agatttacgcccatagtacttctcagcattccgaaagactttgagcatgtcagcatcaaaagcttccactgtcttatagtaaccagtgaggatctgcttctctatggtgataagatctaggggatcagagatcttctcataataatcagcattctttttctttggaggaaggttcaaaagtggagctgccagtgcttgccgggaagaatctttataagagatgataccatcacaaatttctttgaagatctgggctaggcgggctgcccgagccacttcaatattttcctctgcagctgccaaccgtcttgttcgaacagatcgagctgtctgcagggcagagaactgggtcatgaagacatcagacttgatattcccatcatctcggcagatcccattccaacgggtatataatgatgctgagtgaatattatcactggtgtgctttacttcctcctgtttttgacgaatcttctcccagtttcggaccaagaatacatgatgctttaacacaaagttcctttcacgattggacattggcttcatctgtaattggggggtcaatctagttggggtgttgatattttcactgggttcctcagagagatggcctctccttttcttcagcttgtgcttagactttctcttctcttttgaccgtccagattttttgtgtgtggccatgggctggctgtttttgctgctggtgagtccattcacacgctgactcttgcctccgatgattcctcgacatttctccc

SEQ ID NO: 452807 - DNA, 1260 bp, Homo Sapiens
  misc_feature (588)..(656): n is a, c, g, or t
cacgagtattttgtcttctttagagcgggggcgttcaagggaggtctctcccccaagtgtgggagaaggtttgccgttcccgaaaccgtggccaggaacgttaaggggcccctttttgccccttggattttgaaaaagttcctgaaacttgccttgtggggccacccctgccaccttgttcaaggtcttcttcaaaggcaggtggaccggccatgagggatggttgtcaaaagtcgggtgcaggttcccacctcagccaggttacatccccttccttggtttccttctttgccgccaatttattgatgggcgtattctgtacagattggaccatgacagccatttctgtatgttgtggacgatcaacggggggggccacgtcggtgcagagggtaatgatgggcatctgctgtgagccggaagtagccatctaccagggacacaaaggacaaggcctcctcgtgggaagagagcttcagttccattttcttgttgtcctgcttgttaatgctgaccacagactcctttattacaatgtgagtgatttcagggaagtaagaaaaattgttccactcttcccggatcttnnnnnnnnnnnnnnnnnnnnnnnnnnnnnnnnnnnnnnnnnnnnnnnnnnnnnnnnnnnnnnnnnnnnnaacagaaacaacatttggtttatgcctccactggattccaagattcccagtcaccatcacttcgtagtagagaacgtttccaccgtcattcgaatgaaaccaattcatctcattttctgatgaaatcagtaacatggaagtctcaaatatttcagcaccgtaatgttttgtcaaagtttccaaggtagccaagtatttcaccttcaggtcatgcgtggacacgctgctgtcacaaatggtcttgttgttaaattcctttaggaaatccttgaaaacattatttatccgcatcctggtgagaaggttcctctgtctgatggacttattcaatgtttctggaatatatcgcttgtagctgatgtccttgggcagttctggcaactgcatcttcttcatcatggcatagtgtgagatggccaggacagccatccctagacactcgttctaaatatcatgtccatcctgctcggtcttggggtctcgaataggagccaggcatttcaccaaatcatactgtccctgagcaaacagatactccagtgagctggcatcaaggagaggggttgcatctggagtcttttttttctcgtagccatttttctgc

SEQ ID NO: 452808 - DNA, 1324 bp, Homo Sapiens
  misc_feature (208)..(208): n is a, c, g, or t
  misc_feature (506)..(506): n is a, c, g, or t
  misc_feature (698)..(698): n is a, c, g, or t
accacaggtgatccaggtcgactcgattatgatcggcactagattccggtgtgaaccgccttgcaagcttcgtatcgccggcgagcacaggctcgctatttcgcggcggagacgtatctgcgagcgcacgaaaagagaaggcggggtgcaaaccaaaaaagatcgaccaagagaggggtatccaaaagtgaagcgagggttggtgcantcgtaggggagggcgcaacgcggttgcacacagtggggaagggagcgactagtgatgagctttgtcgccattccgccgtgaaactttcaacaaattgccccgtgcgtttatgtggctgtgtccgcctccggcgctgtatctatgatcatcgcgcagagagaatgcggttattcgatgatggttcttgcgcatccgctccccccaataatactggtgccgggggcgtgagaggaggcatactttctttctctgcggggtgggacatagtgtactttcgcagcgcgcagattatcttacncattgtatacccgcctctctcggggccgctcgcgccacccgcatctacaatgtcgacacggggcgtgtggcaccgagtgttttccgcgctgggcacatagacgctccttctattactccgcaccaacttgtgtcgcggcgggtgtggatgaacagccctggatgcgccagctttggaggggcagtgacacangtggggtgtatcgatgtctgcgtgcgagagaaataggtatttggcctggggcgctgcagtggggcaggacgccagaccgaagtggggatgccctccatagaggtgggacacattgggggacacatttcgtaagggtatggggcgcctctaaggtccgggtaagggaagacgttccaccccaggggtgggagctcacccgttcagatgcagggccgtggatgcagggggggaccggtcgtgtccaaggggaggggattgaccgttggcccgcgtaggacagccaagagcttcacacgctcgatgttgcccgggggcgcggggatcgcagagcgggttgctgcggtcgatgttgcgagcatccacgtgggccccagccgccagcagcaggtgcacacaccgcgcctggccttgcagactggctgcgtgcaggggcgtgatggagtccacggtgacctggttcacgcaggcgccgctctcgatcagctgttgcagctgcaggctctcaccccgctgggctgcctcgtgcacaggggtccgctccacccagaaacccacgtcgcccagggagcagccgtccgccgcccggggctccatgcggctcaccggcggccgcgcggcgactctcc

SEQ ID NO: 452809 - DNA, 598 bp, Homo Sapiens
gagggtttagaaatgtagccccggggtggggcaggtgagaaatgcttcttcaattctctcttgctgtcaggccaatgatgacgcgccaggctccccaggtggagctgtgcactccggggagacctatcctttaatggggtgacaaccaggctctgcactgctggcaagaggctgcttgggacattttacgctgaggcagaatgaatgtcctggttttccaaaaggtggcagtggctctcctcccaaaaggtgaagttactgaaggtatcccgaacagggaaagtctgaagaatggcttcttttcagcaacgggaaaacgtggtcgactacttcacagagtctcacatacgaagagatgttggtctttgcatgttcctgtaccagctctcctttagggttgacggtaaatattctattcaaagacactcctacttgcttgtatgaatacacatcctttagatgtgggcaagtggctcttcaccaggctactgcttctgggatgagaatctgactctacatatggttctcggatagggctttcagatgacagcaaccagaaaaggcagtcatttcaagggttcttctatacccaatctac

SEQ ID NO: 452810 - DNA, 1305 bp, Homo Sapiens
  misc_feature (364)..(364): n is a, c, g, or t
  misc_feature (376)..(376): n is a, c, g, or t
  misc_feature (1074)..(1074): n is a, c, g, or t
  misc_feature (1102)..(1102): n is a, c, g, or t
cagtgtcgaggccatttctctttgccactgagaaatgcagcgtgactgactctgttgctacctgtcaacatgaatgtttctgtgagctctggtgtcactcatctccatgatcatctcagccaacatgcatcagtactgcaagaaaagaagtcaatcagcagaggagagcatttgataactaagaggaagacttgcaaagccgttttctcatgagtaccctgaatagggggcactcattttgtttcaacggtccaaacgcccaaccttcagaaagaggaagtcagatagaaatagtccctgagagcacactgtgtaggctaagcctgctgggggctggggtgaagaaattgggcgctgagatccngggctggatccntttgcttttgtttacaataggcactctctctaccccacctctcagtacttgagacttaaagtgctacaggcagctggatctgtttgcatgcaggatgaagagggttaaaacactgtttatataagatccaatctctcaccatctctaaagcagccgttggcctgtcatcagtgagatacaatccagtcttctcatgcacgggaacacacacaccctgcgtttctccctcccaggctaggaacctctctgccaccaagggctgccatccatcgcctagtaaccacggcaacccaacctactctaaaacccaaacccaaaaaaataaaataacacatccctctttgcatgacacatttttttcttctcccccttttttggtacaccttttatttgcaatggcgttttctaaccaacttcgaaggcccacggaatcacagtggactttaggggtgggtcctaaccttggaaggcaccaaggggaataagttagcttgggggaaatctggttctcccctgtttccgggagattaaagttttcgagccagccctctccgggaaatttatacctttcggcgaaggccaccccccgcctaccccaacccgctcgtttggagaaattcacccgcttacactcaaattcgcttaacaatatgtcaccgagtttcccccccgcatggaaaactctgaaggattttggntctatttttaaagaggggcaaagaatangccggctcttcccaacatgggggcagatggcctcacacttggaaccggggctacttccccatagttcccctcccccaattacacccacacgcccactggatcccacaacctctggggttgtgcgctcttataccgccaactatgtgtggctacaacgccctcccgtgtctctcatttcttggggggtggcggcagaaacacgg

SEQ ID NO: 452811 - DNA, 1214 bp, Homo Sapiens
  misc_feature (1026)..(1064): n is a, c, g, or t
agggcatattaccaggtacctatgggaagaaccaagcccctgtggtcccttttcccctaaaccttttcttataatgaagcggagaagggttaaaggcaatagggctcggaagtatttatcgccattccaagggtttggggcattggaagaaatcaagtgggccggggtaaatgaggcgtcgtctgattgttctttaattacctccttttgttcatcccagctttagaaagagaatcttctttggccttgggctggctagaaacttttgaggagttctgctgactgaagtgtgtgggtacatgacgagctagccctccctgagaagcaaagctggcattgcagccaccaacaacacacttgaaaggtttgtctccactgtgtgtcagcatatgcctttgtaaccaactttgactggtagatggagtgttatatactttacaacctttccataagcaaacaaatacccctcctcgctgaccatctacatgtatggaacggatgtgatctgccagatctgggctagagttgaagcaagcctggcactggtcccaacaacaattataggcaatatttttgcttgaagaagtagtgcttccttgtccattcatcattgctggagttgaacgcccactggaaattgtgctgtctacatccattatagtactgcttatgctgtcctccgagtccatgcggctcaggggttccccatccgacgacatctcccaaggctgccccgccggcccccggaggtcgcgtggcttccgcctcccccagtcccgtagccctcgtcgccgccgctggagactacgctgctactactgctgccgcccccgccgccgccctggctgccccgcggtcccttgggctcctccaggccctccttgccgtccccatccccgctgctgctgctggcggcgccggggctcaacgagcgggtctcgtcgctgctgctcccgccgctgctgcccaccaggctctcggcgctactctcctcctcacccccgccgctgctgctgctctcatctnnnnnnnnnnnnnnnnnnnnnnnnnnnnnnnnnnnnnnnccggcctggctggcgctctcggggctcggctccgacatcgtctctgcctcgccgccccccactcctccgccgccgcctccgccgcccccaccgctgccgccgttcagcagcagcgccgccaccgcctcggcctccgcctcctcttccccc

SEQ ID NO: 452812 - DNA, 1003 bp, Homo Sapiens
actcatgcttgtgaggcctctggcctcagccgtgtccctcctgatcccttttctacctctccacccccaggcttcacaagggctgtggcgccggctgcaatagtggcgggaacgtggatgattcagactgtagtgggggcggtggcctgacctccctctagcaataacccccccgtggcccaccccacacctgagaacacggcaggcaatggtgaccaacccctcccaccaggccctggctgggggccgcggtcctccctgagtggctctggtgatgggcggcccccacctctgctgcagtggcctgcccgctcggctcccgtggaccacccccctgcatcgcctatccccacagagggtccccggacctcacggccccctgggcccgggtctcctcagttctgagggccccagtggaaagtggagcctgggggggccggaaggggctgggaaggaatctgacgggggagcccagccctcagggagcccccaaaggaggtacccccccaaatctccagggcgcctctagacctccgcctcagcctcagccttcagccttcgccccgaatgtcagcactggaagggccctcacccccccaaagccttccccaggaacattcccttgctttgggacagcaagcggccccctgaaaagtggcaaccccctaatgggggtgccccttgggacgaactgggcctggcccccttaattgtgatggaccggtgaataatcccgggaaaccccagccccctggctggaaacaaccaagaacttggaacttaccctgggccggcccacttgggaacccaccctccctaggagatccccggcaaaagggaccctggcttcttgtgtgccctcctttggcgctgagacccaacggcaacctggaagtgggctttcagggcccccacattgggctggaaaccccctggaacacttttgggtgtgcccattgcgacccgcaacattaccccataaactttgaggtggaacccccaa

SEQ ID NO: 452813 - DNA, 1147 bp, Homo Sapiens
ggagggctgctggcacccttactcaaggacattctgaaagcttcccttgcacatgtggctggctgtgagctgtgtcaaggaaagggctttatttgtgaattttgccagaatacgactgtcatcttcccatttcagacagcaacatgtagaagatgttcagcgtgcagggcttgctttcacaaacagtgcttccagtcctccgagtgcccccggtgtgcgaggatcacagcgaggagaaaacttctggaaagtgtggcctctgcagcaacatgatgcccctgagtactgtgaaaaagactgttcaacatgccttatgataacaccgatttgtgtctattattggtgacattgttttagatattgggtattgtatattaaggaaaaagatggtctatattctctttattgcatatacttaatgtttcaaaagaatgcagattctgtgtttaagcacagggctgatagttgtggttttgtttacaaatgttctgttttggctgctattggttttttaaagaggttttttatacttttgtatttgaatagttatgtttcactgatgctgagccagtttgtatgtgtgtgcatatatgtgaactgtaactgacaagatgaattactcagtttctctttctctaaagcttgtttgatgaaactggttggtcctttcagtgaacaaaaatatgaccccaaatctgtttgctctggcttttatttcttcaggaagcagacttccacttaaatgccattttgtgattgtgtcaatcatacacattttatttacttcagagtttgaatagagagtacacatttcttctgcagatttatttcatgatgagtttgagttgcttagcagggcgtgtgggtcccgttgaagtgcagtttgaagcaactgcttctagatggcactctttcaggtggcacaaatttgaacctgtatttgtcatctctgttccacacactgcaatgtcaagggatgcagaagtgagtagaattccatccctgcccttgaggatcttgctttaacagatgtaaaactgaacataaagtatttgcagatttaacgaactgggggaaataatgacagtgtggatctagtaatacattaaaatcatagacattgactattaagggttaatggatcccc

SEQ ID NO: 452814 - DNA, 1150 bp, Homo Sapiens
ggaaggttgagcttcgtcttgatagatcaggatctctctggtaaccacgcacgagattgggtcgatgtctgggtactatgatgtgtcactatgggggtacgagcagacactgtggaaatagcagcggtgatgcgcatgactagatgacggtctcgtgtactgcctttggaacgatgttcgttgtttgcagacctattttatcaagatcagagctggcggctcccgccttcgggttcgtcttcattttcgttgttgtttgcatgagagggcccaggagggctcgggacagctgtgtgctgcatggggttgggtgtctgcctggctcgcacttggtacccatggccacctccccattttctgtgccttatctcactgtttcagctgagtccaagttgtttactctgttcctctccagaggggctctctgtcccagttgggcagctcacctttgggacataagcctttgccccacaagctgtggagagggccaaaaccaagctgcttgagcccactctcttgctgagagtccaggcctgcctgcctgccagccagaggtgccccttatgcacatccagtcctaccagcctgcttccaggagcctagagtgggaaaggcacctgggggagccctggtgaagggctggacctgacccatggaggcaggaggaagacctggctttcttggtttgtccggccctggggagcagccttccctactcactttccccttgcggcaccaaatggtcacctccttccagagcaaaaactggcactcatagcaagccagaacccccatccccatcctcatgggtctgtggctgggtgcaggccatcaaaatggacaccacgagacagaagtggggactgcctggccccctagcgccttccactccttaagcaagcacaaagaaaatgaggcagaagaattgtcagagctgaaagttcctttgggttgctcacaactcagggaatgcacccatgggggcaacccagggcagcgggagcccctactagaactgcccagtctccttgccacccaaaaccttggtggcccaaaattgggggcccttctgggctggccttcaaggaaatttttcctccttttgcaattgggggttttccctgcctttaaggaaactaccaggctggcc

SEQ ID NO: 452815 - DNA, 462 bp, Homo Sapiens
tttttttaaatgcagaagatgttaaacaaagtgaatttgggacatgctgctcgtactgtgtgttacagccctgaaggggacatggtggctattggaatgaaaaatggagaatttatcattttactagtgagttctctaaaaatatggggaaagaagagagacaggagatgtgcaatccatgatatcaggttagtgaacaaatggaatagagtttctagtatatacttgatttaacttccatttgtaaaattttccatagccttgccttcaaaaagaggtccccagggcctgtagcatttcccgtattataaattgtatgctaaaatatggctgtttgtatactacttaattcttcttgctaaattataaacccactggggcaccaactataatagcaagtactagtagggtaatgttttgatggaattcatggtttaacacttaggccctgtcccttaagtt

SEQ ID NO: 452816 - DNA, 797 bp, Homo Sapiens
accctttcattgtttaggccccaaagagaccggagtggtttgggtggtttcccaggggggcaggtagaaggcagcccagtttaggaatttggagtgtagcaggtcagccttgggcaccggtgtcagccactgttcacagggactgagactgtgaaatgacaccttgcatattgtctctataggaggtcgaatgggaaaaagttacctggagtatgatttttctttaacccaatagggagcttaaatgtgactgttgatacaggttttaaaatgtaatacacacatatttacgaacctggggcttgactagaggactggaggaccccaaaaaggagcgccactcactcactgtgtccttgcatcctcaactgcccgcatgtctccagaggctgcttagtgcccacacgcctgggaccaactgtgactccaggctgctgcttgtcaccttgccttagtttctggctgatcacctaatcactctggagctgagaatatccttctccccacatctaacccgtgggcagaattctgtgagcgtttccctgcctttaggactgatgacactcggtgtgtgggtggaggtgggggagtcgtcagtcttatgatgagtcccttctgctggagactttggtccacgagagagggtagggggcaggggagaggccgatactcctacagggggggtccccccttgctccccatcaaaatgcagagcaccccattactccagcaccagagttgggaagggacacaagaggcaagggctggcttcagtcttgggctcctgtctgtccccc

SEQ ID NO: 452817 - DNA, 906 bp, Homo Sapiens
  misc_feature (102)..(102): n is a, c, g, or t
aagaggaggggaaaagtattccccctcaataaggctgatgtcagaggcaatgttcgaccagtactactaaattctaatccatttaactgtgataatttctgntaaaatcatgagttttcatgacaatgtctatatccattatatgtgatctgttggaagttttggctagagaaacttaattgtgaggaaatttaaatattgtgtgatgcaagtacttactgaatttggaaaccccttgatagcattcccagcaagtgatagttcaacctttgcttttattcttccagccacagagaactcactgctttaaaaccattccattactgggtagctctgaattgttttcattgttttctcttaaactgaaatctgcttccctgtaatattaatgaatacagctaaggacataccgtgtggcatactatgagagagctccatccagggtgaggcatccaaaatcatgaacctttttaaaagttcatatgctcaggtgtctctcctagtgattgattttgatttgtcttggctaaggtggttcctggatatctatatatttattttgaagtcccaagaatgagtgataagcacctgaggataagaactagtactgaggttaaggatggagcaccaccattctttggatagagttgtgatcacctgtgtgattttatagctcacctgttagttagattgagcaagagaacaaccccttttattagaaacagcatacataagaagattgtaaaaattaacctacacttgctagggtaagataatcagtagtacaatttgtattaatctctgacctaatatgacctaattcacttttcaagtttaacttggggagctttacaaaatagtaaataaaagggtcccatcccaagagattctgatggcattagatca

SEQ ID NO: 452818 - DNA, 625 bp, Homo Sapiens
ttttttcaatttttaaaatttaatttataaagaaactctatatcccattgtaaatgaaaaaaagcagtatcacttgccataaatagagagtaacaaaaataaacacaacaagctgtacaatggtattaaagcctagctggagactattgtctcctcaagctctgggcttcctgccttccctttccgttgataaggaagcttagcaaatgttagagagacgtgaaagacacagtagtaccaaaccaagacttgctcctgggtgcagttcatagaattgaaaggccactgcaaaccagtcctcttccggggtgacttgatgacttgatggtgctcagtgctgtgtttgggatgtgactcaaatccacttatttgtcagcagagtcccacactcctggaagccctggcccagacgacctgctttagctcccgcaaggtgtctcagattgtcgtgttgagtagggaatggagggggtcacaggtgcccatgcccaggtgcagcagagagggggagaccggtcccagagcagcccatcagccagatgagtccccctgcgcccaccgtgggcctgtcgggaatgcagctgactgggccactgccacgtcaggcacattatctgcaacaact

SEQ ID NO: 452819 - DNA, 801 bp, Homo Sapiens
  misc_feature (103)..(103): n is a, c, g, or t
ggaatcccatccccggtttcttctgggaatgcggaaggccctggttttcaaaaagttgtattccaagccgttttcgcgagaaaaagggcctttcttttcatcnttggtcagggcagggactttacccagcaattttcgtcccaagagaatgtctcctttcttatccgtccagatcctcactcaccatggtaagaaattatggtggggttttagtgcaaaccatctttcagtccagttttccggtctgtgcccttttttcatcatgtaaccctgctttaacacatctaatataagttcattaaagacttcattaattgccatagacacagtctgccggtccatgcctttggtaaactgtccatgttccgaataagctcaataagttcccatgcagaaaggccatttttactgtcatcaaagttgattttataatgttcaaattgttcttgctgccaacctcctcccatagcttctgtaagcttcttaagcaggtattcaatctgtttccaaaatgaacctgtttaaataaggcatgtagccctggttggacactggaccctcatcatcatccctgaagtgctcttcaagggcaactgggtcatgaggaaccttcagcaccgtgcacaggttatgggaaaggaccttgagctgggacttggagaccttgccgctgtggtcctggtcgagtgcggtgaaggcgtgccagatggctttgagcagctcctccttcaagctccccatggccgcggccctgctgccccgccaacccctcctgcccagccagcccctccgcgcctcccc

SEQ ID NO: 452820 - DNA, 794 bp, Homo Sapiens
  misc_feature (174)..(228): n is a, c, g, or t
ccttgtggaaagcccgaggttgggttgatccactgaaagcccaggaatttgaggacccaggcctgggccaaactaggcaaaaaccttgtttgtgagtacaaattatgccccaggggctaaggtggggtgggaccacacccgtaatcccagctacccaggagaatcggctaaacnnnnnnnnnnnnnnnnnnnnnnnnnnnnnnnnnnnnnnnnnnnnnnnnnnnnnnntgacagggcaagactcaaaaaataaaaagggaacattactaggggttagaaactaacttcattctttttagaattcaacagttttcctaggtcaccaattccaccttttgttcttattaaggcgcaaagtcacaggacccccttcctgggagtcactgtcattaaatctattgccgtcagctcagcccagggtaggcaaggttcaagaatgggaagtgcttttgtctggggaaacacgcaggtaatgtgatgctaggaaggaggatgtgcaggtgggtgagagcccaggagggagcagctggtgcctgacagggtgagccatcagggctgggcctgggtacagccccaggagaaggagcctgtgcagaagtagcagttcagtggattccacctcctatgtcacaatccagcaggtggccaggactcagcctgggttttaagtgagtaatgccttccctgtctcagagattagctcttaacagtgttcactagaggaagccctggcgagggtgggggggcgtagtgtggggacaaggaggccagatagaaagtgctggaatgttccc

SEQ ID NO: 452821 - DNA, 1165 bp, Homo Sapiens; identical to SEQ ID NO: 150833

SEQ ID NO: 452822 - DNA, 893 bp, Homo Sapiens
  misc_feature (817)..(853): n is a, c, g, or t
cgtaagtcccacccaaattgcggcgggcagccacggggatgttccagggcttcccagtaccagggggtagagcttcgcccgcaggaccggtgaatgcaggcagtcagagtgctgagttttgctgcaaatgatgagtatccggcgttcgtacagcatactggcgtacagatgcaacatgttgttaacatccacagccaccaaatattctgtcagatttctattctcaggtatgctgggaagttctctggtatcaggcacagtaaaataagaatgcacgctgagatggacagacactcctgggtcagggatgggaagtttgtgcagagtttcaagaagctcattccactgattttcctgtctttttgtcgtgtaatctgccaggatgttaagcagcttataaaatacctcgaaccaggggagatagcttaagatacagaagcagctcttcgctcctgaagataagcggcagaacccgaatctctgtttgctgtcaatgtcagtgagcacgaatgtgaagttctggccaacttggctaactgtgaggctgtccacatagaacggggaaacaaaacttggtcaaagtctgtagaacttcctggtcactgtagtcctccgggaattgcctctgcacctcaggatctgaaagagtgccacctgtcctgggataggccacttcaacatatacttcaaatgtggtctctggattctgcttgatcctggagcccatggtccccaggcctcctcatgggcccgcgggccccgctcggcgctgcgatccgctctcgacgaattcgagctcggccgatttggcctgatnnnnnnnnnnnnnnnnnnnnnnnnnnnnnnnnnnnnncgccgccccgcgagaactccattccccatagtatctatca

SEQ ID NO: 452823 - DNA, 1300 bp, Homo Sapiens
agcggggtcacgtcggtcttccgggtgtctttgacagggttttctacgccgctttttcggcgacttttgctcttccacttttgccaccgcccccaaccttctatatccttgcagcccctaccttttcttgtgttgctcctcccctggcagccgtgaggggggttagatctcagccggagccggagctgggcctagctgtcccacgggccaccactacctcctttggttcgggagaaagctacgaccaagtacgcccagctcgggccttagaacttctgaacgggcagtgcgggtaggccctgcttagcccttcccggaggacacctgtgagtttagggggtttcggagaggaacgcagcagtgtaggcccaggtcggcggcggggcacgggaaacttttccgaaacggtagcgttttgttttgcgtgggaggttccagcagtatctcttggttattccaaatttatgggcggcatctgggctgctgtacattttgaagaatcttaggaccgcttactttgcttactcgttttctattcctcgcgtactgcctcgtccaccactccaggaccaaaagaggaagatagtcttgggacccttgcatggtgtttcaaagggtggtgaagaactaaggtagaagaatacatgttcacttccagtgaacaagagcatgttcccaaactcaattttgggtcgcccacccttcactccaaatcatcaacaacataataacttctttaccctgtcacctactgtttattcacaccagcagcttattagaatggcccaattcaactttcagaatgccgacttgtctagaggctgtgtcattacaggcggtgacatatgggaatgtccgtccaatacagacctcagcttccccattatttcgaggaaggaagagattaagcgatgaaaaaaaccttcctcttgacggtaaacggcaacgtttccattcaccccaccaagagccaactgtagttaaccagatagtgcctttatcaggtgaacgaagatactcaatgccaccattgtttcatacacattatgtaccagatatagtcagatgtgttccaccttttcgagaaattgcatttttagaacctagagaaatcacactgcctgaggcccaagataggtaataataatgtagattttagttttgccttttggggaatttagtataaataatggattaatcaaaaatattttatatcctgggattagtaaaacgggccctttttttggtgcaatggttaaaggactaattcagcctaattttcctgtcccaacatttattt

SEQ ID NO: 452824 - DNA, 1139 bp, Homo Sapiens
tccggacctggtgacttctattttctcatcaaacacttctgtcgccaacggagcaggtttctcttcagaaggtccctgcgagccactgacttgctccctctgagggcagctcaactttctcatattcagctgataaccggggctcgtgggcactttctgccggctcctgtgggtgggcttgctcggaggcggtcagtttctcggaggcaacctctgcctttccgtcttcttctgtgtctactttttctggctcttgttcctttttcttctctgaagcttccacttcatcctccttcggcttcctgaaactggtctttttgcgccagccggcccaaccttgagtgaagaattttttgaaggttgatcctgtttcactggtcacgggactggctcggagattctgcagacttgctaggttctttttcttgtttctcttctccttcctctttgcattcctccactgcttggccagattcggctgggggagaaatttctgcgtggctttgctcacgcttcagggtctcttcgggtttctctgtagattgtttgggttcgctttctttggatgctgcttctccagccccaaggctggggtccttgtggtcgccagcccctgctgctccctccccttcatctttcttcacagtgagtagctggacagtgtcaggcttctctgtcttatcctttttcacagtgaatttaaagccaacaaacttaaacaccttcttaaatccaatatcattagcctgggactcagtgggttgtgttagctcttctaaattgctttctgaagaaggaatctgttcgattatttcgggtgtctcctcctgcccatcatctgtgatgtcgtgaacaaccgctgacttagtagccatctctttatcggagtctctttcgctcacatcttcagagtctctctgtccaactgtgatggtgatggtccccagcatattttaagtagcactactgtacaggagatcagcttagcgggtccctgccctccccggcagacgcctagtctcctgcctgccaaccgcaggtggtttcggcgggatcagagcggactgagcgcccagacactcccggaggatgggggagaaccggaggtgccctcggagctgccgcagcgaaaagccccc

SEQ ID NO: 452825 - DNA, 2436 bp, Homo Sapiens
  misc_feature (507)..(508): n is a, c, g, or t
  misc_feature (512)..(512): n is a, c, g, or t
tcgctgagtcttcccgttgttgtttttacaggcaagagggtgtatattcaaggcaggtctaggcctccggcacgttcctcgtgagagacgggcgcggggtggtagttgaaagagggatatttattattgggtggaggcagagagagtaatgttatattgtctatgcgctcgtcggaagttgcactggactcccgaaaagtgagaatggagtgtagcggttaaagaaaaacggaaatagggcgcgatctatgcagtgggtgaggtttaaattatggggagggcatccgggaagtgggggaaagtatgaagagggtggtggttcgacaggggggggaggagcccgcaatggtcgggggggacgtatctgcgggggtcggaggaagactcggtggtgcaagtctatggtgtgggacggggagtgtgtacggtcggaagcaatttttcgggtggggtcggttccgtcgacgtgggggggtgtgagttgtttcggaattatcaaatacaaannacanacagggccttgtaatatacaaagcacaatgaaatctgggggcaattttccccctcggtctataacctccttgtcctcctgggggctggaggggcacaaggctgagatccatcgctgcttctcactttccgtccgggcccgcagcaggaactggtgcttcatgtgctgcccgtggaggagctggaggaggaacacgtggccggggatgccctgcagcttcaggctcaggtcccgcacctgcagctcagccatcttggcatggacgaaaacggcaaacttccctagctccttccgccgagagagcagcaagcagtcattgaagaggtggaggtagactgccttgctggacagcttcagcttggcagggggtgctgcaggcagtggtgccagctctaccaactctccatgccgaaccagccagcgggcctgagagatcagcgggaaaatcttgccctcaaagtggatcttcttgctcaggtggatgagttcctctgtcctcttcatggactgtacactagcattgcactcctgcaccagctccttgagcgcattgaaggccttggtggccatgtcttcgtcttcagagccctgtgctgtccgcttcaggatgttctccaccaacatcttgaggcgggtgatcctctggaagggcaggataaggaaggaggtaaggggcagacgctggcacacaggagactcctccaggcgagccaggatgccagggaacctggggttctccaggagcaggcgctggtaggtgcgctcctggtaggcctggttggtgacatagggcaggtagactctgcggaaggccgggcagtggtccagcaccacgtcgcacacgctgaagcgcagcacatctgcctccagccgctgctccaggtcctgcaggaacctctcgctggtgctcttgacctcgggcagtttggaaaacagccactgcttgtcctgcgcccccagacactcgctcagctcggcagagcctaagaagtggcccacagccaccgacaggctgtggatgtaggaggcctcggaggtgatcagctcaaacttggcctcctgcagcttgcagtcccgcaggctcagcgtggccaggacgccgctgccgcgtacgtcggggatatccctgccccagcgagaagggtggagccttgcgccgagcgctgcgccccggaaggagttgctgggggagaggttggcccgcggcggccccggcccctcttttgcgccctcggcctcgtcccccgggccgtcctcctcgcgctgctgccgccgcagttcgcgggcgctggccacgtcgctgtattcctgatagaggacggagttaaggaggaatcgagactggcgccgctcgttggtgctcctggaccccaaagggggctcttcctgtgtgtctagcctgggctcggaccaatcgccctctcgtgagtcaccaggggctggccgcgacacccggtccccgctcatctctacacttcgagcctccattccagatgctttcccttcccgggctgctccggtgcctgacccagagatgagtgcccgggctgctgaattccgccccaggcgcagagaagagtgcagccgggtcatcagctccgatgccgagaagcgcctccgctcaggaccttcgaggctcactcgggtggacccagacaactccaccctgggctcctctgtgctcagggcctgctcttgcactacctggccaggctctaggaagacagcgtgggcctcggggcagccggggacctcttcacgctggtacacccgcatcttgcgccctcagccagggagctccgtccagctgccagcacggtccagggctccgggacaccctgggggctctggggttgcagccaagtcctcagggggcgatgtcagcatgtcagcatggccctcgtgccgaattcgccacccaggcc

SEQ ID NO: 452826 - DNA, 1023 bp, Homo Sapiens
gtttccggtgttattaactgttggaaacgttagtttgcaaatgttatgagcgttattcgttgatataaataaaagtggtctgtatcgaatgagttgctcgtgcttgttcccgggaaatgcgccgttgattcaagggccgaagtatgttcgctcagggaataatgtgttgtcccataggagaataccggttcaaaaatgtgggatatttttattgcggaattttttgggaaagacgtcggggtaccatctgggttccattcccttatgatacaaaggtggcctaattgtggttggatgaatcgtccaaggtgtgctaagtgtcgctttttggggcaagactacccttccatttgggcaatttcgcccttcagaagaaagaattcttcagtttttgcagaaattgttctggaaaatagttgattttccaggcagtatttcatttccaacgggacatttgtgacctgcatcctttattgattttatgatgcaggctttgcagaacctatggccgcatggcgtttgcactgcttctcgtaatgccatcaagcagatggggcattcatacttgctttccaggggtgggtcaaactctacatcatatccctggatctcctccataaatgagctggagaggttccccgtgctggcagttccacccacactatcatcttttgttacagcgctacaggagctggccatggccacacagcagtcagtttcagggtggctggatccgcagctgttttcacagtttagcagactcatagtaacttgcttctcccttgctcgttttagtgcgcggggagggcgaaccaggagggcagggctcccccaccaaccgcacgactccgctcagccaaggcgctggtagaggacggacacagacactgcgcgccgagacgaggctgcttggacggcaaactctggatccagtgggagccttcgccaccttcgctggccgcccgcaggccaagccccagctgcggacgccactgcttccgcctcgtgccgaattcgccaccc

SEQ ID NO: 452827 - DNA, 814 bp, Homo Sapiens
  misc_feature (43)..(43): n is a, c, g, or t
ggcggccggacatttttttcatttaacgtttccgtttcctgtncgggaaatttgtaaatatcttccaatgttcccaaaaataatgggctagctgcgcaacgggtgaacattcctgtgtgcttgcggcaccgttgggatatagcccttcacagatgtccctgaggtgtttgatgtacacccgctcggtgtccatgatctcccggatgacgttggtccgcatctgctgcttgttctcacagtgtctgtggcggttctggctggcttcttcgtcctgctcctcactgggggtgctgctggagttttccgacagttcttcctgattcactcgcaatctgacgaagctcgcggggaaccaggcttccttatcttcactgcggccccaccaccagtccttgttggaggcttccagaacctggatgacatccccggctttgaagcccagttcctggtcatccatggtcacatggtcccacagggcttctgcgcagaccacgttgccatcactgatcagctcattgatggccagctgctccccgccgggctgcaggtaccgagggctggcctggcagaggtcttcatagctgaagtcctcctcactaccgttgtcatccactaaggcagagggctcagtacctccatctgaagaaaccaagtgaaggctttccagactccagaatcttgctatctcccctctagctaccatccttctgtttggaaaacggcaaccttcagagcaggactggggtgtgaccgaggagccggtccccaagcatcacagaggactgcacaggctggcagctacgggaactgcaga

SEQ ID NO: 452828 - DNA, 1135 bp, Homo Sapiens
  misc_feature (42)..(42): n is a, c, g, or t
  misc_feature (467)..(527): n is a, c, g, or t
ggactgcgacgtcagccgggcgagcgcacaggcagcgtcagngactcgcgcgaggcgaccacggcggccgagcgacacgcacgagcgagtggccaacacgcggaagcacgaccccactcgcgcgccgcagagaaacccgtcgcgccaagtcgcagagcgcaccggcgtcgagctcgcgccgggctcgagcgctagagagttacacagacgggcggagcgtccgcgcaccgagcggatatgtggcaagatgtgagggagcgcagaacacacgaagcctgtgcgtagatgagagagcgcgtaggacgtgggcacaggcgccagccgagcagacgccagctaggccgagcgagccgggtcgacacgtacggacgcgcgccaccgcgcacgactcgacccgcgacgcacgatggcggccgacggcaccgccccaccagcctgccgcccccggggttcccgatcccgtgccnnnnnnnnnnnnnnnnnnnnnnnnnnnnnnnnnnnnnnnnnnnnnnnnnnnnnnnnnnnnncgcgggccggaccgtacacggtcgggtgcgggcggcaggcggtgtcgaggataccccgggcgcgcgcgatgccgcatcgacggacccgggcacgggcaggagcggaacggcgaggacgcccgcgcgaggtccctgcctcccgcccacgcagcggaaggcccgcgccgtcccagcgcgacgacggcgtacccgcgcggggacggccgccgagacggcgcaggacaagcaagccccgaggcccggcctaggagcgcgctgccaacccgcgggaccgccgcgacggggggcagggggaacacggcgcgcgggtgggcccggggccccgctccgtggttagcgggccgtcgcaggcggacccgataggagactactcgcggactctcgcgacgccccgcgtaggggaggcgggggccggctcgtggccactcgccccccccgccaggcccaggccatgcggcagcgtctcccgtccggtccaggcgagcggagggtgggagcggggaccgcgagaccccgctccgcgaggcaggggggcggcgcgcgccgggcggcgcgatgcccctctcgagaagacggcgcgcgagacccggccggagcccgagaccccc

SEQ ID NO: 452829 - DNA, 1112 bp, Homo Sapiens
atagacatctttttaatgttttactttaaaacaaataatcccagtaaaagagagcaaaggaaattacactttaatgatagcttgaaatggatatggtgttcccgatttatttgttttcaggaaacagacaattgcattgtcatacatgacttagaactgcttacttaaatgcacattattagattaggattaagtttctcttacaaaaacacaaccatgtcatttaaggcgaaaaatctcaggcttctagggagacaagttaatatttatgatatttcctctatctggatttaggtggaaatgatccattaatttaggttaggccgggtttcatcatccttacagttttgctttgcaaaatggcatgagaattggtccaatttgtgcctgatttcctcctctctagtagacttattttaccttgcaaattaaagaacttcagaatcactgaatcaatgggaggtgagaaagggcaccttagaacagatcaggacttaaaaactcaataaagttattttaaacaaaacttgcaatctacaaatattaatttagttgaacaaaatgcaaacatgtagatcagacatagcaaaatttttttagttaacctcatacaagggatatttgcaattaagtattagcttgatcaaccctacatgttgaagaaggcagacacacttgtactcagaaagcatatggctactcagtgctcagctaaattgtgcttcaagacatcattaaaattgaccaatggaaatttgcttagtgtaaatgggagacccctctcatttccacagagagtaacacgacagacagaaccttatagcttccacacaactatcttttaacatcccccaatttttgtgctagagtaagatagacacaaaatggtcatggcttcaatgtataaaagtttttcacaacatggtttatcacattttgctatgattaagacctcagtgctgtgtgtaggttttgtttctgaatcttcagtcgtcagcaatgctgggtgagctgtactgtgtttgagacttaacgaggcctaaggaggggtccccaatacattcagaattcctgctgccagtggggtttgacccaggacagagtatgtcccc

SEQ ID NO: 452830 - DNA, 600 bp, Homo Sapiens
  misc_feature (386)..(386): n is a, c, g, or t
  misc_feature (502)..(554): n is a, c, g, or t
ggtagagactgggtcttgctatgtttacgaagctggtttcgaactggaactcctagcctcaaataatcctcccacatcactgtcctagaatgctgagattatagacatgagccaccctgcccagccagctgatccttttttttaacctatctatgcttttgcttgcatagccacttaacatttctagttgatcatctttggtgaaaactacaaaaacaaaggagaaaagggcagattgaaagctccactctcctaaaaatgtaaacttatcacaagaaaatgccaggttttgtatgtaccattcacattttgggtgataattaactctctgtagaaaattttggaaatctaattaattagtaccttcaatacctttagttgtcctncccacacacgcgtgtgtgtgtgaaatcttctacaatatcttcccttttttagaccatgttcactgtcaaaaaggtgctttaagagcagtctttggctgggcacggtggctcacacnnnnnnnnnnnnnnnnnnnnnnnnnnnnnnnnnnnnnnnnnnnnnnnnnnnnnatcaagaccatcttggctaacaggatggtcttaagggacagtgaaa

SEQ ID NO: 452831 - DNA, 676 bp, Homo Sapiens
ggtacccgttatacagaggctaggctcatggaaactttctgttgactctggtaaggacaatctagcagtgatgactggataaactggacaactgtcactgatctctctattagcttccagtaattccttggacacattgcaggcagagcttggtggcacagcattcacattctcatcttgttcaggagacatgggctcttgtttaatctgaactgatgagtctggagcagggacactgccatgggtttggaaagtaggagacgtggttatttgaagagaggctccggtgggtgatggagacacatgggaagatggaggctccagaaaaagtgggaaaaagggagtgggcagcagtgcggcatcaatggatgtttgagatctactgttccttcgttctcgtgtgaggctacagggaacctggtctgggtgctcagaaggttcatatgtttcttgtaatccctgtagaatctgtattctatgggtcctcagtgcactcatctccatagttatctgctgcttgagcataagtagcctctgaacttccacataagctgtctgaagggctgcacgggcttgcagaagattgttatccatgcactgcaatgacttactaagttcttcctcccttaaagaaatattcagcagctggtcaacctgagaacgttctttttttccc

SEQ ID NO: 452832 - DNA, 786 bp, Homo Sapiens
tttttggtagaaaggcacacggctttttaatagcagcaagtcaggtgcatctgcctcgaggggctaccaagccatcataccattgtggcaaagggggcatgaggatgaggagaaagcaccaatgtgagggcatcctcggtgtccacaggtgagcataaggcaggaggggaagcttccaacacatctggatggcgacacccctgggcatggcagacataagatgtgagccccttggtgacacaatcagaggctctttgagaggagggggaggcaaggttggtagtggtgcttcagggcactctggccatccaaatgccacatgctttggtccttctagctgaatggagaggaggcatgttccatctccaagcccgaagcattgattcaccatctttaacttggagattccagactcagtcctggtcaaacatgccctaggagggcaactggctcagctatgcccattcctctgcctccagacctgaaggaatctttctagagggagcagtgcaagccaggaggccacagagggaaaaggtttagggccagtggtcacatagctaggtgcctgccgccagtgtctcagcttccagagcttcccagctgctccaggagggccctgacctcgccctccactcgcagcagctgggccttgcgccaaggattaagggtggcaccccggctatcttccagatcccgcagtaggagctcaaggtgtcgctgaacccgggcccgatcccagctattgaggttccgctggacttcactgaggatcagaccagtacc

SEQ ID NO: 452833 - DNA, 777 bp, Homo Sapiens
gggattccaagtcgctgctgtgcagagcagcaagtgctccgtgcagggctgttgctatcacttggaggtgaacagcctcttttgccggtattcagtgaagaaagcaagtctaaatatgcagttctctcactggagtgaaagatgttttgttcatttctaatcaactatgctagacagctgcaagctgaaaagtgcctgcaatttgccatttatttgtaataagaaaataataaacactgctggaaccagtaatgcagaagtccccttggctgatcccggaatgtaccagctggacattacattaagaaggggtcaaagtttagctgctcgagatcgaggagggacgagtgatccatatgtgaagtttaaaatcggaggaaaagaagtttttagaagtaagataatacacaagaacctcaaccctgtgtgggaagaaaaagcttgtattctggttgatcatcttagggagccattgtatataaaggtatttgactatgattttggactacaggatgactttatgggctcagcctttctggatctgacacaattggagttaaacaggcccacagatgtgacccttactctgaaagatcctcattatcctgaccatgatcttggaatcattttgctctcagtcatccttacccctaaagaaggagagtccagggatgtgacaatgctaatgaggaagagttggaaaagatcaagtaagtttcagacccaaagtttacgcatatcagacctacacagaaaatcgcatctttggagaggaat

SEQ ID NO: 452834 - DNA, 1078 bp, Homo Sapiens
  misc_feature (125)..(140): n is a, c, g, or t
gtagacattgaaaagaagacttgggaataattgggcagatagaatgggttccatggatcattctagttgccactagaaaatgtgagctccttcttcatttaccatgttgataatccggtggtgannnnnnnnnnnnnnnngtaaattgtattagataccccacaggaatgtgacaataataggatagctttgggggctggtgatttgaaacagggactattaagtagattttcccccatcctctaggttcctgtagtctgtgctcagaacttggtttttggcccctattgtttttgcctattttgattttcagagatgatcacatggggacagttaacttttcttctgctgtgttgccttaatgctactagattgtgttgtgttgttggagttttctgacttcttccctataaaaagatactgagagctccataatgaaagaagttgttatactttctcagaatattctggaccactgaatgcacttctaatagagctttaatctaaagaagttagttcagtggttattaactgattttattacaggagaaaaaaactttaacaaaaaggcagggagaaaagtgtgaagggcatcaagcaaaatgacaggggcttcaaaaaacaaccaaagacaaaaccctatcttctgaagaccaaaggtccaactttacttactggctggcacagcttttctgaactccttgagtttagaatagagctcctagaataataaggcggccaaatttaaagatcagtcaatacagtagggacctgctattgatctctcaggcactgagtcttcacatccagtgtcaagcccagcccagcatatggggtgatatgagcagaaaacacacatcggtgtgtctttgatttctcgcagctgtgtaatgtggcatgagaagtatgttttggtgccacatatttctcaatctgatgcctttgtgtcttttttttatataggcaattggcatcttattcaatagtgccaaaaggatttagggtatctggtatggtttgggcccataataaacgggaggataacagtaaagcatacattagattcatagtggggaat

SEQ ID NO: 452835 - DNA, 556 bp, Homo Sapiens
gccggctaccattttggttggacgaccagcaattctggtgtgtgtttgcaaagatcttaacggagaacaaatgttacttagtgctgcagaaggagaacaatgctaggttccacaaggtagtctgtccttttgctgtcttgtctacaccagagaacctttggttgacttgctttaatattggcttcagtcctattacaaaacaacaacaaattattgtattctaaacacagttctaaatgcaacaatagtttatcttttaatcctggattatacagtttacaattacttgcaaatgcatagtacctcactccaaaaaacctcaggcatccaggcatcacaatttctctatctgcatgacacagaaacttccatgtcactagaggatttcacaatccatatatgaatcccctgaagacttcttggtgtgaaggaaacatcactggacacaacactgaaaatggccatagtccaggcatggtggttcatgcctcgtaatcccagcactttggtccgttatcttaatgtaatgtcctcgtccaaccatatggtagccggc

SEQ ID NO: 452836 - DNA, 812 bp, Homo Sapiens
  misc_feature (87)..(87): n is a, c, g, or t
ccccatcacggtcgctctcataaatgagtggctccttctgctgcctccgtttcagctcagagatgaggtccatctgtggccgccggnctttggcggtgacttgggtgctgggggctcccctttgcccggggtatcagcgcctgcctcctgggcagcggcttcttttttccactgttccacctcctgctcagctttcttgtaggccttaatgaagcggctaaagagggagaagaacaggcctggggatgtggtcttggggttctctccgaagtactccaccacagactcaaaggcctcctgagccgtcttgctgtctgccagcagcttgtccatggtgggcgagttggccctcaggaactccttgagcaccatgcagtcatcctgccgcacaaactctctctgtgtcaactctaggcctcgctgcagggagcgcacgtccgccaggacactgtccagggacactgagcccgccttgtccaggaagtgcaggtcgctgtggaagcctgtgagttgcgggtacttctcagcaatgaccttcaccaggtagtgcagcagcgtctgcttgcgatcagtcgacttcatctccaacagcgcatccaggctctggagccggaagccataggctgccccacgcttgctactgttcatgtagttgccaaaggccaggacaatctccaggatctggcggagtttgtcagaggacttgatggtcattgaggctgcaatgatggcattcagttgcggcatgagcagctgggctgtgtccgggaagttgcccaggaaggtgagtgtggtcatgcgctccggcagcc

SEQ ID NO: 452837 - DNA, 811 bp, Homo Sapiens
cggtatctttggggccacaataaagatggtataaaggaacataagattaatgctttgaatattgccagatgctgggtgtgctggaaatgtgaagataacttgaccccagcagggttaccttggcagggtatgacatcttcagccattcatcaccgttctggtttccaatctccttttaccaacctctcaaaattcgttataatggtaccacctgcacctcgggcccatccaatagctatcatgactatccagccatttttgtaatagctattagcatgtgtgactccacctactattttccaagttctggtcacttccttcattcccgaagccagtagttgaacaggtagatatgaatagccctgggaaactaggtcatgcgggcaaaaaaatgtaatataccagattgaagatgccagtaatatgttagtgtggtttgcaagaaacttcaatggaggctctgcaagcagtagacaggataaaattcctccaccaaaacagtggagcatagcagtaaaccagcttgaaataggattcttccatgccaatgcagctgctcccggctgacgtttcaccgccatcactgacactagatagtgcgcgatgtcaaaaaagggaaacatggacgtgcgggagaaggccagagccaactcgtcccatggagaatccataacgaccaccgaccgcggcaaccgaagcagccgcggctactggttccccgcgctcgcgcggtgaggagtaggagagggcacagccgcggccgcccgctcctccgcgccggctccagctccgcgcgtgcgcctggcccgct

SEQ ID NO: 452838 - DNA, 844 bp, Homo Sapiens
  misc_feature (727)..(766): n is a, c, g, or t
gaattcttcgatctttcttaaaggattggatttcttcgggtgacactgtggtgtggtggaagccagcggcttctttcaggttcataaaggccatcataacaacttcaggcttcatggtgtggacagggatccaggagagctgagtggatgtgtgaagtttctgatagattctgtcatcattccaaaggaatgtagtttcctccagctcaatcatttgaagtaatacacattgccaaatctgactgtaacctgacattttagacctattggagaaataggaagaaagcccctccagtggaaggactggacttggaagaagttctgcaggaaggtgcatgcaattggatagctgttcatgagtgaaacgtggggaacattgctatgaaattgtaaggtttgcacttcatttttcgtagtttaaaaattgctctgttctggctgttgaaaacacttggtgtgaggtttgaatgaggattatataatcattctagtattcataggaaaatgattactgctctctatttgtaaaacaaaagaaataactttcggaaacagtattttagacatgaggaaattgtttgtattaggcattttgatctaacagaatcagctaaggatagtggatcctggctttacacatttctttgaccaaacccagctggcaacttgaagttgttactgtgtggcttccagatggctagaaggtgatcctacccacatcactggnnnnnnnnnnnnnnnnnnnnnnnnnnnnnnnnnnnnnnnngaaacagaatccttgctcctatcccaggctgggaatgcactgggcgtgatcttcggtttaatggaaacctcagccctc

SEQ ID NO: 452839 - DNA, 556 bp, Homo Sapiens
ttctagaggatcccaagctccaacaagacataggtgtcctttccaacaaccttctttaatgcttttactaaatctgcataatcgccagcttccagtatggggttttttattagtacttctacagactccaggcctcttttctctcttgccatttttttgcctcaattttgtcataaaagtctttgggaagtttggaaagaatttctacagcttctaaaagctcataagcatctattatgtggcacctcatcaccatcatcaccacactccttcagacatctccaccagcagactgttgttgttccaatttagcttctagttcttgttgggaacgaagaaatcgagtaggtctaggagcacttgttggcagtttgacccattcttcttctagttctttcaactgaacagagtttatatttagtaatgggggtctcagagcatcccgaatccatctgtaaatctccacagcagctagttaggcttcatctcgaacagccttctctcgagactcacagagtattggaaacactttgataataggcttaagcaagctgat

SEQ ID NO: 452840 - DNA, 914 bp, Homo Sapiens
  misc_feature (19)..(19): n is a, c, g, or t
  misc_feature (33)..(33): n is a, c, g, or t
  misc_feature (44)..(44): n is a, c, g, or t
  misc_feature (53)..(53): n is a, c, g, or t
  misc_feature (83)..(83): n is a, c, g, or t
  misc_feature (91)..(91): n is a, c, g, or t
aaagttaccattgcctcangaaaggctgatttncaaaaattaangaatgtaanaataaattattttttaaggaccagaatatncaacaacnataggaagaaaatattttcatattaaccttgtgcgaaagcaaccagaaaactttttgtctcacctgaacagagtttatattttgtaatgggggtctcagagcatcccgattccatctgtaaatctcccacagcaattagtttggcttcatctcgaacagccttctctcgagactcaaagagttttggcaacactttgataattggcttaagcaagatgattttggaaccaaattcacttaaggctttcctcagtgtctctatacaggccactatgatcttgggattcttattgtccaagcctttcaggagctcttcttgaacagcctctcctttctcaatctctatgtacataagacagatctctatgcccagctccttggctttagctttaggttgattgaacaccttacttacaacacctgacacaacttctcctgtggtttttcctgctacatgggcattttcaacataaacaagtgcagcttctaatcctttcaattgaaccactgcattggaatcagtgacaaattttttgatcaatcctaaaaatttggaccactctgggctcttttcatcctttattttctggaagatcttcagggcctcttcatacccacttaaccttgctttccacagcttgtgttcacatttctgatcaactggcagtttcaaccactcactgtcatctcccattgtgcttccaggttttccttagaattaagagtatttcgctccccgggcagggaggggtcagggaagctaaggtccgagcaggatcagcaggaatacccggcaggcggcggcggcggcggcagcagcatt

SEQ ID NO: 452841 - DNA, 423 bp, Homo Sapiens
gcccaatcttgctgaagcctccaagtcccggcccgaatcacctcatcaacattcctgaaaggcactctccaatgccccgatcaccaagtcttctgccctgatgcccttttcctccacaaactgagggtcactggggcagatgcagcggccattgaggtgcatggggggctgagtggccaccaagccttccaccacggcctccagctgccggcgcaagcaggagtgcagggtgttggcagccaagatggctgctgcaggaccgccgtgcccatcgaacagtgcccagtaatggcctgtcaggaactcctctgggcacagggtcagccactcttcttcagccccaaactcacatctccggatgcacagcttcccacaggcggcttgatcctcattgaattcagatttctctgcattgataatccc

SEQ ID NO: 452842 - DNA, 828 bp, Homo Sapiens
ccaaaggtttttaaatttgggagtttccccccccattttggcgggcaaggttccaaatcccagaatggacttaagtttttcgagggcattttcttttcaaattcaggttcttttttccagaattcctccaaatgagggtccctggtgggaatttcccccgtgagggggttcttttcccttggaacccggccaaaattttttccccggatctccttcacagccaagctttctcctggaaaactcaggagcccaaatccatagtttttcggtttctgacccaaacaattaaatgtatcctgttgtttctgatatgcagtatttggatttatctttgattccaagagtagtgatccgtcggactctgcccgaaccagcagcgacatccccttgagctcctccacgtaagtggaggagacgtgcccggtgcctcggtcgtcccattgccggtcttcgttcagggtatagaccttcactcgccgccgcgtatccgacatggtggctgctgtctccaccgctctagccgccgcctcctcgcttacctcgtccgcgctcctcactcttaggagacggtaaaggcagtagtggcggtggcggcggcggcggcttcggagaggcccgaattcaccatggctccaaaggttcagccgcgagaaggggtgacaagagccactgaggcctctccgcccggaggccccgttacctctcacttcacccgcgcatacacccactctcccgtctctttgccccccagggctcgcttgctctcccgccgccgcggtaactactacagatccgccatcttgtaacccgactctctctgcctccgct

SEQ ID NO: 452843 - DNA, 882 bp, Homo Sapiens
gtagaccttgggtcttaatacgctggatgtgcgtgctggcatacacttctgtattatgccatactattatacagaacgttactgggatcacgggccaacactcgtgcccgaagcgtcgtacacttcgctctgagcacgcgcggccaaagtactcccgccccagtcgggtacccctcctcgcgagagcgccgagcattccggcctgggaagcgcgtgcagaagcggaggtgctgctcatgggacttgtcggccgccgtagcccctgctaggacagcccgtgcgagcctgctggaggaggaagagaaaggcagagagagtcgggttacaagatggcggatctgtagtagttaccgcggcggcgggagagcaagcgagccctggggggcaaagagacgggagagtgggtgtatgcgcgggtgaagtgagaggtaacggggcctccgggcggagaggcctcagtggctcttgtcaccccttctcgcggctgaacctttggagccatggtgaattcgggcctctccgaagccgccgccgccgccaccgccactactgcctttacctgtctcctaagagtgaggagcgcggacgaggtaagcgaggaggcggcggctagagcggtggagacagcagccaccatgtcggatacgcggcggcgagtgaaggtctataccctgaacgaagaccggcaatgggacgaccgaggcaccgggcacgtctcctccacttacgtggaggagctccaggggatgtcgctgctggttcgggccagagtccgaccggtaaggttacttggaactgtagaataggggatagtgcctctggttggggcacagcttgggtctagggccctgggcccgttaccgttgctactccttcggggaa

SEQ ID NO: 452844 - DNA, 623 bp, Homo Sapiens
gtgaatttaatgggggtataagggagctgaatcatttgctttcatcttaagtctctcttcagatgaattctgagcagctgaaaactagctctggtactaagaccttcagcttcattcagagactcagagtgtgtaggaaagaaagcttcatagcacattcttttttgggggagacagaatgctaattgcaaggcaaatgggactcatacacagaatgggataggggattcagcatctggtggccggctcctcaagggcatggctgtggaccacattacttctgcttggtcttctgctgggctggtgctggagtgactattgaagggcagggctcaggcaccttggggtggcatggctctggaaccttgggctggcagggctcaggcactttggggtggcagggctcaggcaccttggggtggcagggctccttggttttggggatgcatggttcctgaggtggaggctggcaaggctgtttcacctgctgctgctgaagctgagggggtgggatgcagggctgcttctgctgctgggaactcatgctgcaacagtggctggtcctggtgtgaagagaggaatactctgtatctcccggataatctgtctccgggcagtaccag

SEQ ID NO: 452845 - DNA, 1170 bp, Homo Sapiens
  misc_feature (901)..(943): n is a, c, g, or t
  misc_feature (1006)..(1006): n is a, c, g, or t
gggtggcgaattcggcacgagggtccatcttccggcttgggcagacgctgccgtggaatccttgactctagttttctgagtcgattgtgatcatggctgctgagtctgatgttctgcatttccagtttgaacagcaaggagatgtggtcttgcagaaaatgaatcttttgagacagcagaatttattttgtgatgtatcaatttacattaatgacactgagttccaggggcacaaggtgattttggctgcttgctccacttttatgagagatcagtttttactcacacagtcaaaacatgtcagaatcaccatcttacagagtgcagaagttggcagaaaattgttactgtcttgctatactggagcacttgaagttaaaaggaaagagcttttgaaatacttgactgctgccagttaccttcagatggttcacattgtggaaaagtgcacagaagctttgtcaaagtatctggaaattgatctttctatgaaaaacaacaaccaacacactgacctgtgtcagtcttctgatcctgatgttaagaatgaagatgaaaattctgataaagactgtgagataattgaaatttcagaagatagtcctgtaaacatagatttccatggttaacgaagaggaaagcaatgctttgcagtctacagtagagagtctgacatccgaacacaaaggaaatgaaccacccaagcctccctaccccatagatgggtcttaaagggcaagccctgcgctatactcccacgcaacatcaacccatcacattctaccactcaactccaaccagccttcccaacgcactgaatccaaagatgtaagtcacttattaaatccccaccagcacccacctctcttgcggcaccataacgtcccaacgtgcccatagnnnnnnnnnnnnnnnnnnnnnnnnnnnnnnnnnnnnnnnnnnngcttccgccaccaaaaccccaactccacctcaacctgcgaccacactctacccttatgttctnacacgtggagctccaccatagcccaccacgaaagtgtaccatctcatcacacggcgcctcaccatactgagcctacgccttatcctcacctgaccaccacgataaccacccactccagcaaccgcccgatcccctcacgccaacaaccactcgccctgtttgcc

SEQ ID NO: 452846 - DNA, 1231 bp, Homo Sapiens
  misc_feature (54)..(90): n is a, c, g, or t
  misc_feature (1032)..(1032): n is a, c, g, or t
  misc_feature (1072)..(1072): n is a, c, g, or t
  misc_feature (1141)..(1141): n is a, c, g, or t
  misc_feature (1175)..(1175): n is a, c, g, or t
  misc_feature (1184)..(1184): n is a, c, g, or t
  misc_feature (1205)..(1205): n is a, c, g, or t
  misc_feature (1211)..(1211): n is a, c, g, or t
taatgtatacgactcactatagggcgactcggagctgcacgcggtggcggccgnnnnnnnnnnnnnnnnnnnnnnnnnnnnnnnnnnnnnatcaggccaaatcggccgagctcgaattcgtcgagagcgaggtgaccagaatgagaagatgaaaaatcaaattaagcagatgatggatgtctctcggacacagactgcaatatcggtagttgaagaggatctaaagcttttacagcttaagctaagagcctccgtgtccactaaatgtaacctggaagaccaggtaaagaaattggaagatgaccgcaactcactacaagctgccaaagctggactggaagatgaatgcaaaaccttgaggcagaaagtggagattctgaatgagctctatcagcagaaggagatggctttgcaaaagaaactgagtcaagaagagtatgaacggcaagaaagagagcacaggctgtcagctgcagatgaaaaggcagtttcggctgcagaggaagtaaaaacttacaagcggagaattgaagaaatggaggatgaattacagaagacagagcggtcatttaaaaaccagatcgctacccatgagaagaaagctcatgaaaactggctcaaagctcgtgctgcagaaagagctatagctgaagagaaaagggaagctgccaatttgagacacaaattattagaattaacacaaaagatggcaatgctgcaagaagaacctgtgattgtaaaaccaatgccaggaaaaccaaatacacaaaaccctccacggagaggtcctctgagccagaatgggtcttttggcccatcccctgtgagtggtggagaatgctcccctccattgacagtggagccacccgtgagacctctctctgctactctcaatcgaagagatatgcctagaagtgaatttggatcagtggacgggcctctacctcatcctcgatggtcagctgaggcatctgggaaaccctctccttctgatccaggatctggtacagctaccatgatgaacagcagctncagaggctcttcccctacccaggtactcgatgaaggcaanggttatatggctccaaaggggccccctcctttcccaggagtccctctcatgagcacccccatgggaggncctgtaccaccacccattcgatatggacccacanctcagctcntgcggacttttggggctcggncacttncctccaccctttggccctgg

SEQ ID NO: 452847 - DNA, 839 bp, Homo Sapiens
gtataactcaggacctttcctctctttcaggagtctcttctacattcaaaaatataaaacaggggtatcatttttttaaaaatcttccagaaatctctttggtgggaatagtattggattaatgcagaatactcaatgcttggaaatataaaaaacagccaacataagttctaatattaactattcaaaattttccaaacctttaaatttggatattaaaataatataatttcctccttatttttgccaacgtgaaaacacctagaccaaagtcattctattctgacatattgtctttcttggatatgactttgaaagtaagaattggggaattactggttatacagattctacatttttcttcactaatagtgattccaagaaagtttagatctttccacatggaaaccgtcatgtaagaacagaaaaactctaaggtttatctgctgtgctgctcaactggatccagaccaggtattcttattttaaaagctatatttgatagatgttatattctactcttgcttcaaaacaaatcactttcgacacagtggggaagaaaacagtacctacagagagctaaaatggaaacctagtagtctgcatcagtcatggcaagcagctgtcatgctgctacccaccaccacttcggaaaactgttagcctcagataagtctgaatttacatagaaaaggcttctctgtttctgaccatattacaattctcctctttttctacattttgactcctgaaaccagcagatcttaatattcaatgagttaagatagctcttctgttagggtgcccaacacagtaagtgttaaacttattttgagtct

SEQ ID NO: 452848 - DNA, 1014 bp, Homo Sapiens
  misc_feature (912)..(912): n is a, c, g, or t
  misc_feature (951)..(951): n is a, c, g, or t
  misc_feature (969)..(969): n is a, c, g, or t
  misc_feature (976)..(976): n is a, c, g, or t
  misc_feature (984)..(984): n is a, c, g, or t
  misc_feature (996)..(996): n is a, c, g, or t
taagtacataaataataagtaaaagctactaacaattaaaaaataaataaataaagacaagactgtctggaaaatggctctcctaaaaggaccagttgccatcatccacagtggaagattcaaagcagttggtccttggtacgtatgagaagcggatttcattcccttgaattctacagagcagtttattagagtgaatgcattttaaggccttgcatttgatatgtcatccagttcataatcaagttgcctttttctggctaaaacataatgattatgtatttttctcatttggtcctacaagctgctggccctttgtccctccactgtgggaatcagatctagagcaggctgagcctcagacacagcagtggccaaaaggtcactctaagtgttttgtcttgactccttacttgaagtccacccagctagcacacatctggtttatactgaagccccctgcctagaaatactcatttcaggaaccaccagtaagcatctgtgaccacacaggctttttgactgatggcttcccggatctggtttcaagggataaccccgtctgtgtgcatctatggtcttctctctacagcgaggactttgcagtgctgcttgtggtccacacaaggggctcagagctgagtctgaactgcttcatggtcaccagctcctgtcccttccagtcttgagaggtttttttctccagatggaacctttccttcccgccgttttctcggtctctggctgtttttctcttgtgcccgtctaattggacacctcctgggcttccatctctgtggttctcctgcctcacttcctgttctgttgtttttccgttttgtcaaaatatctcctatgttcttgggcttccttttcgtcgccagggttttcagcttttcctttaggctcttncttctaaatatgggcttctggcccaacaaaaagcctggntctggtcagggatctcangggtttntccaattngccagaaacctncttcaggcctcaggttcc

SEQ ID NO: 452849 - DNA, 832 bp, Homo Sapiens
ttgggccaaaaccagcatgactgggttaacccatccacgagtttgttgcccttaagcggtttccgagttgttctccccccggggggatttcggaatttcaccatttaaagcgggcccaccaacccatcacgtttctttttcaaaccgataggttatagtataagaattcattgcccaattgagaaacaattctaatgtatcattaaacatgcctgtttggcaatagctccaccaagggagcaaattggttggtcttcatttctttcgataagggttcaacattccttactgggattaagcaaaggcactagaatctccatttagttgactatcatctcgagatttcaggtaacgacgatggttttgatagaaattagacagtccataatacataaacacgttgccctcaaatgacttttccagtgtgaagttaatggtacaaaagcaaggtgtcacatccggagataaacatttattacagggactggaaggctctgttccggtataatcaatctcgatctcgcggatgttgtttgaggtgacaaagatgccaatgccgatgggaatgaagatgagaccgatgatgaagaaaataggtagcaccgtgccagccgtaaggatgggctgccaagctggcagccgttgctgtttgaaggccgtgttatccggtctccgagtcttcgcggtgccccccggagcacacgggggcccaccgtccacttcatccttcgcgttatagttcatcgccatcgatccctggggcgccgctccgcgatttgcaggtggaccacccagggggcccgccggctgaccctgacaggaaccgctcgag

SEQ ID NO: 452850 - DNA, 882 bp, Homo Sapiens
  misc_feature (706)..(753): n is a, c, g, or t
  misc_feature (795)..(831): n is a, c, g, or t
tacaccaaccatacctttcgttgttcaaagcgataggtataggataagaatcattgccaattgagaaacaattctaatgtatcattaaacatgctgttggcaatagctccacaaggagcaattggtttgtcttcatttcttcgataaggttcacattccttactgggattaagcaaagcactagaatctccatttagttgactatcatctcgagatttcacgtaacgacgatggttttgatagaaattagacagtccataatacataaacacgttgccctcaaatgacttttccagtgtgaagttaatggtacaaaagcaaggtgtcacatccggagataaacatttattacagggactggaaggctctgttccggtataatcaatctcgatctcgcggatgttgttggaggtgacaaaaatgccaatgccgatgggaatgaagatgagaccgatgatgaagaaaataggtagcaccgtgccagccgtaaggatgggctgccaagctggcagccgttgctgtttgaaggccgtgttatccggtctccgagtcttcgcggtgccccccggagcacacgggggcccaccgtccacttcatccttcgcgttatagttcatcgccatcgatccctggggcgccgctccgcgatttgcaggtggaccacccagggggcccgccggctgaccctgacaggaaccgctcgagnnnnnnnnnnnnnnnnnnnnnnnnnnnnnnnnnnnnnnnnnnnnnnnncccgctctcgacgaattcgagctcggccgatttggcctgatnnnnnnnnnnnnnnnnnnnnnnnnnnnnnnnnnnnnncgccgccaccgcggtgagctccagttcgcccatagtgagtctatacgtccc

SEQ ID NO: 452851 - DNA, 775 bp, Homo Sapiens
ctcggggggctgcgcacatcacgctccttgccgggcgtccggcacagctgcggtcaccaaagcaggtgctggccctcggacctgagagcccagccagggcccatgtggtctgcaaatgggagcggctgtttttgaacacggggtcattctgcagtcaggacgaaccggtccccgtcgcagacggagtgcacgtgccctgcgccacatcctcacgctcggtggagggacgcgtgcggcgggacggtgcctacgggtacttgcagctgtgtcccatgtggcatcccagagctgcgccctgctggtctctgtgagcgccacgctgctgtgctggaaatgccgctttaaaaagggataccgtgggactccgccccgtctctttcataacgcaaatatttatttgtattggggtgacgattgattcctttcgaccctaacaattttgggtttttaaccaaaataacccggtcccacggaatggagccagctcccctttccttgtcagaatggctacctcccaaattgtgtacccaaaaaacgaatggaccaaaaaggggggagaaagccttcctaatttttttccccaagtttaaaatggccagtttggtagaatttgaatacccccagtttggggcactgtgggaaaagggggaaaaagcccccagcctttttattttacctggaaaaggtggggaatttttccagaaaaggctttggggtgggaaccccgttggcgccaataaaataaaaaacccttttctcaaccggggcttgtggg

SEQ ID NO: 452852 - DNA, 767 bp, Homo Sapiens
aacaaccccggacaacctggtgcggccgttcatggacaccctggcctcccatcagctctacatctgagggacatggtgtgccacaggctgcaagctgcagggaattttcattggatgcagttgtatagttttacactctagtgccatatatttttaagacttttctttccttaaaaaataaagtacgtgtttacttggtgaggaggaggcagaaccagctctttggtgccagctgtttcatcaccagactttggctcccgctttggggagcgcctcgcttcacggacaggaagcacagcaggtttatccagatgaactgagaaggtcagattagggcggggagaagagcatccggcatgagggctgagatgcgcaaagagtgtgctcgggagtggcccctggcacctgggtgctctggctggagaggaaaagccagttccctacgaggagtgttcccaatgctttgtccatgatgtccttgttattttattgcctttagaaactgagtcctgttcttgttacggcagtcacactgctgggaagtggcttaatagtaataatcaataaatagatgagtcctgttagaatcttggagtttggaccgttgtaaatgttgacccctctcccgcatcttgggcacacctgggataacttgttgcgtgaccccaagatggaggcagtttgccctgtttgaaggaatttttatgatctctcctctctgcacccatttctttaattgtaagtttcttagtcaatggagttcggag

SEQ ID NO: 452853 - DNA, 888 bp, Homo Sapiens; identical to SEQ ID NO: 321864
  misc_feature (41)..(79): n is a, c, g, or t
  misc_feature (480)..(488): n is a, c, g, or t
  misc_feature (612)..(612): n is a, c, g, or t
  misc_feature (622)..(734): n is a, c, g, or t

SEQ ID NO: 452854 - DNA, 923 bp, Homo Sapiens
  misc_feature (41)..(49): n is a, c, g, or t
  misc_feature (369)..(369): n is a, c, g, or t
aaaattttttattttggtggccttttcaaaaacccaaaaannnnnnnnntaccattacgggtggcaggaaagttcaagatcagattaaacctttgttttgcactaatcacaaaactaataatccaagtcactatcatcaactccagttgatctcagctctgattatgcatcagaacaccctgtgaggtctattaagttcctataccaaatcccaaaacactctgaaatcagtctacaaaggttgggacctaggtatctgtacattttttaaagttcctcaaaaaattctgcttctaggcaaatgtaatagatattgtgcgttgctcatgtttttcctatcagaaccatgattttaaaaaaactatcctntctgtccccatatatccctcatgtggcctccacttctactctcagctccagtggacctgactgccctaaaggttattctagaccctttgccagtgactggctcagggatggacaggtctaagttactttagagcaatgagacctaaggatatggaaagtgaattctgggaaagctttctcatactaggacagggccccctagaatcccagcctgactccttccgcctgcatgtaaatgaagatgcacaaggctcccaactgctactggcaatcatccccatgaccacgagggtagccagccttaggatgatgccaatgttgtggttgaaaagggggtggggtgtggaggcgggttcccaaggttcttgatgacattactgaatcattggatcagaaacactgcagcacattctgtcaatagatttcatgtattgtgaatcaatatattttcttactgtttttaagtcattttaagttggacttttagtggtcagcatctgaatgttaaagagtggtcccagcacagcattctttaattataacaatctgtatca

SEQ ID NO: 452855 - DNA, 922 bp, Homo Sapiens
  misc_feature (466)..(553): n is a, c, g, or t
  misc_feature (846)..(878): n is a, c, g, or t
taatagaccgaaaggagatactttcggactttcgaaaaggtctcgcaatatccggcaaccattccaacatgtcagccacagaggggctcactgctgaaggctgcaggacagcatcaatgccaactgtgtctgcgtgttgctcatagatctgaaacactcgctccacatggctgctgaccatgtctcgcaccttgaggaggatggctagcctttcccctagcttgtccaggacgatgtcatcagccaccagctgcttacgcctcagccgctcttttaaatctgggaaggcccgaagcgccggcacatcctcaaaccgcaggttctgtgcggcctgcagctgttccgccaggttgctgagggaggacaggaggggctggcagtcccgcagggcactctgccacaggccctgctgctcctccaccacggggaagcacttcttcagcgcctcctgcacggcaagcagagnnnnnnnnnnnnnnnnnnnnnnnnnnnnnnnnnnnnnnnnnnnnnnnnnnnnnnnnnnnnnnnnnnnnnnnnnnnnnnnnnnnnnnnntgcctcagctttctgaaggagaccctggtttcccctcgggaagggtaacctggatagggcagtctcctgcttcagaggattcctggcgtccaagcgccgtctcttctctgacatacagtcctgtctcccctgcccgaggctgccggtcgccttcctgaaaaagcggaaaaacttaaaagtccagacagccaaagcgtgagaaccctccagggactgcaccacgcgcccacagtgtctctgcgcatgctcacccgctctcgacgaattcgagcttcggccgatttggcctgatnnnnnnnnnnnnnnnnnnnnnnnnnnnnnnnnnatgcgccgccaccgcgtagagctccattcccctatatgacttca

SEQ ID NO: 452856 - DNA, 843 bp, Homo Sapiens; identical to SEQ ID NO: 150891
  misc_feature (78)..(93): n is a, c, g, or t

SEQ ID NO: 452857 - DNA, 1008 bp, Homo Sapiens
  misc_feature (865)..(865): n is a, c, g, or t
  misc_feature (870)..(870): n is a, c, g, or t
  misc_feature (896)..(896): n is a, c, g, or t
  misc_feature (901)..(901): n is a, c, g, or t
  misc_feature (917)..(917): n is a, c, g, or t
  misc_feature (954)..(954): n is a, c, g, or t
  misc_feature (965)..(965): n is a, c, g, or t
atgacacttttgtatgtgaaaatgccagaccagggcagctaatacagactataagtgcagtagacaaagatgaccctttaggtggacagaaattttttttcagtttagctgctgtcaatccaaacttcacagtacaggataatgaagataatactgccagaatcttaaccagaaaaaatggattcaatagacatgaaatcagtacctatctcttgcctgtggtgatatcagacaatgattacccaattcagagcagcacaggcacactgaccattcgagtgtgtgcttgtgacagccaaggcaacatgcaatcctgcagtgctgaagccctgctcctccctgccggcctcagcactggggccttgatcgccatcctcctctgcatcgatcattctactggtagtactgtttgcagctctgaaaagacagcgaaaaaaagagcctctgatcttgtcaaaagaagatatcagagacaacattgtgagctataacgatgagggtggtggagaggaggacacccaggcctttgatatcggcaccctgaggaatcctgcagccattgaggaaaaaaagctccggcgagatattattccagaaacgttatttattcctcggaggactcctacagctccagataacacggacgtccgggatttcattaatgaaaggctaaaagagcatgatcttgaccccaccgcacccccctacgactcacttgcaacctatgcctatgaaggaaatgattccattgctgaatctctgagttcattagaatcaaggtactactgaaggtgaccaaaactacgattaccctccgagaatggggccccggtttataagctagcagaaatgtatgtggttgggnaattnccaagactcttaacgtggatatatgntctgntcaacaagagaagttnctctacccatgctgctccattcccatattgatattcngggatttcctncgttagccattttttcccatacttctagggtcttattcttaat

SEQ ID NO: 452858 - DNA, 442 bp, Homo Sapiens
  misc_feature (367)..(367): n is a, c, g, or t
  misc_feature (388)..(388): n is a, c, g, or t
  misc_feature (420)..(420): n is a, c, g, or t
tgacacttttgtatgtgaaaatgccagaccagggcagctaatacagactataagtgcagtagacaaagatgaccctttaggtggacagaaattttttttcagtttagctgctgtcaatccaaacttcacagtacaggataatgaagataatactgccagaatcttaaccagaaaaaatggattcaatagacatgaaatcagtacctatctcttgcctgtggtgatatcagacaatgattacccaattcagaggcagcacaggcacactggaccattcgagtgtgtgcttgtggacagccaagggcaacatggcaatcctgcagtgctggaagccctggttcctccctggccgggccttcaggcactngggggcctttgatcggccatncctcctctggcattcattcattcttacttggnttataggtaggtactgtttttg

SEQ ID NO: 452859 - DNA, 939 bp, Homo Sapiens
gtcgtctcacacaaattcaagttcttctgaaaaatccccaatcggtaaccatctgtccacggaaagttcggcaaaaaggggcttttcggaccatctggcaacatctccttactgaaatttttgaatgcagataagccaccctggtcttcaagattttcaaggtcttcagagaaaattgcatgattttttgtcaggaatgctcccaagttggttatcctcgtatacccacatctttaagaaacagaagcatttgcttaatgtctttttcaaaatccagtctcagaaggaggtttgctgcttctggatgtttttctatcttggacaaatccacgcctagaagaaccaacttctgcagagtctcagaatgatccacatagtctcgaagtgtgaatgaagctggtggcaatggagggtctgcaataatctgaatagcctcttcctctgaaattggctgcattggagacaatggaggcaattcatccagttcttctagaaacagctcagaatcaaagctggatatattttgtgtcttctgtgactgttcattcatggaaggaagcagactgctttgggcagaattattctcctgactacttgagctagtagactgggaactattccataaggaggaagtcctgtaagtcttaaatccccactggagaaagcaattgtcagaggatatctgaggctgagcagaaaagccatgtaacagtgttcttgctggtctagtaaaacgttttgtgagttgtgcagcattaatgaggctcctcaacttaactgagttaaaccatctgggtatctgttgggctgacaaagccatttttcttagtctgtggcgaggcctgcttcccgtagcgggtgaccccgggaccgaccaactcgctgggccgcacgtcccgtcccgccgcgccgcacgccggctcctcagccggccctccc

SEQ ID NO: 452860 - DNA, 720 bp, Homo Sapiens
tactggtctgattcttttgtgcattcattaaagctgattgtgtgagagtgaactgggacacaagctagtctagctcactgcagccaagcaaaccctgttgatggctgatgggcctttccattagggttttgcttatgtgaagtaatggaattatgttggttattttctttatgaaaataaaccagttcttccaaggaagttaaaaggcttggtatggatgttggtgtcagataggtctgactaacctctccgtgctgcagcctatactaaggtgacccagggccacatgtagacagctaggccagtgctttttcctcttagggtttctttgcagaaagaaacctccagcaagggaagagaggtgtgtgtccacaggaaggggctccgtggggatcccatgaagggatttgagctctttcaagctccatgtcatttaaccttttttggtttaaccaccttggctttctctccttttttgctgtcctccttacggaccagttaccagattcagaggctaacagttagttacttgttaatgctagtcacagccaggaggtcagaaggaattttctacttctggatccaaatgttacctcttaggggaagttatgccccctcaactattgtcttattataatgaatctttcctttttggtccttttaagtaaccactcaaaacttttcatttcactgaaaaaatatgaaaaaccatgacaatag

SEQ ID NO: 452861 - DNA, 778 bp, Homo Sapiens
  misc_feature (46)..(47): n is a, c, g, or t
  misc_feature (57)..(57): n is a, c, g, or t
  misc_feature (60)..(61): n is a, c, g, or t
  misc_feature (64)..(64): n is a, c, g, or t
  misc_feature (66)..(66): n is a, c, g, or t
  misc_feature (78)..(78): n is a, c, g, or t
  misc_feature (80)..(80): n is a, c, g, or t
  misc_feature (95)..(95): n is a, c, g, or t
  misc_feature (97)..(97): n is a, c, g, or t
  misc_feature (101)..(101): n is a, c, g, or t
  misc_feature (313)..(555): n is a, c, g, or t
  misc_feature (572)..(593): n is a, c, g, or t
tggttccattttattaaaaaacaaaaccaaaagaaattttgtcagnnactaaaaccnggnnttnanaaaaaaccctantncttccttacaccagnantttnatttgtattcccagccaaatacagctgatgactatagcatgacagttactgcgtgttccagggactcaaggtaaccaaatgaggatttaaacattttatcatactccctctaccaacaacagcttggacagaccactttagccctgggtcaaggactaaagcctttgttcatagaaaattgaacacgtaggccaggcacggtggcttacacnnnnnnnnnnnnnnnnnnnnnnnnnnnnnnnnnnnnnnnnnnnnnnnnnnnnnnnnnnnnnnnnnnnnnnnnnnnnnnnnnnnnnnnnnnnnnnnnnnnnnnnnnnnnnnnnnnnnnnnnnnnnnnnnnnnnnnnnnnnnnnnnnnnnnnnnnnnnnnnnnnnnnnnnnnnnnnnnnnnnnnnnnnnnnnnnnnnnnnnnnnnnnnnnnnnnnnnnnnnnnnnnnnnnnnnnnnnnnnnnnnnaagctgactctgtcccnnnnnnnnnnnnnnnnnnnnnnttgaacatgtgtttgctctcaagtgggcggacaactctgtgagtttgctgaaaaccattgaatcgtatgttttaaaggtgaattgtataatatgtgaattatatctcaataaagctgttaaaaatatatgacatgcctaacttgctaggggagcaacaggtgaccccagtagcgtaactcaggag

SEQ ID NO: 452862 - DNA, 752 bp, Homo Sapiens
ggagcacagcccctctcctagcaccaaagacccaagtccctcccacccaacccccacccaagctctcctcttcaaggaagaaatatttacaattgttgaaacttgtcagggaacagggtgcatggcggtgcatggcacatggagctgacctaggagggctagggcctgcccccctgctttttggcaggaaggatggggcacagctcaacttcttcctcatcactgtcctcttcctcttcctcgctctcctcctcagaaacatcattgctcatcgtaacaatctggtgccgcccagtgatccgcacagggccagagcccgacttcaggcggaaggttacaggtggttggagctggaagtcatccagactgagcatgggttggcaggacagcttgaggttggccacagggactgcgatctcctgatggtcatggttccgggccacaacttctaccacattacactcgtctttggctccctcggtgaggcagagcatggttagtgccagcacgtgctccgcatcatcctcttcctctaccttaaaggtgaaggagcgggtgtggccggagagctcacagccgaagaaaaaactgtccatagtgaccggggccgggacccgtaggcccccgacacccccggcccgcgttcggctctcctgactcaaaaacgctaaggcagctgcagtaccggcggccatgctgtaagagccttcttccgctctcgacgaattcgagctcggccgatttggcctgat

SEQ ID NO: 452863 - DNA, 592 bp, Homo Sapiens
cttgaagagctgaagtactgaagtgagtacatacattttgtcatgttaaacaggagaaagattgtgacttggctcctgaaattttaatactgcttgttagccatctacaatccctaaagtgctttcagaggctctacacatcttcaatgagtcaaaccccaaagacttataaataggtatataggttgctaatctattcctgatgctttgcctaaaaaattggcattgccatcttccacatctttcttttggaagcatggttttgagtttgttccttgttggtaagcatccagaaaatggcagattccggggatttcactagggaagtttggtggaagttcctcccttgatcgaggggtaaacacgaaaccaggacagtctttgagtaatctgtaagttgttgggctgacattgatttttcgtggtacactgcaggactcaaatttgttagccagagtgacattgtttccaaaaagacagtaacggggcattttaactccaacgacgccagcaaaaactgatccagagtgcagtccaattcgcatcttgataggttctccatggggagacataacttcatcagagagctccc

SEQ ID NO: 452864 - DNA, 826 bp, Homo Sapiens
gggctgaaggaactaagagtggaaacaatctctgactgcacacaagtgcatttgtgatccaccacaggcacgtttttgtcagttggctggggaagcccaacccatctaacctcctggactctggaaaggcattctccgggtctggtttctcacacattacacagcagaggtttggagttagttcacagaaaagttaacatcccggaacagtgcagaaggcttgggtttcagtttgctagggcccccataacaaaatgccacagaaccaggtggtttaaacaacagatttattttctcacatttggaggctagaagttcaagatcaaggtgtcagcaggcctggtttttcctagaggcctcttttgttggcttgcagacagctgtcttctcactgtgtccttgtgcggtcttcccttcatgcacacacatctctagtttcattatgtgcccaacgttcctcttctaagaacaccagttggactggattttaactttaaccagcctcatttaagttaatcacctctttaaatgctcaatctccaagtacagtctcattctgaggttccaggggtttctcaacgtaagaatttagggggacagaattcagcccgtagcagctgggcagcaggactcatgggtcccagttctcaggccccaaggactcagagcagcaaaggatacgtgacacaagcagggctgaactggacaccagactttctttgggggtgtaaaaaggagagtgtgactccactgcccagggtaagcactcttggtctatgctaccctttattctgaaccttggggcagcctgtgtctcccttcctaa

SEQ ID NO: 452865 - DNA, 865 bp, Homo Sapiens
  misc_feature (209)..(209): n is a, c, g, or t
cctccagaagaccgtttttgggggaaggcccgaaaatgtcataaagtgcaagcccttgttttttcaatcaacatttggccaaggtgtttttttcacatttggatcggttgggggacacagcggcacatgggtaggtcttttctgccagcttcaacatttaggtgggttctttctttaaaagaaatgtttctgatagttgagaatgcggnctgctttcatggggcagggtctggtggttacatagctgggcatcagctgcatgacgaatcacacttgtttgcctgagcttttggggagtttgggggcagatactgggctcttttcttcctctttgaaaggtgcggcaatgtgaggtttggcagtatctgagagtgacttgaagtgtacagtagatggcgctggtgccatcagatttgacacttgagagggttcaaagtcagaaggactgtaaggtggagtcaaacaaaatgctgggattgtatgaaaatcaggtgttcccggaagcagattctcttcctctgacaaatcagatactggtgtaacaggtctgttttcaacgtatttcttaaaatcagacttccaactgcagctcattgacataagtgcttctacagcttcaaaatcacttttctctgcagttttgttccaggaatacatactctcttttggcctttcagaaatcatttccattctttcctccgcagtctgctggagagaggcaccgaagttgagcatggttggctgcttggccgccggcggcaagctgactggctgctaggctgctggctgcttggccacagacgggcgcacggagacactcgacgccgctcccgccgccgccgcgctcagcgccgtctgccccgct

SEQ ID NO: 452866 - DNA, 901 bp, Homo Sapiens
ctttccgtctctggccggctgggcgcgggcgactgctggcgaggcgcgtgggaccttacgctggttccccttcgtctcctctcccggcccgggccactagagagttcgctgacgccgggtgagctgagcctgccgccaagatgccggcctattttcagaggccggaaaatgccctcaaacgcgccaacgaatttcttgaggttggcaaaaagcagcctgctctggatgttctttatgatgttatgaaaagtaaaaaacatagaacatggcaaaagatacacgaaccaattatgttgaaatacttggaactttgcgtggatcttcgcaagagccacttggcaaaggaggggttataccagtataagaacatttgtcaacaggtgaacataaaatctctggaggatgttgttagggcatatttgaaaatggcagaggaaaaaactgaagctgctaaagaagaatctcagcagatggtcttagatatagaggatctagataatattcaaactcctgagagtgttctcctaagtgctgtaagtggtgaagacactcaggatcgtactgacagattacttttaactccatgggttaaattcctgtgggagtcttacaggcagtgtttggaccttcttagaaacaattctagagtagagcgcctgtaccatgatattgcccagcaagctttcaaattctgcctccaatacaccgcgtaaggctgaattccgtaaactgtgtgacaatttgagaatgcacttatcgcagattcagcgccaccaataaccaaagtacggcaatcaatcttaataatccagagagccagttcatgccttggaaacagacttgttcagctggaacggctatcagccatgcattggggccggaagcttcaaggtgggccact

SEQ ID NO: 452867 - DNA, 870 bp, Homo Sapiens
atattcactgccatgcgttttacgtagcaaaacatgttctgacctagcttgtaccacatatcacggatggtgaagccaattagccgcctcatgtccccatacttattcaggattttgttgtatttggcgtgtgagaactgctccagctgcagagaatcctgggtgataaaagccactgccagatgaaaatagttgttccacagctggaactcaaagttcgtgtgttctaggaacttctggttcatggtttctgcaaacttgttgatagctctcaggaagaccctgttttgaaccatgctcatggccatccagtctccagggtacacgttctttccaatgaggtccttgaacatgatgaaggtctccatcaagaagtccacaagttcagagctggtctggaaggtctcaatgtagaaggagtagtgctggtcacccatctggtttaagatggctgtcatacatgccgcaaagtgactaatcagaatgtgatcccggcccatggtgatgactgtccggttcactgtccgcagcagctgggccatgatctcttggatatggtggtaggtgaaggccgcatcctggtagctaaggacttccaagatgctgttgagcaattcaacgcagtacttcctctccaggacctggtgttgcatgtcatccttctgctccagcagctccttcagctctttggtgatgacaggaagcagaatgtcccggcattcttgctttttaaagaggttgctctggactatctcattcatagactgtactttctgcttctggagtttcacaggagggatgcaggtgtagaactcatacaggagttggctgagtaacttcgcatcaaagaccatttctacatcatgcccc

SEQ ID NO: 452868 - DNA, 847 bp, Homo Sapiens
  misc_feature (108)..(108): n is a, c, g, or t
  misc_feature (521)..(642): n is a, c, g, or t
gcacgggccatcccttttagggagtggaacttgccatgtcattcgttggtggacaaccagctccttgaagggtataggacctccaaaaagccactcttcattcagcangtgggggcagaggaaatgctttccgtccttaagccatccaccagcattggtggccccatggatgccaggccacagtgactacaggactctgcagggcgtccattgatcagaagaatcaaccatcttcccttgccagcaggcgggtggcttcccatgacaacttctccggggaattgtaaggaaatcaaatacacacttgagaaacaggcccaggtccattgctcaccacttccatgccattctctactgtagttcaaccagtgcacctacttgtccttggcctccatgactgatctccatctttatgcatatacaatacccatgccattctgtggatacctaggggacatgtgtggccagaactactgcacgtgcccgtttctgcgtctatttgcttttttctgtgggctccnnnnnnnnnnnnnnnnnnnnnnnnnnnnnnnnnnnnnnnnnnnnnnnnnnnnnnnnnnnnnnnnnnnnnnnnnnnnnnnnnnnnnnnnnnnnnnnnnnnnnnnnnnnnnnnnnnnnnnnnnnccctccctggggtgcgcatatgtttccgaacactgcaaagggccacgatggtctgcagcctccaggtccgaccctgtggcaaccggacagctcaagaacaaggtcttcaatcagtaggatgtgaactctgacctcaggccatgcagacataggtctgaggtccctcccctaacagccaccactcctggcgcgagcacatgctccc

SEQ ID NO: 452869 - DNA, 132 bp, Homo Sapiens
ggcatctctggggagggggagattggacgtaggcaacccaacaggaatggaataagaaaagatttgtgttctctgaaggagacttgtgaagcctattccacttgctgagggtaaggctcccggggatcctca

SEQ ID NO: 452870 - DNA, 693 bp, Homo Sapiens
taacggctagtacgaggctcggtgttactcggcacgaggcctaaattgagcagtattgcaactcagagagaaaatcatctgaatagtaggacaagctcagaaggtacattgtgactgagggcttaaaaggagaccaaaacatggccccatcagggaagcttcttaatgcttggggggccagctaggtagggttgcttccaaaagctggagcccacccctgcctaggggttgtcagagagccacacctgcaggggaacaggtacctccgagggtgagagtcgtggtctctgggagttgttttctcacctctggcttagaagggtcaggcagaaaccacaggatgtggggtcacactcactgtcccaagtttgggaacctgaaaaagtctccattcagaacatggttgttctccctgtcccatgctatcttatcttcctaaatgactaatgaggaagcgggtgttctttttctgcactttgattcgccatctgggttctgtagggtgctctgaaggtgtgatctgccttctggctgatgtggaggaagagcaagcgccttcccaggccacagctgctcacctctcggcagatattttaggcaagcatccgtgtgtcttcccatcttcaggagaacggtaattgcaccctaagtgttcacttctgggcctttttccagttccctggggctgtgtgc

SEQ ID NO: 452871 - DNA, 915 bp, Homo Sapiens
  misc_feature (391)..(391): n is a, c, g, or t
  misc_feature (402)..(402): n is a, c, g, or t
  misc_feature (479)..(501): n is a, c, g, or t
cccaagatttcttgattccccagttggggattagcggaggaattggaaccaaagaaccaggaatcctacttccatgagccatggctggagtcagtattgtctccagggtctcctccctgaaatcggttcctccagctaccaggacaaaccccctggcagcgcctgggcctttgagggataccttatggagacatggatgtagtttcagctgccacctacaccagatcagcaatttttaataagtcatttgttcatatcctgttcaaaaccattcttcctactttccacacaatatgcacaatgctttctttcatttaaatatttacaaacagaaaaggcctatcttttaaagaaaagacattttctgagtctctataaagtgcagctaatntaaggcaaatntaagtgaaatataaaagtggcttattctctctctatatacatttcccagctttaaaagataaggtctcctcccctcnnnnnnnnnnnnnnnnnnnnnnnagggctttaattttttttctggcaattttaaaatgtaagatcttactggttgtaggaaatcatagatttcctgaacatcataagtaaaatggtcttcttctttaaaaaaataacttttatatagcttcttcaaacaagttaaaaggtggcaaagtatctgctacagtagtttggaggactagaggactgatgggtaagtaagggttgttttgttgttaggtaaatagatattaggcagtccatttctaaaatatgcctgatgaagctagatacctaaagctacccttagctccaggaatgagtatcttccatctccatcggaatcaaatgctctcaagctctctggttctggcatagcagaacctagggaggtccagatttcctggtaggtcagcttcccatccacgtcctgtc

SEQ ID NO: 452872 - DNA, 455 bp, Homo Sapiens
ccttccatttttgagaaggtgaaggtggggagggggtcataggttgtgggctggcctctgtctgggcctgaggagcctggcagagacaccacctggcatagcagctggcctcaaggggaatgagacattaaagaaaaagaccagtgtggtgacggtttctgtcagtttggcacaagagaagaagaaaacggaatatgggaaagagaaagcaagactgggcaatgggtgcagaagatgggaccgagaagaggtgtgagaataggcgataagcgggagagagtgtgagcttggggagattccccctgggaccctggcgtatccacggcatctctgggatcagtgtcggaacctcacccgccctgaggtgtagttagtgggagtaggatggagcgggccaggcagcccctcaagaaggagcccaggacctcttgccatctgggcaatctcctaagccc

SEQ ID NO: 452873 - DNA, 695 bp, Homo Sapiens
  misc_feature (69)..(69): n is a, c, g, or t
  misc_feature (267)..(277): n is a, c, g, or t
gggggaggagagacccaaccgcttggtgtcttgtggggcggtttttcttttggggaaaacacgtgtgancccctgttgtggctttgtctctgtggggggcggccggccgcccagaagaggtgtttttaaaagttttttgcggggccgcggggtgctcccgccctatttttttgtgtgttctttccggcagtctgtgtgccccgccgctcaccctgcggttcgcgacgggggtgatcaggtaaggtgttattcatggtttagtggaannnnnnnnnnntcggctgatcttgtggggtggcgtgttcggggtctgtgggttttttgttcaggaaggaggagtgttcccctcacaaatttatttctcgtgggggtggtaagaggtgtgtcctctctcctctccaggcttgggtgagtaggtctcaaaagataaatccactctgacactccaacctccccaagcctttgagtcccatcctctgccacgcagagaggcaggcctggcatttcagcctcactttgtgtaggtcactttttggtctgtgttgtagctcaccaaccaaccagtcaaaccccagcagtggtagcacgaggtccagaacctctgcttagtgggcccgtatcaataaacgcaactaaatcaattttttgttcctttccccattatccctactgtagggtctcctggttccccctgc

SEQ ID NO: 452874 - DNA, 727 bp, Homo Sapiens
ggtcctaggagaatgttttagactagatgttaggagaagtttgggcactaccactggtcttcatagacctgcattcagggtggtcctaggcctcctgttccagctacatagtggacacctccctttggggtatagcacacagggccacagcgcaactggggctcttccctcctcataccagcgctgttcactgaagtcagggaagaaggctgcaatctctctgctggctgaaaccacagagtccgaaccatgggtggtgttgcgggtgtcagtgaggccgaaactcccacggatagaatctggggccacatggcgtgctcggaacactctggtgggtcccatgagcgtcctccagagctggatggcatccttgtgggcaaggatgtaggctcggattggcccgctggccatgaactccaccagcctctgatagaaaaaacgcccttcatgctctcggtaaaacctctggcaatcttcctttctccacagtagttctctcattcgtacaatcaggaacttgttgcttagaatctgctgatgaacagcctccagaatcagtggatgggcgactgcgtcaggcttgatcagggctagagtgagctggagagcctgagggcttcgcaagattgaggccatctcactccccagattctgggtcattcggagccccagtgcagcagaagtccggctgcgggttcacccctcgtcgaaattcgccactcaggcc

SEQ ID NO: 452875 - DNA, 1061 bp, Homo Sapiens
  misc_feature (659)..(659): n is a, c, g, or t
  misc_feature (747)..(747): n is a, c, g, or t
  misc_feature (1004)..(1004): n is a, c, g, or t
acaggctagtcgggctgggtgtgaatcggccgaggggcgctgagccccgcggttcagaaaggcagcggacagatccagctgtggcagtttctgctggagctgctggctgaccgcgcgaacgccggctgcatcgcgtgggagggcggtcacggcgagttcaagctcacggacccggacgaggtggcgcggcggtggggctgagcgcaagagcaagcccaacatgaactacgacaagctgagccgcgccctgcgctactactacgacaagaaccatcatgagcaaggtgcatggcaagcgctacgcctaccgcttcgacttccaggggcctggcgcagtgcctgccagccgccgcccgcgcacgttcatgcctgcggccgcagctggtgccgccgcccgcggtcggccccaggaccggcgcggctccaaaaagggtggccccgccgggcctccgcccccgggttgcgcccttcccccggggcccttctcccgaacacttccaaatcctttatatgggcggcgccccttcgggccaccgcccccgaggaaagccgttttccttatgaaacgccgtttttccggggtgtcggggcggccgcccgcgcgcgttctcctgtgtcgagcgtgtcatagtctggaaatccagtgtgggcccccgtangtacctgggcgtgttcgcccagaggcgagagtttccctcgtcggttcgcccggaggccgcaagtggcgctctgtggtaccgtttcgcncaaccgcactacaccagaacgacgccgtttcgggtgtggcgcgaccgatatgcgaagcacgcgtgttcctgacacgtacacacgaccgcgtcactgacgagttgttctctcgcccgctcgccactctagtacgttggatgctcccggccgctcgtatcgccagcatcgtgcgtgcgctgactccttcgcggcagcaccccccgtctgttataacgaggccccacctcatcggctggcgctgtcgttctctggcgacnctcggacccctcgaggtcggcgttggcgtcacaccgccgcgtcgctggacgcactgg

SEQ ID NO: 452876 - DNA, 414 bp, Homo Sapiens
acttttctagacatttacaactttatgacttggaaacagggtggatcacccattttggtttgtccttgcaaaaatcctccagaggtttcacagagttgtacaggtaacgtgtcaacagtagatagtgaaccttcccagggcccctgtgcccccaactttgtcagcctgtgctctttcctggggataaggaatttgagaatgtaccagaatgggtctgttgcaaaggccgcagatgagggtcttggaactagggctctacactgaagctgctgctgtttgtaaactgtctccatgatttgctgttggtatggagcctttgctccagaaggtaactgaatggttcctagccagcctcattatttatgtggtagtgttggatgtgggtaggcttacaagatttatgctgtggatccc

SEQ ID NO: 452877 - DNA, 673 bp, Homo Sapiens
cgtaaaaacccatttacaactcaagagtggagacaaatgactttgagatgagaaaagcaaaagtactttatatgaagaaacctaaattaggatggtaacagtctcaaatattctagcttcacagtatgagaaactaaaatcatgtcactggagtttaagtagcttcaatgctgaatcccaccacctgatgtggcaagtaacaacctgcccttgcattatgatgcctgtgtcccagcagggaagaaccagtctggtgggactgaaggtgggccacaggcagccttcaacaactccatgccagaggtagctcaggcctgttctgaactgttttaaaaatcacaccacttccaatttaacattcaggcacaggctgaactgtgtactaaacttaatgagcatagaccaagaatctgcaataagctctaaccagctgcttcaaagactataggtaagtatgttctcactggcagactcatttgtgaatcaaaattcctctgtttcagattcaactgtttttgctcaacatgtgacactgctaaaacttaatacatttccacccagtataatcattttccaagagtaatggagaatgttggtaaagtactcagaaaaataaattgtacttggtaatcaaattatattaaatttgttatgataaggaaggcatcccgag

SEQ ID NO: 452878 - DNA, 873 bp, Homo Sapiens
  misc_feature (166)..(166): n is a, c, g, or t
cctgccatgagattgggcagctcagggtcttaaggttcacatacagtgctttcagtggtcaagtgttctgtttaaattaggagtccaatagcaggctagtagctgccattcaaaggggaatgtatatggcaaccatcttgggtaatttatatgtccaaaacccaangggcctggtgcatcctgatagcagtctcttgttgccgcagtatccaatctgtatgggtaagagtcaatgagacctgtagttccatgggcctacattaatgtcaggcccatgttaatgcatagtaggcctctcgagtctgctgttgttgagggccccattcagaggtggctgtgttgtgggtaattttaactaaaggaggcaaaataatactcagatgtgatacatgttatctccaatagacaaacaggcataccagctattgagcttcttttaggtgggggctgccaaggacaatatttgactttatcaggaatactcctctaattactggaccaggtagctccagggactgcacttgttgggcaagtcttgggatcttatcagggctgacaactcaacctgcatgtgtcatattatctatgaccttatgtatggagtggtcaacttgtttcataggctggcaatgagcatgttattaatatagtggatgacaagtacttttcgaagtaactggacatgttgcaggtcaggggaatggaagtattgctatggactgaactgtgcccccaaaattcatatgttgaagccctgagctctgacatgattgtatctgaagtcctaaagccaggaatgaggaaggctgtgaatgtccattgttccatacaagaatgactcttctcttggctatttagagatcatgagggata

SEQ ID NO: 452879 - DNA, 1462 bp, Homo Sapiens
  misc_feature (74)..(90): n is a, c, g, or t
  misc_feature (92)..(195): n is a, c, g, or t
  misc_feature (1208)..(1208): n is a, c, g, or t
  misc_feature (1286)..(1286): n is a, c, g, or t
  misc_feature (1290)..(1307): n is a, c, g, or t
  misc_feature (1309)..(1309): n is a, c, g, or t
  misc_feature (1383)..(1392): n is a, c, g, or t
accaaacgtaggctaggtacgaggctgggtgctgaatcggcacgagggagagagagagagaatcctctccgagnnnnnnnnnnnnnnnnngnnnnnnnnnnnnnnnnnnnnnnnnnnnnnnnnnnnnnnnnnnnnnnnnnnnnnnnnnnnnnnnnnnnnnnnnnnnnnnnnnnnnnnnnnnnnnnnnnnnnnnnnggtgtgagctaccggacccgtgccaattataaactattcttagctcagtgggctatgcaaagccttaggctgaccccgtgactccagacgtgtcttctgagacaagcatttctgtgagctgccccagtgtgataactgagttgtgcagtagctgatggtggttaaatggcctctcccattctacgtgcatttgctcagaccagacgtgacgtgcacaggagcagtgtggaggggggctgcaatatgccaaccatttactcttcaatagaggtgtccttcagtgagcctcctctctctctctcattactgactaccctcagctgtagaacaccctcatttttttccccagacctatccttgttaccccaatgtgcctctgcttccctgggttggggataaactggaaggagagaatttctgagttctcttacttattttgttccataacttctccctcatatctgtggttggagactcccacccttgtccaccctttcctgcctcatactagtatcatgagtttagggctgtcgctggaaagtctggcagcccaggccataggattccagttcagcctacgatttcctagggaaatcaccaagttccaaaggctggtttttaaacctagaatatccatgtatccatttcctaatgcagtttggacctgttctagacagagcactcagccttagcaagaaaaccaatgaggtgcagaagatattctgtgcccacagtttttccctgccttctggaccctcagcccctgggatgggctccttgggattgcccatgcaacaacacagccacaagacattcagcacaccacctcctcctgtgttttgaatctctaaatgaattctgttctaaagcttcttcacgtctctctccatcctgctcccatctccacctctaatgcttcttgggagtctgaagctcagattcacattttcacattttctcgtataaacgttgtgggataagaatggatgatatgtatgtgtctgtgtgagttntgttttctcaacctggactgtgagggcctatttcacaaatcacaccatacatgcgccgtgtgcattgcgcgcaagccnaacnnnnnnnnnnnnnnnnnnangggtccaacaccctcatcaattctccgggtttaggtcccaaattcggatgggaacgggtcaaaaaaaggggatnnnnnnnnnnctcccggaaacaattttgccctttttcttggcccccttagaaaacccttctttcccattggggaatattt

SEQ ID NO: 452880 - DNA, 1263 bp, Homo Sapiens
  misc_feature (1206)..(1206): n is a, c, g, or t
taacactttgtgtagctctgtggagttggattttcttaaggtttaaaaagaatcacagcttcggaacttttaactgaaaatgagagacagaagccacaggggaagcaaagcaaataggattttcaatataaatatcagtgtggaaaaataacctattctgttgaatttagtgttcatgcacttgagaacaacattatttccatttactccgaaaatccttctgtgggggtttgagaaagtgaatgttgcagacatgttctgttgtgttgcactttatcctgtgtttatgtgtatgtgtttttagattaattcaagttgtgtgctatatttcttgtataatttacaaagttacacaaaatataaagagcagtaaacttgtctgaaagtttttgggcaaagggaaggtaactttcaatgtaatagcttcctttaagagtacaggaaaatgcattctgtaatgaagtggggcccatgtaattgtttatattttcagttttaagcaggtatagtgcaggcttgttaggaatgtgtggaagggaagattggaagtgatttttcctcttttaaaagtaaacaaaattcttcaaatatgccctagttaactatttcagcatacccatttttacttgggttaaccagtgtacattttgataacctatcaggaatgaataaagtatttttatttaaaggtgatattgttttatgcttccatgaatattttgcttttcttagagcatattcatagatgcagtactgtgatttaccgcaagataattgggaacactttctcaaaatcgattttggttaatatcaggtaaatcattacctaggagtaagagggaaattgttgtcaattcctgactttagattgatccagcagaaagaaaaggtggaactttgtatatatccactgttgaaagttgcatgacctgacttcctgttttctaaagttgggggaatattattgaacttcaatttcagaactgcatttcaatttggggcttggaaaatgtagttaaatcaatttcgttctctaaattttctaagcaggaaagcaatgtaaaccaaaaatcaaaatgtttagaatttataaaaatggggttatatagcttttaattttagtttcctttttactgccaaaaaacttaaaaagacaacagcgtaaccacctgttttaagcaccgtggggaaccatctcttatttcnggtaagagccctgggtccctggcggacccacttaacaggggaagggcgttgcctgtg

SEQ ID NO: 452881 - DNA, 1624 bp, Homo Sapiens
  misc_feature (294)..(294): n is a, c, g, or t
tccaggagtttggaaagacttcaaattccacaatgggcccagccatgtgtatttttcagggccaagtaaaaagggtccccctccaacggggatttcgaggactaaaagtttatgagattccaaaaaatgcaagaagtcacaggaatatttttcctcaatgcaaaaggtgacacagtagaatgttaagaaggaaggtttgttggtttcaatcccccagctgatgttcaacactttatttacttctcacttgaattttaaattttcctgaaaaataatttcccatcaatttccatntctttggaaagcccccatgtgtaatttattgataacatctctgaagagctgaattaatgatatttcctagctgttgctccagatcttgtagggtagaggaggctgaagactgctacaggggaaggcatctctattgcctcaaaacgtcaggacggtacggatacttttcccagagtgaagcaggtcaaatccttcatttattttttcaaaaggtaaaacatgggttattaacgcatccagtgaaaacttcttagccataaaatcagccacaagttttgggataccttctttactcttaaagccaccataaacagcccccttccaggtgggtcccagtcagtagcagcatagggtttattgagaaggttctgggaagcaggaggtacccctacgatgacgcttgtgccacatgcctcatgacaacataacagggaagccatcatggtgtcaagccgaccgatgacttcaaacgaaaaatccacacctccatcagtcatttcctttagcacttcctgaatgggtttcttgtagtcttgagggttgatgcattcagtggcacccaactctttggcctttgcaaatttgtccttgttgatgtccaccgcaatgattctggctgctccagctgctttacagcccataacagcagataggccgacccctcccaggccaaacacagcacaggtagagcctggggtgaccttggcaacgttaactgcagacccataaccagtcgagaatccacagccaatgaggcagactttctccaggggcgaggctgcatcaattttggccactgcattctcatccaccaccgtgtactgggagaaggtgctggtgccaaggaagtggtgaatgggcttccccctgcaggtgaacctcctggtgccatcctgcagggtcccccgaggattgcctagatcatttttcaagcagtagttgctctccgggtttttacaaactctgcattttccacactgaggagtaaagagcgggatgactttatcacctggtttgactgtagtcaccccttctccaacactctccacgatgccggctgcctcatggcctaaaatcacaggaaggggggtcaccaggttgccactaaccacgtggtcatctgtgtgacagattcctacagccaccatcttaatgcgaacttcataagccttaggaggtgcaacctccacatcctcaatggaaaagggtttctttacctcccatagcacagctgctttgcatttgattacttttcctgctgtgctcatgtcgtttctgtcttctctgcccaccagcagactgtgagtcttgcggattccggagaattccg

SEQ ID NO: 452882 - DNA, 929 bp, Homo Sapiens
acaacctttaacccgggggaaaggcccattcatgggggttcaaggcccgaccgggatgatcttcaaaacggaaaaaatcccccaccttccattcagttcattttcttttagccacttccctggatgggttttcttggtagtctggaggggttgatgcattcagtgggcacccaactctttgggcctttgcaaatttgtccttgttgatgtccaccgcaatgattctggctgctccagctgctttacagcccataacagcagataggccgacccctcccaggccaaacacagcacaggtagagcctggggtgaccttggcaacgttaactgcagacccataaccagtcgagaatccacagccaatgaggcagactttctccaggggcgaggctgcatcaattttggccactgcattctcatccaccaccgtgtactgggagaaggtgctggtgccaaggaagtggtgaatgggcttccccctgcaggtgaacctcctggtgccatcctgcagggtcccccgaggattgcctagatcatttttcaagcagtagttgctctccgggtttttacaaactctgcattttccacactgaggagtaaagagcgggatgactttatcacctggtttgactgtagtcaccccttctccaacactctccacgatgccggctgcctcatggcctaaaatcacaggaaggggggtcaccaggttgccactaaccacgtggtcatctgtgcgacagattcctacagccaccatcttaatgcgaacttcataagccttaggaggtgcaacctccacatcctcaatggaaaagggtttctttacctcccatagcacagctgctttgcatttgattacttttcctgctgtgctcatgtcgtttctgtcttctctgcccaccagcagactggagtcttgtggattt

SEQ ID NO: 452883 - DNA, 970 bp, Homo Sapiens
  misc_feature (567)..(567): n is a, c, g, or t
  misc_feature (587)..(587): n is a, c, g, or t
taaacaaatcagaaaactacacagaagaatattagaacaatttctctcaaatttctcttccattgagcttcctgcctgaccctagagctccctcacctctttggcttaccagctcccatccttcaaagtttctgagttattctgtggggaatttgagctactctcttcctttaggtccaggccatctcagctaggtccagagagcctcactcacctccccaactaagcaagcatccctggaggtatgttcttcatgcaagggcagttcctgagagaatttatttggttagctcataaagggattatattgttttcccctgcacatgagagagagtagctgaagtctactgactttaatgaaattctctgtgaagagtctgggagggacggtttaggtaatccatctacaagggtgctcagagagtttggagcgaagcgattggtgtcgttatgatggcattctatggcacagtagttacagtgcaccaggcactcttttaaagacttctcaagtgttcattcatttaattcttaccacaaccctgtgagggacttcctgttattgtnctccgttttactggtgaggnaagctgaagccaagagaatttaactacttttgcccaagttcctttcctcttttgaggataaggagccaaaggttcaggaatgcccaaatcacatccctcttcttgtccaaccacccaacctctccacaggcaacctgatcagccacctttatacaaagtacagtattcagattgggataaaaatatatctccttgactccctgctctgagaggtatttcttctcagaactcccaaagctggaattgaggaacatggctttatttggtacagtatagcaaaatgtccctgccttgttggaaaacgaattttgtggaattatcttcctttttccctcaaggaaatcatttgaaggggctgttggtattcccctattaaaaaggga

SEQ ID NO: 452884 - DNA, 923 bp, Homo Sapiens
  misc_feature (231)..(372): n is a, c, g, or t
aattccccggggtagccttttaggaaggcccagttggatatggggtaggaaggggataccgatcttagctcccattttaatacggggggaaaagttacaaggtctaaggtcatcctgggtcacactgctcatgtggactattagagcttcaaaaaccctgggagagacagtaacagtcatagttccatggagagcttgcctttggagaacaaggtgtcatgctacatgatnnnnnnnnnnnnnnnnnnnnnnnnnnnnnnnnnnnnnnnnnnnnnnnnnnnnnnnnnnnnnnnnnnnnnnnnnnnnnnnnnnnnnnnnnnnnnnnnnnnnnnnnnnnnnnnnnnnnnnnnnnnnnnnnnnnnnnnnnnnnnntgtttttatctcatccgaaagctggtactccaaaccactgatagactttgctcccagactaactatgtgacagcaaaaggtgcgcaggtgacagctaagacatctgcatcgaggacggcagcatgcttcagaggcaagaactggtttctaggtgctgacagtcttgggagccacggcaggtggagctggaggggcaggtggaagcttgtgtggctcggctgggagggtgctgcatgctaattataagatcggctacatttgtagactttcttctacatgtggaaccaattctatggtttgtcacctcagttatctgcccaggggccacctccacatctcgatctcctgtcctcttggtgaaggactggagacacactgtgtgctcctagcttgagctaacaagctgggaagagtggatccaaagaaaggaaagtgcagactgcacgtccactcttcccatgagcatggtctctgtgtctcctggcctggcttatccaacccagccctgctctcccttgtgtgctctctgcagggccacccacttctatcac

SEQ ID NO: 452885 - DNA, 1310 bp, Homo Sapiens
ccgactgcggggacctgtggctacttttgggatagggccggaaccgtccgcttcttcccggttgaagtcgggtccgcttttcgtccatcttgtctaactctccactgtttgcgggacgtttgattttttggcagattactaccccaagaattatattcggacgtggtgactcaagacctggtcccctcaaagggcaagagtttggatggaacagggtcctgggcgctcagcgggatcaggtagaggtccttgacgtgcctgttgttattagctacaacaccaaagcggccacggctgctgaaataggagtagagagagatataggcgacctcctcttcctctgtggcggggtggaagcggatcagacagagctccttagacacagaagacttgagtttgccaacataatcccaaactgtcttcggtgcgatcctcccaccaatgtgaattgtgtcaggcaaatcctcactgaggtaatcaaaacacccagagacaggatacgccttagtgacaaattttgccacactctgcatgttaataaatcctttccaaatggtgctgagtcgagacaaaaagagggtcgtgtctccctctggaggggaacgtgattctgaagtgctgatatttggtgacggaggaactgacaggtatcttgggtcaggagatgaggatggcttagctagtatggacttgggcaccatcacagaagtcaagacaggcttcggcacatcctgtctggcttccaccatgtgggtgctgtctgggcgggatgctgcggaggccacggctgtgcatgaactgcttggagcggtcctggggtcccggccggacactgtgacggtggtgaccaccccgctcccacaggaggctgggcagggggacaggtcttccagcggggagggctcgggatggccatctcctggaggcccagggaaatacgttctgtccacatttggatgagaagcactttctaggcctggctcagaggcaacttcaggcacagcctccggcatcacctcatcagctgaatccggagctgggtcaggtgcagagctgtcatgctttgattttaagtcttctttcttaacagaagctgacaatttttgttttttcggagctggctcatcttctgcggagggaacctggcctgtgcaaattttacagttgagatcgaagaggtgtgcgcggtgctgactggtggtgtctttcaacatgctgctgaagacgtcgagaagcggcgctgtgctcttatcgagggacagcacgtgctgactcttgctgttcctctgaatccgacactggcggagatc

SEQ ID NO: 452886 - DNA, 759 bp, Homo Sapiens
  misc_feature (332)..(353): n is a, c, g, or t
ctgagttatataatgtagaaacttctaaagataattggatgagaatatacatattgacctgtaggttatgactaatcatgactcagatcttaatacagggatgatctcgtagcatttagatatcagaaaaggttttgacctatatgtctttaatattttttgaatacatgtataatctttatcattcctcagtgtttcatttctcaaattctgtaaaaggaatataagaggaaagacaattcatatacaaagacagcgagattaaaaatatgcagtaggaaaaataattacttaaggggagattttttttacatgaaatctgggctttggannnnnnnnnnnnnnnnnnnnnncacatatgcactgtggtgggagtggggcaacttggggaatatgttacatgtgtgactttgttttgccctgggagagttaatgttgttcagaaagggtaaaatgtttggacacttgcaattgctcatggatgaatttatatgttttagtcatagaaaaaattgtaccctttggtagaagcacattttcttttccaaagttggttaattaaccacagaattatagcaggtattcataacttaagtttgaaaatcaatagcgtctgcaaatggattaacagattagagaatcaacagcatcggaaaataggttaatgcatattgcttctaacaagtgcatgaagaaatagaagaagctatgtagctttcagttctgacagaaaagggtgaaggagggtatcatttcaag

SEQ ID NO: 452887 - DNA, 1052 bp, Homo Sapiens
tgattgtagttcttctgtaagagacagcataactttggcaactgggtgtactgcaaatatattttgaaagttcgagatatcaagatacagtcatagcatttcgttttgtgaaaggtggtctgtacaccaaggctcagaggttgttaaagattgattccatgtggaaatagtgcaaatatcctgcacagatagcttactaggttgctggcatagttattcaccagcagagtcttggattttgtttgcatagctcacacatcactggaatgtggaaaagtgtgctattttttggcaagagcaaaggagacattaaactgaagtgaattaccatgttggacatgctgaatccatgcagaacactggggcgaaggctgctacctgacatcattggtttttgtatactggttttgtttttgttgaagcagttctgttatagccagaagctttttcaatacgtgctgctgtgcaccacgctcattactgagcgttcgaagttcatctgaatgagccacgcaaatctcatgcaatgctgctaaatcacgggacaggtccgttctagaatgctctgtagtgtccggaagttcaggtacattcccaagttcatctaaaaacatgatcatacgatgtttgttgcttttgatgaatggattgacaccttccatgtagggctccttagctccaaattccacaagatttgctaagttctgcacagatttagccactaatatcagtgttcttgcagcaataggagatggagaatctgagatgatattgaacatccgtggattcaggatggcaggacagatgagtcgaagaaaaacaaaaccactaacaactcttgttctcatggtggtatttgtaggccacttatgctgaacagatttctgtaaacacccataaatatatctcaatgtcggtggaagtatttctgaagccatgaatattttctccacaagctctgaaagtatgttcaataggtgtgttaaattagtgttcacatcttcatttttttctaactttgatggacttaactcacaagactgcttgctttc

SEQ ID NO: 452888 - DNA, 1047 bp, Homo Sapiens
ttttatgcctggggggggctgggttccctcccttgtggtgttttctccaaggattctggttctctcgaattccaggggtgggtgctttgttttgagaccaagttgttcaggagcacctttgccccttcttatgcccccagtgcccttcccagggtgctgcgaggctggctggatgctgggcaagggggccactgggtggggggctggccagggcaggcggagttcagacgtactctcgggcagcagcagagggtccaggccgatagggctgtgggctgctgttgggtctctctggctccgggcatgtgcagcagaggaaggagccgcccagcacggccaggccagctgaggcccagcccacgaacagggctgggccaaattcatacctggcattgacaggtgtgcttgggttgaagaactcctgggtcaccagggtggcataccacgagacagcagtcaaagtgcagaggcctgccaggatgaagagggctcccccggcgatggcaacacggcccttggcaatggggttgctgtctcccacccgcgtacacttcatgccaactacgctgaggaccatggccacgaagcccaggagcacggccaccaccatcagggcccgcgctgattggatgtgaccgtccagggcgagcagcgagtcgtagagcttgcactgcacttgcccagtgctctgggaggcgcaggacatccagagcccttcatagaggcccacggcagtgatgatggcgtcgcctgcgtaggaagactgcttccactgtggcagggctgtgctagcaatgatgcccacccagccacccagggccaagaagtagcccaggagctggaggcctgagttggccatggcccaggagagaggaccgagggtcccaggactcagagctgggccagggtgccagcaggggctttggtcatggccaggtgggaggagcagctgggcagggggagcagcgagaaggagggtcagaggcagagaaggagaggtggtgcggcggcagcggctggatcccgggaatccggaccggaccagcc

SEQ ID NO: 452889 - DNA, 1024 bp, Homo Sapiens
  misc_feature (33)..(33): n is a, c, g, or t
  misc_feature (37)..(37): n is a, c, g, or t
  misc_feature (985)..(985): n is a, c, g, or t
  misc_feature (998)..(998): n is a, c, g, or t
ttgatcagaggatcccagttcgacggagactcntccntccatacgccacgataaggttgctgagcaggaaatgcagctagagcccattacagatgagagagtttatgaaagtattggcagtatggaggagaaactgtaaaaatagttcgtatagaaaaggctcgtgatattccgttgggtgctacagttcgtaatgaaatggactctgtcatcattagccggatagtaaaagggggtgctgcagagaaaagtggtctgttgcatgaaggagatgaagttctagagattaatggcattgaaattcgggggaaagatgtcaatgaggtttttgacttgttgtctgatatgcatggtactttgacttttgtcctgattcccagtcaacagatcaagccgcctcctgccaaggaaacagtaatccatgtaaaagctcattttgactatgacccctcagatgacccttatgttccatgtcgagagttaggtctgtcttttcaaaaaggtgatatacttcatgtgatcagtcaagaagatccaaactggtggcaggcctacagggaaggggacgaagataatcaacctctagccgggcttgttccagggaaaagctttcagcagcaaagggaagccatgaaacaaaccatagaagaagataaggagccagaaaaatcaggaaaactgtggtgtgcaaagaagaataaaaagaagaggaaaaaggttttatataatgccaataaaaatgatgattatgacaacgaggagatcttaacctatgaggaaatgtcactttatcatcagccagcaaataggaagagacctatcatcttgattggtccacagaactgtggccagaatgaattgcgtcagaggctcatgaacaaagaaaaggaccgctttgcatctgcagttcctcatacaacccggagtaggcgagaccaagaagtagccggtagagattaccactttgtttcgcggcaagcattcngagcagacatagncagctgggaaagtcattggagcatgg

SEQ ID NO: 452890 - DNA, 919 bp, Homo Sapiens
  misc_feature (99)..(99): n is a, c, g, or t
tcctagacctttagaggttcacccttctcgggagacttggcccaacacgggggggtctttgtgggcttttgagaagcggaacccggggaaaaggggtgnaaaaaatgcccctttctcttcctttgcggaaaggggttccttgggaaggcccatgtgccaggccacccccaggctgggggcttggcttggggggttgttggccacgctgttggggcccctgaccttcttttttgctgggggctgcaggcggagcccgaggaagagtaaagcgcttctggcccggatgctgtaggtgatactgggcagcgtgggagtgttcattctcacctcgccctgggagaggtggctcagggacacagtctgggtgatgctgtggggtggcatgatgacagactgctctgggtggatgctggagatgaactggggcactgggatgcctgcagccagcatgactgtggcgttggtggagagcgccgtagatgcagtactgctggggtggcttgcccttgggaatgaggatggcccgggtccacttggtcgaggagaatgagcatctagctttgcagctgccaaatgggagacagttcgatctgctgggatgctgggccccgaggggacatggttgacttctgtaggcagtttgctgggcagagcaggagggtggtggggcgtgagcgtggaccccaggttggccggctgaaggaccttggtctcgattttaagggtgacggggtcagcaagcttcttgtttgtggtgacaatgcttggggtgaggaccagctggttgtgaaccagcacagggggtgtgttgatcctctgggtgagaaccttcactgtgcctccctgggtgacaggcgtggacaccgagaggtgaatgggctcgggcttctccaaggatggcctatcggccttcacagac

SEQ ID NO: 452891 - DNA, 761 bp, Homo Sapiens
tgagccattgcgcctgacccagattgagtaatttctactgttctttcagttcactgattctttccttagggggtagcctcattaccactcactgagtttgggtgaaagtcctgactctctattaagtttcttctgctaccaccccaacaggaaagagagggatgattcctaatagacttgctggtggtggaagtctaggcaccccattcagtctttgccagaataggagaggacaagccacagtttgtttctgtggcatttggctggaatagtgcaattattgtctaaaagttttctgttttgctagactgcctcattcctgatcctttggctagagagaacaggcttttgttagggaatttttaggctgctcctattgggatttccaggttgctggtttctttagctccaagtatggcatatatgaggcaaaaagaaagtccacagaaatcagcattgtgtcctgcctttgtttctggggctcctagctggtctacctccttctctccacatttcagtcttcttagggttgtcttatatataatgtccagggaggaggacgagggaagatcacatctactcaatcctccctgatccattctcttttattcacttgtttatttggttttacactagattttcagctctttaagtgttttgctgtttgtttgggagacagagtctcgcactatcaccagcctaagtgaggcatgattcgctccatccctcgtacattgcactcagcgatcggcctttacgta

SEQ ID NO: 452892 - DNA, 672 bp, Homo Sapiens
  misc_feature (357)..(366): n is a, c, g, or t
aattaatacgccaaggaaaggtttaaaaggaggttattttttcccgaggaggggggggataaaaatcccgtaaaaattttagccccttaaattattgggggaaggtggagggagaggaaatgagcctagaaaacttagaattataatggttctaaaatttaccaaagtaaggggacacaggcattagagtaggttttgcagagaatgaatgttttaagacacacacaggtgtctctgggacaaccaagaaaagtgcaacaggcagatggattgaggagtctggctaaagataaggatttaggaactgctgaattaaaattacccaagcgtgagaagtggtgttgtgattaagagagnnnnnnnnnntggaggtctgaggaataacatttaaggaataaatgaagaggccaaaaggtggggggtggttcaggagtgagcaaaatgtaagaagtcaagggaataaatctttaaagtaggggttgtcaaaaatgtcaaatacagaaaaaaagtcaagtactagcttgtgaattaaactgtggatttagaattaagattttagactttacaggaagggactgttaaccagagagccaaatggcagattttagttaaggagccagtagaaggtgacaaagtagaggtaagaatattccttcaaaaagattggcagct

SEQ ID NO: 452893 - DNA, 898 bp, Homo Sapiens
gcctaaaccgcgggaaggaaatttaaacctaaaagtctaaacttgcgtggctgaactcccactgaagtccccgggccacgggtccaggctaaccgcgggaggaattttaatctagagtcttaacttgcgtggctgactccactgaagtcccgggcacgggtcaggctaaccgcgggaggaatttaatctagagtctaacttgtgtggctgactccactgagtcccgggcatgggtcaggctaaccgcgggaggaatttaatctagagtttaacttgtgtggctgtccccactgagtcccgggcacgggtcaggctaaccgcgggaggaatttaatctagagtttaacttgtgtggctgtccccactgagtcccgggcatgggtcaggctaaccgcgggaggaatttaatctagagtctaacttgcgtggctgtccccactgagtcccgggcatgggtcaggctaaccgcgggaggaatttaatctagagtctaacttgcgtggctgtccccactgagtcccgggcacgggtcaggctaaccgcgggaggaatttaatctagagtttaacttgtgtggctgaccccactgagtcccgggcacgggtcaggctaaccgcgggaggaatttaatctagagtttaacttgtgtggctgtccccactgagtcccgggcacgggtcaggctaaccgcgggaggaatttaatctagagtttaacttgcgtggctgactccactgagtcccgggcatgggtcaggctaaccgcgggaggaatttaatctagagtctaacttgtgtggctgtccccactgagtcccgggcatgggtcaggctaaccgcgggaggaatttaatctagagtttaacttgtgtggctgactccactgagtcccgggcacg

SEQ ID NO: 452894 - DNA, 475 bp, Homo Sapiens
  misc_feature (432)..(432): n is a, c, g, or t
  misc_feature (454)..(454): n is a, c, g, or t
  misc_feature (460)..(460): n is a, c, g, or t
ttggcatcaagctgctgaaaccacctgtgcaaaaatgataacagtgagagaggtctggggtggctgattccaccgagtcccgggcatgggtcaggctaaccgcgggaggaatttaatctagagtctaacttgcgtggccgactccactcacttccgggcacggttcaggctaaccgcgggaggaatttaatctagagtctaacttgcgtggctgactccactgagtcccgggcacggtccaggctaaccgcgggaggaatttaatctagagtctaacttgcgtggctgtctccactgagtcccgggcacggtacaggctaaaccgcgggaggaatttaatctagagtttaacttgtgtgggctgtctccactggagtcccgggcatgggtcaggctaaccgcgggaggatttaatctagagtttaactttgngtgggtgttccccattgagttnccgggnacgttcagggttaaa

SEQ ID NO: 452895 - DNA, 916 bp, Homo Sapiens
tccttctgttctgccttccgcagtgtaggctttaccctcaggtgctacacagtatagttctagggtttccctcccgatatcaaaaagactgtggcctgcccagctctcgtatccccaagccacaccatctggctaaatggacatcatgttttctggtgatgcccaaagaggagagaggaagctctctttcccagatgccccagcaagtgtaaccttgcatctcattgctctggctgagttgtgtgcctgtttctgaccaatcactgagtcaggaggatgaaatattcatattgacttaattgcagcttaagttaggggtatgtagaggtattttccctaaagcaaaattgggacactgttatcagaaataggagagtggatgatagatgcaaaataatacctgtccacaacaaactcttaatgctgtgtttgagctttcatgagtttcccagagagacatagctggaaaattcctattgattttctctaaaatttcaacaagtagctaaagtctggctatgctcacagtctcacatctggttggggtgggctccttacagaacacgctttcacagttaccctaaactctctggggcagggttattcctttgtggaaccagaggcacagagagagtcaactgaggccaaaagaggcctgagagaaactgaggtcaagatttcaggattaatggtcctgtgatgctttgaagtacaattgtggatttgtccaattctctttagttctgtcagcttttgcttcatatattttagcgctctattattagatatatacatgtttagtattatgtcttattggtgcatttactctcttatcattatgtaatgtccttctttatctgtgataattttctgtgttctgaagtctactttgtctaaaaataacatacgcactcaa

SEQ ID NO: 452896 - DNA, 861 bp, Homo Sapiens
gggaccaatgtactttcaggcttttgaaaacctgggcaagaaagcccacacgactgcatgagacaaagccgtgagaggcattgctcaggaggaaacgctgggtctcttcaccaaaattagattacagcatattctgggagcacacgcccttgtactgcttacaaaccaagggagaaagaccaacgcatccatcatcccaacgccttccctggaacagggaaatgagcatcattctgtgggaacagcgtctttagactctgcatcagtttgttccacttcagcatccgcggcagctggggcaggagcaactctggtttgggcgctttctgcctctgctgccattgtctcggcgccatttccagcctctgcagcctcacttctggccttggggacgcccttctcatgtgccgttccacagggcacctgctcttccagcagctgttcggcttgaggatcactaccggcctccgctgtgtccgtggggccttcgtcctcagccggctccccgctgctctctggagcagggcgctccttccccatctacggccctcactgctgctgtaatcacctctgctaagacgtccgcggccacctcctcaggtgtctctttcttatcctcacctcctaaattgtcatctccttccatttctggatcaacagtttcactggtgaaagggtcctcaccctggccaaagaggaaacaccggtcagcgtggtgtaagcagagctcaggaggcccatgattgcggggatgtcagcttttcagaaccagcagtccacaagggaaacacttctgtaaattatgccacaggagtgaatcctacatgttctcagagcctacagattcagaaaacacctcgg

SEQ ID NO: 452897 - DNA, 936 bp, Homo Sapiens
  misc_feature (128)..(128): n is a, c, g, or t
caagccaaggcggggtcccagggaaggtggggttgttcccggcaaggaatgcccctcggggccccccaagttttccagaagcagaaactttgatcaaaacttttcccccagatgccccgctcaatttnggccaccggccgccaccatttctcctccaaagatcagggctttagcgcccgaggtgcccaggcagaaggccaggggctcgcgccgcaggttcacgttgagcagcgcggcctccatgcccgctttggccaggcccagccacagccccacgaactccggccggccctccaggaagatggccaccacgtcgcccggcgcgaagcccagctggcggaagaggttggctaccgcattggagtaggcgtccagctgcgcaaaggtccagcactcgccggtcccggcatccaccagcgccaggcgctcgggctgtcgctgcactaccgcctgaaagatgcgcgggatggtgtggccggcacgctggtgccgccgcagctccaggcgcacgcggatcagcacagagagaccgaagaggtctcgcctcgcggtcttgcagacgatgcgcaggaagcgccagccgccgctgcccacgtacacgccgagcgccgctgccgcgctccaggtccacggcagccccagcagccacaacagcgccagcgagaccaccgaggccgcgcccgcacccggagcccgcatcctgaagctgcaagccgtgccttcagtctcccagaagctcaggcaggaggcaggcagggactaggaggctgaggccggggacctttctgtttctgcagactcctggacccttcttgggtgcgctgtgcctactgtgcgggcttctgctttggggtccttcccttccagctccccctcctctgccccactgccgactccaccactgcttttttctgatccgagggaattccggaccgg

SEQ ID NO: 452898 - DNA, 804 bp, Homo Sapiens
gcctgggggtggtggtggcctcagatgaggtagtggcaggcagatcatcagcccacgttggctctggagccttatcatcttcatcctggtctctggtgacactcaatgactcagaaatttctttttgaggctctggagtagattcactgagttcttcccctgacatcccaaatccaggttgaggtgacgatgaaccaaaaatttgaacgagataggaatcaaaatcctcacaaattttttgaaacaatttttgcttcagggtgtcttgcagggtaaagaaatcatcaaactggtaaacatgctctgggtcagtagcaattagattcatttctttgtggaatatttcaaagttgggatcatttttcttcaccacccctatcacaaatatctccacattggtgtcactggcattcttcaccacctctgtcagtttctctttatcacgagaatctgtctgtccatcagtgatgaccaaggccactttttttacacctggccttgcatcttcaaacatgtcgttggctgcttgcagagcagtggctgtgtatgtgccttcccccagatactgcatgttgtccacagccaacttgaagtcatccttgctggagaactgcttcaaattagccaccttctccaccttatggctatagttgattatgcctatgcgggccgtggcaaggtccagagcaacccggtcagccatagtcttcacaaaatttttaatgatctgaaagttctctggccccacgctttctgagctgtcgatcacaaacaccagctctagtggagtctctttgcatttgg

SEQ ID NO: 452899 - DNA, 919 bp, Homo Sapiens
  misc_feature (109)..(109): n is a, c, g, or t
  misc_feature (134)..(404): n is a, c, g, or t
ggggcacaaacttggaattgcaaaatgtgatttcttccaggtttaaaggacagttcaatcccccctgttcaatctataccggctttcttttttccttcccggcagcgtncactaccctttgagacaagagtctnnnnnnnnnnnnnnnnnnnnnnnnnnnnnnnnnnnnnnnnnnnnnnnnnnnnnnnnnnnnnnnnnnnnnnnnnnnnnnnnnnnnnnnnnnnnnnnnnnnnnnnnnnnnnnnnnnnnnnnnnnnnnnnnnnnnnnnnnnnnnnnnnnnnnnnnnnnnnnnnnnnnnnnnnnnnnnnnnnnnnnnnnnnnnnnnnnnnnnnnnnnnnnnnnnnnnnnnnnnnnnnnnnnnnnnnnnnnnnnnnnnnnnnnnnnnnnnnnnnnnnnnnnnnnnnatcctactgattcaagagaccacagtgaaaggtctgtaaagaagtcacatgaagtgatttcagagttgaggatgaaaagtcataaaatgtaaagtagcctttttcaaaaaaccccatataatttaggttttttttaattgcctgaaatattaactgaccatttccacatgcccttggaccttcgacatgcatcgcgtcatgagattcaacgtatttggagctgtgacttttctgcagcatgcagtatcataaatattggagaactagagactgaattatcgcttgtgtaaatcttatcatgttccatagtaatggtccttgaataatagcctcagcatacataatccatctgtatggtttcatccaagatgtatgttttgatatctagtcatttggcaggcctcaagagacctgattcacatacattgctatgatttctctttagtatggaatctctgatgttgattaatgctagaacttagcatgaagagtttgccatactcagtttgtaagaa

SEQ ID NO: 452900 - DNA, 878 bp, Homo Sapiens
ggcctttggttttggttttaaggccttttaagcagccctgaaggccatgtcattacctagataaaaaatcatatttatatggtgttttcttgaagtatatgcacactttaaatgtctctctgccaactaattataaaaggggaaaaggagtttaagacattccttctatttttatatagtttttctattatgtctctagtgataagcggaaaagagggatgaggaagaggctttattggctcaaccagaaacagaaaccaagaacccacgactgtattcctctcccttggacacccccggcagagcgttaggaatgaaatggggggaaatgcgttaagatcagagtcctaattaactttgcaaatttatggtttgttccgcggggaaatattctttagaataacaaggtctgaatatcaaagatgagttaaggtggttaatgagaaggagaaacattgttatatctagaggagagctactcttgttagcagttcagaaagtattgttcttcctgctttctgtacatagcagaatatcagggtattatctttttcatctaagggaaaatttactgccaaaggaaattgaagaaattctctgaaaaggagtccctgaatgagtagtcagctatccttgtcttcatccttataatcatcttctgtcataattatttgagacttcttgtctaaagggctttacttaacattttgatagagagcaaatacctgaggttctagccttggagcttaggattcccctcctgaatgttcagcaaacccgaatagcaaaggtactcctaaggaatcctctttggccagatggatcagggatacatttccaaacattaatccgcaggaattccggaccggttacccagc

SEQ ID NO: 452901 - DNA, 1182 bp, Homo Sapiens
  misc_feature (65)..(118): n is a, c, g, or t
  misc_feature (150)..(158): n is a, c, g, or t
  misc_feature (203)..(252): n is a, c, g, or t
  misc_feature (279)..(287): n is a, c, g, or t
  misc_feature (994)..(1071): n is a, c, g, or t
ggggggagttgaaactttttaaaggcatataattctagttacctgtgtctgttagctttgtgcannnnnnnnnnnnnnnnnnnnnnnnnnnnnnnnnnnnnnnnnnnnnnnnnnnnnncctccttgtttggtaggagcttcaaatattcnnnnnnnnnctatactaaaggatttgtttccatttgtgtaattggctgtgtacnnnnnnnnnnnnnnnnnnnnnnnnnnnnnnnnnnnnnnnnnnnnnnnnnntgtttgttttttctttcctctctcagnnnnnnnnntttcatgctttaaataaaatccaaagacacaccctttcactgctgatgcagaaaaaagggaaagggttcttgttacttgagaatttgtttctgatttaaacaaacaagacttagtttaataaaagaaagagaaaaacaaaagattcccaggttgttatgtgcttcttctgcaagcagagaggcaaatgttaatgacaattccatataccaaaagacacattttttacttcaaagttttgtccttgtgttaggcagtctgagcagcgagtgatccagagcgcagccaacaaagcagcagatagcagtgtacagaaagcaaaaaaggaactgtatgtgaggcacttgtttctgttaatatccatattcctgttaacacacaccctttctcatgtaaaaagaaaaataaataaatggtctgaactttgaaaactttgtgctgctaaaacatagattttggagacaaataaatagatgctttgctgtttcactttcatagctaaacatcaacagaaaccatctccccttgcccccaaagtgtgaaatccttcttcccttcgttttcttccttatggtttcaaaagggaactttgaagaactgtgaatacaggttccattggtcacctttcggggcttcttttcccagtgctgaagccactcatcgacttttgcaaaagactggagcattcccaagatctggaaaatggaannnnnnnnnnnnnnnnnnnnnnnnnnnnnnnnnnnnnnnnnnnnnnnnnnnnnnnnnnnnnnnnnnnnnnnnnnnnnnaattggaaaattgtaagaattcccggaaaatgggtggtaacattatttttcctaaacctaggggctggaatggcaccaagggggccaaaaattcccctttctttttttaac

SEQ ID NO: 452902 - DNA, 923 bp, Homo Sapiens
  misc_feature (438)..(492): n is a, c, g, or t
ttccgaatgttctatttcatggaccaaattccacggaagagaactttgtgtttgtttcctgttcaggatggctagggcgagaagggcccctttgtgccaacctcttttgttctctttaatcaatgagattcttaaaaagtaaaaaggaagggatacagattctcagtaactaaaacaatctcgtgtgcccgtgaggggaaagtccttgatgtttttaagaatgtcactttattgttttttaactgaatgatacagaggtatacaattttcaaactgtttgccattttaatcaagcaatttgaaaattaaaatgtttttgtcaggcattaccaaatggcacagaatgtgataggccagcctggttttggggtcctttctctactggttgatatgcataaaaccttctaaaaatcaagaatattgccagagagcaacagnnnnnnnnnnnnnnnnnnnnnnnnnnnnnnnnnnnnnnnnnnnnnnnnnnnnnnncacgaagaacaaagccccaccaccgtgctgtgctgtttgtgtggccccactgcatcgaggccacaggctagctgctagacgcatctagagttccctgatcccctaaaattattttatcttaaatcctgttttgccctaaccttcttaaggcatcagctttgagttaccaatgtaacccaacacaccatgcaaatgtgcccattgacttaattgctgcattaactgcggtgaaggttcatcttcccgtttcagccctgaccctttgttcgagaggacactaaatcgtttggggtaaatttgcaaagtggagcctgcttttgcaaccaccccccaacggcggacctttttccgttctcttcctccaccgatctttcccttggggaccgaagatatctccacccgtttgttatcatcaaccctacggtgccttt

SEQ ID NO: 452903 - DNA, 859 bp, Homo Sapiens
  misc_feature (16)..(16): n is a, c, g, or t
  misc_feature (35)..(35): n is a, c, g, or t
  misc_feature (69)..(69): n is a, c, g, or t
  misc_feature (89)..(89): n is a, c, g, or t
  misc_feature (113)..(113): n is a, c, g, or t
attaaataaaaattcntcgagaaccatggttcaangcttcaaagccttgaacaacatacttacattaanttgaatgaaaaggagtcaanccaaggcataatatcctattgcancctaaaggcctgggagattttaaactcttctaaggtgtatttgaatcagatcttcaaagaaaagagtgttatttctagttttttgttgtccaaattacaagagtttcaacggattaaggtttccttaccatgattcttttaacacctaattcctaatcagaaatggtacttaagaatatcaacgtttagaattcaaacatgattctagaaaatttcttatcttaaagtcaaactataacctttactcaataaagcatactcttaaaggtctgtgatgcatgctttaaagaacagtgatgggattctggagttctttcctttctttctccttctccaaagatacagatatctttctacagttttctatggaataagagacttcatcatataaaatggctggcatgttttcccttttgaatagttctgattataagatccaccatgaaattttacgtttccaaatcataagcttaatagcaaaagcaaacaatttgacctaccactgagctaaattgaagaagaaaaacctgtattttagagtatctgttatcaagggttagcaaactttttctgtaaaggatcagataaatattttaggctacctgggccatatggtctcccttgcaatgactcaactctgctactgtagcacaaagcggccatacacaatatttaaaagggtgagcatgggtgtgccccaataaaactttactggtaaacactgcaatttgaatttcaatctctga

SEQ ID NO: 452904 - DNA, 889 bp, Homo Sapiens
  misc_feature (42)..(57): n is a, c, g, or t
  misc_feature (73)..(73): n is a, c, g, or t
  misc_feature (90)..(90): n is a, c, g, or t
cactgttgctgagacatttttattggcataggttatatgttnnnnnnnnnnnnnnnncgcacatgcgcagggnaggaagccatgtggcgntgtctggggaaactcggggacttccctggcccccgctgcccccagtgcctctgctgcagcccatccagtgtcaatgtttgaggatcacatagtccacattttcttgtgcctgaggccgctccccgaccccaaactggatcagctctgagtaatgaatcccctcatcttctggaaaatctggaatgacgttctcatagtcgcccacttggcgcttgtgcaatgctgaataagtgaccgtgtcatcgcagtccgggggaggtctctgcatctctgaggactctgcatctccagttcgtggtatgttcatctcgggaaagcgcagggtggtgtagctaatgccatcttccatcattggattgtagcatcccagggagtgggggccttcagagaggggggcccttctaacctttttattcctcacaaagaagctctggccgctggaattctcctgaagcccctgctggctctgtgtcctcttccaacgtcgctggagcttgagcccacagattgccaggatgaggatggcgaggcaggacccgagtcccacagccactcgcctgccgatggtctccgggctatagtagacggtgagggtgctgagaggcgaacggcccttgcccacactgttggtcccctggcaccagtaggcacccgagtgctggaccttcaccggctccaatctcagcttctggctgtggtaggggaggctttggttattccagtcaaaccaggtgtagtgggagacgggagggttggcgtcgctctgggaaatcagggttgcactctcccctttcgaaaa

SEQ ID NO: 452905 - DNA, 1753 bp, Homo Sapiens
agcggttctcattattccaattggcaagttttcactcattaggatcaacagccatgctgtttgcttggtaaaaaatctgccccaagtaattcaattatatgtggaaaaaggaagtgcaagcaagggaccgtacctgtgtaccagctgatgtgggaccccctggagcggcctctgcccagcttcctgggagccacttagcagaccaggaaacgagcacagctcacctagttctcagtgacctgtgataccttgctatttttctagatggatctgtcttcctacaaaacccttgagttaattcaatcccattctacaaatggtatggaaaggaaagagacataagctagagacctagagaatggaattgagctgtaaaaactatggcagttgtgggaagtcatcttttttacttagatttttagtgaaatctaacaaaattaaatgggaaaacaatataaattatatttaacttccccaaagacgttttctcatttaggtgcatctttacttatttaaagatacatgtaggcagcaacacagagatttctttccctgtatctgttacgtagtattgcctaaaatttttgtaattcagacatattttttaatagtgatgttgtttgcattgtattttatttcatgggttttttctttaggatattgagaaagtctgtgaaaactgtctatcaaggatctaacctaaacccagatcttggagaactggtggttgttcctttgtatccaaaagagaaatgttcattgttcaagccactcgatgaaacagaaaaaagatgccaagtttatcaaagaagagtggtgttaactactagctctggagagtttttgatctggagcaactcagtcagatttgttatcgatgtgggtgtggaaagaagaaaggtgtacaacccgagaataagagcaaactcgctcgtcatgcagcccatcagccagagccaggcagagatacgcaagcagattcttggctcatcttcttcaggaaaatttttctgcctgtacactgaagaatttgcctccaaagacatgacgccactgaagccagcagaaatgcaggaagccaacctaacaagcatggtgctttttatgaagaggatagacattgcgggcctaggccactgtgacttcatgaacagaccagcaccagaaagtttgatgcaggcattggaagacttagattatctggcagcactggataatgatggaaatctttctgaatttggaatcatcatgtcagagtttcctcttgatccacaactctcgaagtctatcttagcgtcctgtgaatttgactgtgtagatgaagtgctaacaatcgcagccatggtaacagctccaaattgcttttcacatgtgccacatggagctgaagaggctgccttgacttgttggaagacatttttacatcccgaaggagatcactttaccctcatcagcatttacaacgcttaccaagacacaactctgaattctagcagtgagtaccgtgtggaaaagcggtgtcgtgattactttcctcaaccggttcatcacctcagaatgggcatatgtttcttcgaggcttgaaacccttttggaaattattccaaggcgcaattccggggcctttcccccttatggccacgaaaacccttggcctttttttggggtctctcccaaagggggaaaaaacaccatttgctataacactcgctgataaaggcgaaaaaaggctctccccttctttcttggggca

SEQ ID NO: 452906 - DNA, 679 bp, Homo Sapiens
cagggcatgtggccacaggtcatgggggcaggataactggggctgttgaagagcctcttttcctcagtctggttcttcttccagcactcagatgcaggacgcccggtgcagaagcaccaggcactaataatcaggagaggcatggctagattccactcacttccaacatttccttctggtctcttttccctttggttgggaacattctccagcagtacagccacagaggggccagagatgccagaagcagcagaatccagacacccaagagcatggcctgaagggttctgaacaaggccttcagcatgtccatgaaggaggtacataggtgtagccttctgacttcttctggactctgagtgggggctggagtgttccagtcactcgagctggagatgcggcaggcactgttgtaataagagtagccatatcggaaatcttcattccaaagtttgagggcagcgatggctgtggagaaagctgccagcgctagcagagtcctcagcagggcacagtatgtaccaccccgtgtctcataaatgaaggcagcagctccagccagcacaggccacagcccctgtccagatgcagctcccgagttacgaggaggggtatccgatgtagaaatcctctaggcgcatcaagatccagcacgattgcataccatagccacagcagc

SEQ ID NO: 452907 - DNA, 2348 bp, Homo Sapiens
  misc_feature (67)..(67): n is a, c, g, or t
gtgggggagagggggaagggtttttcccccctctcgggtttcctctggtgtggcggcgccaccggtnttcgagaaccagaggcccttttgtgggtttttcccccaggcttgggccaggggttcccccctctgccaggggggcccaacgggcttgggttgtttgggggtgaaagttttcaggaggagaggaacaggcagctttgggggcacccccttgtccagaaagggcccccctgccattggcagccaagtggaggcccagggacctttcagggcactggaggggacagagcagctctttcctcagtgacccgagggaggggaagtgttagcgcaaaagagtggggcccacagtcctggaaggaggagttggctccgtcccgttcccaaactttaaccaggcggagccgccctctcttgccttctggacacgcatcacttgattccaggcaggagaacctctgagaaagtgtccccagtccctttcctccaggaactctcctgctgtcgcacacacacactacccggcagctgctgacaactgcctggaaacactaacatacccaccgtgggttgcagccacgacgggccccctgttcaggtgcatctctcagggcaaactggacaacacgagcctgtccttaaaggcagctctttagctccaggacatggcagtgtgtgctggcatgttccaggggccattggctcggaaagtaaaacctcagggcccagccccattcctgctgcacctcctcagcagccgccccccaggctgacagctgtcgtttcacgatgggctgaggggtgggggcttttccaacacttgattcgagcagactgcaacgcccagctcacaggacaactgaaggagtcagacctcaaactgctgctctcaaagacaaagacaatgacaaaacccatttttgatgcctgaaaagaggcaaaggcttctggctaaatatagaggccagctccgtctacccagtgaaacattagtggagttggttaaagacacgaagccggagctcactctagcatgtgctgaaacaccaactttgccgtggcattgccaaaaagttgacagcaaaaaataggaaaaatacttcttaaaactgcattgcttcaattcttagtctcagtgtgttcacaacaaaggatgatttccagtttttttcgggtaatatgaaacattccactgagatcatttatcttgtattttcataacactgtgccagaaaacatcctctcacatctacgcatcagggatggtctagagcgattaagcaaaaacaagctccttgctcaaagcctctccccagccttcagaaaggcagtcctctgagttcccagaaactgctgtgtcagaggcaacagtgcccctgcatcctggcagagaacaaggatgttccaggcagtgttgggttgggcacacatctgggagagctcacccaagcctgccccaagcaaaaaagtttcccagccccaggcactggcagccggcctcctgcacaacccaggcaggtggagacacccaggagcactggccatccccaaggaggccatggttttcagctgtccaagagcgttcacgctgcggctgcaccactgccctgcaaagcacccccgaaaacattcctccatcccctcaaccaaggccagcccaggcgtgggcctgctttgcaatatgacggtccactgtttacttggaatcccatcccatcgtacttggtgaatgatttccacaagtcaagaagggcattccacagaatctcacagagccatgcctggcacggggcaagctggggacagagcagcccagtgatctgcaaacacaggctggccatgagaagtgagggtgggtgtctgggcagccaggccctccccatgcaggctggacgacactgatggaagggttgcgtgtggaagagcaaaggctattctagaaatggggcatggctggcagcttaaagccactggtgggaggttcacaggctttcctacagtggccatttctgaacaagggatgtgcctgcttttctaaggcagccccttttcataccaaccttatgcctgaggcagcaaccctctggcctacaggtgcctaaagcacagctggcatcctttatagcactgccattcaaaaccacacaccactgcccactatgtacaggagagagaatatggggagatgcccagcaaagcaaggtttcagagggtcagagcaccgacaggctgacggaggctggaaacaggctcttgcaaatagccactggtaagcctgaggatccaccaaccaggcagaaagcgtgactgagataccgtgtaaccaaaagcatggcacggaaatc

SEQ ID NO: 452908 - DNA, 875 bp, Homo Sapiens
tccggataatgattttaaatctgtgtactgacgattctttcggtgttaagaaacacagggttgtgtacttccctttttatgggcttatggattctatttatattaagacctgtttataattgttttcttgccaaagggaattgtctaacttcagatttctacattgggttcatacttactgttttatattggaaataaaaaaatagcttctgctttttcatatgaaatcttggtacatcagaaagaattcctgaaaatttataatagaatgaattttattaatgcagaaaaataccccagggtgttaaaatatatgaagtgtgggatatattcttatagtttgtaaaatgtagtcaaccaatactgtcttctaatttggtaatttatttataaaattacttaaacattaggtaattatatttgttaggatttgaaattatttgtagttaaattgtcatgctgtttgaaataattgatacttgtctacgtaatacattttactgtatgttttgaagatggttataatttcactttcaaaatttaaaaaatcaattttaaatgttttaaaaacatatagcttagggattttttttaaaaaggttttcttagtaaaaacataaatttaaaagcccctgagttctaggagagggcttattgaattgctataagaaagctggagttactttgataagtaataaattataaatagcactgatctataatgtttttatttctatcggaaggtactttttcttctttcatcatcagttttagccagttagtaaatgggaatactcagttttagggatttgatttttgtttggtttaattttctttcaaaaattaaaagtatatttctaaaagttttccccaga

SEQ ID NO: 452909 - DNA, 1432 bp, Homo Sapiens
gggactcagccacgtggactatgccttgattgctgaagaaacaggaaaatgcttttttgctccagatgtctttaactgccaagcaccagacacagggaatatggaggttctgcacctgtatggaagtgaggaacagaagaaacagtggcttgagcctcttcttcaagggaacattacctcttgcttctgtatgacagaacctgatgtagcttcaagtgatgccacgaatattgaatgcagcatccaacgagatgaagatagctatgtaattaacggcaaaaaatggtggagcagtggagctgggaatcccaagtgcaaaattgcgcttgttcttggggggaactttacctacttgctctctgtatgatcacagcctgcatcagactatgttggtgtacgtcttttacacagttcccattccagtcatcactgcttacatgactacatgaaaacatcaaaaagacaattgtgattctgcttattatctgttttatttttcttcttagcaaactttttctaatacaatttttcttttgactagacacaaacagcacagcatgattcttgttcccatgaacacacctggagtaaaaataataaggcctttgtcagtttttggctacacagataattttcatggaggacattttgagatccattttaatcaagtgcgagttcctgccacaaatctaatactaggtgaaggtaggggatttgaaatttcccaaggccgccttggaccttggcagaatccaccactgtatgagaacagtaggtttgggcggaacgcgcttttgtagatcatgtgtgagcgggcaacacaaaggatagctttcaagaagaagttgtatgcacatgaggttgtggctcactggattgctgaaagccgcattgccattgagaagatccgcttgttgactctgaaagctgctcacagcatggacactctgggcagtgctggccgctaagaaagagattgccatgatcaaagtggctgccccacgggctgtcagcaaaatcgttgactgggccatccaggtgtgcggaggtgctggtgtttcccaggattaccctctggctaacatgtatgctataacccgagttttgcgtttagcagatggacctgacgaagttcatctttcagcaatcgcaacaatggagctgcgggaccaagccaaaagactgacagccaagatataaggagggtggcactgccacatcccactggcagaaactctcctttatacaaacttcattggctccaacatttgaatctcatatttttgtagcagtttgagcacagggttaattattcatttgtggtaaagattatagcatctattttgatcagtgggttttattatttcaagggtcacacagggttaagttcagtaagaaatgctgtagctgttgtcattcaatctagtgcctc

SEQ ID NO: 452910 - DNA, 1210 bp, Homo Sapiens
  misc_feature (69)..(84): n is a, c, g, or t
  misc_feature (248)..(248): n is a, c, g, or t
tccaatatggtaaggggaatttcaattccaagggccagggtttttttattagtgaagaataaggatttnnnnnnnnnnnnnnnncaaagagattcccaattgtagcccatgagatggaaaaaatgttttaagggtaaatgggtatagcctttcttctattttgcttttaggggtaaggtttggctaaaagcttatttaaaattccccaactgacataatgtgttttcaaataaggaggaacgctgccngtgtccaataccccttcccctgtcattgttcggtaccatatctcctggcttctttctacatgggtcacttagtaaagagggaggccaagggagttccgatttcaggcagtgtgtggcagggttactgtcctagcaacctggctactcctcactgtgaacgtttctcataggtgtcatatggcaggatgaaaaacatatttgcctcccagtgaaagatggcacaggcttttgcccagccaggttggcaagagaacagaactcttaaccccttgctcgacaggtttgagttcaaggggttggatgctccaagcagagggccaaaccttgatttatgaagcatgctaggtcaacagccagtcagaccactcccacaaaggctgccacaaaaactcccagggaactgagaaaaatgttcagggtggcagaactctgtggcccttctgcctctttggagaagtgttcaaagtagagaatatcccccagccccacccagtgccatgggaccaaggcctttccatcctggtaatcataagttttaggggaatcagctgccctgggcctgccagggcatcacatccacagaagcagaagagaggagtcctccatagaagccatggaggagccggagattgacacgcaggtggaagtatctgcctcccacctcctaccctccccccagcctatagtctagcacaggcctggagtgcgggagcaactgctacaatgttcagttcaatcagataaattggttgggtgtctcttcagattccagaacacttggaaatggtaattctgccaaaagaggctctgtcagagatgatctgggtgacagattgcagttaaaaacatcatctattgaacctctggaagttacactgaactttcggtcagtgaaggaaatccttcggattaaaggctcttattcgggagaattccggtaccggtacccagcttgttttttc

SEQ ID NO: 452911 - DNA, 1569 bp, Homo Sapiens
aacccccagggctgaccagccacaagagtcaactggtccatctgcaggcaaggcaaatcacagggaggtcctggtttatttttagagtcacattctttctgcagtgatattatttctttccggattgcagttacctctgaacattagcaggaggtcagctttggaagagtaatccagtgtaactaaatgtttaatgtgttatctgaccctgtggcatacactcaaggtaaggcaaagtaattagacttgctagtctgtaactctcacacgtaatgtacaaagctaaattttaactcaaattccaatctgatcaaagaggaatgcatgaaacacatagggacacatataaaaacaggagatgatgatgatgggaattaatctaagcttcatgtatacaaaatgtatttaactgctaataatcaaaacgtaagaagggttccactgattacatttgttaacaaaacacaatatattcaggatttaaaaaatgtacaattaaacataagtatctgataatataataaaaaggagcacatattctttaatagcactgtaactaataaaattgcaaataatactcaactatgaagaatttaaaaaaacacttaaaaaacataaggcagtaatacaattgtctgagtatgagcctgtgggaatttgaggctggtactacccatgacccactgtccttgtatgtctctctcctccaaggaggcggtgagcttgctgggggccacagaagcacaggatggagaggaccgagaggacctgcctctagtgtgcagcagggctgggagttttcagtgactattaaacacccagccaactgcagggagccagcggagagccttattggcatggtgggtgcctagtgactcttgcagggcgagtgaccctcagctatcatgactctagctctagggcaaaggaaatactagaggtcagcaggtgacactggccctgctgcccagggatggccaggtctgtggtcctttccagtctgtcccagagccctggtgggaacagctctacacctcttaccttagaactgaaaacactgacaccttcccaaggtgagaaagtgaccaatggcaaccctgcacagttgcaaggtcactcgctgtatgggggccccgcggcttttacaaagtgttgtcatagggatatgtgcttggcagcagcttactcagaggtgctgagaggaacactcagagcccagaagcccgggagcctactgtgtgcatctgcccggcaattgccccagtggttgaaggtcagacaacctgctgtctggcaaaaccagagttattattcaccttacatgctgatgtggtaagaggagagttccctgctagagtttaagagcaaattgcagaaccaattagaaccctctctacagtagctgacttgagagtgagtcaccattttcttggagggcaggtgggaaatcatgtcattatcacatttgtctatagagatatataaggttagcagtgggagggacgtaaacagtgtctgttcctctatactgagctttcatttgtatcccgggaatccggaccggaccag

SEQ ID NO: 452912 - DNA, 905 bp, Homo Sapiens
atgttggtttccccccaggcattctggttttggagttaagttgccatcccacaaggctttttacaacccatattccctgtattttttcagaatgaccattggagttgtcatcaaaagtaaagaaccgagattggcatttagctttagttggcgcacagcacgtgtttggggacatacttcggggttcatataggtgaaaccaaggtctgcacaatcgcgtgtttggttgcatttcatgtgtgcgttgagtgggaaggagcattctccatcacagtaattggcagcatagcccttgggtgcaatgatccagtcctgccatcccaggtcttggaaactcacatacagctcatgcttcctgcaggctgttttcaattcactgctgttgtaatctgaagcactggagacccgcgccatgtcctgggactgggtagagcgattacgactctgttgtcggcgccggctggaggctgacctggtggtgcgcacgtggacctcactcactttgaagaaagccaccatgaagggctgcttgtcgtaagggccgtctctgcccaccaggcctgcggctcgggggtggacgtggactccatcccttgtcaccacgctcagctgaagccccatgttatgctgtggagtcacaacccacagattgctagtggccgtgatgtcaaattccagccagccttcttctgaggcccatactacacgggtgtccaacaaaaacaggtcagagtctctgtgctgatgctcctgtaagacttgataaatgctgataagaaaagtttggtttttaaaactccccataacacagtccttgtagatgcggaattctgcagccgtcaccacctcaccctcaggaatctgggataagttgaacatccgaagaatccggaccggtaccagcc

SEQ ID NO: 452913 - DNA, 1235 bp, Homo Sapiens
ttttttgagaaaaaagggttcccttccccaaaaaggggaaatttttgggatttttctttctttgggccttttcgggggttcaaaataaatgtactcttcctaaacatcaccactgtccaggtccattaacacagcatttgaattagcaatgacatctttgggctctgaatcaatggcatttatacaggagcctatggtgccacaagaccagggagaataatgggaaagatgatcttcttcaaattttgtaccactcacactctctgagaaatccgcacgaaagtctacactgaacagaggagaaggtggtgttggtgactgtgttgccacaggaagagttgaagagacaagaggtgctttctgagtgtgggtactgtgccccactgatctggcttttcttcttatctgctcctcgcaaactggtcttcaaatgaccacaaggttcccttggtaaaggcacagttgtccttggctcacttggtggctgacaagccaccgaataatatccatctaatgagttatatctttcctcgcaaagatgtctgatagacagatgagtgcatcacatccattggaggtaaagaattgcttctaataatgtcatctcgttggtacataggtgggcgccagatgcgcctgctgtcgtacacaggagcatacattccagaaggtactggaggaactggtccatacggctgcggaggaggaggctggtaaggagaagaattcattcgatctcgaggggaaaatgtactgtaatgatcggcatatggcatggaagcaggtgggagggaggactctggaacgttattggacctcacaaagcgaggaacacagggagccacaccagactggtaccgttggaggtggtggatagtatcctgtctgtgggtactgtgggacttcaaagggtatctgagtccttggatcttgaaaatactgaatgttttcagaatgcggaggatatactggtactctagttagaaatgggctggatttttgaggcacagaattcagctctgttccaacattagagggcccagctgaggtagctgctacattacttacaggagtcttgggtggagaaccaattttattttcagttacagaatctgcagagggcccagcagcattctgaccattagcgccaacctttcccactttcttcacggtctccagagctcttaaggtactgtcagtactacgtgagcctcgtgccgaattcgccacccagc

SEQ ID NO: 452914 - DNA, 1091 bp, Homo Sapiens
  misc_feature (78)..(78): n is a, c, g, or t
  misc_feature (1081)..(1081): n is a, c, g, or t
cattatttatctgtggatcaacgtcatcttgtgttaatatatagtaattggttaaagttagtttattaacgcagacgnatcaggtattgacataagttatcaaaatccgcgttcttacatatatagatcagatattggtgcggctgatactatccgcgtcagaggtagactaagtcgtgaaaatatctatgacgcgagtgtattacactggagtattagtctttaggcatcaggaggtcgagaatggggacgtgacctattaaatatagcgagcatgcatgtccacttctgattgtttcttatttatacgcaccaaggatgggcgaggataaaatctttaattggatggctgtatatatgaagaggggatgaggaacagtggaagcgaataggattcatcacgtgtatatattttagttagatatgcttaagttataatacgcattgaagaacagaatgaaatgcgagattcgaaacaaatatgatatatcgatactggtattgcgttattcaatagactatttacaaagtatagtaaaattgacagaatgatatagatatgggatatgtgaagcatgtgggtctttagtaataattgttgggttaatctattgtcagaatcgcgtaaagataaattaaaagttatgtgaaattataagtatgggggcgggcgaaagtaattaaagtcgtacggatgacaataatataggtgaagatactaaacgccactagaatggcgggatggctgaaaggatgagataacatagataatctaagctagaaaaacatgcgtagtgcctaaatgtggcttcccacctgaggacacaggctcaggcagctcctggttagcaactgggaacttcctttgagcttggctcctcggagctggggtagcccggcttgggtgtcttgacccagatcacccgggataggttgggcacggtgttgagtctcctcacgagcccgttctcggggacgataccgggagggggccccctcacctctgtccatggtgggtgggggcctctcatttctgcccatggtggggctggctcgcctggagcttgtaacgtgtggttcngagatccagg

SEQ ID NO: 452915 - DNA, 740 bp, Homo Sapiens
gatgcccaattttcttccggggattcctcctaggttccgcttcttgccggaaaattgtattaatttgggccctgaaggatgtggttttttacttttgacctgggggtccccatgatgggatttttcactgcaggaggaggcgtgacgtttcatctgggccctgggggggggctcgggctcctcgtcctgcatcttttcataaggaacatcatcatagactcggggttcaggccactgattctggcaggatcttgcatataggaaggagttgcgcccagcactgacgatgctggttaaggtctccacatccacgtagtcatagtgcagcgcctccggagtgactctggagcccatctccaccagcagcagcccgagccagcgacccatgtcctctgaacagcttgcctccaagatggccacctcctgccggttgcgcaggatcttgaaggcaaatgggtgtcggggcccaaagcccggggccacctcacagccttgcagggcgatggcgttcacatgggttcgcaggtccatgtgatccttgtggaaatacagagtgttgcacttcaggcggcaccagcgttcattccagccctggttcaccagcacgttcaggtagccacagcagggaacctcctcctcggtggaggacgtctgcaggtcatcggccagtgtattgttcttggagaagccagtgtatatgggtgatcttgaggcctgcagccacgctcaatcccgggaaa

SEQ ID NO: 452916 - DNA, 911 bp, Homo Sapiens
gtgtttgttaattaaggttgttcaggttcctgtctgtctaaaataaccgatgctgaaaataatttgtttattgctggggtttagggtgatgtttgtaaatctgctattaatgggggaaagttaatggctagttaatccacgtaagggtaaaattgctgtccagggtgcattgtttagtccgatttacggtggcgtgtatattggaactaaactaggcaatatcttgggggcagctaacctcccacgggggagtattagcaaatttgcatgccaccggagggatttccattagggtctgcattctccttggtaacgcccagtatcttagcaaccaggcagtccactttggtgacatgccgggccagcgtcccgggcatccacttctgccagcagctctttgactttgcgcagaaggcccacctccagtggccggttatccctggggatcagtagtgactggaaggtggccgggttgaaggaagaagtgacttccacgatggggactgtgaaggtcttgccccaagtccccttcaggggccccattttctgacagttcctttagcctctccccatagctccttgcctgctggctggaggtctcagtcgctgcccactctcggctgccacgcacgggaggctggagctggcagtagtggccagagtccgggtcactgtagctgctgagtgatggtgacggggaggccttgccaagggtgtgggaggggctggtgtgggggcccttgtctgactccccatgggtctttggggcacttccgggacacagctggggctcactggaacggcgggcgacaggggaggcaggcaatgctgtggcagaaggggctgcaggggcggcatggacacgggttacagtgctgtaggcaggggagctagggctctcggagagtggc

SEQ ID NO: 452917 - DNA, 926 bp, Homo Sapiens
ttgatcaatgagttatgtccatctttctgatgttttatgccgatctataaacccggatgttcgttgtaactatctccagggttctatggagttagaacggtatcccggataccggagcacccgaaatggggactgttattcataacccgaggtgcggggccccagggttccctgtaggggcccacccgggaaggtttgaacttgtagaaaaccggaaaaggattccgcccaaagacccatccaaggtctccgggctacttcaacggtaaccatggaatattatactccttacttcagagcatgactgggagggattcaatgacattgtatgttatgcaattttcctatgaagccaagagtttcctaaaccggtgacttttctcattaaaagaattggtggaacaaggacatggtcactggggttttctcaccaaattaaaagaatgggataaactgctaatttttcactgacaaaaagtcttatttttattgaatgagtgaatcagaactcactcactttagaggtgtaactcccaacctcatttaagttagccttgaggctacttacttgcaatttgataaatatctggttcttctcttgccagcttttctctggcaacatcagctattggtccaaaaatggttacaggcctcagaaatccagctggagagaaattcacatgaaaaacagcatattttataccttttctttcttaaacatattgacgttaaagggtattaggttagtctgtagaaaataaactaccttctcgaagaaccactctttcataagctggaaactttgtttgaacaggctgagcggacaaatcctctctgctttttcgaagatttctcttggagctgcgaagacctctgaatctccagaagtcagcacggtctccgcctgctgttttgatccagggaat

SEQ ID NO: 452918 - DNA, 1204 bp, Homo Sapiens
  misc_feature (402)..(453): n is a, c, g, or t
tattaacctaacaaacaaaaactttattttcctttaatacaaaattaaatagcaaggggttttctttgtacagtgataaattagaaatttacagtacagacatcgatgcagacatacttttgtacatccttaaaagcagggtccatttcctttgaaatttagcaattcattcagggcatgtgtagcaggaagtttgcctggtacctctttgtcaaacatctgaaagtcccccagattggcttcaaggttcctggagctgtggggtggcatgaggacccaagaaaggccacagagcatccagcccgactgctgcacagagcaggggaagtcacattttatctttttttcagattacatccgatatttcatctacctttcttacaaagagctcaaggggccatnnnnnnnnnnnnnnnnnnnnnnnnnnnnnnnnnnnnnnnnnnnnnnnnnnnncagaaacacctccatgcctcactgggagagatctagaaagcagcttacccctcccaaagcccacagccaagtcagggccccagcctattagtacaatttgaaaactttcacaacctcggagagaagatggacccaacctttgtggcgcagagtggctcttgccccctcttttcagaagctttttaggatgacagtggtcatgtactgaatattgtaggagagcaaggaggtttaaaagctttgaggacatggctcatataggaccccaaaaaggtcctctacaaattgcctggggaaattctgggaattggctgatgcaaagaagaagagaaaaaaggtacatcagaaacagaaacatgctactatcagggcaactgagcttgccaaggggaagaggcatgtcgggggatctgtaagtcatttgtctcctggtactgtcaagtgtgtaatcaccgcacaagtgcatggcaagagacagcaacagaaagctctatgtaggctagagtgaaatgaaatctattatgtggggctccagtatctgatccttggtaggagcaaaatgctctctaaggagtttccaagatctatgatctaaccctggaggaaaagtgataacccaggtcatttgccagacataatacaaacccagaagggaactctaaactcaaataaaataaaggaaccaataggattttcagagtccagtgactcgacatgattgactggaatagcaacatcccaggaattccgg

SEQ ID NO: 452919 - DNA, 949 bp, Homo Sapiens
caacccaggccctcggatggttttgaggacagagttcgtgcttcaggtacgtgatgttctcacggatggtggagcgcgggccatcccctgcctgccagtgctgttccagccactgcacaaccacctggttgttgtcccacaagtaggccttgacagccccctccgtctccacgaaccagcgacgcagcatggactggatatgcacgtgactcagctccccgctggcctgcaggatctcctgcttgacctggtcctccaggaggaggcggcgcagacgccaatacaggaaggtgcgtgcggtcttccactccaggatgtcagatatgacgcccttctccagcatccggccgggtgtgtcatggaagtcggcgaactgcaccgccacctggtggtagatggggagcagcaggtcctcgcgagcctttagccggccctccaggtcctttcggtccttgtcggagagatcaggttcccctagctgttccatgagcttcttgtaagctggatcgatccttctcatggactttatcagatctttctttcggaacttaatctccactgtcccctctggttccagaacaccacccctgctctctttgtctgcatacatttctatgcacagcgggttgatggtggcatctatgaccacccaggagcgtccccggagctccgcatagggcgggatatagatcaggatgggctgtttgtattgtctaaggccgtccacgatgtaggctccaaacttcagcacctggtcatacatgtctttcatgccaccggagaaccccctccagttggcaaagatcatcaggggcaacttctcccggttgaagtccttgatggcctgggcggttttgtaggctgagtctgggaaccacacctgtcctgcctgctgaattatcttggcctcagaatccaggttggcagggtctgcagggactgccacctc

SEQ ID NO: 452920 - DNA, 948 bp, Homo Sapiens
  misc_feature (87)..(97): n is a, c, g, or t
  misc_feature (205)..(217): n is a, c, g, or t
gcactggggggggtggcattggaaaaggggagggaaaggaggccccccgggcccccctctgaaacccttgccccctttttaaaggannnnnnnnnnnagcccgtccagggcccaggcaaagggggaaaattattgcccaggccaggagcccccggggtgcaaaaaggggttcccagcacccccgccgcggacaggggggggtttnnnnnnnnnnnnnagcagaattgggtagttaaaaatctgaaactagatttcaacaagaccaacagaagaggctatgtacagaatgggggtggattcaatcctaagagcagagtggggattattctcccctgcctgacaggaagcccggctggcaaggatctgggaaggggatcactttcccacaggtccgcagccccttcccctgcggccaagcgagaagttctgtgcccactgccttggcaagggggcgccgctcaccagctggggtggatgaggagcgtgaagacagctcgctccagtggccgcggggggcgctcgcccactcagagcatggccgccagatggcgccggctcgcccgctctccacaaggctcttccaaccccttaccctgtcccacacccttcgctgcgccagcccgggggcggcgtgagtcaggaaaaaggaacagaaaccaggaaggaggggtctcggaagggaggggcagtccttcacccccttacacagccaaaacccccaaggggcataggggcggggcaaggctttggtcccaagcccccaccccctagaaacccgcatagccgaagtgggacccacaaattagaaatacattattgcttctactccccaggagcagctggggacagggaccccacttttacaatacagctgtaaatatatacacaatatatgtatcactccttgggggatcaccccaatttggggagcctctgccccaatacctt

SEQ ID NO: 452921 - DNA, 867 bp, Homo Sapiens
  misc_feature (76)..(86): n is a, c, g, or t
taaaatacccccatttttcaaaaaggtttacaaccattaaaaaggtgtataatttaaaaccccccttccccttttnnnnnnnnnnntggccccattttaacattcaaaaaaattccagggaggccctaaatattcacccttcataagcacttgcagttcttggaagtatggcccatttctttttctgggtagaaacgaggtacggtgtaagtcttaacaccctacctaaacagtgttccaaagatctgtagtttcacatagcaattcagaaatcatagtgatttttacatagaagtttccttgtctgtgaactagttcaggcacctgtttatttgtacccagataaaactattaatttttaagtatattttaattacttatgcagagaaaactggaatattacacatttgggtcaatatgaatatctgacatacaccttaatgtgtacagtaattgtcctaaaagaatcacagttatgccaaataaaaaaacaatataatcaagtttattcctttaaaacaatgaagtgatttacataaagtagcttgatcgaagagtttcagtggaatcgtagcaaaacaattatagagctggcaccagagaccaaaccccttctttgcaaaactaaaatacgcatcgtgttatctctgggtcgtataccaaaggccttagtaagatattacagaccacactagcactacctaaggaccgggattatgtctcttgtttggggataccatatacccagtgccttgtgcggtgactggcatctggtaggcactcaataaatatttgctgaataaatgagttctgcaaaacaggtttatgaggccaacggtgggtgaatcacttgaggtcacggagttc

SEQ ID NO: 452922 - DNA, 645 bp, Homo Sapiens
gggggggccatttccccatttccttagcccaagaaatttcaaaatggattttggggtatggttatttggtaaaagggggaattcttacttatttttttccggggtaatttggctgggaattctttaaatacttttcttcatctggccagtccccaagacctcttttccctgccaggaaggggagtagaggctactttattcattatctgttgggtcgtgttggtgacaggtgtgtatacaacagaaaatctggattcattaaatgtatctacccgtcccaggtccatggtaagcagtgaagaaaaatcatttacttgatgactatgaggatatatatacaaacaaagtagtaggagcaatgaattcagccattccattaaggactctcttttcattctccattttttaagaaagttcttgcataataaggcccaagtttgttgacacacactgatctttctcttcctcatcttgtttctgggaaaatggaagcaaggaatctagaggtatggtttatccactgagctccttgtttagaagaaagttattcatattttctcctggtctctaccatgtatctagaatttgctttaactatttgacttctgtgaaaagtttctgtgaagactgctttcagagtccgct

SEQ ID NO: 452923 - DNA, 1188 bp, Homo Sapiens
caattctggttctttcgtcatcttcaaacacgtctgttccctcaaacacaaaattcatgttcataactatgatagaacatggtgcttgatatctccgaaaaccgcgcccccaaccccgaatcatcttagcgtgtgttaactcccgagggacatagttttggtgggcccaggctaaagggaaagcactcgtggaaaaaagccccgcgttcacccgccaatggaaccgtatacggtttcctttcaggggccacatcagcaggcagggcatcccatccccaaactcaggcactagttatggaaacgtgaggtggcccgggcccgctgctgcatgtcgtgtcttcaggcaggaggaggcagacccggatcctcgcatgggggagcttgccctgcatcggagcccgcttcgacgagtaggcactgctgtggtggttcctccatcacccctggctctaccccgtcccgtggctgctgtagtctaagactcctttcttgaagaatggtgaaactcacaaatggtatgtttcgagagagtcagtcccactttgttgatgtggaggggagatgttgcggactggagcatcacgctgaaaaagtccctgaggtatttctctaagtgacttcgtctctcagcaatcacacgttcatcctgtatttccaaatagtttctttggaggaaattcaagggcagcaagcttgacctcaaactcgaagtgtgcatcctttccttgcccgcagaggacgtagcgtgggatactaattttaattgggtccttcaggtcatctggatttgcgcccaaagagcgagaaaccatccgctcatattttagtttacgttgaatggtgccattgtgaagtttctcattatccttcatcgtgtctgcagatgtactgcagccttcactaatcacacgatgcaaatcctgaaggcgtctttggacttcttcttcaatgtaagcattgatcctggcatccatgaggggaaccaggtgtaatttttcagcactgactggcaagctggaagaagccaccttcccttccagggtcccatgatgatctttttgaacaccatcgacctcataaatcttctgtttcagctgctggatttcatattctaacctctcctggtccttctccagggcttcctcgctctcgacgaattcgagctcgaccgatttgttggcgccactt

SEQ ID NO: 452924 - DNA, 760 bp, Homo Sapiens
ataaggcgttcttgtgcaggatgggcagttccagggacctgagatggaattcccggtcactggagaggcgttaggtccaggtccctcagcaggttgaaggtcaatatatcaagtccggtaataaagaagcctgtcggtatacgagctgtgtctgttcctccagcagaaaccatcgtcgatatttgcatgcagtttttgaagtcactttcttttaaagctggaaagaatcttcaccccaggcccaccctcatcttaatccactatttagagtcctacttgaatgatatcgccagcaactttcaactttggatccagatttctttatttgtatccaccaggaagagaggtaccacgtttctgagttcttttatgagcactcgctatgtaatttgcaaggcccagtgcgaagtgaaaacgcaggccccttgttccaaaattgttaagaatttcaagacatcaacagcagagcattaaatcaggcttagggcccttctgaactcctgggctctgggcatacccatgacaccagacctggcagtcttggttggtgctgcattgattttgttgtattaatttaattggcactgccatctcttttgcccctgtatcgcagtgtttcctgtggtgaggacccccaataataaaatactgtgacctccatcagtttaaagagaatgccaaattacactgcagccaatttttacagcatacattttttagactttccacacccccaattcacacgggaatcttttctacc

SEQ ID NO: 452925 - DNA, 641 bp, Homo Sapiens
  misc_feature (359)..(369): n is a, c, g, or t
  misc_feature (569)..(569): n is a, c, g, or t
  misc_feature (577)..(577): n is a, c, g, or t
  misc_feature (591)..(591): n is a, c, g, or t
  misc_feature (628)..(628): n is a, c, g, or t
agtttttaaaatcacggtctccaggtaccaataaatgctacagtttgccttatgatgttaacataaaacacttagtagaaggacaatatttccatgaaaataatgtttttcaatattaagaagttactactcaaattttcacagtaagccatttagggtatgtttggctatttttataaggacatgagagattatgtcataattttgttgtggaagtctcactcttggctaacttaaaagcattgtggatagtagcagttactagttccaggttgtcatatttacaggaaaatatgtatatggtgaaaggccaccgtgtttaattactataatgatgtagaaaagattcccgtgtgaannnnnnnnnnngaaagtctaaaaaatgtatgctgtaaaaatttgctgcagtgtaattttgcattctctttaaactgattgaggtcacagtattttattatttggggtcctcaccacaggaaacactgcgatacaggggcaaaagagatgggcagtgccaatttaaattaatacaacaaaatcaatgcagcacccacccagactgccaggtntggtgtcntggggtattgcccngagcccgggggtttcaggaaggggccctaaggcctgntttttaattgttc

SEQ ID NO: 452926 - DNA, 809 bp, Homo Sapiens
  misc_feature (282)..(304): n is a, c, g, or t
ctccccctccccccgggggaaaaaacccccattttaaagggggttttccctcccccggaattattaaagggggccttttttaaaaaagggcggccaaaccctttttgaaaaaagacccgtttaaaaaaaatttacttggcaaaacctttttagttgggcggccacccccagagttcaggttttttcccatgggaggcatcaattttttgaagcccgaagttcaatggtggggaaacttcagaaggataaatagcccggatggccctcgtaatttgttcgggnnnnnnnnnnnnnnnnnnnnnnnctaactgttttgttccagaaatcagtatgtaataaagttcgattttaatcaaggcacccccaggtaacgcagagaaacaaacacatacagcaaatcactcacctgtccaaagcctgaccaacttgaaaagaggttgcctggatacacaagcaggacaaaggcagatccaaggggaggactggatttaggtgggatgttcattagtctcagggtcactcacctccactggctctgccccaacaaccattcctaccccagccatttggagacccaagcaggcgtcctcctaaacagcccgtggttggagggtctcttatttttgtaagaaaagagccttaagaacaaccaaatgttactgtactgtgcaaacactcttccttgctgttcactcacttttctttttcctaaaaggcgtggggttgacagagggatcccagggaaaagagacaggctaggttttaaaattccacttgaggccgtttggattctggtccccagatccgga

SEQ ID NO: 452927 - DNA, 908 bp, Homo Sapiens
  misc_feature (59)..(91): n is a, c, g, or t
  misc_feature (94)..(94): n is a, c, g, or t
  misc_feature (742)..(742): n is a, c, g, or t
  misc_feature (784)..(784): n is a, c, g, or t
cgcaccactgcactcccagcacccccacccgggcgaacgggcgccaactcttgtccccnnnnnnnnnnnnnnnnnnnnnnnnnnnnnnnnntantgccatctttaagggtcatctgaaatctctaaagacttggttaggaatgagtgccagaaacacatagcagccattcactagaatgtcttaaactgaaaaacttcatgtaagtttgtctttagcatgaacacaagaccagttatttaagaacacattgccatcaagaagcccaggaagaaatgggcatgcagggttaacctatgcactggatttagaggagcaatcaagcatagacatttgtaattctcagatgttctctattttattgagtggttgcttcctgggtgagagacctgacctgagtctgttgagactggagagaccaggtaccaagcaccgactctggtgggaacctggcttcctgataacatcatctatttcacctaaatgtgaactgctttcttttcttcagctcaatagcttaacatctaattcatgtttgctccctttgctggacaatccccattccaaataagacaggtttagtggctcggctggaaggccccagttccttttgctaactcctaggtacaggaaaataaaagtggtaactgagtcttacagacaccaagtctaggatgtgcaaataagcatacttgagctgttggtagtcagggcatattattttctactactcctggggaattngccatgttcttaaccaccccttttcaaaaccagcaggtagcntttgggggagtttgccttctatcccagtttggctatgcacatcttggggaactgtttttgatagcaatctatctttcagcttatctagattaaacctaccgccatgttgacctactttcatccc

SEQ ID NO: 452928 - DNA, 979 bp, Homo Sapiens
  misc_feature (43)..(79): n is a, c, g, or t
  misc_feature (845)..(845): n is a, c, g, or t
  misc_feature (926)..(926): n is a, c, g, or t
aggtgtagtctatagcgacctggattcaccgcggtggcggcgnnnnnnnnnnnnnnnnnnnnnnnnnnnnnnnnnnnnnatcaggccaaatcggccgagctcgaattcgtcgagagcggggctcgtgcggggccccgggcgtcgcgatgaacatcgtggtggagttcttcgtggtcactttcaaagtgctctgggcgttcgtgctggccgcggcgcgctggctggtgcggcccaaggagaagagcgtggcgggccaggtgtgcctcatcaccggcgccggcagcggcctgggccgcctcttcgcgctggagttcgcccggcgtcgggcgctgctggtgctgtgggacatcaacacgcaaagcaacgaggagacggctggcatggtgcgccacatctaccgcgacctggaggcggccgacgccgctgcgctgcaagctgggaatggtgaggaagaaattctgccccactgtaacttgcaggtttttacctacacctgtgacgtggggaagagggagaacgtctacctgacggctgaaagagtccgcaaggaggtgtggcgaagtctcagtcctggtcaataatgctggtgtggtctctgggcatcaccttctggaatgtcctgatgagctcattgagagaaccatgatggtcaattgccatgcacacttctggaccactaaggctttttcttcctacgatgctggagattaatcatggtcatattgtgacagttgcaagttccttgggattgttcagtactgccggagttgaggattactgtgccagtaaatttggagttgtgggttttcatgaatccctgagccatgaactaaaggctgctgaanaggatggaattaaaacaacccttggtttgccccttatctttgtagacactgggcatgtttcagagggcttgccgaaatcanggaaaagaaaattggagcctttttttctgccacccctcttgaagccctggatt

SEQ ID NO: 452929 - DNA, 1019 bp, Homo Sapiens
  misc_feature (77)..(93): n is a, c, g, or t
ggagaccaaggcttcatgtatctgtgattgcaccactgcactccagcctgcatgacagagcagggccgtgtttcccnnnnnnnnnnnnnnnnnggaatctttttacctgcaaattgtaaggtactcgagggcagacattggcattttcagatacatgtgaccctgtgtgtttgtgtgaatttctgtgcacacgtacatccccctcccacgccttgacataatgcatacagataaatgttgaggttcagtggcagctgttttgtttcccacagacattttacttagattattctggaaaacattctgaagagaatcacaagcattgatcataaagttagaagatgtgatgtttaagacaacatggacataggaattgaaaattttctttcccattgtctctcgagtgtttttgagggccagtgcttcttactcttgcttgagtatacctggacaacaaaatctaatttctaaaatttctgccccagaagaattctgatggcacctgggtgtgcctgacacgccccctagaacccttgccaaataactcaactgaccaaactctaaatttgtgggtaacccttggccctaaaccaaaaatgtacccaaagcactatatctaagcgattgacacctcttcactcctatggaaaaagggagtcatgttccctaccggtaaaatgcgtggaatacccatacaattttttctgccaaaggggtcccaaaatctaatggtcctcatacaaagcacaactcatatctggtagaaaaaagaaggggtacagaataaccaatcgggcaggcggcgggtccacacgtaaacacaaacttatccaccgtcatggtcaacacgtgtggggttcttatacgaataacctgtcgcccagtatggaaaatgagacgcccccaacctgtggttattgaaaaagccccacaataatgcgcattttcgctgatcttgttctaaccccactgtgtgaagcctcacactacccgcctacataaactcactatgccctata

SEQ ID NO: 452930 - DNA, 1054 bp, Homo Sapiens
aaagcggcagcccagaatctcgtgttaatgcgatccatttcttggtacacaaactgccagagaagaataaagagatgttggatattttggtgaaacacttaacaaatgtttcaaatcactccaagcagaacctgatgactgtggcaaacttaggagtggtgtttggaccaactctgatgaggccacaggaagaaactgtcgctgccctcatggacttgaagtttcagaatattgttgtggaaatcttaattgaaaaccatgaaaagatttttcggacgccgcccgatactacattccctgagcccacctgcctgtcagcatcacccccaaatgcgccaccaaggcagtcgaagagacaaggccagagaaccaagaggcccgtggccgtctacaatctttgtctggagctggaagatggtgacaatccttacccttccaaggaggacacccctaccagcagtctggactcactttcctccccgtctcccgtgactacagctgtccctgggcctcctggaccagacaaaaaccaccttctggcagatggagggagctttggagactgggcatccactatcccaggccagacccgatcgtctatggtccagtggcttaacccacagtctccaaccacaacaagctccaactcagctgtgacacctctttcacccgggtcgtcccctttccccttttctcctcctgctactgtagcggacaagccacctgaaagcatccgcagtcggaaggctcgagccgtgtatccgtgtgaagcagaacacagctcggaattatcttttgaaataggagcaattttttgaggatgtacaaacctccagggaacctggctggctagaagggactctgaacggcaagagggggctgattccacagaactacgtcaagctgctgtagctcctggcctcagagcccctgctgaccctggcacccaggggacctgcctgggggcagagagctgtcttcctcctccgaggctctgggctgcacccacagggtacctccacacttggggagttaccatcatcacagtcagccc

SEQ ID NO: 452931 - DNA, 534 bp, Homo Sapiens
  misc_feature (285)..(285): n is a, c, g, or t
  misc_feature (447)..(447): n is a, c, g, or t
  misc_feature (456)..(456): n is a, c, g, or t
  misc_feature (485)..(485): n is a, c, g, or t
  misc_feature (502)..(502): n is a, c, g, or t
aaatgtttcaaatcactccaagcagaacctgatgactgtggcaaacttaggagtggtgtttggaccaactctgatgaggccacaggaagaaactgtcgctgccctcatggacttgaagtttcagaatattgttgtggaaatcttaattgaaaaccatgaaaagatttttcggacgccgcccgatactacattccctgagcccacctgcctgtcagcatcacccccaaatgcgccaccaaggcagtcgaagagacaaggccagagaaccaagaggcccgtggcttncttacaatctttgtctgggagctgggaagatggtgacaatccttacccttccaagggagggacacccctaccaggcagtctgggattcattttcctccccgttttcccgtggattacagctgttcctgggggcctcctgggaccagaacaaaaaccaccttnttgggcagnttggtagggagttttgggagatttgggcntccattattcccagggncagacccgttcgtttatggttccagtggttaa

SEQ ID NO: 452932 - DNA, 418 bp, Homo Sapiens
agcacagtgcctggcacaaaagagttgctcaataaataaatcaggatgaatagataaatacacggataggcactttgaactacagatgagcttaaatactttgtgtttttcttagtcaaacatgtgcaattaagcatgtgataaatgttatgatgaccacacctgtgtcttgcctgacgttctttgcaatcactaaatgatgtcaattgtgcctgttttgacagttctattttcaacctaatgatctgtttattttaacttctggctgttggctttgtttgggttttttagcctgacaaagtggtagatattggtatttgctcttttgtttaaatgtcacgaactttaaaaatgcctttgcttttggtaagaaaccctagttaggtcaccctagcggtcaggatgatttgggttctgg

SEQ ID NO: 452933 - DNA, 842 bp, Homo Sapiens
  misc_feature (11)..(11): n is a, c, g, or t
  misc_feature (421)..(421): n is a, c, g, or t
ttttttttatnttaattggaatcagacatttaatggcataaaaacattgcatatatggctttgctgttccgaatgtcatgaacttaaaatccaaatatgacataagcagttttaagacttattttggccagcctccccaatcccaaaggagatttaaaagtaataatgtaaaaaagttaaggtcaaggtgttttaaaatcaacatctcagctaatgactaaccctttgtttcctggggacttctgctctactgtgaaaactgctgagcttaacccgctgttgaacaactggttagttattagttccctgggtgattgtccctgaagttaagccatgctctggggacacatgaggcactttaattgggggtagttactttttccgggttggggtacaatgtttgggctctcaaaagcaaggntaaacagtttacagtcaaaaggaatgctctgtgattgtgtgcctttgggatcaagggttgagatcttagagtattctcataaacatctgtaccaggtgctcaaagatgtttgagggttgtcaagcaagctgttcaacttctgcattttctgtggatatgggcacaatgacccactcagatttttctcctagtgtcctgaatgacagctcatctacacagagtgaaactccagatatgtgacaagcagcatgggacagatgctgacaatcagaacagatgctggatgtaaacaactggtaaggctgcactggtgcatgctggcagaatcacctgctatgcatccagggagcaaatgcgtctgcatgctcagcatgacaccagcttacctccctgtgcaaatccccatcccgggaattccgga

SEQ ID NO: 452934 - DNA, 901 bp, Homo Sapiens
ctttgagttttggaccccccttattctggctctttttatgctattgggatccctagcttcggcattccggatggggtaatatgttccgagcggcgtactttccttggtaccttcataaagacccgtatggtattaagaaatggtaggaaagagtttgtatgacacaccgataacttgcccggaagggctccagattaaagattcacgtatttgaggttgggaaaggggcggttctagagtaagggaggtgtagcgcttatggtcaggaggaaccatttataaaatttagtgaagcttaggggaatattaaggatgtcttggtcaccaatcaacctctatattccatgaatttggctttcaaaatatacctctcaaatttatccttgtttttcactccatcctcactgttattactcaagttctggccaccattatccaccacctgacttcttgcaacagccttcttctcattgttgcttgaacgtatagctattatataccttgcaagtatacctgcaccccaccaaattattatttataaagtcaccataataatatttctagcacgcaaatcaatttatgctcagccttcttaaaagataatcctttgacttcagggtagagcccaaatgccttttccaggcttcctgagtccttcatcaacaggtcctgatcacctctccagtctatactttgccaatactgctccaaattccaaacattacgttctaattatttgaaactcctttaattttccggaatacggtatagtcttctgaatataggcaatactcatactgttttccttttcttaattttccttgtctactggatttgcctagcttgattttctttatctaccagatcagaaatgaaatattacttaattatcccgggaatt

SEQ ID NO: 452935 - DNA, 1116 bp, Homo Sapiens
gaaaatattcctcttttaccgcaataaacaaccgtttatttctatattaggagtcccctcttttccccagttatggggtaaagcgtaagaaaaagaaacgaaccgtcaaaaatataaaattacaagggtgagtcaagttgaaagattctttttgaataatttcaaaaagaaacggtgacccaggtttaacggggataatacaaaaacaagtaggaataccataaaggttcctgtgtcagattgacccgggcaacttaattaccattctttaccaccaagttctgttaattggactgaacttttaatgatcccaggaccctggggatgtgtgattatatctgactatgtagatagtgttttcagagtgagaaggggccttggagattgcaaagtttaattctctcatttaaaaagtaaggaaactcaggcccggagagaaatgacctgcccaaagaagaggagtgggtcagacagagctggggacagaaatcaggagtctggactgttttacactcacaggggcctcctttgttcatttgcctgaaatgtggaacacgggagagaagaatgtggtggagggttatacttgactttgactgtaaactttcctcccaactcacctgttaggcaggactttggatgtgctcttgtcactccagctgtattccagtgagtatcctccatctgtcactttcaccagttacctcatttgctgtcacttcctcagtgttttcctacatctcccccttctttccctcagttcagaagggcatatatctttttttaagaccagtaaacccaaaaacttggctggtagtgggtgttcgatggaacctaagtgattctctacctgatatgctcagttctaagtttaactctcatctgttttcatgctgacctttaagccaaagcaaaaagccacgaaaagaaacataattactttgtagtcatttgtaaaacttgttttagttgctgttatttatctctttttcctttaaatatgtgatttggagaatactcaaattacatcttagagccagtctttttcacaaggaatgtatctccaattttataatcaaataatagcagcttagcattcctgtgaagtaggggatt

SEQ ID NO: 452936 - DNA, 1037 bp, Homo Sapiens
  misc_feature (643)..(643): n is a, c, g, or t
  misc_feature (669)..(669): n is a, c, g, or t
  misc_feature (714)..(715): n is a, c, g, or t
  misc_feature (717)..(717): n is a, c, g, or t
  misc_feature (722)..(723): n is a, c, g, or t
  misc_feature (730)..(730): n is a, c, g, or t
  misc_feature (750)..(750): n is a, c, g, or t
  misc_feature (827)..(854): n is a, c, g, or t
ggacgggacaacgctatgaacacggaagaactttgaaatcatatttaggtttaaccaaccagagcagaagatacaacagaaaggagcctgctgagtttaatggagatggagcttttctccatgataatcatgaacaaatgcctacggaaattgaattccctgaaagtagaaaacccatcagcaccaagtcacaattccttaaacatcaggaaacacacaacatagagaaagcccatgaatgcactgactgtgggaaagctttcctcaagaagtctcagctcactgagcataagagaattcatacaggagagaaaccccacgtgtgtagcttgtgtgggaaagccttctacaagaggtacaggctcactgaacacgagagagctcacagaggagagaaaccatacgggtgcagtgaatgtgggaaagccttccccaggaaatctgagcttactgaacatcaaaggattcacacgggaattaagccccatcaatgcagcgaatgtgggagagctttctccagaaaatcaactactcgttgtacatcagcgaactcatacaggagagaagcctcatacatgcagtgaatgtggaaaaggcttcattcagaagggcaatctcaacatacatcaacgaactcacactnggagaagaaaaccttatgggatgcanttgactgtggcaagggccttcagcgcagaagtcttgcccttgtanncncttcnngagaatntccagacagggaaagactcnccttttgaatgttcctgaaatgtgggggccaaaccctgttccacggaaattccggggactccatttagaacattccnnnnnnnnnnnnnnnnnnnnnnnnnnnncaccctttaaaaattggcccgttggacctgtgtggggaaaaaagccccttttccttttataaaaaaagaacaaaaggggcccactgttggggaaacctccaccgagaaaacctctccccccgggggggaagaaaaagagaacaccccttatgggggcctttgtgaaaagaaaatgtgggtgag

SEQ ID NO: 452937 - DNA, 927 bp, Homo Sapiens
atcccccaggccaattcatggtgcatgtgaaatctggaccaagcaccctcttttggggcgataccaaagcccactcattcttggtgtgcctatcacgttttcccaaacacataggattcccatctcaggagcagggcccagtgtttagctagattaaacttcactggtgatcttgttgatgcatataaagtaatctggcatatatggttaaattcaagatgttatggcagaagtgactttgttttgctcacaaaagcattgcccaaaaggtaaattatggatttactgcttccttcttaggtagacatgggaatgaaaaatttctaggtcataattcaaactgtaagattttcctcgcaccataccaaactcatagaaagcttttttattcctctcaataaaataattgcacattgctgataacagaaacattacataaatgcatataatgcaaaaaaacctgaaaacactcatttgcttttctttttttctccaacaccagttgctaaatcttatcaatctctattatggatgaccaaagaaaatctctctccctgaaatcaaacacacaataagttatctttctctctatagctgttgaattacaataaaaagcacattcgatccattagcagttggctaaagggagtcaattcgcttcatctgtacaataataaataaggttgggtcaaatgcataggtagcttggactggctagtgaagaaacacagaagaattaataaactcgattatactatctaaaactaatcaaagaacatagttttggtctcatgttagttaaaaaccctgtctttcagattgtaaaagtttaatgaattacattttaagagtatcctacacataacaaaatatgaattccctgaagctgtaacgatctagatcccggagaattccggaccgtaccag

SEQ ID NO: 452938 - DNA, 1026 bp, Homo Sapiens
ttccattttggcgctattacaaatagtgcaactatgaatgtactgcatgttaccatcttacttgagcctttaatggacttatttcttcaaatccttccaaaaattattataagcattgaaattatagtttcaagccaactgtggatacccttaccctttcctcctttatcacaaccaccgttaccagtatacttatatttccctaaaatacatttaaaacttacctaagtgacatttgtagttggagtaataggagcttccagctctaataaaacagctgtctctaacttattttatttccatcatgtcagagcaggtgaagagccagaagtgaagagtgactagtacaaattataaaaagccactagactcttcactgttagctttttaaaacattaggctcccatccctatggaggaacaactctccagtgcctggatcccctctgtctacaaatataagattttctgggcctaaaggatagatcaaagtcaaaaatagcaatgcctccctatccctcacacatccagacatcatgaattttacatggtactcttgttgagttctgtagagccttctgatgtctctaaagcactaccgattctttggagttgtcacatcagataagacatatctctaattccatccataaatccagttctactatggctgagttctggtcaaagaaagaaagtttagaagctgagacacaaaggggttgggagctgatgaaactcacaaatgatggtaggaagaagctctcgacaatacccgtttggcaaggagtctgcctccatgctgcagtggttcgagtggattgtaagtgcaagatggaaaggattgtaggtgcaagctgttccagagaaaagagtcctttggttccaacccttatttctgccaactcctgtacaagggtgaacccttggggttattttggcaaataatttcccttttggggcccttctgggcctttcttctacacccctaaagaaaagaggggaggaaatttaggcaatttttattttt

SEQ ID NO: 452939 - DNA, 1860 bp, Homo Sapiens
  misc_feature (75)..(102): n is a, c, g, or t
  misc_feature (794)..(826): n is a, c, g, or t
ggtgctttgacagggggcatagccccttgcattacccagggaggatgggccccgctgggtggttttccaagaaannnnnnnnnnnnnnnnnnnnnnnnnnnnaagccacaccttctttttgccaatatttgaattccgtaattgtgaggaatgcattttttagattttcaaaatattaccatttcgaagactaggggtgggggatgaactgtggctatacataaagtctatatttcatcaccattttggttccccccagcatcaaaaagagtgattatgcaggtgaaggcagtaatgatgcaaatggaaatgtggctgtgagcaagcagctggctctacaaagcacacaggcctggactcagcctgtgaagcggcgggtactcagaaagtgacactagtattttaaataaacacccaagagcttttgcatctgattgttcccttcaaagtagcctgctgggagccttgatcatcagaggatgttcatcagagggggaacagatcatcctagatcacagaggagttcagtgctaagaatgtgtcaaaaccttctgtctggaccttcagagtggtgacaggagttactcattcgtggcaaatatttatccgcagaggcagaatctgaattttggaaacggtcaaatatcttttggccacaagtttggttaaagagatgaaaaatcaagttaggcaattactcttatagtaacaaccaagccatagaatcagagcaggctgcggctctggtgtcccttaaaaactggctctgagagtgaagccccaaaaggatgctnnnnnnnnnnnnnnnnnnnnnnnnnnnnnnnnngtgcgccttggcagcatcatcaggatgaggctgagctccccaggggaccactttgaaagtggcaacgctcgcctgggcagtgcgggttctgtttatttgttagagaaacccgccggcccggggcgcggcggctggtgcggcgactcagctcttcttgcgcagctggctgtaatgcgtgcggcccaggatgggctccatgacgctgggccggaagaagctgtcgctgaccctgcgctttggcttctcgcggggcacggccgggaagcccgggcgcggcgctgcgggcgtggcgacttcgtcctccaggcccgggcccggggggcgcgccggggttctgcgcgctcgcgcaggctgcggcggggctgtgcgaagacgccggggcgggttccgggcgggcggatggcgccccagacgctctgcgctccgcctcccggcgctcgacctcggctggtgggttgtcgatgtcccggaattcgctctcgggctccatcagcgacagcctgggttgcggcacgtaatgcaccactgtgtccaccacgttgtcagtaacgcccttcagggcatctgatagggacatggccctccccttggttgaggagacagcaggggctggtgtgaggtgcagcaccctccctgccatgcccagcacagctgcaggtgcccatgtcacagccgagatggtggtctggagggtcttctgcagggtatgtgccacaccacccaggaggcctcgagggcctggcagggctgctacctcactgaacttgttctcctcagtctccaattcttcctcctcctccgtgtcctctccctccgtgtctgtctggtcctcatgatcctcctcctgggcggctgcgaggctgtgcagccagggtacccgcacttcgctcctccgccgggacaccgcctgcatggccactgaggcaccccactgggccaggctgctcaggggcaccacgcctgggatccacatggccacggtgtggccctgctccagggcccgggccatggtctgcacggtgtatcgatcccga

SEQ ID NO: 452940 - DNA, 1152 bp, Homo Sapiens
attaatattttaagaatcacaatgttactaccattattcgtctgaataaaaggatgtatgatgccaaacgctttacggatgctggcttcgatcaccatgatcttttctttgcggatggcagcacccctactgatgccattgtcaaagaattcctagatatctgtgaaaatgctgagggtgccattgcagtacattgcaaagctggccttggtcgcacgggcactctgatagcctgctacatcatgaagcattacaggatgacagcagccgagaccattgcgtgggtcaggatctgcagacctggctcggtgattgggcctcagcagcagtttttggtgatgaagcaaaccaacctctggctggaaggggactattttcgtcagaagttaaaggggcaggagaatggacaacacagagcagccttctccaaacttctctctggcgttgatgacatttccataaatggggtcgagaatcaagatcagcaagaacccgaaccgtacagtgatgatgacgaaatcaatgggagtgacacaaggtgatagacttcgggccttgaaaagcagaagacaatccaaaacaaacgctattcctctcacatgtcccctagctgtgctgacctctgcactgtgtagtgttgtcatctggtggattgtttgtgactacattcttcccatcctgctattctgtctcgatggtttcagaacacagtagccatcaggaccccctgacagatagctgcttctctccatttcaaggactaaaacagtcttgcgttaagtaaaaacctgtgaccagagctgaaggaagactctaggactgaaaactgcaacagaaattagcacaatttgaaaacaaaacaaaattgcaaaagccttagttgctttttccacctaagaagttgatcaatggagaaaatgtccactggagtttgaataatgaactttgagtttgggtgcaagcaaatgactcagagaagggtccagctctcaagctgaatgacaaacatgctgttgtaaatttagtctcaggtgtaaatacccaagccctctggtacccagggagctggctggtctgtggtgcatgtgtgtccctgtgaaggcaatccttgtagttgctggccttcagaagaattgatgatctgaatggaag

SEQ ID NO: 452941 - DNA, 728 bp, Homo Sapiens
cccccaacagggcccccgggaaaccctttgtggtaacgtttccttcaggcgtggtcccttggtaaaggtccagaatggccccataaatttaaatttatcacaaggagtgggcaatttttggcctgggacagaatcaaacattaaaaatcctttatttgaaattcaaatttaattgggcatcctgtatttgtgtttgcttcatctggcagccctactatggacacttctctaaattccagactcaagtccagtccacaggttgtccacccttctcagaagtccagggataagggatatggaccaatctctaaagaaaaacctccatttcaggaggagttatgctacaggtgcctgtgactccaggtctagatgctggctttcaccacttgacagggattccctgcaatgggagaggttcagtggcctggggctgactcatatctgagaaaccctgagtgtgggtttcagggcctagctaggctgtggccatgaggtgatcctgcactcttaagagttcaccccagcataggatgcataagtgtttcctgaggacaagatttgggacatgcaagaggctggcactgggccaagaagactctgagtctcagtggagtgactgctagaaaccagatttggggaggaggtggaggaggaggaccagaagctggaggaaaacctattgcttgcattgctggagttacgatccaatattccagagggaggcctca

SEQ ID NO: 452942 - DNA, 649 bp, Homo Sapiens
  misc_feature (575)..(575): n is a, c, g, or t
  misc_feature (591)..(591): n is a, c, g, or t
  misc_feature (607)..(607): n is a, c, g, or t
  misc_feature (612)..(612): n is a, c, g, or t
  misc_feature (619)..(619): n is a, c, g, or t
ttttttgagggaaagttagtgaatcaggtcaacttacttagagaatgtgttcatttactttaacccagaatacagtcttgtttcttctatttgtatgtttcctaaacctaattcaataacatatgctttctgttgtgtaatatatctggtttaggtatttataatgtgtttaaaatttgggcaaaggaaatgtttttcttttaaaaagtacttacattgaaaattaagatgtctggattactatgtaaattctagagagtagcagacctctcatctgaagtcttagtgaatctcttttgacatagatagcaatagaagtatctttcttctttcccctttctttttctaaacaagagaagaaaagcgtaatagaggggagaacacataatgcccactaagggtagtgcattaaggaaaaacagtcttggcaggtatataggaatagtggtttccagactggttgatgaccgtaatcaccaagaacagtggttctcagtcttgggctgcacatttgcagtggatctgggaactttaaatactaatttcttaaaaggggtgcagtgggcttcataccngttaattccccggcantttgcagttccgggtnggggngattcanttgagcccgggggttttgaggaccgcccgg

SEQ ID NO: 452943 - DNA, 758 bp, Homo Sapiens
gatttgcctattttgtcatgaagcatcaaagttacccagaaccttaaacacatcaagtacaaatgcaacatatacaagcaaagcgaattcaataggattcctagcaaattattaaactccacggtggtagggcagggagtagttgcagagggagggagtgagatggtgatagagatggagatagggagatagatagaagatgagatatgcaaaccagttttttacgtttccatttttcagagtctgatcccaccagcaaaacaggtcctgccccagttggccagaggcttcttgattatgaggactatctgagcagagctgcagaaactatagctctagtcctcataaaaatgagaggcagtttattattaaaatccaaacatgaaaatacttcaaaccatttcgttagcagcatagtcccaaatgcaacattccctttatcaatcaagtctaaaccatgtggcttcaatgcatctgtcctgctaaatctgctaaaactcttaaaagagcagtgcaaaagagaaaagacatctttccttttaaatggcagacaatccttataagacattctctagggttctattctgaaggctattcaatttgatttggggcactttttaaacagccatttggcgctttccgtttggagttcttaggcacagtgtgacagagtcagcttggtgagcccttccccatgcattcggtacagcagctgaaaagtcagcaggcagactggtgggactcctgccacttcagat

SEQ ID NO: 452944 - DNA, 889 bp, Homo Sapiens
  misc_feature (423)..(536): n is a, c, g, or t
  misc_feature (834)..(834): n is a, c, g, or t
actgtatttagcctgaagactttcctaaagtgttttgttctaaaaataacctgccattttctatagattttaattttttatatcttcaagggttctattttggtcacaaggaaagaatgtggcttctaatagtgctaagaattaaaagatgcttttatagagacttagagctattttgaaaagctttggggcttcccagccactgatcacaattagactaagcccatggaatttctgggagtgttgtgcagtggattcggttctagatccatcttacatttgtttagtgtttcccaatttttgggagaaggggtgcacagcaaatttgaggagacttttttgaatctcacacatgttattttcctcaagattcttttaagcctcttctgaatgacttgtctgagatagtgaagacccacattnnnnnnnnnnnnnnnnnnnnnnnnnnnnnnnnnnnnnnnnnnnnnnnnnnnnnnnnnnnnnnnnnnnnnnnnnnnnnnnnnnnnnnnnnnnnnnnnnnnnnnnnnnnnnnnnnntctgggtgtttctaatttgcagacagattgagaaccactatgatacgtcatccctttactgagaattatggcgagaatcactgccatttgaattactcaggagtgactgattcctcagttgtgtaggagaagcagaaaaaataagaataaaaagaattgagagatactgatatcaaactcccatttgaaatacaagggcccttctgattcaaggcccagttggggagcttggaccatgttgtgaatggcctagcactcgccagtctgggtggaaattggtggtcttagttgctggaancaggctgagtgtcccccgcgggggttttgcatctgttcccccagaaactttttct

SEQ ID NO: 452945 - DNA, 1120 bp, Homo Sapiens
actgcatggaaactaggttgagagtttgtgggatgtactcaagtttcctttttagatacatccatggctttactgctttttttcctggactgggactgaaagaactgagtcccagttcagtcactcggtttctttgatgacattgtctttagatcagtgttcttaacctcaactctagttaacacttccctctcatgaggttaaattagatgcttagtttccaaacacatttgcacatttgctaaccctgtccatgttggtttatttcctaccctcataccacattccctagccattcgcaagatccatgtgtgagggatgggattcaattcaattccttgtccatgtgctaagatgaatagaacacaaggaaataaaaatctcatagggaatataagaacagataaaaatgtgttgctctatcataagccaaagggaggcaaattgtataaaaggcagttaaaaatgtctaaagcttatctaagtagaggaatggcatgggtcttgaggggttggttggctatcgtgataaaattagaaaaaagaaatgtatacatgaaaaactaaagatggaaatatttaaattaacataataaaagaaacaaacgggacttactaaaaaagaagccgtcagaaactaaaagtgtctgaaagttgtacgaaacataaaagattagaataaattaagtataggagtcaagtgaaaattaaataaagagaatccgataacatgtaggaagagaacggatagtagaggagaataaagtgaaaagcagtctgatatccgcattacaatgtttggcccgccagcccgaaattacaatacgaggtcattgagccttcgcgacagcaaggaaaaaagagtaagaagaattaaggaaaaatcgaagacagatggggggtgggggacggcatgttgatcttgcttcactatattgaacaattgtgcactaaatgttatggtggatagcaggacgtatttaagtaaacagtgtggaagagaaaggaaacaaagagtaatatatgataagaacgcgcagacttactacaaaaaatagaaaagtctcaggtgaaagcgaacaactcatggcgctgtctgaatgacaactacataaactaa

SEQ ID NO: 452946 - DNA, 1355 bp, Homo Sapiens
  misc_feature (425)..(449): n is a, c, g, or t
  misc_feature (1110)..(1110): n is a, c, g, or t
  misc_feature (1207)..(1207): n is a, c, g, or t
gtgcccctcttagatgatgtcgtggtttttaagatcgagcaaggagcttctcttcctagattggatcccagcccctttgtgggggtctgacttgcatagtcccagccattatgtgatatttcacgttattgatgatagtgaaccgtgggtccgaagctgactcaacggaggcagggaacaaagtctctgtggtctgttgggtcatacttcctggttccactgagtggcccaacactgggactgggttggtgtcccctctgctgacaggaccctactcactatggagcaaagtggttgattttgaaggcagtgttcccttctctccattgactatgagagagttgggggacacacatgcagaagaatcccgtggggagaaggtggattcctggtgtgctggctggtttttcagggctgttagaggnnnnnnnnnnnnnnnnnnnnnnnnnatggcaagacttttggctttgagaaaactcacttaaagggctttccagaagcttacgatggtctaaaaaattaggatattcttctcgactttggaagacaacttactgatactctgccccaatacggatcaaacctttctgatatatcaggtaaaaaaaaccaataacgaaataaaaggaccttcatccaaaatacttttctccttcgtgacaatcaatccaacataattgatacaaactagcacgtcaccaacaatctgactctgcagtccaaagaaagggaataacaaaatacgcataacttgattcacacggccagacaaaacagacccgccgcggcatacacggcgttgacgttattataattgttctcctactattatttcttctataatattcgcagtcttcataactatataacatatttacacacacctatcgtaagctatagactacaccacgtaagccacaatgtacgttcaactctgtgagtggcatgatacgttctataactcaacacgaaaacaacaagggaaatagagtgaaatgatatcaggcgatccgcagggataataccgtaatagagcgtaaaaaagccaggtgggggaacatgaattcctcggatctcgttacctgttacatcaatttctcaccctatcanatctactacacgcaactccatcaccaacaatagaacatcctaacaccactacaaagtaaaacaggttgcagaaagacgaggctcacaaatttacctnagcatacactaaatatccaactataacaaattaataggcatggtgataaataatgcaagatgctattatcaacaataaactctaatgcaaatcctgtgcgcgaaatgagtcctaatattctttactcctaactcacatacggatgtta

SEQ ID NO: 452947 - DNA, 995 bp, Homo Sapiens
  misc_feature (634)..(930): n is a, c, g, or t
gcctcccctgtaattgggccctccctttagtaaggctatcctccaatgtacccttattgtgcctcccataaaatccacaaataaatcccagtctaactttaaaactttccttccttgatgtagaatttgtggtaggaaacaataaggggcaatgcagagacacagatttgtggtttacaaggtaatttcaaaaacacattaaaaaatctctaattgcagaatcagagctctcatgacactttagaaggtgagttctagtgattactgcacaacgtatttgaacctctgcatcagtttttaactagacctctgctgtcagcatcaatcctccccataacacctgacatttagaaaaaaatgtttgttcttgggcaatcaataggctaatgttgaagttccattatctagtgtaggaagtatcaggtttaactgcttaatagttaatggaataatctagaatttccaagacctaataaatcaatctctgggattggaaagagaatggtgatagatggaaagaaaaaatagggcaaaaatcacaaagtacaacatcaccctgtaactgttcatttgcattagttggtctcccacgtctagtaaaatgaatttgagatattaaaaagtaggaagttcnnnnnnnnnnnnnnnnnnnnnnnnnnnnnnnnnnnnnnnnnnnnnnnnnnnnnnnnnnnnnnnnnnnnnnnnnnnnnnnnnnnnnnnnnnnnnnnnnnnnnnnnnnnnnnnnnnnnnnnnnnnnnnnnnnnnnnnnnnnnnnnnnnnnnnnnnnnnnnnnnnnnnnnnnnnnnnnnnnnnnnnnnnnnnnnnnnnnnnnnnnnnnnnnnnnnnnnnnnnnnnnnnnnnnnnnnnnnnnnnnnnnnnnnnnnnnnnnnnnnnnnnnnnnnnnnnnnnnnnnnnnnnnnnnnnnnnnnnggaagttcacacacttgagtagaacaaaaagtggaaaattaaattcccgagaatccggaccggtc

SEQ ID NO: 452948 - DNA, 934 bp, Homo Sapiens
gccgggggcctctttctggaaatgtgtgcccaacaaccaactcctaaaatttggccctcaatccatcaaggtttttgccttggggggatttgaaaccatcttgttaagtgtttccccaaaaatatccaacatctctgtatttttttcaggcagttggtgtaccagaaaatggatcggcattaaccacgagattctgggttgccgctttttggctggaacaatgaaatctccatgtaactcataggtcatgagaggctctggaagactcttcaaatactgtttcaaggcacttgttattgtcttcacttcccaatctgcagaattctccaggtccacctcattgcatgtttttacatccatcaacatactcagaagtctctggacctttgaactcacccccacaactctgtacaatccttggtcatttatacctcgtgtttcaacggcactgatgcattttctgataattgtgaaccccatcttatccaactgtgcatttccttctggtcttgggatgatggctgtattaaaactatgggacagagcttcctttccacccagagcttccaaccactgcttcctttcctcttcggaaaatgcctgcatggtcaaggaaacgccaggccgatcagcagcttctatgtcaaaacaaaaccttctgtcaatggagtcagtatgcctcttggtacattctttcaaaaagaacacctctccgtccccaagtttccctccagatctgtgctcaaatgggatcatgttgaacttctttgctgcttttcgatacatgcaatagtgtttgacccaactggaaccaaacggagcaggccttttttcctggacatacaggtagccttcggctgtaaactgacttgctcgtttgtggtccttgggattctgtctgattttgttcatgagctcttccacttctgacctt

SEQ ID NO: 452949 - DNA, 684 bp, Homo Sapiens
ccccactctttcttccattttcctgcccaaaagcacagcaggacacagtgtgggtcttttctttttccaggtgatcgagtaagtccccatattcgggcttgggtttcaggtagcctttcggataatacatttcaaggctgaaagattgctttgtgcttgtctggagcagcaggtgtggacgcccatggtgtcagctggtgttccagggtggcatatgggcccaaatgtgttctgagttgaccatgggaatttaagggcttggtgggcctcccacggctattctgctcccagcagtcagcacgaaccttcccaactttctccatgtcttttgaaattcctttaatggggaacataagggataaggcttagactgcaagaagcttttgggagagaaaccccaggcatgaaggtgctccaagggatcacactaagagagaggggcttggctatgagccatctccctaaacctgaatgctcttctcctagaggaaggattaggccaaggctagtcccagaaggcagagcaggaaaatatacagatgcagcattcagttcaatgttagaaaccattttctaatagtcaggtccaagctcagttataccaacagtaggaccgatgggtttgacaaggccccccgctatctccaggcacgtgtctttgccttggagaacaggtagagccga

SEQ ID NO: 452950 - DNA, 1559 bp, Homo Sapiens
  misc_feature (1146)..(1300): n is a, c, g, or t
cgtgtattagttattgccctagagagcaaacaggaggggggtattaaagtcgtcattgacagtgcgatataagaatgaaggaagttaaggcggggagggtagtgaataggtaggcgaggttggaagtgtaggtattgtgtgtcctggtctagagggtattgagcgaagttgcagtgtgatatcaggaagtatcgaattatgtataagaagtctaggctggtgaacagtgaaatagataggtgggggatgaagtaagtacgaagaggaatgtggcggtaatgaatatataatccttcaacaaataagaataggaggtgagaggttatatccgattgcgaattaaaataagggaggatcatcgggttgtggaatttgagaactctataatacgggcggtttaaggcgataaacaaaaggcggtatttggggtagggaccccaaattgataattaattgcgcggtggatgtgtagaagttaaactttgttaatggcgcatttcggcaaggttgaagtttaaatttctagttgctggagatagaatagaagggctttaaaaccaacagttgtttattcgcaagcaaattatattctgggaaatatctgtgatatcacccagttaatttataactttaaaaatgggcatgcaatactttttttaatgtagttaatagatatgtcttagtagggagcaaatatctgtccttccttatgtacatggattctggttagtgaaactagtataaaagttttggggggatacattactcttcagaaaatggtactaataaggacaaggaacagagggttaatcatggtttcacttaatcctgtggagattaggacttttgtagagtgctacatttttcacagtgtgctcctgggaacactgattctgtgttaactatagttagagcgagacaaaggatttggtggtcaaagtttgagaaaagctaaatgtttaatacatattaggcagacttctgaatttcagtacttcttggagatataactgtgcactctccagagaggggaaatgcattatttcccaaactgaaacttcactgctgctgacatttttagaagatgctggtatagaggaaaagctatggatttaggagcttctagaagtcttattattattattnnnnnnnnnnnnnnnnnnnnnnnnnnnnnnnnnnnnnnnnnnnnnnnnnnnnnnnnnnnnnnnnnnnnnnnnnnnnnnnnnnnnnnnnnnnnnnnnnnnnnnnnnnnnnnnnnnnnnnnnnnnnnnnnnnnnnnnnnnnnnnnnnnnnnnnnnnnccgagtagtcttatttcttacttgccatgtggacttgaatataacctccttgagcatctttcctgctctttttcattggattatgattagaattagactaatgaatatgtatgaaaatgtttgattccataaagcattacaagacatcagtattaacatgaaaatgaagaccgcttaatcaggagtgataacggcattctatattaacaatgggttaattttacacattacatcccgagaatccggaccggtccagcct

SEQ ID NO: 452951 - DNA, 1147 bp, Homo Sapiens
  misc_feature (1076)..(1076): n is a, c, g, or t
  misc_feature (1136)..(1136): n is a, c, g, or t
aattctcgggattcttttcctactatttcctcacttagcagtagctagtgtagttattttgtggttattttatttcattctctaggatctattccattaaggatgcaagtgtgtagatgcatatatatcatttgcttctttcttccgccattattttcctttaacacttagtcccttgcaaggggtctgactatacctaacaaaaattgagacctactaaatccctgccatctggctggaaggtgtagcagtgtattaatgtaactaatagcaacaggtgtgcagcagataagacaggagaagacactcagctatggttgagttgtgaaagctaattagatccagcatttcttatgttgattcagattgaatgaggtagtgaaaagggacttgtgcttttgtaaattctagaaaggcaaagaggactatattgaatagagctgtgtttaaacttcattgctcatatatcttttagtaactggtaaaccggcgaagctgataagccaataagagtgctgtctagaacgcatttgcaaaccgttaagagtagcttctttttgaggcctggtacttctgattcatctatagaagtctattatgattccatcaattgcatagcttgtgtacctggtagaaattgtgtcttggaatgaccctttcgagttattgacatggctctgatgaatagaacatgagccccaaaactaaatccaaaaggaattttctatctttcatcccccacatgtggcaagacaagttggccctttcttacccagaggtcttttgtgtgactgcatctttctcctccgttctccattgtgtgctttccattttgtctttagtgcctatactgttaggtgttttcttcactggcattcacaaatttaagccattgctgcctcattagccttgtattttgtgtgcatatcatgtatccagacctgtatgttcgctttaagcattcttatatcacactgtctcctcatctaccatatgggtaaatgttaaaactccacatttgtctgcatcaggggaaaatgcatggggcacacatcctccctccctccctctttggntcttcctccctttccttcagggccttttaggcattggtttggttttccccatttctgganactactacttc

SEQ ID NO: 452952 - DNA, 520 bp, Homo Sapiens
  misc_feature (425)..(425): n is a, c, g, or t
  misc_feature (485)..(485): n is a, c, g, or t
taaagctgtgtttaaacttcattgctcatatatcttttagtaactggtaaaccggcgacggattaagccaataagagtgctgtctagaacgcatttgcaaaccgttaagagtagcttctttttgaggcctggacttctgattcatctatagaagtctattatgattccatcaattgcatagcttgtgtacctggtagaaattgtgtcttggaatgaccctttcgagttattgacatggctctgatgaatagaacatgagccccaaaactaaatccaaaaggaattttctatctttcatcccccacatgtgggcaagacaagttggccctttcttacccagaggtcttttgtgtgactgcatctttctcctccgttctccattgtgtgctttccattttgttctttagtgcctataactgttaggngtgttttcttcactgggcatttcacaaattttaaggccattgctggcctcatttaggccntgtatttttgtgtggcatattcaagtattccagac

SEQ ID NO: 452953 - DNA, 1342 bp, Homo Sapiens
cctttttagacttttacttgttggtggatgtgaaactgctgaagtaggcatgtcaaaagcttctagctgtggcctttctgcctggagagttctttcaggatcaccgtattataagcaggttactaatggtggagacggggttactgcagtaccgaagactctgggattattaaggatgttaagtgtcaagttttacagtcgccagggacaagaacaggatggaatttttaagatgagcctttctccagatgggatgctcctggcagccattcacttctcagggaaactgagcatctgggcgattccatctctgaagccaacaaggggaatggggtcaaaatgaccagccaggctctgatgaccttaatcctgattggaggctctctactgagaagagaaaaaaaatccaagataacgagtcccttttacccactgatagatgtccattggtgggcagaccgtgcagtgactttagctcgatgctctggtgctttaactgtttcatctgtgaaaactttgaagaatttactgggaaaatcctgtgaatggtttgaaccatcacctcaagtcactgctacccatgatgggggatttttaagtttggagtgtgagattaaacttgcccccaaacgatctcgtttggagactagggctggagaagaagatgaaggagaagaggattctgattctgattatgaaatatctgccaaggctcgctactttggttatataaaacagggcctttacttggtgactgaaatggagcgatttgcaccaccacggaaacgcccacgaaccattactaaaaactaccgccttgtgagtttgcgctccacgacaccagaggaactttatcagaggaagattgaaagtgaagagtatgaggaagccttgtccttggctcatacctacggcctggatactgaccttgtatatcagaggcagtggaggaagtcagcggtcaacgttgcttcaattcagaattatttgagtaaaataaagaagcgatcctgggttctccatgagtgtttggaaagagttcctgaaaatgtggatgctgcaaaagaactgcttcagtatggattaaaaggcacagacctggaggctcttttagcaatagggaaaggagcagatgatggcagatttacattacctggtgaaatagacattgacagtatctcctatgaagagctttcaccacctgatgaagagcctggcaagaataaacgggaaaacggagctccagaagagacaagaactactgaaattagtgaacttttccaagttgacactggaacaaaaggaacttcgccgttgtagacggacatcgtgatctcgagga

SEQ ID NO: 452954 - DNA, 1407 bp, Homo Sapiens
  misc_feature (505)..(635): n is a, c, g, or t
  misc_feature (639)..(722): n is a, c, g, or t
attttttaatttttgggttgggaagggaaattcccccacaaggccccccttatgtgtttcaattgtgatccacagggagatttttcccctatagggaaaaacccaggctttatggggccaaatgtttcaacattaccccttaagtgggcgcccggcggcgccccaaaacagaaatgggttctaagaaaagcttttttggaggggcccgaggcgggccgaacaatgttttaatttgaagtccttcagcccgccggaacacaaatctcttttatttcctccatttgaaagtattatcactttacacattacatctattaaagttacaaagccaacaatacattttagtaattatgactttaccatctagagtgattatcttatcacgatacatttttcttccaactacctcctttttgatgttactgggaaatatgttatagacatattacatttctacatgtcaaatactcagcaatacattatgcacatattattattattatcnnnnnnnnnnnnnnnnnnnnnnnnnnnnnnnnnnnnnnnnnnnnnnnnnnnnnnnnnnnnnnnnnnnnnnnnnnnnnnnnnnnnnnnnnnnnnnnnnnnnnnnnnnnnnnnnnnnnnnnnnnnnnnnnnnntccnnnnnnnnnnnnnnnnnnnnnnnnnnnnnnnnnnnnnnnnnnnnnnnnnnnnnnnnnnnnnnnnnnnnnnnnnnnnnnnnnnnnatcaaataaacccgacttgtcctctcaaagtgttaacacaaccagagtaagccttagaaaaatgtcgttaaaccccaaataattcccccacaaaccaacaccaaatatatatattaatttcacggtatccgtcaccgaataatatacaaaacgcggccaagaatcaacaatttaaataaaaaatagaagagaatacccacgagaacaacttatcagtagtttattgaaccagggagccccggcacagtatttatttcttaccaataataaagcgtagtaataaaacaacaactactaccacaagctgtatagggagtcaatatatttaacataacgaacatataatggatcatcttgtaccagcataactaatgtataaataatacctataaaacaccaaaaaagagtgtacatatatgcaaataaaatcatcgaaagaatataacaaacccttaactataatacgaatgatacaacacttttagaacccacacagtataacttgtattaccacaaagttattataaacagacgttccccacctctaatatcactccctatacaagctaccgcccaaaattaatattacctacgcccgtgatacaccgcatacccctcgcactgtactagaataaagccacatacaaagtgaactgctcaccacttcaacccccttgtttaaaca

SEQ ID NO: 452955 - DNA, 1196 bp, Homo Sapiens
  misc_feature (1183)..(1183): n is a, c, g, or t
gaaacaggagcaggcaccttaaaagaatttctgggggtaaaagaggaaaggggggcgaagatcagttttcttctgccccccagcggggagatccagggccagagttctgtctgcgaaggaggcccctgagtgtcacaggagcatgggcagcctggtccctcaggctcacagtaaaatgcttcggctcttgcaagaccagtccccgtactatgatgacctgcccaggcgagagaccctggggaagagcatgtgagcagggcacctccagcctggggctcatcagcaggaaaggatgtccaggctgggtactctttggtgccttccacaaatggattgatgtttcaggaatccaacagcctctaaccaggatgtcaccaaatatacccagcgtgtccacatgagacagtgggagccggtagcggaagtggagaaagtgctgtccattcacactcaccttcacttcctcattcccgaagagaaagaggatgaggaagctggagcctcttcgcagggccaggtggggccaccgggcctccctttgccagcgtccaccatgcagggtgttgcagatgacatggggcttggtggtatggaagcgagggttgaagtggaaggcgatatctggccggggacacaggctgcagccacactggaagtccacctgaaacctactgtgtgcatctagagggaccactccttgcagcatgaccatcttgcctgcatgcaggcctccaaaaatcgtcgtgacataaggaaccaccgggtggaagactggtggttgcagaatgaagctgtcaggaattgggtccagtttttctccaggtgacatgacagtggggcaactccaactgtagatcctcgttccaggagccctgcccccactgggctgactcatctgccccagtcagggtcctaaatgcctggagcagctctcccagctgttagtctcacctgcgacctgcagcgttttaatgctgtctggagcagccctaggagggcagcgggcgacctccaggctccacaccagccccactcccggtggtatacagcagagctctggctgggcgggggctgtcagcagaactcagtgtccaggggaggaagactggcattaaccaactaactacccactccgggtctgcagcacatggccattgcagagagaagccagaggctggctccnttatccggggaat

SEQ ID NO: 452956 - DNA, 1111 bp, Homo Sapiens
  misc_feature (270)..(270): n is a, c, g, or t
  misc_feature (1079)..(1079): n is a, c, g, or t
aggcgaacagagctgcctatccgtccagtgaacccgtctcgctcggacatatcgtaatgtatcataggtcgtactagtcgcgctaccataggcatattctaaatcttgtatcataattcttccgaagtggatccaatactgctccttgtctctagtaatccatgcttgatttagcttctgcacgcgatagagcaactgctgcctacccacttactaatgactatttttttacgattacgccccgtatggtgccgtaacacttctactacntgttaaattattctttttatactaactacgcggaggacgaaagtcgattgagattgattatttatggttttgttcttaatatataatatattcaagaccccacacaatataaaattttatgtatcgacatttaatacacgttcttctctcatttttaataatatcagtatataatttctcaggatggtaatatctgggcccgcttcactaatttattgctttgtgttggtatgaatggttgattcaacacattactgttgtaggtttcctgggcattaacacggtatacccgttttcttacttcattactgacattctatttgcggtaggaactttatggaggataccaaatgttctgcggtagtattattgtttttgcattacctattttgtttgtgtttcccagcgattaatattcttcttttgtctccgcctgtgctctttttaggcattgagctatacataattcttgttatgtttcaaaaaagaggaacctcaagtgtctgacgagcattggggcagaagacgggaggcagccgcgggccgaactcttctctttcatctatctgcatcttttgtatcgggaaggaaggtggcggctcctggggtgctggcacaagagcgtgagccacagatgatgtttcccccaagtcagtgtcttgggagctttggaagttggcctccccagagcctgcctgatcataaacactttctcttgggtcatcctcggaggatgaggacttttcatcgaggaacggcaaagctccctgcagtaatccaggaggcgctcctttttgaatatccgaccncacctcttaatttatttatctcacttatacaa

SEQ ID NO: 452957 - DNA, 1189 bp, Homo Sapiens
  misc_feature (105)..(165): n is a, c, g, or t
  misc_feature (488)..(488): n is a, c, g, or t
  misc_feature (516)..(516): n is a, c, g, or t
tgtttcccccttccccccaggttcgggggggcgcaggaaaaaggtgtgtgtgtgtcctttttatcgtttctgccccgagggaaagggcgccaccgtgcccctatnnnnnnnnnnnnnnnnnnnnnnnnnnnnnnnnnnnnnnnnnnnnnnnnnnnnnnnnnnnnngggctccgccgcatttttggccccatggcaccacaggggagccgggcgggggaggccccattttctcgccccacaggtttgggggacccacagtttaggggtcagccagcttttggtttttgttgttccccaaaccttttagggtggcaagaaaccttctcgccggggggcattttcgcccctggggctcccatccccctcctgggcttcggagcggcgccatggctttgggcaacctgcggggttggttctccttccactgcaaggagttcctttccagaaagcagcagatgccgctcagctgcagggcggggagaggggcnccagttgccccaggggaacaagggccgnaagatctctggctctgaacccaaaatgctgctcaaagatgcggacactggtgtctccagccattgaggtgaccagtgcggtgaactcagacaggatggatggaaggaggaaccgggacaccatgtgggcagagcttctggacactgaggcacaaccaatctgaaccataaactccatccagcgctgagcaacacgggcaaacacaggatgaagggtccccacctcaccctcttctagctgtgttgtccggcgcttttgtctctgggctccagaatctgagcctggcgcccgctcagctccaccaggagtccgaacactctcggttttgtgacgcctccggccccgagtgtcttctggccgatccaggacaatgtcatcagttgttttgggggaacccaaatccccacactctgttttactcagcatatcccagaagctacgccggcccgctttgctgggtggagtcacaggctccccagggacaggggcagggggaaaggtgctagctcggcctgcagagctcttagtttccaacgatccgttcctgagactgtgggtgtgtcctctgtacatagtgaagctggcagcagctgaagctcgatgatggcatcggccagggcctggcgagctgctcctcggcctcgtgcggagttcgccacccaggcctcgctac

SEQ ID NO: 452958 - DNA, 1159 bp, Homo Sapiens
  misc_feature (17)..(17): n is a, c, g, or t
  misc_feature (33)..(34): n is a, c, g, or t
  misc_feature (729)..(737): n is a, c, g, or t
  misc_feature (971)..(983): n is a, c, g, or t
  misc_feature (1087)..(1098): n is a, c, g, or t
caggtgctggcctctgngctccttcaaggagcnntgcctgtcactcgctcctgggctgtctagccatgtctcccacccccactttaccgcagccagctgctgggatcaaagcaagtctgttcttatgttatttgcctgtatgaaatcatttctcattttatcacaattccttcaactcagcttactcgcgtggctgcctgttcatatttgaaagcagccaccgtgctgtggctttggtttggaaaagcatagcacgcacttcccttggttttcccttcccagagccgaccgcagctggtcagccctctcttcccgctcctgaacctttacttactgactttgagctctgtgactccgtcggttctcgcaggaattaactaacttaccaattggttcaatccacttgagcgccatagctctgagctcctctgtgtgacatgccacagatgactattgcacacctgggtcctgccccagcaggccatgcccctcccatgtgccgtgcctgttgctgcagctgcccccccaccccgccactggctgcaggaattcagcctttagaggcagaggcagctgcagcggcccctgaggtcaaaccccagtgtgactgcatagcagtgttagctggttggtttcaaactactggattccaggcaaaggcctacagattgaccttattatttttgaaaatatgttaagggttttttcatagagagagaaagaatggannnnnnnnnaactgggaacctcctgattcttacggaaaattatccttctataagaagataccagagagatttattccaggtaatttgataacctaaaatcaatttctccatttttttatcaaatgtggggaatttgttgcttaatccggtttcaacaaataaccttttatggtccctaacatattcttgaaagccttattttatgaatgggatataaccgggaattattggaaaatactggannnnnnnnnnnnnaaggggggaaaattttgcccaatatttctttcccccaaaaataagtaaatacccccttggctttaaactaaggaaccggtttaaacaattaatggtggaacccnnnnnnnnnnnnctctccttctccacccggggaaccccctccaagagaaaaaatttcccccttcccaaatttc

SEQ ID NO: 452959 - DNA, 447 bp, Homo Sapiens
ccacgcgaattaacctgagttgaaaggaattgtgaataaaatgagaaaatgatttccatacagggccaaataaccataagaaacagacttgctttgatccccagcagctggctgcggtaaagtgggggtgggagacatggctagacagccccaggagcgagtgacaggcagtgctccttgaaggagccagaggccagcacctgtgcacagtctgccagaggcctcggtttaaccctcagcggggctggaagactgagcatggccgcttggtgccatccccatgaatgggctgagccgccccaagaggcgagtaccagagtgaggtgaggacagaacacgttgcccttgaaattgcaccacagaaaaacgagcatgaggtttgttggaaaagaatttctcccacagtacagttgagctgatcccccctcaggtgactattctaaacgt

SEQ ID NO: 452960 - DNA, 992 bp, Homo Sapiens
  misc_feature (561)..(570): n is a, c, g, or t
  misc_feature (572)..(859): n is a, c, g, or t
ctgcaatctcaagacaatgcaggtaactcaatgtgaaatccatcaaaaagaggacaacttgctcaggtacaaggcccctgaaaagtaactcatcaaatgacaataggaactgtgtggacactccctctgtaacatgcactaggatatcactctcctatattagaggagctccaagcagtgtatcatgctcaaatatttattaattgacagtgtccgacaacctcctgtccataaagcatggcagagtgggtaattaattggaaagagttggcagtagaactttaagaacaattataccttctaacattcttacccactccccattcctaggtgacaactttctcatctcggcgaattctcttgtgtactgtttctggaacatatattactaaattcctgtctccgtttaccaaatgctgtatcttgggcaaaagacatatgtattgtgcttgtattgtgtatctaatgtgtacatatatgcatattctcacaaatatggtatacatttatattatgcatgtgtatggacatatatctgcatattgtaaaatgaagtagaannnnnnnnnncnnnnnnnnnnnnnnnnnnnnnnnnnnnnnnnnnnnnnnnnnnnnnnnnnnnnnnnnnnnnnnnnnnnnnnnnnnnnnnnnnnnnnnnnnnnnnnnnnnnnnnnnnnnnnnnnnnnnnnnnnnnnnnnnnnnnnnnnnnnnnnnnnnnnnnnnnnnnnnnnnnnnnnnnnnnnnnnnnnnnnnnnnnnnnnnnnnnnnnnnnnnnnnnnnnnnnnnnnnnnnnnnnnnnnnnnnnnnnnnnnnnnnnnnnnnnnnnnnnnnnnnnnnnnnnnnnnnnnnnnnnnnnnnntgaagtagaatttttttaaatgaacggtcggagatcgagctaaaggctataaaatggcagggttctaatcagctcagattgttttcagtagaaatgtacgcaaagtctttggagttaaatgatgaactgccac

SEQ ID NO: 452961 - DNA, 859 bp, Homo Sapiens
  misc_feature (447)..(447): n is a, c, g, or t
ctttgggggggaactccccgaaggaaagaaatttttgagggctaaaagggaaattttaattttaaaggtcccggccaaactttgcccaaaatggttaccttaccaagggatgaagccctttacattccccacgggcagagaatggagtacccccaaagtgcccccagttctatgggtaaccgttctatgggagggaaatctgaaagctcttagtgagaccagtgggcagatgctgagcctgcccccagacagagggagaagtcgaaaccaccaagcatttgctaaggcggcgcagcttctatgtgatcagggccaatgatattcttttgctctttccagcattgcccagtgatcctggggatgccgtttggaagctgcacacctttgacatctttagggtcgaagagatgatgctccccatggggactgaccagtgatccattagtntcttgtggagtcttcggaggtctacggggccttcctggggtgcacctcatttcccccactcctgacttcgcaatttactcctttggatctttccagaaaccgtctttggcagttctgaaacaaaggccaccttcctggggtatttgtatggagcagtcacccttttcacatgctcctggagttcccgcgttagtgcctctgggtcatgagaggagtaggctggagtaaggactataaatgcctttaccacctctcccctgatggggtctgggctgctgaccacagccgactccaggacagcaggatgctctgccagggcactttccacttcaacaggcccgatccggtagcttgaagaattgatcacatcgtcgtttcttcccatgaaccaaaagtagccatccttgtccat

SEQ ID NO: 452962 - DNA, 1439 bp, Homo Sapiens
  misc_feature (129)..(155): n is a, c, g, or t
  misc_feature (219)..(255): n is a, c, g, or t
tgaatccagaaaagcacatcagaaaatgcccaatgacagaccacaggccaaatatggcagggcaaactgatttggttctgcgatttccattctcctctccacatccgagaaatgctttcagctacagcnnnnnnnnnnnnnnnnnnnnnnnnnnntcccgatcaagcatgcttggcacaccaggaagctaatgctggatcatatagccctccaatcatnnnnnnnnnnnnnnnnnnnnnnnnnnnnnnnnnnnnnatgacagagagaaccacgctttattggcggagccttatgtgccagcgaactgagaaggtccagggtaccttcacctgcactgccacagtcacccggtctcgccccaggtaatcaacctttactgattttcaacggccctggttccctatactcaggacatccactggattttctaattcttcttcctacttcactctagtcttaggatctgtgttatgcttgcaggtgtcaggggtcaatgtgcacattcgaagttttgctcctttgagcactgctgactgtttgctttcctcagctaaagcagctctggcatctcctattcccacctgcaccatggccggtacctgacagctgtgacttccccgccgctgtgcctacctggccaagctcatggccctctgaggcccagaggagtggctgcccaagtgctcaggaggtggcccttttagggctcaggatgaaaggtgggtgtgtttgccttctctatcatggaagagctggatttgccattgtttgcacgtggcccaggacttacccctgggagactgattctcagtttcatgaatgatttgtaaagagaatacagcgtctccgaagtgacatgaaatggaagcgattctgccaatctggaagggatgggtgtttccctaagctgctgtcagagggccctgtgtttctcaagttcagctccaaatgctggtttattccgtcagagtactcactcagtaaacgtgctgacttggtaagcatttgatgttgcttctcaggatactgatggagaagttgtcacccctggggtttgtctgggatcgggggagtggtctacctttcttgtcagcatcctgtgcttgaggcagattaaaatctcagcggactaactggcgaatttcccacaaagtctacccccgttttgggctctgtccttcctggcggatgtgagcctgttgggagagatgctagtttctcgcctctcagcaggaaatgccacgggcagatttaaagtcacttggatcccagtgctttttcagaccctttctcctaggtcaccctcaaaaacctcaggaggacacattcagggtcaatacagctcaatgccaggaatacgatgccaataggccagttcttgctaccgtatgacagaataaagcccttaaatgtcaaggcttttcattcaaccagtttct

SEQ ID NO: 452963 - DNA, 1177 bp, Homo Sapiens
caagtggcagccttccctgtggccacatcaggaaacccacggagacagggtgattttgcatctcctggaaaatgagtgggacactcctggccccctggctctccccaccacccctacatatgtgctcagaaggagcccaatgcattgaatggttccactgtcgagccctctaagacctggtttgcctcctaaacctccagtgtacttctctgataggtgtttaagctacaggtgagactttgaagtccagagaagacagacacacctgaaaaccggtccccatttgggccgaaccttaaaaagcccattgtcccagagtcctagtgcccacggagctgtctgtgtgtcattgtcctgcccagggtcatcaggtgtgcggctgaggacaggcccagggcatgaccctcccatgaaaggggttttcttctttcctcatttccttctatttgaggacttgtttggggtttagatttgaattttgcttcccctggacacctgggcatcagcatagtgccaccccctgctcctgacctggccagtacttcacagtgctcttgaggtgcggagccagctgacaaataggccagagggtgtgggccagcagcaggttaaagggggaaacccagcagaccccaccccagggcactctcccctactgccttcagccttctggtgcctgttgaacccccaagctgtgccctaagcagacccctgggcaggaccctagccctaagcacacaccaccctgtgctgcaaccatgagaaagtgcccatgccttgggctgtccagaagctcaggagtgatcagagggcaccttctctaagaggggaggttcctggctaagggaccatggagtggtgggccacctgaaggggctgggcacagcccaaacctttgcgcacactccgcctggagcccatcatgtcgctaccttgggctttaaaccctaaggcaggcgcctggatttttgcccgcgttagccgcgaaatcctttccacgccccccaatggggagggcttcccttgggtggagagaaatctaaccttggaagctaattctccccgccgagtttttggggggcgcatcggtaaagacgctgcgttgtcgcgcgggaggcccctgcgcgccaaacgtcttgtccccgagtgcgtcttttgtttgcgcctcctggcctcc

SEQ ID NO: 452964 - DNA, 861 bp, Homo Sapiens
  misc_feature (15)..(15): n is a, c, g, or t
gccttccccaggganttgggggccttcccacaaggcccccgcaccccaaagaggggggtggggaaataaactgtcagagtgtttggggcttttatccccaaatcccgttatctttgatgggatcctcaggttctgggctggagattggactgaactggttgaaggtgggtaatggctctgacttgggaggctccagtttgccagggaaactcctggcactgtctccattcataaaagtagaatcaaatttcccacagttgtggggatctggaggcagatctgagccccggaatccattgtgtaggagactgggagtaatgtggtctttctccgcttcaaatgactcctggcggctggtgttcttgacaatgacactcacggccggcacatcgggggctgatcctgagtgagacaaggacacactttcatccatacatatgcctggaggtttgaggggactctcattctcctcactgggtgtctggatggcctccttggcatcaaggctggtggggtctgggatgtcaaaggcagccagaaggtcatcaaaatctggggttttcatatcccccatggctggatgctggcaagggctgactggtatccgtggcaggtagggacctcctctttcggctttggagccccccctccctctgtctccgtacgggggagcgtcttccttctgtcttctcccttccttcttgcctattaaactctccgctccttagagaggatctcaaaacaagggtgtggcgagcgttgctaggggagcagagctgcggagaaaggaaaaacttctacctaggcacatggtctagagtccaaacaccacctggcggcggcggcggcgactgcaggcca

SEQ ID NO: 452965 - DNA, 892 bp, Homo Sapiens
  misc_feature (70)..(70): n is a, c, g, or t
  misc_feature (239)..(405): n is a, c, g, or t
ttccaaccctaaaagttgaccataaagcccccaattattaaaaaagaatatgtttgggattattctttgnaacccaaactcatcttttaggaattccactcccatcttttaaaaacataaatgttaaattcaaaccactgaaacaaacaaataatgattaaaaatgacttagaaaaataaatagaactttgaaacttcttggcttctcacagtgtaattttgcaccccttcccccactnnnnnnnnnnnnnnnnnnnnnnnnnnnnnnnnnnnnnnnnnnnnnnnnnnnnnnnnnnnnnnnnnnnnnnnnnnnnnnnnnnnnnnnnnnnnnnnnnnnnnnnnnnnnnnnnnnnnnnnnnnnnnnnnnnnnnnnnnnnnnnnnnnnnnnnnnnnnnnnnnnnnnnnttaaaacaattttctgaagagacagggcattgctgtgttttgttttttctcttctttaaaagatagctggttttaaccaccactgagctgattaagagctctctttattaggcttagaactgttgattattgctcttaaatctcacagaacttagtgtaagatttggattttacttcgatcaagtttatcctgcaattctaggggttctcaataaagagaggcttgagaatataccctgttttatcagtggctttttcctacactacaactagttctgttttaattaaataggaatggctcaagagcctccttttaccagacagtatcaactatgtgtgtcataaagggagaaaacagcttaatactcatctaaagtgttcacagaacattcagaattggtaacagtggaattttcaactttggaacatataagggatgttgacagtggtcaggagtggagccacctatccagaactacgatcaagc

SEQ ID NO: 452966 - DNA, 1373 bp, Homo Sapiens
  misc_feature (39)..(39): n is a, c, g, or t
  misc_feature (272)..(272): n is a, c, g, or t
  misc_feature (332)..(332): n is a, c, g, or t
  misc_feature (509)..(509): n is a, c, g, or t
cagcaggaacccacttgtcagccactatcattatgctancgagtattgaggtccaccgtttcgccgcccactagatactatagtctgggagcgtgacgtaatacatgcgcacgacaggtgggtgggagagagttattcaacatcgaggagtaaaacttatgtgcgcgggggggagaccacgtctaagaaattctcctctaagggtgtaatactcccgcgacaagaaacatcagaaatgagcgctcacgtcggcgtttttttctttcgacgcnagtcttgtgcgtgagcatctcttatgcgtagaggaataacaaatacaataggggataatngagcgacacctctatcctatataggtagatagcacagatatgtgtgtcagatgtgtgggaggggaaattatgtgagcatccccacaaacctcgacaggcgagggcgatactattttttacttctagcgtgcgcccaaacaatcatgtcgcgacatggggcgcgttatagagatactncgcaccgcagcaaactagtatcagcacatatctaaacaaagtagcgcgctgtcaatgttcttatcataattcacacaacgcgcgagagtatgcgtggaagcgtgtgaggtcgttattcaaatctctaacggattcggaaaacaaattagcgttttaacatttcaaaattttccggagagtattcacagagggtttacactcaaggtggccaactggggaacgtgtgaactcccccattaatctttgtttaccttccatgggttgggaaaaattctggggaagtgtttctctgtccaaggttaatctggggtgactaactaaggacctcaggttccggggcttcaactattttcgagggaggtgtgaaagtggtgagaaataaacaggggggtcttttttgcgtgtagttctgttattcgaggatgtttcccctccactcagcgcaccccggcaagagggagtcggctccgtttcttcagacaagtccagctcagggtattgactgagtagaggttcctccggacctgggagaagctggggtggtgccagcatctccttacaggtgcctccatcctgtccttgcggaaggggcttaggacaccccgcagtccgcgccccgaggtggcgaggcccgcacgaatcgcctgctcagccattgtcctagcgagtgatctcgaggagctgtgctggatggagtgagggagatatcaagacaccttgtcagttcaaagcattttagcgttgtttgaaatcctctccacgtcaacgtaagcagcctgtgtatttgaacagctgctttgaacagtgaaagggaataaactgattcaaaacctggaggtgtgtgcccgagacaccttcaacgtg

SEQ ID NO: 452967 - DNA, 1135 bp, Homo Sapiens
taccacaaatatttctatacagttggcttctgttgatcttctagcaagttattaattgaaacagaaaaagcaaaagaaggtgggagaaaggcagacagaattacaataagaaacacaggacaatagaattgcaaaggccttaatctacttctttatttgtaagttactctagggctgcgaaatgtcattgagacatcattatggcagtcaatattcattatattgataaatacaaaattagaaatcaatatccaaatgttcagctgatggaatgagagataaatgtcaggtggatactgatttcaaaaattataggctttatacatctgtcttaatatatcaaaatttagtttggcttgtgttttcactaaatagaaccctgaaaaagtcaatacaacattagattatttccaaacttgtgacatgcctccaactttttcatcgagtacataatcactctgaaaataatattgctagacaaacgcatcttctctctaggtcaactatgtctttccaaacctacctttaacctgattcttctctgtttcaatgataaaacattaatttattttatatattttgtaaatttaataattgttaccttatttgtttcaactaagtgtgagtatgacaatcgtaactaatgctccccagaaaagactttaaaaggggaagaaaagaggttctgaccttggcaaagctccagtcaggattcctagagaacaggaggcttgagctaaattcgaagaatgcacagcagggaacttgttgaaggaaagggaggcagagaagagagcatagaagtgggtcttgggacacaggggcttgtggtcagcagattgggagtggaaggttgagcaatgatgtctttctagaggcattcccctgtctgaaccaggggaatgacattctgaaaagacctctctggcttcccttaggcaatcttatcaaggaagctcatatgcacgtgcttccaaagaagtccaatatagatgcagcaaacagcactaacataaaattagtcaagtgcttagaggaggcattccactactctctttcctaaattcaccgagaattggtctttacgtagcaagaaaggctccatcgactctcttccacacttcatttccctgca

SEQ ID NO: 452968 - DNA, 1458 bp, Homo Sapiens
gggccccaggagccgccaaaccctttttcacatttcttttcggggaatcccaaaattggtttttcgtttccaaccaacaaccttccataccaagattctggcacaggctttggttgtttggatcaaagtaccattttaaatatgaaatccctggcaaagtttctttcgtctttcgggcaacttgcatatatctgtttcagtgagagccaatggttctgtgctcaccattagattgatggttgaactagaagctgaccttgctggctgtggaggtgggggctgagatttctttgtactgaaacttccatggtaggtggctctgacctgagacctcaggtagcagaccacagccacatggtatgtctgcccagcgagcaggcctccaatgacgcggtccgtgaccgtgaggttctgcttcagaaccagggactgatcatgggctgaggtgacggtgaggtcataaaaataaggaccggggggctcaggcctctcccagtggagtttggcgctgttctctgttatctcaaacacctggacttcacgggacatcttaaccatgggcttagtggtggctggcttggtggcagctggtttggctgcctgtggcctagggacctcaggcttggtcgccactggttttgcagcagcagcagcggggggtcttacagctgctggctttgctgctacaggcttcgctgccgttgctggcttcaccgccactgggggtctaacagtggccgtctttgtggccacaggcttggcagccacaggtttcgcaggggccggctttgcagcggctggcttcacagatggctgatttataatagtcacaggctttgttgtggtggttacaggctttgttgtggtggtcaccggcttcgtcgtagtcaccggcttcgttgtcgtcactgggttggatgtaggacttgaagtaacgttattcggaacatttacttgtttgtgaccaaacttcacaaggttctttgtgggttggtccccttggaaccaatcacactgtttcctgatatctggggacaagtaaaaagcattttcactgctgacgaaggatggcaacagcctcccgaagcgcatcaaaggctcctcgttgagctcggtggacttgtccactaatttgaagaagacgtcgtttggctcactggcgaaggtgtatacctccttgatgttcaccttcctgccaatgcccaggaccacgaagaagtagcccttgcatttggcctgcaggatgactctctgggcctcctccagctgctgctccggcacctcgcccgtcagcatcaggaccacaattttcaggtcccgtgggtttggggcactttcaaagacattctctatggtgtattcaatggcactgcctaaggccctggttccctgcaactgtgtcattcccctgctgaggaagtccaccagcttctcgttggagccatagtcagtcaggga

SEQ ID NO: 452969 - DNA, 1131 bp, Homo Sapiens
atgggggtaatgggacacgtcaagataaaaagctggaataaacccagagactttctggagtgggaaacatgtaatgggatgttgggaatgcaggcccttgcagcccacctaggtggggaaagcttctagcagtggttgatacaaaaatctattctaattttaaacagttgcagggagggggtgtttaacggctgtatagcaccttgtaccttctgggcacttacagatattaaatgatggtgatgatgaatggtacacaactctgtaggaaggtttataaaaacaattacaatttgttaagaaatttcccaagagttctttaaacaaacctatttaaactaccatatctctttaaaaaaatcttccgctctcagtattatatgatgttctcaagctgaggtttgggcaatagccacagtcatgtcaaggggacatggaagagatccttctccttaaatactgaggaactttgtatcctgccagggctttcttcatcttcatcatcatcatcatcttctaatatacaaaatggacttctttttaaaaaggtgcttttctgaggatggatttatcagctaaatgccttgacatggaatgtatgtgaactcccctcccacagcatctgtcacagctcaccctcatcatcttagaagcatcaggataaaaaggcttgatttctttggtataatctctcccaggatcttgcactgcaactcttctggcttcccttatggcaccgtttttggtccatggaatccccacttttggcactgctgtaagcacggacagctggacttcagtgcgcacttcagcaagagcagcacttggatttgtctcggcacagcactttgggcctttgagaatatgagcttcgatgacataaagctaataacttggttttgtgggcagccatcctgttcactcattaggctggagcggaattttcaatccttgtcaactagtgaggagaatgaaaaacatgccagggttggcccagcaagtccagtttgtctcacccctctccaagaatgttcatactatatttacacatctagaatcatttgaaatatagtgtagtatcctaaatccatctctatttctgatcccgaaaattccggaccggtccagcct

SEQ ID NO: 452970 - DNA, 1328 bp, Homo Sapiens
  misc_feature (51)..(82): n is a, c, g, or t
  misc_feature (687)..(687): n is a, c, g, or t
  misc_feature (933)..(1269): n is a, c, g, or t
tttttttgaaaaagctatgttttataaatatttctgtagcttccacatccnnnnnnnnnnnnnnnnnnnnnnnnnnnnnnnncatttacaacccaagctagtgattccatgtggtgggcccagcaggctcagaccccagggtgggccagggggtcccgcagaacattctgaagaaggcgggcagaccccttcccggaggctggtctctgtggccctgaaaggtcaagtctgtatcagtctcaccgatcccaagccccgctccttacaccagcctgtgggcactccagagcctcaggctgccaagttatttttaatcttgtcggtttcctttgatgtcctgccctccttccagggtggccagaccttctgttcctggtggcttccaagtgaaggcaaagcacaagccgcctcccatgcctggcatctggaattcacaagcagagctccatggagtgtctccaggcccctggccccagttgctgagggtccttgagcagagtcctcgctcctgcgtggggcggagggcagggcctcacttgcagacatagcgctccacggtacgctcacacctgcggcaggtgacgtagcagcaccagtggtacttacagtggcaccgctcgaccacgcggtctgtgtaggggttgtagccacgcccgcagcacataaggtcgcagctgtcgcttccgnttggatgtcttgttgcactgcctattgtgggggcaggaaggaggtcagtgcatgccttggtcaccaccccaccaacaccccatgactcccagccaggcagccggcagcgtctcccatggccaccgactcagcccttcttagaagctgtcttgatctttggggaattttaaataatcctcttacctaaaggtacttctaacttttccctatatttctaataaggggttaccaaaatgatggggctgnnnnnnnnnnnnnnnnnnnnnnnnnnnnnnnnnnnnnnnnnnnnnnnnnnnnnnnnnnnnnnnnnnnnnnnnnnnnnnnnnnnnnnnnnnnnnnnnnnnnnnnnnnnnnnnnnnnnnnnnnnnnnnnnnnnnnnnnnnnnnnnnnnnnnnnnnnnnnnnnnnnnnnnnnnnnnnnnnnnnnnnnnnnnnnnnnnnnnnnnnnnnnnnnnnnnnnnnnnnnnnnnnnnnnnnnnnnnnnnnnnnnnnnnnnnnnnnnnnnnnnnnnnnnnnnnnnnnnnnnnnnnnnnnnnnnnnnnnnnnnnnnnnnnnnnnnnnnnnnnnnnnnnnnnnnnnnnnnagatagcttttttctatttcttctacttctaaatactggaaggaccctccaaccaatct

SEQ ID NO: 452971 - DNA, 1084 bp, Homo Sapiens
  misc_feature (52)..(60): n is a, c, g, or t
ccccctttttccaaggcccccaagaaaattggggttcaagcccccttatatnnnnnnnnnaaaaatgggggggcacccgttcccccgcaaaattaaaggtgtgttgggggggccctcaagcaagacaggaacggggccccatggggccttttggttgggggcacttgggctccctgtttcctggggaacgagctccgggggggcccctggtggccattggcccgggacagagatatggttcccaagctttcccccgaatttccggtgtcccagccgtggcccctgggctcgtgaggctgcacgccggtgcgatgacacactgtcccccggctcaggctgtggctgccctgcactttgttggcgatcacccagacctggtccaggggccccacggacactcggcacacgttgttggacacgtgctcccagctggagccctgcgggtagctgggcgtgatcccttggcgataccacaggtttccattctcatccagggcatacaccgacgtctgccccgcggacacctgcttcagcctctgtctcggtggggacgggatgtggtaccagcagtcaccggctggctgcgaggggtacacggatccccggtagaaggcggagccgtcccttgccacggcccacacctggtagcaggccccgatggagatggaggcgaagggctggtcggtgccaacgtgcagccaggaggagcccgcagggttgagctccgacacgcccaggcggcacagcacatcccccttgtcgctgacggcccagagggcgatgctgtgcccactcccctcggcacccgggctctccgggatgatggacacgtccctgagggcgatggggggcacctccagccagggcccactggtcaccagcttgcattttctggcccagcacctcctcctcacaaaatccttcatcgttttggacccatggtatgaggcagggaagtcgctggcatactgccacccctcctggtccgtgccccccggaacgctgaaatccacgaaccagtcggaaacccaggcccactgcagggacgggggcttcgcctcgtgccgaattcgccacccaggcc

SEQ ID NO: 452972 - DNA, 867 bp, Homo Sapiens
  misc_feature (55)..(55): n is a, c, g, or t
  misc_feature (390)..(421): n is a, c, g, or t
  misc_feature (430)..(714): n is a, c, g, or t
  misc_feature (797)..(819): n is a, c, g, or t
ttcccttcaactggaaatatgacctgccataaatgaacaaggaacttttgttcanctaggtgtatcccagccacctacaaacagggtctcaatagttgttaaataaattgaatgaaagaagaaacagatattattctggcaagcagaaattgggggcagggagagggtggaaaagccaaaaagtgtatcaagtgaaggaaatatcagcaaaagtcttccatgaaggcagagaagtgcagagcatgtttaagaccaatctagatacaatatgaggcatatctgcagctgcggtgggggttaagagtggaaatacaagttagatcaatgccagatcaaagactttgtatctaattcaataaacaactagggaaagcaggatctatttaagannnnnnnnnnnnnnnnnnnnnnnnnnnnnnnngagatggannnnnnnnnnnnnnnnnnnnnnnnnnnnnnnnnnnnnnnnnnnnnnnnnnnnnnnnnnnnnnnnnnnnnnnnnnnnnnnnnnnnnnnnnnnnnnnnnnnnnnnnnnnnnnnnnnnnnnnnnnnnnnnnnnnnnnnnnnnnnnnnnnnnnnnnnnnnnnnnnnnnnnnnnnnnnnnnnnnnnnnnnnnnnnnnnnnnnnnnnnnnnnnnnnnnnnnnnnnnnnnnnnnnnnnnnnnnnnnnnnnnnnnnnnnnnnnnnnnnnnnnnnnnnnnnnnnnnnnnnnnnngcaagaagtatccattttattttagatagatcaaaattagcagatataacatgcaactaattattgagggaaaagataaaagnnnnnnnnnnnnnnnnnnnnnnnagagacacggtctcactctggatcccgagaatccggaccggtccagcc

SEQ ID NO: 452973 - DNA, 1848 bp, Homo Sapiens
  misc_feature (185)..(185): n is a, c, g, or t
  misc_feature (1178)..(1179): n is a, c, g, or t
  misc_feature (1190)..(1190): n is a, c, g, or t
  misc_feature (1195)..(1195): n is a, c, g, or t
  misc_feature (1197)..(1197): n is a, c, g, or t
  misc_feature (1199)..(1200): n is a, c, g, or t
  misc_feature (1203)..(1203): n is a, c, g, or t
  misc_feature (1205)..(1206): n is a, c, g, or t
  misc_feature (1226)..(1226): n is a, c, g, or t
  misc_feature (1230)..(1230): n is a, c, g, or t
  misc_feature (1232)..(1232): n is a, c, g, or t
  misc_feature (1247)..(1247): n is a, c, g, or t
  misc_feature (1251)..(1251): n is a, c, g, or t
  misc_feature (1254)..(1254): n is a, c, g, or t
  misc_feature (1259)..(1259): n is a, c, g, or t
  misc_feature (1272)..(1272): n is a, c, g, or t
  misc_feature (1278)..(1278): n is a, c, g, or t
  misc_feature (1300)..(1300): n is a, c, g, or t
  misc_feature (1308)..(1308): n is a, c, g, or t
  misc_feature (1787)..(1787): n is a, c, g, or t
acaagctgcggcgctacacgaccttcagcaagaggaagacgggcatcatgaagaaggcctatgagctgtccacgctgacagggacacaggtgctgttgctggtggccagtgagacaggccatgtgtatacctttgccacccgaaaactgcagcccatgatcaccagtgagaccggcaaggcactnattcagacctgcctcaactcgccagactctccaccccgttcagaccccacaacagaccagagaatgagtgccactggctttgaagagacagatctcacctaccaggtgtcggagtctgacagcagtggggagaccaaggacacactgaagccggcgttcacagtcaccaaccttgccgggtacaaccttccaccatccaaacagcacctagcacctctaccaccatgcaagtcagcagcggcccctcctttcccatcaccaactacctggcaccagtgtctgctagtgtcagccccagtgctgtcagcagtgccaatgggactgtgctgaagagtacaggcagcggccctgtctcctctgggggccttatgcagctgcctaccagcttcaccctcatgcctggtggggcagtggcccagcaggtcccagtgcaggccattcaagtgcaccaggccccacagcaagcgtctccctcccgtgacagcagcacagacctcacgcagacctcctccagcgggacagtgacgctgcccgccaccatcatgacgtcatccgtgcccacaactgtgggtggccacatgatgtaccctagcccgcatgcggtgatgtatgcccccacctcgggcctgggtgatggcagcctcaccgtgctgaatgccttctcccaggcaccatccaccatgcaggtgtcacacagccaggtccaggagccaggtggcgtcccccaggtgttcctgacagcatcatctgggacagtgcagatccctgtttcagcagttcagctccaccagatggctgtgatagggcagcaggccggggagcagcagcaacctcaccgagctacaggtggtgaacctggacaccgcccacagcaccaagagtgaatgatccggccgccgccctggacagatggccccagggatggcaccacttatttattgttgccttttcccgttttctttacacacacgttgacgggccgcaggagggagnngcggggaggangaacngncnnccncnngactgagccctcccgctccngccnanggaaggggcctggcngccncgncccgnccggcccgcagcnccccgngcgcccgccccaccgcccaagncgggggcngggaggggcggtccgccttccagggaccccctcgcccgcctgggctcgatgtttgccatgggtaatcagctgatccagatgggaaccagtggcccaccatccacccacacaaggcctttcagggggggcaggggacacaatagtcctccgtctgtaggaaagcaggtggggggctcttttgggctgccctcctgtgatggaacgcggggtcgaccgcttgtgggcctggcagtacgccgtggtgcacagaaaaagccctggaagtgggcccataccagggggacccacccttggggtaaatatggagacttatagacctaacacagagagggggaatgcctgaccagcaagatgtgcctaaaactaccatggcgccgttcatcaccgtgacaagaggttcactgcgggggcggcccaggagccttacatgatgtccactacgcacttagacatctactcagtgaggcagtcctgcgttncggcgtgggggacccatgagcgcgcgatggtagaagaacactagcggatgtgagttgagta

SEQ ID NO: 452974 - DNA, 914 bp, Homo Sapiens
gtcacagggtcagggctgtacagaccccattttccacaggcacagacacagcggttacagtccactcggttttcagctccatctgcatacgtttcatcctcccagggcacacttcttttcaggagggttgaaagatgggttgaggcacttgagaaactcttggaagctgagtttccaatcagcattttcatcagacagttcaatgagagcatcaacacagagtcccctaagcaacttgttgttctcctggtctggatacgttgtaatattgatggcagtttcattctgttccacaaacttcaggaattcactggagtccaggcgagaatcaccattatcaaagttcttaaaatacttgtctaggatttcactgtagttgctgcctttagagaaccagccatctggaatgatctcagcttccagccactggatgatgcgacgtcggagctcatcacggttggactgatagcaaacaactgggctggcagatggacttacggatttcttctctttgcagtgtccatcgtaatcaacctggattttggatccagtgaggcaggcatctcgatgcagttcacagtggttgaggtaggtcttgccattactgccacacacaggcctcttgtgaggtttgcattgctcaatgcagagacaggtgggttcccctttctctgtgactgcacattcccggccggctccacaaaacacattggcacagatcttggatttgctccttagctcttcctcggcgcggacccaggcgaccgccaccagcgcgagcgcgagcgcgagccagcgtttccacatcgtggtctggtccaggtctcctgggggcgcggggcaggacggcggcagcgagctgtaagcggaggtgggagctccgccgatcgccagcctcggaggaaacgcccgct

SEQ ID NO: 452975 - DNA, 930 bp, Homo Sapiens
  misc_feature (60)..(70): n is a, c, g, or t
  misc_feature (702)..(711): n is a, c, g, or t
  misc_feature (843)..(843): n is a, c, g, or t
agcggttgaaggatatctatccacagattcaaaaacccaataaaatctcaagcagtattnnnnnnnnnnngaagaaatctacttctagtcacataagagtaaaactgcccctaaaaaagacagagagaaatctcaaaagcagccagagaaagaatacacattgcctcacaatagacttctcaacagcattggtgtaatactatctcatgtactaaaagaaataactgccaactcttttatattttccaagatctcttctggaaaacaaaaactttaagaatctgccttcactggaaattcttaatgatgtacttcaagcaaaaagaaaatttcctaggtaacaaggtctaagatgctagaaagaaagacatgcaaaggaaacttaccaccatattacagatatggactgtcagtctgactggtcacactaggggcattttgttaccaaggccttgaaaataataaccaacactgcatacatgagggatgccagaagaaaggtctgagagccacctcttcctggcactgaaggaaacagggcccatcagagcaacacaatgtacctttgtgcctctctcatctccttggaggcaaatgtttataatctctggttttgtgtacagtttataacagtatttttcattcaggttgctacctattagtggatggtgaaattaatttggtggatcacattcaggatannnnnnnnnnaaatcaaaagaaatacaagctgggctcaatgactcacaccttgtaagcccaacagttttgggaagaaccaggcagggaggaattgcttgaggaacagggagttcaagaatcaagccctggggaaacaatggncgaaggacccccttatgttcctacaaaaaattttttaaaaattattgcccaggaattcctggtgtggggccatgggttcccccacaa

SEQ ID NO: 452976 - DNA, 884 bp, Homo Sapiens
  misc_feature (817)..(817): n is a, c, g, or t
  misc_feature (828)..(828): n is a, c, g, or t
  misc_feature (865)..(865): n is a, c, g, or t
tggccttgaaagggtttttttcatgttgctttgagtttaatgatgatgatctcgcagaagcagcgcttgatgaagatgaagatctaaccatgtgcttgatgagcaaatttacagcccagagactaagaccattctaccggtttttaagtcctgccttccaagaatttcttgcggggatgaggctgattgaactcctggattcagataggcaggaacatcaagatttgggactgtatcatttgaaacaaatcaactcacccatgatgactgtaagcgcctacaacaattttttgaactatgtctccagcctcccttcaacaaaagcagggcccaaaattgtgtctcatttgctccatttagtggataacaaagagtcattggagaatatatctgaaaatgatgactacttaaagcaccagccagaaatttcactgcagatgcagttacttaggggattgtggcaaatttgtccacaagcttacttttcaatggtttcagaacatttactggttcttgccctgaaaactgcttatcaaagcaacactgttgctgcgtgttctccatttgttttgcaattccttcaagggagaacactgactttgggtgcgcttaacttacagtactttttcgaccacccagaaagcttgtcattgttgaggagcatccacttctcaatacgaggaaataagacatcacccagagcacatttttcagttctggaaacatgttttgacaaatcacaggtgccaactatagatcaggactatgcttctgcctttgaacctatgaatgaatggggaggcgaaatttaggctgnaaaaagagggntaatgtaaaggaggctatatgggatatggcagcgcgngggcattccaccaggacct

SEQ ID NO: 452977 - DNA, 952 bp, Homo Sapiens
  misc_feature (305)..(346): n is a, c, g, or t
  misc_feature (422)..(422): n is a, c, g, or t
tttttttaagataaagaaaccaaggatcagaaaggttttagagacttgacttgtcaaggtcacaaggtggagccaagatttcaattcatgtctgctagatttaaaagccctaccccttgattctcaaactgtactctgaggcacccatgggtgttgttgcaattaacagggacactgtgagttacattaaatgtttgagggaaacaaagcaataattgacattagacagacactgtgcaaatggctagcttgaggtagctctcagttacaacattagatcgcacattctttttgatgaaaatccnnnnnnnnnnnnnnnnnnnnnnnnnnnnnnnnnnnnnnnnnntttaaaaactgacacctattactgataaaattctctgtttaaaatcctatttactattttaaagataagtattagnttttttttaaatacaataattctgttattgataaaatttaaggcattttcattgccttttgcagatttactcataactacctaacaaggaaagaaggtataattatttcagattggattatttattctaaaattaaattcttcactaatttattctaagatgaatttaatagtccatcaggaaattggtttttataaacgcttattttatgggcatcaaatacaggcaaaagtaataataaatgccaaccgtctctttactttatgaagccaaatatttcctcagacttggtttttaaagctggaatcttcctccttcaggccactattatttttcaaactccatataaatattgaatctaacaattaattagtaattttaattttcctttttctcttcaaaattccttctcttctcctgtactgttgactttcaaaattcacagatgacctccttctaccggggctgtccttccctcgtgccgaattcccacccagcctcgttaccttagaccgttaggatactgcctc

SEQ ID NO: 452978 - DNA, 750 bp, Homo Sapiens
tatccgtgttcgggattacgggctgagagtggattggggacagggggaagaacaaaagggtaaaatccttcctgaaactttgacaccacacacagcttcacattgaacctcccgcattcagtctcagacatatcacatcaggacagatatgggggtattcattccagaagaaaccagaagctggtttgtgcagtcagaactcttcaacacggcagggagccttgagctgaatgtcctttctttgtggtattctgaataaaggatcagcctgggagacaaggagccagagctgcatcatttccttcctggggcttggccaggagacacgtaacggtctggaaggaactctcattaggagtcagaaacagcacaacgaactctactttagcccaactcgaagaacacgcaaccttctaaaaccagaaaccccgtctgaaccctttacatttcagaacagaccccatgcccacctccaccagagcaaacacaatgcatttgcaggctccagtactctccaaagcaaggtaacgttagtcttcctttctatcaatccgaattccacacttaaggcttggcttgggacccacgtcctaaacaaagcctcttggatagactcagccctgcaaatccttcccatcttcaacacctcgaacacttacattgcctggtttatcttctagttttacagaagtgtcagctccccaggtactgctacttctttgaggatggggccatttcttgaacgtcttt

SEQ ID NO: 452979 - DNA, 1166 bp, Homo Sapiens
  misc_feature (835)..(896): n is a, c, g, or t
  misc_feature (953)..(953): n is a, c, g, or t
  misc_feature (1045)..(1045): n is a, c, g, or t
  misc_feature (1064)..(1064): n is a, c, g, or t
  misc_feature (1080)..(1080): n is a, c, g, or t
  misc_feature (1087)..(1087): n is a, c, g, or t
  misc_feature (1107)..(1107): n is a, c, g, or t
  misc_feature (1130)..(1130): n is a, c, g, or t
gcgctgcacatcgccgcgttcgctggccaccaggacatcgtgctctatctcatcaccaaggcgaagtacgcggccagcggccggtgatgcccgccgggaccccggaccccggccctgcgcccgcgtcgtctctgctgtaccttcccgccaactacctcggtgcgcgcccggctcgcaggccccgccagaaggcccgtggccacggcgaatacggcgcgtgcgtcccggccccagggtccggcagccccgccggccgagcgcctccctgcggcctagccgggcccggccgggccggagcagcttcccacggcccccacccgctcgcctgcccgccgcctcgcgggtgggggcggggcgcgggctccagccccttttgaaatttgagtctcgcaaccagcaagttcggaatcccgagataccggatcctctgcgcaaaatgttttctcccgaaggtgaaaggcgggcggcgggagccgaaggcggactcggagcgctccgccgccgccttcaggacccgcccgcaggcccgggacgcgccgatgccggctgcagccgaggagcagccccgaggtccgaggtccgcgccgctggcgcgcggccgaagagacgctcggctgttcgctgttgctggtgttctaaactatttatcttgtgtgtgtacatttgtgggtggagtttgtgcgcctggtttttttgtttggaaaacactgcgtggtcaatgtggttatgggggggagtgatgcatttttttctagtcttaaaactaaaaacttgagtctaccatttcttggttgcactgaaaataccgcccagcctgatggtgttcccgtgctgnnnnnnnnnnnnnnnnnnnnnnnnnnnnnnnnnnnnnnnnnnnnnnnnnnnnnnnnnnnnnnttctccctctccctcaaatccgtgagttttggaagccccagggcctctctcccccgnccctcctgggatgaggccaccatcccccaaaccggcttgttttgcagtttccccaggatcctgggaagcttcggtgggcgcttcgaggggtnggccggggacaaggggggngttgggtgaaggttcntttaacnttttttaagttgcgttctantcaaaagttaaacggtttgcaanatttttttaaaaaaagtaaaatgggatttttccaca

SEQ ID NO: 452980 - DNA, 897 bp, Homo Sapiens
  misc_feature (182)..(182): n is a, c, g, or t
cttttttccagggggacttccaacaagtttcggggggaaaggtttcctgtttttttgacctgccctgggcaggctccatgggatggggtagttttgttttaacctggggcccccccttgtccaaaggcagggctagaaactattgcttgaaaacctagaaagaaaacctagtgagaaagagnatggtgatgatggaatgaggggaagttgtcttcttcctcccaaaaccttgtgcccccccaaccccaggggacgcccataagactttagcgaggcgtccttggctataaaatgtcatgcatttgttcttggtggccttgcccagtggctcctctaaaaagcactacatcccatgcatactccaacacatctgggatgcaagcccagacaacacggcaggtgcagcctttgggtaattgattaatccagagcccagtggaagaagatgcaagagaagctcttgatctctggaagaaaaggagtaaaaggggaaggcccccaaaggaaaacaatccccccaaacccagtaacctaggcatcatctccaaaccaaacaaaatcccaaatgctctctgtaatcaacgggccccctcctctctatttcttcaacagtttcaggtcacaaattaggtgagtcttccatcaaataacttaaaaaaggaggagggattggaatcagtgttgcctggctcaggccagttagcagccagtttttctagaatctcagtcactgttcaaaaatggagctggaaaagtcacgtggatgttggatgtcttcacacggaggaggcaggaaagggtgggtgggcatgacccaaggaggtgggggagcgaggatgggtcaggggagagcctgggccaccaaaacaggagcggaggcctgaggacagcacagga

SEQ ID NO: 452981 - DNA, 739 bp, Homo Sapiens
  misc_feature (44)..(91): n is a, c, g, or t
  misc_feature (127)..(187): n is a, c, g, or t
  misc_feature (371)..(371): n is a, c, g, or t
  misc_feature (578)..(578): n is a, c, g, or t
  misc_feature (672)..(672): n is a, c, g, or t
  misc_feature (677)..(677): n is a, c, g, or t
atgggagacaatggggccattttttcacaaatagggggggaacnnnnnnnnnnnnnnnnnnnnnnnnnnnnnnnnnnnnnnnnnnnnnnnncccccgggaaaaggggtttagggtggccaccctgtnnnnnnnnnnnnnnnnnnnnnnnnnnnnnnnnnnnnnnnnnnnnnnnnnnnnnnnnnnnnnaaatgggggtttcctggccctgcccttggcttggctaccacaaatggttacaagaaggggtagaggtccatgaggaaattcaaaggctgaaagatgtttttggatgtttggatgacaccgacgtacccctcaccttgcaccttgaaccctgctctgaagccccgtgtagttttccaggcttggncctaaggcaaaaaactacaaagcatccctaatgagcagaattatacaacaggaatgtatgtgcatatttgacatagtttcttctctagaagggtggctctctggcctgtgacctctgccctcttcaagggcgagggaggagtccagagaagaaggcttttgttccccacggccagttcttctgcagcccctacagccccagggaccntgccctgctccgcgtgggctctcagaagcccagcaatttccatatgggtgggtgacttcagagcgatggacaaagctgtgcggccagccttgtncagtncaggctgctgtcgcaggctgggtgtgccaggagcagccgcaccaggtccacgttgccatggt

SEQ ID NO: 452982 - DNA, 1008 bp, Homo Sapiens
  misc_feature (451)..(459): n is a, c, g, or t
  misc_feature (735)..(735): n is a, c, g, or t
  misc_feature (898)..(900): n is a, c, g, or t
tctgctgaccatttttctgcactataaaccagttcattttattttatactctaattagctctttatttaaagtgtttttatttaaagtgttggcacacaagtttaagataagctaaattagccaacacatataactagctattgggtattaatcaaaaggatgatagtatggcttactgttaaaataaaactcagtatttagatcttaatttgcaatttgaggagctaaaccagaagtttctcagatgcatctattgcctcttttgctatcttgggaatagagataggtagcaattacaagtcaaatttcatttctgtaaactttaagatcatgggtttcgttgtttcattaaagtgccatccaaaaatagtgttctacatcaccacaatagcagtgttgtcctctggctgccattgtccttacccaaggcctaaaaagcacatacttgannnnnnnnnctgtttcagtattttagtccatccacttgtaaacagatttcccaccacaacccccaatgcagtttctgtctggcaagataatgctgaaacatcatactctcaccttggggaagggtggttggaaaagataaaacccttagcttccaggtccatctgctgaaattgtccgaatttggccagtgtattatattaagtgatagcaaatggagagaaaagaagaaaatgaatcttgacgagtgagctgccatcatttctgtggcagtcttttccaatacntgttaaaatttctaccccattggatttttcaggcttctaattattggtatgtatattatatgtggtgtttgtgtagccactcaggattttaaatttgctttggtttggtttttttcatgttgaattaggtgggaatgtttgaaataaacaagaagataagggnnnaactcttttctttccttttaagttccgggatacatatgcagaacgtgcaggtttgttacttagggatacgtgtgccaaagtggtttgccgcacctgttgacccttccc

SEQ ID NO: 452983 - DNA, 886 bp, Homo Sapiens
  misc_feature (154)..(154): n is a, c, g, or t
tctccttcaggcacatggtcaggaagggcaactgggccaggtcatcccattcaatctctttaggatcaccgttcttcaggagctcttgcacctcctgtcgggcagtgctcctggtattctgggtgcctcgcgaggttgtacaggacccaggagnaggccactggccgtggtgtcatggcctccagacatgaaggtgtcagcctctgctcttatgttctcatctgacaatgccttcccatcttcatccttgctcagcagaagcacatcaatgaaatccaaagtcttggacttggctttgtctttgaaaaaatcatcaataccctgagtggggagggtgcgacgccgctcccggatgacagcgtctgtgaagtcatgcaccaggcggcaggccctgtggaagcgccgcccgtcatgggagaggtaatacagaaagtccatgtgctggaggatatgctggcttcttttctctacaagggcactgagctccaagatggtggcaatatattcactgggcctctcctgacaatggctgtcaaagctgaagatgcatttctgtagactgtccaaggtcatgaggctgatgtgctcaaacatgtccagacgactgctgccctctgaggccaggtgctgccacttgtcctggccagagaagggaagagagctagagctgggccctgcctcctttgtgcccctccccagtcccaaacatcaggatggactcccccacaaccagcctcctggtcctctgccccaggaacccattgccagcaaggaccagactgggatgcgagcagaaactgttagtataggagatgaacacccatggcttggagtcaagagaactgcattcaagtctcagctctgtctcctatgctctatgtgccat

SEQ ID NO: 452984 - DNA, 1134 bp, Homo Sapiens
accataatcccaatttccaaacttaatgtaatcccaatacaaccttcatacaaataggcaggttaaatcacaccgtagtaaaattttcgtacaacatttttttaaagtttcaaaattcaaatgttccaaaatgtttaattattttgtcttaaggtacatttgcaaagaattctaactgctgctattacctttgtccttgctgaaggaaaacattaggagaatgagctgtttttaagctaaacgtgtctccacttgatgaatggcgtgaaggagcttttccacccaagagtgatgtttctgcttcttttatttccattgcccttttgtataattcagcagctttttcaaaatctcctccttcatagctaagcacagctaaatttttcagtgtttctccaactcgaggatgcatccgacccaggctatcttcataaatctttaatgctctttcatataatggcaaagcttcaacgtgttttttcatttggctataaagaacagctaagttcaccaaggcagtagctacactagggtgctttgggccaaaagatttctgtcgaatttcaacagccaattcatacaaaggtacagctttgtcaagtttccccattttcttatacaagatggcaagatgcttcaccgtatatgccaaagaagggtgatcaggagctaatgcacgtctccgaatatctaaagctctttcataaagttcttctgctttatcatactgtttcttttcattgcatagagctgccagattattcaaagactgagcacagtcagggtgatctggtcctagaactcgctccctcatttctaaggaacgcttcagaaactggtcagctgtttccaggttattttgaagatagtagagaacacccagttcattgagggtccgagcattatcaggtgtgtccttacctaatgtaagctcttctaactgtaaagcccgtctacgtaaaagggcaaatccgtacaagttgccttttttctttatagccttctgatgaattttaaaggattttttcctaaaatgttcagcttgttcatatttattttgtttctggtacaaagttgcaagtgcttcaagttcacgagcagtatatggatggtccgcaccataagcattttccc

SEQ ID NO: 452985 - DNA, 1184 bp, Homo Sapiens
  misc_feature (227)..(244): n is a, c, g, or t
  misc_feature (802)..(810): n is a, c, g, or t
tccggaaaaggtgaatatttttttataaaaaaggttactggtgaaactaagggggaaatttcatttgtccaccaccttattggggactgtctaatttcagaagttttctgtttttaaaatgtcactgttggaattagctcagtggattgtttcatagtcagttacagatgggaatttcttgttctactcttttcccccccttctgactactgcacttgagtagtctnnnnnnnnnnnnnnnnnngtcactgtcttgatttgggccttcaagcagttattttactgttgccactaagcagggccaaactggttcatctctagtcccttggtagccttccatcagcaacaaaattatgaaaccagcaacagagctgaacctaatgccatcccagtttcttcaccagtgctcccagccctaagttcattgcttaagaggtaaaggacaaataagtattttcatgtaggttgaataggttggatctgaggacaacccataccaactagaaacctattaaattccacccacttgtcgtagggctcatcttggtcaccacctgaaatggagactgatagtttcaatcatggtccacttagtaaaataataacaaagcctgttatcttaataatataagtaattaattaaacaagtgttagagaattggaaacataaaaagagccaggaggtaacataaaaccatccaccacatatacacacacacaaagttaacagtagttctcttctggtagtaagattatggctaatttttctacaaggcatatatatttatttacacatataaannnnnnnnnaatgtaaagcttaagtgaacacatacctgatcccacctccattaaaacaaataccaccacttatgttagagtctaacagtaatacttacttttaagtcagttactgcattagatagtaggaacagaattctctagaaaatggttatatggcctatgagatttaaccactggagttgcaggttcaagaagagactgccaaggattctaacactggcaccattaatacacctctctacctaaggagccccagaaaaatcactttccagggacaaagaagtccttaaagtgtatatggaaggtttcacatcttagcttcagtaccttgtatcaaacaccaatatttttgtttgccccacccccacccttggaaagta

SEQ ID NO: 452986 - DNA, 1581 bp, Homo Sapiens
  misc_feature (104)..(104): n is a, c, g, or t
  misc_feature (136)..(136): n is a, c, g, or t
  misc_feature (423)..(517): n is a, c, g, or t
  misc_feature (1073)..(1073): n is a, c, g, or t
  misc_feature (1165)..(1165): n is a, c, g, or t
  misc_feature (1254)..(1254): n is a, c, g, or t
  misc_feature (1274)..(1274): n is a, c, g, or t
aatggaaaagacagacgccatgttgaccttgaccaaatgcgttttgcacatgtgtgaagcctctgtttcctcagcgggcccttcttgaaggggtggcttactgntcttcaggtattgggacccccagtcgtgccgnctcccacccttggcccagtctgacttagctctgcattcgcctgtgatgactgctgcaagttgtgattggtgggctggatggtggtctttgcattttctgccgtctcatccatccctctggtggtccctgcagacctccctgaggcagaaggtggggaccctggggccctgccgctgtcccccaggaggtgggccgcagggggctgccaggcagtagcattagccctctggggtcagcccctaagaaggcctgggctctgagcccttttatatacttagccactactnnnnnnnnnnnnnnnnnnnnnnnnnnnnnnnnnnnnnnnnnnnnnnnnnnnnnnnnnnnnnnnnnnnnnnnnnnnnnnnnnnnnnnnnnnnnnnnattcttactaccatactaccatgttaaaacgccaactcaaggttcttctcaccacgcagacacaattatatttgcctgcgtatttcacacccccaacccacaacgctactatctccattgtaatctacactccatttatcatacgcaataacaagaccaaatttcactatcttacccctttttatctcttatatttatgtacagacactcctcccactagcacgaacaataatcaacaatataccaaaattaattacattacacccccaatctataaaaaaattattcaacattccatcacctccaccaccaattttgtaacaaaaccacaatctacacgatacacatatagcagatagacaccaacgctcagataaaatgtatataaacacatgaccaacttatgtgtcactaccacgccccactacactttgtatcgaaccccgtctcaacgctacttgattgtaataatcatgaggtagctgatcttttccttcaattaataataataagcaaaaacttactttgcagaagagatgatataatataacagtgntatccgccctctgcctaataatttaatcattgatatatgtgtgccataccactgccgcccgcccagttaagaatatgaaatagctcccaacncaatatcatcatatatgatcaacacatattctataatgtcaacgaaaacaatgatgtcatattttattattatagccacgcttcgctancacgcctctcccctaacccnaatcttctaaggatagacaacattaatattgtagatatattgagattactcgcgtttcaattaaaactcgtacaaacacatgatcacgctagttctgagtcttaccctccccctcccacacaatgctccacacaatatttttatacttccccacttatacaaccttgatagcgcgttatgtgttatttttattttcttatcaaccttatctctttactatacttttctaacgccccatcctcatctattactaactcatactcacgatccactcaccctttatatgaataatatgtccactctctcg

SEQ ID NO: 452987 - DNA, 566 bp, Homo Sapiens
tcaggctccggagctggggtttctaggggctcattttcttcgctgtcacttgaactgctctcgctctctgagtctgaggaactgtctgagtcactggtgctttctgactctgcactgctggaatgtgctgatgccactggttctggaagggactgtggagcacttggaggtgcagatgaggagggaggcttctctggggtttgttcactgtcactgtcctcactgtcactgagctgaaggtcgtcttcgagcatggatgacgttccttgctgagaatttgagtgagtttttgaagatgtatcatattgtttttggttttgggttacagaactgacatgctgagagtcctttgtagggaaaggaaacttggatggctcagctgtactaggcgtatgtattgctgtcaaaggaggcggtcatgaatgggtcatttccttcatagtctcttcaacacaatggacttcattggagtaggtctgctcaactgactgagaaggcatcttcagtttggtgagcttggctttggcaggcactttcaagtctgtttttccaaaagtctgctgtcg

SEQ ID NO: 452988 - DNA, 643 bp, Homo Sapiens
gtgagcactgctcctggcccccacttccttttgatttctcagatcagtctttcccttctgagccatggccttctgtgcacccagctcagtggctcttcacccctaaaactaagtgaagtcatccttccccaaaaggacccctgggagatgttctggccctctgctgactactcccaggaatcagcacctcaaggactatttgagaatgttgtgctctctattggtcaccttgagactccgttcccctgctgccaactcttctcttctgccctgtgtattctgctgtgatcccccttaacggcttttctgtgctactagcttagcccttagggcttttatgaatacctgagtcttataaccattaaacttcttggagcaggccagtggtcccaacttcttttgctccttcaggggaacctgaagtggtgccccttttccccttttttgcaggggctaattttgacattaaataaatcctaagtgttgtttgggggaagaggggtatgccccaaatctagggcatgtcaaattgatattgccaatatgcaaaaaagagggccttttgtagggggaaggctatttgggaggctatactcacctctgtgagcaggggcgccacactcaacgtggggggaatatggaa

SEQ ID NO: 452989 - DNA, 961 bp, Homo Sapiens
  misc_feature (193)..(201): n is a, c, g, or t
ggtccggaattttccggatgtttttcaagtactgagaggttgatgggactgttcgattagctcctctgagaagaagagaaaaggttcttggacctctccctgtttcttccttagaataatttggatgggatttgtgatgcaggaaagcctaagggaaaaagaatattcattctgtgtggtgaaaattttttgnnnnnnnnnttgccttcttcaaacaagggtgtcattctgatatttatgaggactgttgttctcactatgaaggcatctgttattgaaatgttccttgttttgctggtgactggagtacattcaaacaaagaaacggcaaagaagattaaaaggcccaagttcactgtgcctcagatcaactgcgatgtcaaagccggaaagatcatcgatcctgagttcattgtgaaatgtccagcaggatgccaagaccccaaataccatgtttatggcactgacgtgtatgcatcctactccagtgtgtgtggcgctgccgtacacagtggtgtgcttgataattcaggagggaaaatacttgttcggaaggttgctggacagtctggttacaaagggagttattctaacggtgtccaatcgttatccctaccaggatggagagaatcctttatcgttcttagaaagtaaacccaaaaagggttgtaaccttaccccttcagcttccttacatatctcattcatcgaaaaaagtccaaactggccccaggcagggtggagaatctacaataagcccctaattcagaagcggccaccctttatttctagggggtacaaaacttggctaacaatgtccgcggttacaacctccctggtacaggctaagcctcttcctcggggcttatgtttcaacatttggtgttaagcactctggtgtgtggaactaacaccctccgtcctaaatcgctgaaacactcttttttgtggcacaaaacaa

SEQ ID NO: 452990 - DNA, 986 bp, Homo Sapiens
  misc_feature (153)..(154): n is a, c, g, or t
  misc_feature (166)..(166): n is a, c, g, or t
caggtaggaacactgccgtctcctgggacaggggcagctggagagggagggagttcagcagaacgctgctgctgctggcactattgcacaggtccgaggagcagaagtgggtataggagccacaaagcaccccaggaggggctgagtgatgtnngtctttctgggnaatttgagccccaacagtgctgcagcctttgtcccccaccagggttgatgtgagtcctacatctatgagcagcagcgtctcctgacacacctgccccacttcgcacatctcggtattcgatgtggtccaatcagtgggttcttgagccaagtttccgtgtgtcataatggtggtcccccgatgacaggtcagaaaatctttcatatcgcagttctcagtcatacccacgggcccaatttcctgtgtcccattgagcaggttgcaaactggctggggcatgcatccctggactctcagattggagaagatgcctcctcccctgagcctgaggaggccatcataacagtgtgtggtccccttggggcagatctcttctgttgtcccctccagacagccttccatagacaagcagactgggcacctcaaggatcctgggtctgctgggggctgtggggcccaaagcgggagggagttaacgaggttgttgcagaagtcctcctggcggcacacgaaggtgtaggagatcagggagaggccggggcccatccggtgctcagtgacgcggggctcctggtccttggcctccgtgcagcccttggagagcaccaggctcacttggggtccgctctcaatgagcatcaacgtgtcctggcaccccaagccgctgtcgcagctggtgttcttaggggtccattgccggggcaggtcggacaccttccacacatgctgaactgtcccaaactggcagagcagcgcctgcactcctggcagtgggaggatgaaccccaggagggccagcagtaataccgcgctcatgacc

SEQ ID NO: 452991 - DNA, 932 bp, Homo Sapiens
  misc_feature (119)..(119): n is a, c, g, or t
  misc_feature (466)..(481): n is a, c, g, or t
ggcaggggcttaaacttttatataggaaaaaccctttcccggggcaggccagccatgttactttttccaactgaaaagatgaggttagtggcccatgggcggggtcacctgtaggtccntgcatgaaattgttcccaccaactgtgttttgctgtttggggttgtaaattaacccgtgaatacaagtaaccaagaaaatcctctccacaggaccaactcttcagccagtgcatgcagggctctggagggtgatgccagcaggatctggaggtgaggcactgggtggtttctcagacacccggagatggcttcagcctgggccgccccagctgcctagtgcactggtgtccctccaacacaggctactcccccaacacccatgtgccaccaagtttctcaactgcacacgccagatgcgcgttttacgagaatcaaatgagtatttatactgtatatgtgtgtgtgnnnnnnnnnnnnnnnnaattaatctgcacgtatataaacactaaaaggagaaattccaagtgtctgttctctgaaggaaagcaatcactcgccattcttggcaattcctcaaaggtttttgagaccaaacatctttactccccaaattaagaatacaaaaataggctgcaaaacttgccaagtactcacaagtccctgtttgagacaaataagatgtggtccctattgggacagggagggcagaagatgacactttagaagaacatgattttggtttcaaaagcaagacctctcctggaaggcagaaggggccaccgccatgcttgtccttggagccacatgagcacggtgccctgccaggtccagttccctgggtaggggagaaggacggtccctaaaacaccaccagtgcttcttgcccaaagcccttgccctctctctggggtcttctagcactgtcactctgc

SEQ ID NO: 452992 - DNA, 866 bp, Homo Sapiens
  misc_feature (30)..(30): n is a, c, g, or t
  misc_feature (645)..(699): n is a, c, g, or t
cacaaaacatggccccagcctggcccccanttggggccctgtttcactacccaggtggggcttcccagcctggttcccagcaaacagattcccacaccctgccgcgggcaaccagtttcctttctcccaagacagcagggaagtgccagaggctccgtgtgaactcagagcctgataaagaaagcgtaagggcaagtccccatcagggccaagagctctctgagttaccaaaggcctcgtcaacatagccagtgctaccccctggacacatttcttgaaaatatttcattaatgctacaaacattattgatcattttactttaggccttgaaccagcatattttttactttccccacccagcaggataagctgtcgtatttaacctaaatggtctctgtctcagcgtttcacgtctggctgcgtggcagatggctacaggtgttaggcaaataacagcactgctggggactcaaggcagtgggggtgctgcagaaacacaggtagaaatgccccgtgcattgagacacatgttcagtcaccacagattagagaacatagagagcttaggatgtatacctgtgtacgctgagctcaggcctacagcccagagaagacattttttcttcatttacattagcttatgnnnnnnnnnnnnnnnnnnnnnnnnnnnnnnnnnnnnnnnnnnnnnnnnnnnnnnncaattccattacaataaaaatgaaagcaataacaatttggagatcaaagctgcctagctcttggcaataatgagctatctggatttcacatcttccgctagcatggttctgcccggctttggtaacaccacatgtgggtaaaacggtataaagaattgaagaactgt

SEQ ID NO: 452993 - DNA, 907 bp, Homo Sapiens
  misc_feature (644)..(665): n is a, c, g, or t
cccccaaggggaacccgggcccaggggggaaaaagtgtcccccaaggaagggggctttcccggttggtgaaaaccttcacaggaacgccttggatttaaaaggaaaaaggccgtaaaggggcgccaaagttccccccccttcaagggggcccaaagaggcttccttttggatgtttccccaaaagggcccttcgttcaaccataggccagttgcctaccccctgggacacatttccttgaaaatatttttcatttatggctacacaacattattggatcattttactttaggccttgaaccagcatatttttttactttccccacccagcaggataagctgtcgtatttaacctaaatggtctctgtctcagcgtttcacgtctggctgcgtggcagatggctacaggtgttaggcaaataacagcactgctgggtactcaaggcagtgggggtgctgcagaaacacaggtagaaatgccccgtgcattgagacacatgttcagtcaccacagattagagaacatagagagcttaggatgtatacctgtgtacgctgagccaggcctacagcccagagaagacattttttcttcatttacattagcttatgaaaaataaagggaaaacaaccctcttcaatacnnnnnnnnnnnnnnnnnnnnnngcaattccattacaataaaaatgaaagcaataacaatttggagatcaaagctgcctagctcttggcaataatgagctatctggatttcacatcttccgctagcatggttctgcccggctttggtaacaccacatgtgggtaaaacggtataaagaattgaagaactgtgggcacagaatcacccttactgcagattctcattcttaatatttcatcccggagaattccggaccggtccagct

SEQ ID NO: 452994 - DNA, 918 bp, Homo Sapiens
aattatttatcagtgtgagcctggctatgaactagaggggaacagggaacgtgtctgccaggagaacagacagtggagtggaggggtggcaatatgcaaagagaccaggtgtgaaactccacttgaatttctcaatgggaaagctgacattgaaaacaggacgactggacccaacgtggtatattcctgcaacagaggctacagtcttgaagggccatctgaggcacactgcacagaaaatggaacctggagccacccagtccctctctgcaaaccaaatccatgccctgttccttttgtgattcccgagaatgctctgctgtctgaaaaggagttttatgttgatcagaatgtgtccatcaaatgtagggaaggttttctgctgcagggccacggcatcattacctgcaaccccgacgagacgtggacacagacaagcgccaaatgtgaaaaaatctcatgtggtccaccagctcacgtagaaaatgcaattgctcgaggcgtacattatcaatatggagacatgatcacctactcatgttacagtggatacatgttggagggtttcctgaggagtgtttgtttagaaaatggaacatggacatcacctcctatttgcagagctgtctgtcgatttccatgtcagaatgggggcatctgccaacgcccaaatgcttgttcctgtccagagggctggatggggcgcctctgtgaagaacaatctgcattcttccctgtctgaacggaggtcgctgtgtggcccccttaccagtgtgactgcccgccctggctggacggggtctcgctgtcatacagctgtttgccagtctccctgcttaaatggtgggaaaatgtgtaagaccaaaaccgatgtcacctggtcttttcttcttggacggggacaataactggttccca

SEQ ID NO: 452995 - DNA, 1084 bp, Homo Sapiens
cgagtgcggcggcggtgccaggctacgatggtgacagcgtgtgcgttggcccggggggtctgcgcgcagtggggtgtgaaacagcgcggttggtctttgagtccgcactgcggcaggttccccttctcgcggctcgcttgttgcttgggaccatttctagttatggtagcagtgtcgacgctcgctacctgtgtggaggctgtggcatcgtgtccggtcgagggggtgtcggtgaggaggcggcccaaatgtaccagggtggcggggcgtgtgataaagtctttttgtcagaagaaggctgttttgaaggccttttagtgttatcggcgggcgggggtttgggcaagcttccacggggggaatcaacacggagagacccactcctctggaaggtcttagggcgctgtgggatttggcccctcatcttcgcgtttctgagcgctgggaaaaggcccttttctccgtgggagcttcggttccctaaacgccaagaggctcgtctgtacttttttcacttctctccgaaagcttgtgaaggttggccctactggaccagagtgctcccacgttctcgccctggtgcgtcctatcctcgggtgtcacatttgccctgagacctccagggtctcagcccgtccttccctgacatgtgacatagctcagatgtctactccaaatctcatgttgagatgtaatccccagtgttggaggtggggcctggtgggaggtgattggatcataggggtggatttctcatgactgatttagcactatgcccttggtgctgtccttgcgatagtgagtgagtcttcctgagatctggttgtttaaaaggatgtggctcctccccgctctctctcttggtcctgctcctgccatgtgatgtgacttatcgtttctagtaaattaataatcatccatcacctgtctcctccccactagaatgtaagctccgtggagtcaaggatttctgccttgctttgttcagtgctgaatgctcagcagaacacagcacgccctcttgaactgacagatggggaggcgggtggataggtggaatggcctcctcgagacttcgagggaa

SEQ ID NO: 452996 - DNA, 631 bp, Homo Sapiens
ccccgccgtacagttgcgacttacgcaacagtgaccctagtcaggaaaagtgtttgctaggagctgaagctgcgtccaaaaatgttgtgcacccactagctgtgagtgtgtctgtggggggaaggaggggcccggatccccagcagggcaggctgctgcttgggagcaggagattaacagaatgctttttaatccgaaatgatgggtcaagtcataattaaggggctgagcaagaactgagagtcagaagggaaactgaggttcaggaaattagggaaggacacccagaaggttggagaatgaaggcaggggtcagaagttcatgagagcagagggtgaatggaacatagcaggggcttggcggaccaacaagccagagtgtaagaggggctgataccacaggttctctgtggtggctgaagcatggtacgtgggaaagccagctatgtttaaagggacagagacaggccgatgcagggtgatgtcatgcagatctgtgtccctgcccaaatctcatgttgaaatgtaatccccagtattggaggtggggcctggtgggaggtgattggatcaagggggttgatgctcatgatgcattcgcgcactgtacgaacgggggccgagctcgatt

SEQ ID NO: 452997 - DNA, 980 bp, Homo Sapiens
  misc_feature (227)..(244): n is a, c, g, or t
acggcaggtactctacgagtatggtagcgaggctgggtggcgaattcggcacgagggtttgtccttcctttatactaatgatagtgctttagaatgagaattatgcctgaaatctggcaaaccgaaaaatgttgctattgcaacaaagtggcaaaagctaaaagtaaggatttatcttcaaacataagctgagataacgaatagaagcaaaacgattggctactagnnnnnnnnnnnnnnnnnnattaggtaaatttgaaaaataaaaatgacttggcacttttaaaggtaacttcaccaaagaccgaagagccagtaaccagtagctccaacttgtctcagcatcacatcttctgtgctctttatttttgccggaccagtttgcggttaggagaatgtgccttttttgtacctttgcatttaggttttataattttaattgatgtatggacacacacaaacaaaaaagcatgaaggaagatttggatccaagcagtgccacactttacatcatcactacaagtgttcaagtgtaaagaaaaccaattttgaaactatgaaattcctgattcataaatacacagttatttctactttagtacatataagataattcactgttattaaagctcttttattaaggcaattgcatatgttttaaaagcaatggtaaattaagttgtcttccaaaactgtgtacttgtctggtcagctgtgtatgatcagttatctacctcagagtctattttcttttgtgctgggacaggttgctgggcctccctgtttcacagaccaaatcctcctagctcaggagctaggggctaagcagttatttctttcaagtattttttagttcttaaattttatgcttggatttgatgatagatgtcagtgacttttcatagttttcaaaagtcctttgctgcgtctgagaaagtggagatttctagttgaaatttacataagtcataaagagaaaa

SEQ ID NO: 452998 - DNA, 1092 bp, Homo Sapiens
  misc_feature (373)..(373): n is a, c, g, or t
ggcaaaagcgagcagtaataacattctagtagactctcgatggtggtctccgctcttgcccgaagacctctgaagtacgctggagctgtgttgtacaggtgctgtgagacctaccctattcagaattaaacctcactgcaaatttcctcccatcacgaagctaacaacactaatatacgtatttagcacctctgaggctttgccatggagacccatttctgtagggctaaggaaacatttagacgtggtgactgactttcatttggacttggcgaagtgtatctgagaaacacctcggctgtggtctctctgctttaaatcctaacaggacttcctaggagcgtttgacagaaattctactcgtgggacgttngggaagaaagattttaggtggcttggggaatgtgggtggcttagaggatctaaaccgattcacttcctggttgagaagcaacgagggcttgctctaaatcgtttagaggataacaggatctagagatgctctctgcttgacaacaaaagtcagggtgcagtcggtccacccttgactgcatttgggcttggtctctaccctcactacctcagttctcaataacttagtgaatcactgccctcctcaaagccatttccactcagctctttccagagaattctcagttttatgagacgggaaactttatttcacgagaaagcctcattgtcagaagtatcttcattcaatgggcacaatatgctgtgtatctcaccaggtagctgtcaggggccaccgagagtgtcgtttaaaatgggcatcgttgtaataaaggaaggaaagtgcgacttttgaaatgtttggaaaggttatttctcatgcacattcccgggaaaagcagagagtaaattatagacgggataggaaaggccgtggggagaactccaatccttagcctgtgttcaccctggaatgtgttttaacttgggaaaaggcgttggcccacctctttttagggtcacccctggaagccagtttttagccccttttgtggataaaaagggaaacccctgggcccctggaaaaattttttttggggccatttttaaagggggggtggg

SEQ ID NO: 452999 - DNA, 812 bp, Homo Sapiens
agcctgctcagggccttccggagccgacccagatagtggatgagaccctgtccctacctgaaggacgccgttcagaagatgtcgacctggccgtctctgtttcccagatctccatcgaagagaaggtgaaggaattgagccccgaggaagagaggaggaagtgggaggaaggccgtatcgactacatggggaaggacgcgtttgctcgcatccaggagaagctggaccggttcctgcagtaatccggcagctggtgggcgttgtgtgtagttagacaatgtcctgttgggtggtcctgttgcgtggagatctcctctggtcctttcaaagggaaacgctgtttgaaccttgttgcctctatttatgcttaatccatttgagtgcctcacacaaaaaacgtagagtatagaaatccaccttaaagcccctcgccccaacttctccaccaacgccttctgggctttcttcagaggtcacttctacccttgaagctgtcggcaaaagcgagcagtaataacattctagtagactctcgatggtggtctccgctcttgcccgaagacctctgaagtacgctggagctgtgttgtacaggtgctgtgagacctaccctattcagaattaaacctcactgcaaatttcctcccatcacgaagctaacaacactaatatacgtatttaggcacctctgaggctttgcatgggaggacccatttctgtaggggctaagggaaacatttaggacgtgggtgacttgacttttcattttgggactttgggcgaagttgtattcttgaggaaacacctcggct

SEQ ID NO: 453000 - DNA, 765 bp, Homo Sapiens
aaatgagtcaatgcagaacaaaaggaggatgaaagcaactagaaagtgagccagcactttctgttcttccaattacagataaaatgagctgacgatctatagagatttccactttaaacaagcatatgcaccatgggaagagagaggttgtccaggttttcctctggtttctagcctttttggttcactttctcatctttctaaggtggatgatcttgtcggacgtctgttgtcaatgatctttccatctttctttgaggttcttgcctgagaagaagcacctattgaatcactggctgcaaagaaggaagcagcagccatttgtgaagctgaactgaggtggaccctcttggtgggtggggaggatggtacggtgaccagtctcacagtcttacttcctgcttgctgagcactcctctggcgtaaattagcaccatcaggtttactgtttggcctgaaagcagcatatgcatttggacctcccactgaagagatgctactcaaagacatcttctttgcaggggtctctgaatgataaggaaccaaagatgtaggcatcactagagatctagggaggtcactagggttagagatgacatcatcatgagtttcagcagcttctagaaggtatggtggtggcagggtgctactgcgcttgctgcaggactcacaacataacttgttataacctggtatggagcagtatcgtgccaacacttccatttgacagaatatggacttgtctcccaaacatggttcatctgc

SEQ ID NO: 453001 - DNA, 1005 bp, Homo Sapiens
tcagaggaggatttttggaatcttcgaggattccctgtttcgtgttcctttttctctcagcaacctcaacttgccaagacaatgttccatccctgccctcaatgattccgttgcccactctttgggctccccttcaaaagcaaagggaccgggttcttactgcagaaaggatccttgtagggtgtcagcctcaaagtgaactgttttcttgatcgcgcaaagagttggacctcccgttctcttttctggatgataaaatggaggattctggagatggctcactgatgtcgctggtcttacctgggcccccttgcaggacctggtcaataatctggtgcatgaactcggtggagctgtctgacagcgcatggctggaaacaccatccaggcggaattccttcatgctctcgggcttgtcacagacaaagactttggagggtggtgggtggctggtttcatggttaacagtgtaggtacgctccccattttcagtcagaacgaagactttgctctcctgttcagaaggagtttctttgatgcgaacaaaagtggattcgataggaacttctttatctgaatcgaaaatatcttcggcttccaactccggaaaacgttctagaaactgtgccacgtaagtcatgatagactgctcgtctggtgtgtcaaccatgatgtcttctggctccaggagcctggggactgtgcagggcatcctgtgcgatgctgaaagccttctctagattttctcgtgtggaattttccagggcctgtttcatgtccaccaggctggggtcaatggccttgatcaccgccaggaaagccagcccactcctccaactgcccgcaaagtcctgcaccgccacgccatactttctcgttttcctctgcacccacgccaacagggccttgatagccttcctctggtctttcaccgatattgccacgctcctctctgcagtgggtgtgggtgggaaggatgagtctgagtctgtgccccctgagcca

SEQ ID NO: 453002 - DNA, 1274 bp, Homo Sapiens
  misc_feature (156)..(156): n is a, c, g, or t
  misc_feature (824)..(824): n is a, c, g, or t
  misc_feature (881)..(881): n is a, c, g, or t
agatcatcatgtttgtggctggctttttggagggttacctcactgccccacacatgaatgaccactacacaaacctctacccacagctgatcacgaaaccttccatcatggataaagtgcaggattttatggagaagcaagataagtgggacccgngaaaaatatcaaagaatacaagactgattcattttggagacatacaggctatgtgatggcacaaatagatggcctctatgtaggagcaaagaagagggctatattagaagggacaaagccaatgaccctgttccagattcagttcctgaatagtgttggagatctattggatctgattccctcactctctcccacaaaaaacggcagcctaaaggtttttaagagatgggacatgggacattgctccgctcttatcaaggttcttcctggatttgagaacatcctttttgctcactcaagctggtacacgtatgcagccatgctcaggatatataaacactgggacttcaacatcatagataaagataccagcagtagtcgcctctctttcagcagttacccagggtttttggagtctctggatgatttttacattcttagcagtggattgatactgctgcagaccacaaacagtgtgtttaataaaaccctgctaaagcaggtaatacccgagactctcctgtcctggcaaagagtccgtgtggccaatatgatggcagatagtggcaagaggtgggcagacatcttttcaaaatacaactctggcacctataaacatcaatacatggttctggacctgaagaaaagtaagctgaaccacagtcttngacaaggcactctgtacattgtggagcaaattcctacatatgtagaatattctgaancaaactgatgttctacgggaaaggatattgggccctccctacaatgttcctttccatgaaaaaatctacaactggagtggctatccactgttagttcagaagctgggcttggactactcttatgatttagctccacgagccaaaattttccggcgtgaccaagggaaagtgactgatacggcatccatgaaatatatcatgcgatacaacaattataagaaggatccttacagtagaggtgacccctgtaataccatctgctgccgtgaggatctgaactcacctaacccaagtcctggaggttgttatgacacaaaggtggcagatatctacctagcatctcagtacacatcctatgccataagtggtcccacagtacaagggggtaccgag

SEQ ID NO: 453003 - DNA, 1825 bp, Homo Sapiens
  misc_feature (26)..(26): n is a, c, g, or t
  misc_feature (65)..(65): n is a, c, g, or t
  misc_feature (98)..(98): n is a, c, g, or t
  misc_feature (144)..(144): n is a, c, g, or t
  misc_feature (277)..(277): n is a, c, g, or t
  misc_feature (289)..(289): n is a, c, g, or t
  misc_feature (735)..(735): n is a, c, g, or t
  misc_feature (1572)..(1580): n is a, c, g, or t
  misc_feature (1598)..(1607): n is a, c, g, or t
  misc_feature (1812)..(1812): n is a, c, g, or t
cgttcggaacgtcgcatttggtttcnatgcgttcggatttacattcatttctttgtgagtgacangtagtactcacgtatttcctgatgttacgaccncacacgggctgctggacgctctcggtgaaatgggcagatgtagtcnacgcgagcagttcgactgattccgtcgggagtaatttcagcggaggttcggtgtgggtcgattcccgttcacgtccatgaggtgcgttctcatggtgctacggcttgtcgcaactatctattggccgtcggtnacgttgcgatgntcaactacacgatgtagcggtggtcttgcactactcgtccttgcaggctgcggtcgacgttgctcttgaggagccagtatatgtcagcgccgtatgatagcgtacggcgtagcgcgagggaccatcttgtgtgagaactgcacccacgcgggcgcgtcattagcgacgtgaatctcgcgcacgtcgtctgtgtgccgccacgttgtgcgtatctgagctgttctacggctatggtacgtatatgtcgtgtcgcgatgtcgcgtaatgatatgcggacggtcatctatcacatcactcggcgatcgtgtgggtattatgtcgtaattgtcgctattgctctatattgcatatgtcttgtgtgcgctcgcgcgattctctcgatcatggcttggtgttacttgttgatgcgacgcacgctcagtcagggtgtgatacacttgcgtatnttgcgtcagggtgagcatgcgttacgctgagattatcctcgcggtattgtctgattgtatcaattcgtctgatgttgagtgtatgtgccgtatcatcatggttgttcagttaacgtgtttatcacagttgcacacggacctcaggtgatctagatatgctctataagtggaggttgtctatgccgttgactttgattgtgtgcgggttcttattgtgtcggacgggatggacctagtcgagtaggatcttccattctcacctccgtggctgtcgggcgggccgggacagggtgagttatctggctgcgattgttgtcgtgtgtaagcatggtatgatggccgtgagggtcttgcacgtgggggccgctcgccgcgtgtgtgggtggtcttctcgtgttctttgatgctgattatttcgttcgtgtctgggtttatttcgtgtgttgggtcgtgtgctcgtgttcgtgcgccgattgtctgttgcgtgcgcggattgtggttgccgacgtgttgggttcgtttgtgtttcttgttctgtgttggatcgcctatttcatggattctgatcttttcgtgtttctctgcgcgcctctcgcgtggtgaggcaagttcttttcccttgccggtttgccgtccgtggcgggcagcgtccgctcccctgtcttcgtcgctcgcgtgggctctattgcaggcccctcgcgtccagtgggcccgcccggggtcctcttcacacacgatgcttggccggtccgggtctttctcctcacatttggtccgggcgagaggagaggttgagggagttaggagaattcggtacgggtcccggtcccgggcctnnnnnnnnnggagggggcctcaacttnnnnnnnnnnagaggaggtggaagcggaggaaggcggcggagggccggcgatggtgaagggagggggccgggccggcccgggaacgccgcgctcgctcgccctctcgttctcttcgggggccgcaggggccggagggcgcgcggggcaggagagcctcgtgccgaattcgccacccaggcctcgctacttagaccgttacgggccgttgccgggngggaggggggggc

SEQ ID NO: 453004 - DNA, 1047 bp, Homo Sapiens
  misc_feature (484)..(509): n is a, c, g, or t
  misc_feature (746)..(825): n is a, c, g, or t
  misc_feature (853)..(853): n is a, c, g, or t
  misc_feature (872)..(872): n is a, c, g, or t
  misc_feature (889)..(890): n is a, c, g, or t
  misc_feature (938)..(938): n is a, c, g, or t
tctccaaacaccatcattctggggattccatttcaacatgatttgggggatacatcagaccataacacttttctttttctcaaccttcacatccagttggttctcaagccctggcgattttacgcgctagataggtcttaagttcatctctacgcctgccctggttaaggttctcatcatttctcctctggattcatctgcaacacaggctgctgggttggttcccacctcctagagctggaagagtgggctctctgattctttacacccccgcctcaatcctcctgctgcctgaataaccatctccccgtgacctaggatatatcccagccccttagaggcatgcaaagccttccatgtctgaccctgcctcatgtcttggaagccctagactgctgctgtaccctgaaggaggtacctgctcacattggcccctctgtctggaataaccccaccccggttccacccaattcaggaaagcttnnnnnnnnnnnnnnnnnnnnnnnnnnaagctaagtgaagtgacccctcttcttgcctctgtaacaccgccatgcacatttcatacagcccttgctgaaacttcatctagttctctgttagacttaacattccctaagggcaggtttggaaccttactcatctttatatggcgtctaaaatagtgcttgctttatgataggtgctcagtaaaggttgtcttgaattgagcagatcctctagggacaggagttggatggagagcnnnnnnnnnnnnnnnnnnnnnnnnnnnnnnnnnnnnnnnnnnnnnnnnnnnnnnnnnnnnnnnnnnnnnnnnnnnnnnnntgaaattgttcactcccatcagccttgntaaaatgagttcgggggcngggggaagcatgatggnnttttctctctctcagaaagaaaagcgctgtatcaaagcccctagcacncctctctacacccacctttcagtattttcatatttagatgcgggcccaagtggatacttttcttttaccgtccccgtgtaaagacagcaataattggcaagcccctgcc

SEQ ID NO: 453005 - DNA, 949 bp, Homo Sapiens
  misc_feature (913)..(913): n is a, c, g, or t
catttttccttcatctgtgtcatctacaacttatttcatcagtattttgtggtttgccttgtactgatctttcacctccttggttaaatatattcctaggtatttttctgttgcaattgaaaatgagattgacttcttgatttttcttctgttagattactgttggtgtatagaagtgctactgatttttgtacattgattttgtatcctgaaattttactgaattaatttattaaatctaggagtcttttgaaggagtccttagagttttctagatttaagatcctatcatcagcaaacagagataatttgacttcctcttttccaatgtgggcgccttttgtttctttctcttgcctgattaattgctctagataggactttcagtatcaggttgaatagcaatgaagagagtgatcatccttgtcttgttccagttcttagggggaatgctttcagtttttaccctttcagtatgatgttggttgtgggtttgtcatagatggctcttattattttgaggtatgttcctttgatgtctagtttgttgagggtttttatgatgaagggatgttggattttatcaaaagctttttctttgtctagtgggatgattatatggtttttgcttttaattctgtcaatgtgatgaatcacatttattgatttgcatgtacggaaacatccttgcatccctggaataaagcctacttgatcgtgacgaattatctttttgatgtgctggtgaaattggtttgctagtattttgttgaggatttttgcgtctatgttcatcagggatattggactgtaatttacttttctcattgtgtccttgctaaggtttgatatcacggtcatactggcttcatagaaatgagtcaaagaaggattccctccctcctgaatattnttggggaaagattattctttggtacaatttgggaaa

SEQ ID NO: 453006 - DNA, 887 bp, Homo Sapiens
  misc_feature (365)..(392): n is a, c, g, or t
  misc_feature (842)..(842): n is a, c, g, or t
  misc_feature (854)..(854): n is a, c, g, or t
gatctttgtgttgccaggcaggaatgggctgcttggggacccagtgagctccgagggcctttctgctgcttcctgtacccctgtatttcgctcagctctctgacttgactcagctccagaaatattctttcattaatattacatgcttatggaactttacctattgattaaagacatctacccctggagaaagagcccaatgagaagtaatctctgaagcccagatttcctaaggatgaagcttcgggagaggccttatcaatcctgacaacaaacttttctcgtcaatttagtttcatttaatggaagttttaaatgtgtaaagttcagaaggctattaaaattggttccagctatctaagatnnnnnnnnnnnnnnnnnnnnnnnnnnnnggtagagataaatatgttcgaaaatccagctcaatgttactagaaaatttgatcagaatctggtgaaataaatagtaaacttactaaaaatgccaaatatcccagaagctgcttaacatttgatcaaaagctctgtccagtcaattcctgcttctttcaaaaatactctgctgaaaagccaaaggagaaatggggctggtaccttcaatatagagaattccaagtaagattagatcccagaaggcttagtgtggctttctaggactctcactattaggcagtaacctaccattcacctctgtttcccagattcaccttgttataccttataacttaaaatataaattccaacaatgtactgcactcaaaaaaattatttctcaattttgtttgctcatactaattggattttttttctagaaatctaaaataatttgtgaaattaactantgaattagcagntatgccacaaaacaggtaaagtgaaaattcagt

SEQ ID NO: 453007 - DNA, 1384 bp, Homo Sapiens
  misc_feature (76)..(76): n is a, c, g, or t
  misc_feature (538)..(538): n is a, c, g, or t
  misc_feature (571)..(622): n is a, c, g, or t
  misc_feature (635)..(750): n is a, c, g, or t
  misc_feature (761)..(784): n is a, c, g, or t
  misc_feature (787)..(788): n is a, c, g, or t
  misc_feature (791)..(791): n is a, c, g, or t
  misc_feature (793)..(798): n is a, c, g, or t
  misc_feature (800)..(802): n is a, c, g, or t
  misc_feature (805)..(816): n is a, c, g, or t
  misc_feature (818)..(835): n is a, c, g, or t
  misc_feature (837)..(844): n is a, c, g, or t
gggtcgtgcggggtcgacgtgctgacatatcgcagagcgtcggctgtgtagggtgtgtcgcactgctcatgagcancgcacgcgccttgagcgccgaccgattctctcgtcactcacattgagcttctgtgactgctgcgcgacgcgcgtgagcgcatgtctgctcacgtatgtgtggaggcggcgcgggggtagctgtttgtgtggtggccgcgctgccactgcgctgtgctggcgtgtcttagcgcaggtctcgtcctgttcgagctagatcgtggtcttcagcatcgctgacgacgggtggcgtctcggcccggagtattgctgggtgtggccagcacgcgcgccgctgtgtgtgggtgcggttctttaagagctggatctacagatcctccgtatcgcggctcccgtcctacgctcttcgttcgttcgcttctggcgcctcgttctgtcattctcacgcttttctgcctgggcgcgcttctctttcgctggggctgcgctggtcctcctggtgcggtaaagtgttgtaggtctncctgcgcgcttgttttctgcggggcgtcctgcnnnnnnnnnnnnnnnnnnnnnnnnnnnnnnnnnnnnnnnnnnnnnnnnnnnnggttcgtcgcgcnnnnnnnnnnnnnnnnnnnnnnnnnnnnnnnnnnnnnnnnnnnnnnnnnnnnnnnnnnnnnnnnnnnnnnnnnnnnnnnnnnnnnnnnnnnnnnnnnnnnnnnnnnnnnnnnnnnnccggggcgccnnnnnnnnnnnnnnnnnnnnnnnngtnncgngnnnnnncnnncgnnnnnnnnnnnngnnnnnnnnnnnnnnnnnngnnnnnnnntacccccacccccactccccacccactcctggtcccctcaagaaccaaggagccggcaggaggcagggagatagcgctaggggccgccgccacccccgccctgtcacaaaccctatcagatcatgcagctctagacttccgcctcgtccagtttgccccgggcgggcggccttccctcgggacccctgtggcgccacccgcccgccgccgtgctcctgggctcctggtaggggttgtccagcaggtagtggaaccggtcgtagttcttcagcaggtacttgggcgcatacatgtgctcgctggggtctgcaggcgggtactcctgctgcgtgccgtcgaaccagcccccggtgcggatcaggccgcggatgtagttcaggtcccgcttgtcctcgtagtcaccccagcgtgggaagtcgccattctgggcggacacgagcttgaagtagatgccctcgggcgtgaagcaccaggagcagtgccagccggcgaagtgcagggggctgcccagcgaccactgcaccaggatgtggccggtgc

SEQ ID NO: 453008 - DNA, 967 bp, Homo Sapiens
  misc_feature (903)..(903): n is a, c, g, or t
gaccgagcccaagttgtgtccaacttgaagggcatctccatgtcttcaagcaaacttcttctggctgccaaggccctgtccacggaccctgctgcccctaacctcaagagtcggctggctgcagctgccagggcagtaactgacagcatcaatcagctcatcactatgtgcacccagcaggcacccggccagaaggagtgtgataacgccctgcgggaattggagacggtccgggaactcctggagaacccagtccagcccatcaatgacatgtcctactttggttgcctggacagtgtaatggagaactcaaaggtgctgggcgaggccatgactggcatctcccaaaatgccaagaacggaaacctgccagagtttggagatgccatttccacagcctcaaaggcactttgtggcttcaccgaggcagctgcacaggctgcatatctggttggtgtctctgaccccaatagccaagctggacagcaagggctagtggagcccacacagtttgcccgtgcaaaccaggcaattcagatggcctgccagagtttgggagagcctggctgtacccaggcccaggtgctctctgcagccaccattgtggctaaacacacctctgcactgtgtaacagctgtcgcctggcttctgcccgtaccaccaatcctactgccaagcgccagtttgtacagtcagccaaggaggtggccaacagcacagctaatcttgtcaagaccatcaaggcgctagatggggccttcacagaggagaaccgtgcccagtgccgagcagcaacagcccctctgctggaggctgtggacaatctgggtgcctttgcgtccaaccctgagttctccagcattcctgcccagatcagcccctgaagggtcggggctgccatnggagcccattggtgatctctgccaagacaaaatgttagaagagtgcccgggggggactcatccc

SEQ ID NO: 453009 - DNA, 902 bp, Homo Sapiens
  misc_feature (50)..(50): n is a, c, g, or t
  misc_feature (59)..(59): n is a, c, g, or t
  misc_feature (62)..(62): n is a, c, g, or t
  misc_feature (77)..(77): n is a, c, g, or t
  misc_feature (87)..(88): n is a, c, g, or t
gggatagggccataacttttcaacccgggccaaaggttgtgggcaaggangtaaaaatncangggctggttaaaagnaacacagcanncgtttcaaagcctaagcagcttaaaagtgcaaagtggctcccgggtggaaatgatgagagagcaagagcacaaagaggaccctctaaaacagagccagtgaccatgtgagctgagggggagggcttctcacagggcaaacggtacagaaagacgcgaagacacaaagcatcatgacccatccagggagctgcatgtgatcccacttggctaaagtgaagggtacatgtgggaaagaagcagatgatgctaaataaacaggcagaggcctgactgtgaaggaccttgtgtgccaaagtaaagtacgtgaacattattccaaaggcaacagggaactgaggcatttttaagaaaagaaatgacaagcagactagctttaagaaaaaattactctggcactccaatggtttcccatctcacacaggataaaatccaaagtccttcttatgcttaataccctatacatgctgatcactcgctatctctgaaattatttctccttttccctcactcactgctctggctacagtggccttcttgctgccccctcccatgtgccctttcctcagtgcctttgcacttgctatccccactacctggaactcttccctggttagctgcatagctcactccctcactcgcttcaggtctgccttcatgttcaaaccttttcttatcagagttgttttactgttaccggaaataaaagagcaaaaatcgactataatcagccccactatgttttcctccagtgtatttatagtatttgtatactgcctgtctctccttactagaatgtaagctctatgatggatt

SEQ ID NO: 453010 - DNA, 872 bp, Homo Sapiens
tcagtgaacagatatttttcctgtccccatttcactacataagggtccttgaagggctccccttaacgtaggcagtttggctccagtcctcaaacatgtgaggtgtgtaccctatctcgtgcctatctccccccttgttgggcttcaataactcagcccctcagctctgaaagcttatttttggcccccacgcctcagtaggtccctcaacactagttcccaagcaccagtctgattttgagttgattcttccttttcacacctcaatatttcattttcgttggtttcattttgctatttaaaataattttgttacattttatccagacttttatgtgtttgagatggaaacattttccatgtcagctcaatctaacaaattggccagaagtcatccaagtgtaatatgtattcataaatgaaccaagattagaggatgatcagaaatgatataaataatttggtatttaacgttcatcacttttctctctcctatagaattgctcaggcttctacctttaaaaaaatatttaatcaattgtttggattcttgagtatcaaacaaattaaacacattgtgactttggaaatacaggggatcccctccaattacctgatatcacaatacaagtgtctcttgatcgcctcttcatagccttgtaagcagcatccgcaatagcaaaaaggtgaggcggtctctcatacagctcacggcctttatactgctcaattgtgtctcttccatagatgttcaacaacttgtaaggggtcacagaaacgacgacttcctccatgaacgtatagatgcgcccctttttcaaatctggtaccggaagccaaagaaaaagggaagacttaacctgttggtttac

SEQ ID NO: 453011 - DNA, 822 bp, Homo Sapiens
  misc_feature (368)..(384): n is a, c, g, or t
  misc_feature (389)..(413): n is a, c, g, or t
  misc_feature (682)..(682): n is a, c, g, or t
gatattagaggcgaggcgggtggtaattcatcacgaggcgaggattaaggtgatcatgttgggagggttcaagcatcccacgaccctcaccttcctccctcccacattccaggcatggagatatctggtttcagagtcagccccaaatctcctgcctataattactttaactggggtctctaaggttcccacttgagggctaaaatgtagttgggaaagagggcctactggggaggtctcacaggaggcagtgccctgggaaatgccaagtccagactcagtgccaagcagtaaccatctgcactcggggacagcgaggagctgaccgtggcctctgatgaccagcaggtattagatggaagtgaatnnnnnnnnnnnnnnnnnagtannnnnnnnnnnnnnnnnnnnnnnnntcgaacacatatgattgccagtatggagaatgaaagattaataatgctttctggagagtttgatgcaaaagtgggggaaacggcgaaaaggcgctaaggctaaatccatctgcatttgctatatttcattagctaaagtcaggtcagggcagggccaaggcctccaattggcaaaggacagtgttatggctttaaaaagctgaaaccccaacctctaagtagatcacaatgttttctgagctttgcagtaattttctatggaaactaanacctctaaaacatacaagctggcccaaatgagaacacaagcaaaagatgtggaagacagcaaaacctgagcactggtttgaaccaggcactgacatttgaaatgctttaagccttttcacattccttctttattccctcc

SEQ ID NO: 453012 - DNA, 998 bp, Homo Sapiens
  misc_feature (345)..(397): n is a, c, g, or t
gttacagcactctttacagggggggtgttacaaagagcgacatatttttcgcctttgcgcttttcaaacccttccatgggaaggtaggctgtagggaattttctcaaggagtgccattgggggccacaacccccccaagataaaatttttttggaattttaaagaacaaggagggggtttttccaccaatgttccccccaggatgggttttccaaattccgggagctccggccaaatccaacccggcctcagcttcccaaaagtgcttaggattacagggtttgagcccaccgcagccggccctctccctgaatagattttaaatacctagaggtcagggatgannnnnnnnnnnnnnnnnnnnnnnnnnnnnnnnnnnnnnnnnnnnnnnnnnnnngttttatgtatatatttgagagctccacatccctggatctgaatcctccacttcccactggaaccatgcccctcccagtcccggtaagtaagagggaagatcgggagggccaaatcctacaccagggtctatcttagggagggaagggacctggctggggggagggggattctgaggagtgaaaccacttcctgtgtagctagttcctgtgttgacagaaagagcagaagaggaggtggggtggagggagcagagccagggattaggggactactgacggctctggagatgagaccgccaggagtccttccccaccatgagccccctccactcctgcagctggaggagtttttcccagtctcagtgctgccctggggcgagagagactcgaacaagctgtttgggtgggaagagaatggaggaagttgacagggatgggcggggcccgtcgggggggctcgaccaggaacccagcttcctgctcagtacccaggcatccagcccccagctccacccccaccccttccagcccccactcccctcaggaacccaaggttccagccctcctcccaaatcccagccacccctcccccaccagttt

SEQ ID NO: 453013 - DNA, 911 bp, Homo Sapiens
  misc_feature (112)..(112): n is a, c, g, or t
  misc_feature (123)..(123): n is a, c, g, or t
  misc_feature (173)..(345): n is a, c, g, or t
  misc_feature (731)..(775): n is a, c, g, or t
  misc_feature (783)..(816): n is a, c, g, or t
cccccatatcaatggccccgggggaaaaaatttttaaaatattttttggtaaggaagaacggggggcctctccacccaatggctgggcccaggacttgggtcctcgaaactnccttgaccctncaaggtgattccggccccacccccagccttcccggaaagtgcaggagatnnnnnnnnnnnnnnnnnnnnnnnnnnnnnnnnnnnnnnnnnnnnnnnnnnnnnnnnnnnnnnnnnnnnnnnnnnnnnnnnnnnnnnnnnnnnnnnnnnnnnnnnnnnnnnnnnnnnnnnnnnnnnnnnnnnnnnnnnnnnnnnnnnnnnnnnnnnnnnnnnnnnnnnnnnnnnctgaaacatgccttcttttgtctaaagtggctgtcccctctcagggctgaggatgtgaattttgaagggacaagggtaggatgggagagccaacccaccacaagactagtgacaggaccctagccttaagagacactggtgaggtggctagatccatagcgacgctgtgacttcaggacagatagtgagagatgagctctctgcatgtgttgagcatgtttggcctacgcaaggtcttgagatccaggctcagctctcaccatggtttgcacacattaacagagggacactcagctgctttgcacaaaaccacgacggctgcaagctggacctcggagctgagctgctgagggcaggctaaggtaggtcttctcccatgatgttgnnnnnnnnnnnnnnnnnnnnnnnnnnnnnnnnnnnnnnnnnnnnnccatctcnnnnnnnnnnnnnnnnnnnnnnnnnnnnnnnnnntaatggataataaagcatgacagacctcaagatcacaaatgattttctcctctgctgtcatgcctacagagtaacttctccaaggtcacacatta

SEQ ID NO: 453014 - DNA, 1026 bp, Homo Sapiens
  misc_feature (54)..(54): n is a, c, g, or t
  misc_feature (59)..(59): n is a, c, g, or t
tggaaaaaccaccagggcatccttttcttttcctggactccttcttctgttttnctctnaggggacggggggccccataaaatgatttccttcacatgatcaatcagaatgcgagacactgttgactaaaacataaagcaagtagccctgatttcagagaaatggagttacaaataacattttcaacagtgccttaacttgcaaggtagcttttactgcagaaggatatcagctccttttgtctacctatcagaagagaaacaaaccatttccgtcgaactagaaatgcttagctcttatgagaatattgtgcttttaaaaaaaattcaaatgttaacattatttgcagtctgtgttctaaggtttcaatttgttttttctctagtccatttgatcattgtctctggtgagcgatataggaatattaatttggcatagagatcttcttctagctccagttctcctgtctctcgaactaaaaaaatatctgtgcacaacttcaaaattcgatccacatttggaagctcttcaaacatgatggagtgagaaatcccactgaagaattcacggacaaatttcccaatcacaaggacaactgaagcatataatcccataataccatagccagccaggaaccccagacttgggggactgactttgtcattgaagaccaccagttccagggcctgagagttcggattgtatattctgtttccagtcaggttgagaacccaccactcactgttatatttagttgtattgtctctggacaaaatgatggtaatatccatgaaattattttcagataaaagttgctttataggttttgagttagaatcactaggtgctttcacataatatggataaatcttttctatggtcactggtgtttttgaactttctgtgctgttgcctgctatcattttagcgatattctttcgagtaatatttttaagaggaaaagaaagcttatctgttgctatttccgattttgcacccagacttaagtttctctgaatactccat

SEQ ID NO: 453015 - DNA, 1534 bp, Homo Sapiens
  misc_feature (990)..(1100): n is a, c, g, or t
  misc_feature (1241)..(1285): n is a, c, g, or t
  misc_feature (1313)..(1330): n is a, c, g, or t
atagaagggatgttactgcacttatgtgtaatcagatctttatttaggtatacatatcctcctataccgcacataaatagatttcagagcccccatacaatgggcagtgtctgctatagggcttcaggcattaaataaaaccgagggttgttgattttgctgtgacagtacactaaatcaatactatatcttatacagtttgaaaatatgataccctacactttcaggggaccgagtctgacaaacacaatacatttatctgtgacctatatcaagtacacatttaggagccaggtaggttacctgcttacacactatattttaattgaattgaaactatcaagcactacttagaaactggaaaacatatatatgttagcatcaaagggggcagaagcaaagaagatacagatctgcactgaagacattagactggccatagaaaagtaagcttgaactcccaattgatgtgaccacactcttcttaattttgttcacagtaaaaacacttttttgagttattaggcttacccctagcttttgacctttgcatttcatatatgttagatgtctcagcaagaatatctggtctcccctaatttttattcccagtgccgatgttcaaaataaactttctccagtctgggaaccttttttacttccccatatttgttattatttagaatggttcatacgtctgctttgtttgcatactggtcttcagattatgagactcgatgataacagtatggtactgcttctgtgacaaatatcgtgccttaacaatgtggctgtccttttccactgaagaaggaaagacgttttgatctagaaatagcgttgtgatttccttgctgttggttttacactgccttccacattgcaacagcaagttggatttcttgtggatcccaggaattttctaagaggatgagttgaatctatagcagcattgtcagtacagaccagtggttctcaaactttaaaatnnnnnnnnnnnnnnnnnnnnnnnnnnnnnnnnnnnnnnnnnnnnnnnnnnnnnnnnnnnnnnnnnnnnnnnnnnnnnnnnnnnnnnnnnnnnnnnnnnnnnnnnnnnnnnnggtgagctgggggcatacagggaggaacactgccctggactatccattgcatttttgcctctaaacaactacagaattttctagggttttaaattatgtaaaatgtttaccttatctgagcttagagagaatggggagggnnnnnnnnnnnnnnnnnnnnnnnnnnnnnnnnnnnnnnnnnnnnngcttttaagaattatagggtattagggnnnnnnnnnnnnnnnnnncccctttatctttgaagttccccttttgaatggtttaaaacctatttggcctacgtttccaggtttggtaagcaacccagcccccaaaaagttttttccttgggaatgaaagaggtttcaaagtttttggaaaccctttttcttagggtagtttttaattgtggtaccactataaaagggggctttttcatttccccaccaaac

SEQ ID NO: 453016 - DNA, 885 bp, Homo Sapiens
  misc_feature (52)..(602): n is a, c, g, or t
aaaggttaaccaggttattatttttttgccactttcatttccttttttaccnnnnnnnnnnnnnnnnnnnnnnnnnnnnnnnnnnnnnnnnnnnnnnnnnnnnnnnnnnnnnnnnnnnnnnnnnnnnnnnnnnnnnnnnnnnnnnnnnnnnnnnnnnnnnnnnnnnnnnnnnnnnnnnnnnnnnnnnnnnnnnnnnnnnnnnnnnnnnnnnnnnnnnnnnnnnnnnnnnnnnnnnnnnnnnnnnnnnnnnnnnnnnnnnnnnnnnnnnnnnnnnnnnnnnnnnnnnnnnnnnnnnnnnnnnnnnnnnnnnnnnnnnnnnnnnnnnnnnnnnnnnnnnnnnnnnnnnnnnnnnnnnnnnnnnnnnnnnnnnnnnnnnnnnnnnnnnnnnnnnnnnnnnnnnnnnnnnnnnnnnnnnnnnnnnnnnnnnnnnnnnnnnnnnnnnnnnnnnnnnnnnnnnnnnnnnnnnnnnnnnnnnnnnnnnnnnnnnnnnnnnnnnnnnnnnnnnnnnnnnnnnnnnnnnnnnnnnnnnnnnnnnnnnnnnnnnnnnnnnnnnnnnnnnnnnnnnnnnnnnnnnnnnnnnnnnnnnnnnnnnnnnnnnnnnngctcctcaccaattacatgatttgcaaatattttttcctattttgtgggctttttttactttcttgatgttatcctttgaagcataaaagttttaaatttttatgatgacctatttattttttcttttgttgcctgtgcttttggaatcatatctaagaaataactgcataatccaaggacagaaagatttactcctaagtcctcctaagaaattcatagttttagctcttaatattttggttcctgataaattttgagttagtttttatatatgggataaag

SEQ ID NO: 453017 - DNA, 1484 bp, Homo Sapiens
  misc_feature (1099)..(1150): n is a, c, g, or t
  misc_feature (1454)..(1454): n is a, c, g, or t
gaaaaaaaagttttgcgggggtatctattaagtaccctgcacagccatattattgtttcctagcgaaagaaccgagagaatttttgtaaacatgtgaaattatttatatttataggggggagtgtaaaaccccatttatcaaatgttacgcgcaaggggggtgggtcagtgcaatattacaaccagaaaaatctcgtagggggggtgtattaccgcgtagtaggggggggatatatataaattacattgtcagccaaaacagtaaaaagagggtttataaaaaaccaagttaatttgttttgtgaagagattttgggtttttccaaggtaaccgcgccctttgttacttatttattatagctattcttccaatgtggaaccccttatagaaaagagcgggcatatagggtttgaaataaaaaaaggatggggttgggtgagagtctgttaaagcccaagttggttccccttgttagacatgttcttggggccaacattgtttaagggttttccctaataaatttatgttcttgcaagtaaactataaagggaaaaaaaggttggggtaatcaagataacttctcccgaggtaaagaagtgtctaaaattagaaaacgatccttttatgttaagcagttgtgttttcagtagtactagtactgaagaagaaataaagcctatagtttatactctttgttacaaaaaaagtaagagattttttaaaaattcggtatttacaagaattagtgacaagactgcaactgtagtgttatgtactgaacacagtgtttcatcctaaactttttcctgtcaacactcacaaaaaataacatttatacagcaagcacactgtggtgacttgagtcagctgctcactgcaggaggatacttgggtgcagcccttgagagcctccagccaggttggacatagctatcctgaggcatttgtaacccattcttagccgactaggaagagtcactgttacacaagcatgtaacatacatatgttgagattgctatgcttaacattatatatataattgctaagtatatgggctgtggagtcatattatctaggttaaaatcctagctgtgtgnnnnnnnnnnnnnnnnnnnnnnnnnnnnnnnnnnnnnnnnnnnnnnnnnnnnactacaggaatgagccaccacgaccgaccgagactatgcatttaaaagattaatgttataaaaacattttgataatccaagtctgttgaaattcttccacgtggcccagttttacatacgattccacatggcatgatttgtttcataagaatatgatggatgaagtacatgactgaggtattattaaatgttaatgatgtctattctattgtttcagatgaaatacgaattggcttaagagaaaatagttccattaaaatggggtaagatccccgacacatgttctttttcacccttgtacctncaaacactgagaatagttctcgttacagat

SEQ ID NO: 453018 - DNA, 1058 bp, Homo Sapiens
  misc_feature (86)..(94): n is a, c, g, or t
gcttgtcaggatgttaagcatctcaggagaaatattggaaaattatatgtataaaaccaaagtgctatttttaaaagcatcatttnnnnnnnnntgacatgcctgaacaacttttccactttccacgtgcttccctcccacctttggtttggcaacaggtatctcgtgcatgaagctgacagctaaagaagattttaaaaattgagttaaagatgactgtgtaaatgtccaagcacagagagcatgcacctgactttctaaagtttgatgtgttctcaagcctgacagaagcacaaggaacagtttgatacacttttaaaaggttctgaaaacaaagctgtatagggatcctctctctcttgagcaaagtataggcaacagaatatattgcttttgttgtaagcttttgtagtacatgtttttactaataattcttgttctctaggaaagctttctatttctaacctatggcaaaatgaatccttcatgtcttcttgttattgtttacacacttgcagtgtagcccagtttgaaatatttatttggttatcaactgcccatggaggaggctcttgatgatcccaggtctcctcgacctccatacaccacacaggcatttgtaagcacagtttccacaagcaccttgtaggaatatggataagattagaccagcccctctctgtccactgggtttatttcttgaagaagatgcagatctggtttttccaatgtgccacagtctttccttatcctctccatgctgagcttgacaacactctgggaatgaggaacaagactttttctaaaaagatagtggaagttcaagggatgtaccctcgttttcaggttcatccaatctccagtgggaatgtttttccttaaaaagatgaaagaaaaatgtgttgtgaatctttttaataacacaatccccctataaaaaaagtgggattaaaagggatattaccccaaaacactggtaaaataaccaggatattcttaaccaaacattttagggggttggcccctttttttgtggaatttacactcccttggatttc

SEQ ID NO: 453019 - DNA, 864 bp, Homo Sapiens
acacccatcccaagtcaaagaaaaacagggtgcttgtggctgggttaggtaagtagaggaaaattttaatgcagacggcaatagagcacagcagtcaaaacggaaacagggaagaagccaagattagcaagagcaaatccaaaaagccactttcatccctagaactagaaagaccaaaggaagagacaatgttatcagaattcagggctggctccatcagaaaggaactagaacaacaagggctcttaggagctggctaacgagcaagtaactactgccaaaaaaggctgcccgagttagtgagagacaggggaagatgggtcctggatgccccactcctttagcctttgtagttgtctgtcaatgccttccattggctgaacctacttggaggcaagtgagcaagcagacgggacatagtttgcagaggggcaggaaacagataaagcaaggagacgtttagacttcagtaatgattagcatttaagctactcaaaatctataaaacttttcgctctcaagatgtctacaaaccatgcacaccaatgtatatgggtacatatacttgggacaccacattcacaatgaaatgatgccctgtaagtaagatacagagtgtcatcttttgagcctgcagggatctaagagagtctcctaatctcccaccaatatcatctacttttttattcttttaaaaatttctctccaggtaattcataagaggttgtcaccatgaatgccattatatttttaatttagttactgatggagcatagataatattatttactttagcacgcccactctactaaactcatcatttaacttaatcacttttttctctcatttgaggtattcaatcaa

SEQ ID NO: 453020 - DNA, 970 bp, Homo Sapiens
  misc_feature (157)..(170): n is a, c, g, or t
  misc_feature (310)..(310): n is a, c, g, or t
ccttggtgccagggcccccttttaattcccaggctactcagggaggcttggggccaggaaaaattcacttgaaccccagggggcgaagggttgcagtgagctgagaatcatgcccatgcattcccggcctggggaaccagagcgagaatctgcttcnnnnnnnnnnnnnntttgtttttgagacgtgcattaacattctttccttttgggcagtgatattaagaagggaaggggaggttttcctggggggaatttttcaagttacacatctctcctccacaaatagatacattgctttttgttctctccntagaatactatagagacccactgattgtagggtgccatatccctttgtgtgctgggggtgcaaaaagttaaaaattgtttgagatttatcattggataaaatgttcccaattagaattttacaaaaacataagacgttttgtttaaattacattatttattttttagatcatccctcttagtcctgcatgcattgttagcacaaaaagttgaacttgatcacaacttcctttgaagagagagtaggtacacaatgaccatctgaagagtttctccacggagggaccaagaattccagacgctggtaacactgtcagtaacctacacaactttcaatacaaaaaaatttaccaaatatcctgtttaatgtaaacaaggcaggaggcaaaacagagtattacagtaacactattttacagggcccagaaaatgtgattatctaccatgttttaacacataaagtgtcacaatgacatgcatatttgatttactacataacccaaaatataattaccatatagtgtggttttagcacttcactgtaacgtcttctgtcaatactgatggacttcataattaaatggcaattgtatgttaatgcaataatttatgaaaacattaccatgaatttatatccggagaatccggaccggaccagcct

SEQ ID NO: 453021 - DNA, 1392 bp, Homo Sapiens
ttttacctaaaaaagaaaaattactgggcttaaaattagtagtcatttttaatttatcttcggaaatttaaggggaatattcctgggaacaattttaatgggaaaaacataagcctaccacaccacccccaaaaccataactacaaaactttcatttgcacacaaattttaaaaggttagagtctggtatttttaaagcccaactacttttgaaaaactgaatcttctaaaaattcttaatgttaatcacacttttcgaaagttcttttatttacaaggataacgaaaatgaataaagtgcaattaatgaaaaccaaaaatcattaaaagacaaatgtaaaagaacgtaaaattcagaatatttctctggcgggaataaaaatagtacagagtgtcagatacacggttttatgttctcaacttagcgtcttctgtttgagcatttttaagctttcatatatcaaatcttgcttaccagctgctaaataattttgactggaagaataatcatcagtttagaatcatattaaattaagcagatataaatatgaagaaaaaattcaggactaggaaaaacggtaagaagtacacactagcacagatagttgataggagaaaatagtaaagcagcagatacgtgtgacatgaggtttatttataacttagccccacaagaagatgcagttaaatatctgtgttagtggaaattaattagaaggtcacaaaaatgtttttgagttaaataattttagagtcaagactcaacaatacagcagtgtcagaaataggtgtcaaaactccgtatcattattggaagaaatattattagttcaaacctactgcaataatctattttctggttcatctttctgatgtgaatgaattctgcaaaataagtactgttgaaaaaagtttccaaggctacagattactgtggaagagaatactaatttcccccctaagttaattttctcctttttcctttaatattagattcccaagttttagctgagcacaagtcctctgtaaatacagattttgttggctaacctcccttgcagtcaggcatggccaagtaactaagttctggccccacaggaggctgtgtcccctcgggctggagccacaggtagctcgtggcagatccccaggccagaacccccggactttagagggagatcccctactgctacttctaagtcagttctattattagatacagaaaccacgtgctccttccttaatataaacacttcctctctgcacaagtggtcacctgttcctagaaattgcctgcaccttgtcaattttaacacatatacttttttttccccaattttctaacatctctgaaaaccgaatgaatcttaaatcgataattatatacttttt

SEQ ID NO: 453022 - DNA, 577 bp, Homo Sapiens
gggctttgccttaggttgagagagccgttttttctccaattcaatactttttttgccttgaggaggccgggaatgatcttgcatggaagtgagccacttgtgcacacaaaagtcatctgcccctgaatagatgcagtctggatccaaaggagaccatgccacacaaagcagtcgaccttgatgtcctcggaaattgcacaggggctcttcccggagagcatcccacacctgggctgtaccatcataggaagcagataccagccttccatcatgatgtgggctccacgccacactggtaatcttgggccgtatgccctgagagggtccggtagggctctgtaatggtcactggagactcagggctgctctctatgacagtcttcaggttgttgcacgtaaatgactgcattgttgggagccagaggccatcagatagctcaattctggctggctgccatgctcatgatgccagctaatggtattcacaagcttgtgatgctgttggatagtacagatcagtttcaggttgggaattctgaaatatttctattgatccatcttcatcctgtgccgaatc

SEQ ID NO: 453023 - DNA, 445 bp, Homo Sapiens
  misc_feature (18)..(18): n is a, c, g, or t
aacccaaaggaaaaccangcccaacaacaaaacaatcgacccttgaatgtccctcggaaaattgcaacaggggctccttccccggaaaaccatccccacaccctgggctgtacccatcaataggaaagcaagataccagccttcccatcatgaatgtgggctcccacgcccacactggtaatcttggccgtatgcccctgaagagggtccggtagggctctgtaatggtcactggagactcagggctgctctctatgacagtcttcaggttgtgcacgtaaatgactgcattgttggagccagaggccatcagatagctcaattctggctggctgccatgctcatgatgccagctaatggtattcacaagcttgtgatgctgttggatagtacagatcagtttcaggttgggaatctgaaatatttctattgatccatcttcatc

SEQ ID NO: 453024 - DNA, 967 bp, Homo Sapiens
  misc_feature (87)..(87): n is a, c, g, or t
  misc_feature (764)..(851): n is a, c, g, or t
aatcattatcatgtagctctgagattgtatttctacaaatgaaataagtgaatcttgccctggtactatgtaaagcctcaaaccaangaaatgacattactaaaatacaaataaaaatttggaaaaccagttcttaattttccaacttgtcactctttatcaaatggcgaccacttcttattttaagctggcagtagcaatggccatctccaacttactgtctacccacggcacacttgccaaaaagactaggagaaaattacgatttgggttttaaaggtttttcctggtatcagcttcccgctaatacccagattgaaatacgattgagtcataaataaaaatgtcaaaaagcctaaagctctgcagtggagtaaatcaacgctgacattgttaagcagcagtcttgcaaatattagaatattccatttttacactaaaaatgaagctgtatttttcagttcataatcttcctctccttttaatctgaaccaccatcctttcttagagcatggtttctcagaagactgtagcacataggcttcatgagtacaactttttttgtgtaattaatacttgtttaagattatgaacacagggggagaagatctttgcaggggagacttgagccaggtccctgacatagcccagagagttatacttaccagacttgctagcatttatctttgagccaataatttaaaatatttccataagcacaagcacagataatacaggtgcaccgggccttttcatttttttannnnnnnnnnnnnnnnnnnnnnnnnnnnnnnnnnnnnnnnnnnnnnnnnnnnnnnnnnnnnnnnnnnnnnnnnnnnnnnnnnnnnnnntcgtcacagtcaattatagcacatttacattaccctccctccaaaaatcccctaccttattagcagtcactccccttcctcctcccacccccaatttcctgctatacacgttaatt

SEQ ID NO: 453025 - DNA, 1000 bp, Homo Sapiens
  misc_feature (482)..(482): n is a, c, g, or t
  misc_feature (491)..(492): n is a, c, g, or t
  misc_feature (502)..(503): n is a, c, g, or t
  misc_feature (514)..(515): n is a, c, g, or t
  misc_feature (537)..(538): n is a, c, g, or t
  misc_feature (558)..(559): n is a, c, g, or t
  misc_feature (571)..(571): n is a, c, g, or t
gaccccttgttaattcctggcaatgatcagattgacaacatggactccaatgtgaagaagtacgactctactgggatgtttcactggtgtgcacccaaggagatagagaaagtcatcctgactcgaagtgaagctgccatgaccgtcctgagtggccatgtcgtggtctgcatctttggcgacgtcagctcagccctgatcggcctccggaacctggtgatgccgctccgtgccagcaactttcattaccatgagctcaagcacattgtgtttgtggggctctattgagtacctcaagcgggaatggggagacgcttcataacttccccaaagtgtccatattgccgtggtacgccattaaagtcggggctgattttaagggctgttcaacatcaacctctgtgacatgtgcgttatcctgtcagccaatcagaataatattgatgatacgataccttccgctgcagggacaagggaatgcnatcttgggnncgtcactcannacatcaaatcnntatgcagtttggatgacaagcnnatcggaagtcttggcagggnnctaattcccaanggggtttcacacccctcccaggaaatgggggatagatcccctcctccaggataaacaagcccccagtgccaccggggatggtttacgttcaaacccattcccattcaacaaacttggggggttcaaacatcccccccatcattcacctggaaacctaattggaaacggaataaccaaaaagggttcaagcttttttgggggcccccccagaaacgaaatggaatggattgggcccccctggaataacagaaaaaacgtggttacccttccaagggcaaggcccccttttttgccccgggtgggggggaaacaaccattttttttgccccggtcccaagggggttcccctgggggaaccctccccctcccctttggaaaacccgcgcgaaaaccataaacttttctcaaaggggggacacaatattattc

SEQ ID NO: 453026 - DNA, 697 bp, Homo Sapiens
  misc_feature (35)..(35): n is a, c, g, or t
  misc_feature (43)..(43): n is a, c, g, or t
  misc_feature (55)..(55): n is a, c, g, or t
  misc_feature (69)..(69): n is a, c, g, or t
  misc_feature (100)..(100): n is a, c, g, or t
  misc_feature (139)..(139): n is a, c, g, or t
  misc_feature (155)..(155): n is a, c, g, or t
  misc_feature (187)..(187): n is a, c, g, or t
  misc_feature (223)..(223): n is a, c, g, or t
  misc_feature (293)..(293): n is a, c, g, or t
  misc_feature (590)..(590): n is a, c, g, or t
  misc_feature (644)..(644): n is a, c, g, or t
ctgtagccacctcctaagggcgttttccctcagcnaatcagancctcccagcttnccggcgtggctctnccggtcacccagggtccgtatcaagggtgangatacttgtcaattgaagtacgtcgcgctcatggagtgngtccaggacactgacnggcaaatgctgtcccacaggcaaagggctgcngtgaggtacagttctgtatcagggtcatcatcatcngtcgttggtcccaaaaacgtgaacattagtatcgttcactagttcagtgatgatggggatgttgaccccnagttgtgatggatggttgacgtaacatcccagtgcactgggctgttatctggagaggatctatccattcctggaggtgtgaacccttgggaattagcctgcaagactccgatgctgtcatcaaactgcatagatttgatgttgagtgacgccaagatgcattccttgtcctgcagcgaagtatcatcaatattattctgattggctgacaggataacgcacatgtcacagaggttgatgttgacagcccttaaatcagcccgacttaatggcgtaccaggcaatatggacactttgnggaagttatgaagcgtctcccattcccgcttgaggtactcaatagagcccacanacacaatgtgcttgagctcatggtaatgaaagttgctggcacggagcggcatc

SEQ ID NO: 453027 - DNA, 998 bp, Homo Sapiens
  misc_feature (315)..(315): n is a, c, g, or t
tcttggcggtccggagcaagttttctcaaatcgggtggtttcagcccacgttgccctgggtgcaggaactgcttggagaacagcaggcatttctcttgttgctccagaagcattttttgcagctgggcatacacttcttccgccttttgggagagtcgcaggtcctcatggtggatgaggatgaagtcaccctcctcatccgtcaagggcgaaggcaccttggacagatcaacaggtctgccagatcgggcctggatgatctgagcctcaagccatttggctacccgcagataggctttggcctgctccaggtcnctggctgcgcttggcctgcagggctgcccgctgatactgcagtttccgtgcctccagcagtgccagctgctcccgcacagatggactcggtgactccttagaacttgaggccctgggctcaggcaggcgctgggatgaagggactgtgggccgtgcaggtttcttggccactggggcctgtgctgggggctcaccctcgtcctcgtctttatcagccggggctgaatcctctgcagaggccagtttctctgcagctgccaatgtcgctgccactgcgtcctcctcaacacccatagtggactccaggccagggatggggggaaatcctggaggaacaggcaattcagcaaagttgactttccgtcctgctcggtgtgctcgaatagcatcttgatattgcttggcaatgcgctcatgcatccgagccttgcgctcgtccccaccactccgggcctggatgcccgcctcgcggtacttgttcagcctctgctgcagggcatccagcactgtctgtgactctgtaggggccactggggttgctgggacgtcaggggccatcacatggctgcactcgctcacggctgggggaatgactgagggtgctgtgggagcctcggaagcctcgctggggcttcagatcctcagtccgcggcatgcactcagatcacggcggtaccagctcg

SEQ ID NO: 453028 - DNA, 885 bp, Homo Sapiens
tggcttcccaagggcattggggagccaactgtacattcttgagcagggcaatgatttcacaaaaaggatttctcaaaaggttagtcttgcaacagaagacagcggtggatttggactggaagagtgggaggggcaggtggagaaggcattgtgctgcaagtggggagcagccctgggggcccagccagtcccctgtgccctgacaagtggtatggcatggatggatggctctacttctgggccgccaggatggacaggtactggttgctcttcaccatggcgataatgaggaggccaccggtcagcaggaaggtgggccagaagagggagaagaggagggcctggggcccgtagaggcgctggaataggacgctggtttcgttcccccgaggtgcggagaagcagtagaagacctgctgctcttggaatttggctctgaccttctccacgtcggcccgggccgtctggtaattgtccacgctgcctgggatgtaggagcactgctggttctggtcccgagtgtcctccgtgtggtacagcacagcccacctgccggcagctgacacgttgacccacaggcatgggtactggggcaccttcttgcccttcagctcctcctggtccctgatgttggtctcaatcaggtggcacttggattcctgggtccacacgcttttctggtagaggggcagcacagtcgtgaccagtatgtagtaggtgatggcggcacacaccaccttggttacacccaggcaaagggctcgtgtctctccccgcttctgggccgtcaccagcttcttcaccatattcactgggggcagtgatcatttagtcttcccggcgtcctgtgggtcttgagcagcagacagtttctttctgcctgga

SEQ ID NO: 453029 - DNA, 1005 bp, Homo Sapiens
  misc_feature (167)..(203): n is a, c, g, or t
  misc_feature (343)..(627): n is a, c, g, or t
tcttgaggatccactgcccgtacgcgcaagagggagacctgtgcaaagggagagtgagggggaccgagggccgagcgagaagagagtgagagggagaggggtggttttaaagagtttttaaaattgctgaacaggggtacctctgggcagtgtgtcagaataccacnnnnnnnnnnnnnnnnnnnnnnnnnnnnnnnnnnnnngaggctttaactgatgtgtatctgtatgtctatttgtgtatattttgtcatgatcatgtaacagagtctgaaaagtgtcgaagagacagttttcaggaacaacaagcaattgttcctactttccgagttattttgatgcnnnnnnnnnnnnnnnnnnnnnnnnnnnnnnnnnnnnnnnnnnnnnnnnnnnnnnnnnnnnnnnnnnnnnnnnnnnnnnnnnnnnnnnnnnnnnnnnnnnnnnnnnnnnnnnnnnnnnnnnnnnnnnnnnnnnnnnnnnnnnnnnnnnnnnnnnnnnnnnnnnnnnnnnnnnnnnnnnnnnnnnnnnnnnnnnnnnnnnnnnnnnnnnnnnnnnnnnnnnnnnnnnnnnnnnnnnnnnnnnnnnnnnnnnnnnnnnnnnnnnnnnnnnnnnnnnnnnnnnnnnnnntaaataaataaaaccaccagcaccacaaacaacaacaaaaagttattttgtacttgttttgagcacaggactcctgagggtatctttgcatttaatattacataggggtgccagtgggaagtaatgtgtatgcttggcctcatgagctaaaaccctgtgttaattatgacagaaggaaagtgtgtgagagagatcttaactacctagcagctctagctgccatcttgaaccatgaagatacgggccacacgtaggggtagctgggtagtgagcagcaagaaaccttgttggatgagggcacgaaggagcagaatcactgggaatcactgtgtcagcccctaaattacctaccctcgggaactttttatgtggaggggg

SEQ ID NO: 453030 - DNA, 492 bp, Homo Sapiens
  misc_feature (13)..(13): n is a, c, g, or t
aaccctgcatccnagaggaaatgggcaggccagggaaaaggaggccatttggggcaacactgccattgtgaagtgagggaaaccccagcagcaccccaggacaacagtcggatatgggagacacactcaatgaattctttaggtccttgctgcattgcagaggggggatgataaagccaaggcagatagcggatcacagctttgttatctctgtggttgccccgtgagatgtccatggctgcaatctgggccagccccactttgagatgtcccccaaaggtatcttcatgcagaggctgggaacatgtcttcatgtggctcttcagtttggtcagcgtgtgcatgtctgccatgaaatccaagcacttcgttgatgtactgcctcacacactccatcgctgcagtcccacatccaggtacagaggctatcatctgcttgctcaggattgttgactcagctagtttggttccagcatctgcacaaataaactg

SEQ ID NO: 453031 - DNA, 543 bp, Homo Sapiens
aaatcctattcctgtcaataacccccttgaaacctgaaattcattcctgattttgggagattttgttaccaacggccactttgcctccgcaaataaactgtcccacaactgagccaaagatgaaacccgtggaagagggagcacatgtgccagcacggaggtctttgattcctctggaaatccaatcaggataacaataagatggtctgcaacgtgggagcctgcatccagaggaatgggcaggcagggagaggaggcatttgggcacactgcattgtgagtgagggaacccagcagcagccaggacaacagtcggatatgggagacacactcaatgaattctttaggtccttgctgcattgcagaggggggatgataaagccaaggcagatagcggatcacagctttgttatctctgtggttgccccgtgagatgtccatggctgcaatctggccagccccactttgagatgtcccccaaaggtatcttcatgcagaggctgggaacatgtcttcatgtggctcttcagtttggtcagcgtg

SEQ ID NO: 453032 - DNA, 947 bp, Homo Sapiens
  misc_feature (34)..(34): n is a, c, g, or t
  misc_feature (40)..(40): n is a, c, g, or t
  misc_feature (71)..(71): n is a, c, g, or t
  misc_feature (828)..(828): n is a, c, g, or t
  misc_feature (867)..(867): n is a, c, g, or t
  misc_feature (887)..(887): n is a, c, g, or t
  misc_feature (909)..(909): n is a, c, g, or t
  misc_feature (915)..(915): n is a, c, g, or t
  misc_feature (933)..(933): n is a, c, g, or t
tgcattgcttgttcagtttatttgtgccagatgnctggtnaccaaactagactgagtcaacaatcctgagncaagcagatgatagcctctgtacctggatgtgggtactgcagcgatggagtgtgtgaggcagtacatcaacgaagtgctggatttcatgggcagacatgcacacgctgaccaaactgaagagccacatgaagacatgttcccagcctctgcatgaagatacctttgggggacatctcaaagtggggctggcccagattgcagccatggacatctcacggggcaaccacagagataacaaagctgtgatccgctatctgccttggctttatcatcccccctctgcaatgcagcaaggacctaaagaattcattgagtgtgtctcccatatccgactgttgtcctggctgctgctgggttccctcactcacaatgcagtgtgcccaaatgcctcctctccctgcctgcccattcctctggatgcaggctcccacgttgcagaccatcttattgttatcctgattggatttccagagcaatcaaagacctccgtgctgcacatgtgctccctcttccacgcgttcatctttgctcagctgtggacagtttattgcgagcaaagtgccgtcgctacaaatctccaaaatcagaatgaattcagcttcacggcgatactgacagcactagaattttggagtagggtgacacccagcatccttcagctaatggcccattaacaaagtgatggtaggaaatggtgtgtctccatgtggatttagtttaatgggagggatttgcagggatggcaatttcggaccnttttgttcaagttgattacccatgtgggttggccatggnttcagtcaaatttcaggcanttttttgggggattccggtttngcttcnggtttttaggaccagtgnaccaccacaggcta

SEQ ID NO: 453033 - DNA, 1455 bp, Homo Sapiens
tgcggatgggatgccagtggcaagcactgatcagtggagtgagctgaccgaggcagagcgactccaagagaaccttcaagcttatcgtaccttccatgttttgttggccaggctcttagaagaccagcaggtgcattttaccccaaccgaaggtgacttccatcaagctatacatacccttcttctccaagtcgctgcctttgcataccagatagaggagttaatgatactcctggaatacaagatcccccgcaatgaggctgatgggatgcctattaatgttggagatggtggtctctttgagaagaagctgtggggcctaaaggtgctgcaggagctttcacagtggacagtaaggtccatccatgaccttcgtttcatttcttctcatcagactgggatcccagcacgtgggagccattatattgctaacaacaagaaaatgtagcagttagtcccttctctcttccttgctttctcttctaatggaatatgcgtagttccctggggcctcgctttcccatcttaaatttctaaaaacagttaagacaacaggcattttctttcttttttctctgaccacctgcagcctgttgaaggactacaggtattttcatcaagtagcgttggagacatacacaaatgggcatacaagtttagcctggggggtgtgatttgtgtgcgtgcttgcatgtgctgcaggtgtaagagagtgggagcagggacaacgtcctttcacttcaggtttctaaccttttctaaccccactaagtaacctctacaggcatttaactgccttacagacagaatatacatatgttaattctagtcctggatgactcggtctgagaagattcaatttaaaatcagactctttagttgatttaaactcttagagaataagaataataatggctaacttttattatcttctatattaaggcagtatgccaagggtctttatgtatattatgtacagcgtttacaaccttgtgagcaaggtggtgttactcccattaggtagatgagaaaacaggctcacagagatttggttaagctcacacagctaacaagtagcacactgagtttgaacacagatcattctccttgtaaaagcctatgtgcctttcactttagaggcttgatcatgaatcactgcacctctttgtcacagggtgttggaagatgcatccatgtaatctattcccatcgctggaaaacagctgctgttagatgtcctcagaagtcagttgcaaattttagcgttaaagtcaggatttattgttcatacttgggcgtgaggagggcagctggagatcttaagatttccattttggaaaatgaatatgcccgcccaaaactttttgaacttttggaagcctgggggaatgtttttagtaaataaaagcccctgggtttttttaaggtacccccccttaaaaagagttcctcaaa

SEQ ID NO: 453034 - DNA, 938 bp, Homo Sapiens
tgggccaaacccccggggcttgccctggccccacagttcccgtttttttaatgagaaaaggggggttttgtattgcccgtattccaggcacagaacccctgggaaattcgcggggagttcggattccaagttactcgggtggctggtgactcagcaggttccacatggcttgggctggaggtagggggcttccgggccggaggggaactcttattcacactaggcatcatgagcagtttggagttagtgaattcttgcttgtagctggaagggcttgcaggcttctccatggggtaagggacatctaaggaactgtgggagggccccgtctgctgccatgtggacatctggcccggggctggtgccggggtggcctgctgtgggttctggagcatctgctcgcgcttctgcttggcagcgatctgctggagctggtgggcagaggacagctctgaggcccctcctgggccctgactgggcaataccacacctgcaagggctctttgtgcgttctgggcctgggctgatgccggcatcaggtttggactgggattgtccgcccggggctgaccagaggtgtggaataaggtttgggagccccctaggctgggggaatctgtactcacaggggcagaggaaggccccagaaaggtctgccctgcagacccggccctcacttgtggagagcctaactgttcttgctcaaaggctgctggagagaattccgtcttaatattaatgtcctgtgccaagggggtttgtgtggcagagccagaagactctgggtccttcttctcctcgaagtcctcattaaacaggtccttcatgtcttcatcgggcaccgacctgttcagctcctcgatgagctccttccactcctgctcgttaagcctcgtgccgattacagccacccggcctcgctacctagcctattgtta

SEQ ID NO: 453035 - DNA, 785 bp, Homo Sapiens
tacttttccacaggttacaggccaatgattcgaacgctgaggtgaacacttagtactcgcatttgagcttcaaagtaaaaataaagcagaggacaaacgcctgtcacagcgtggcagcccggttcattttgtaacagaacaagtctcacacgtcggctgagcccaccggagagaagcacacaggccagcttccttctgaacacagccaggcacctgttcaaaagcctctctcgtggtggcggtggaccccaaaacccacgggttggaagagcctttgggaaagcaaattgataccctgattgcagtccttgaagaaatcacttagggttagtttaataaacgaacattaaaaaatcttccaaaaattgcattcaaatgtattttacactttaggcagttcttaagaagggagagtgcagtttcttgacacttaacatttaaaggttttattggccacattaatcttcctcacaaaagttttaagttatctataagttcttagaatgtcaaagaagagaagaaaaactgactaactttaaggggcggtggaagcagcagcaacttggcaataattctgcagccgactttgcgtgttcaggcatcctttttctccagtaaaattttgtgcaactcgtctgcatcctcgctggtttttacccgaatcaacatggtgactggcatggtggcattcttctcgtcaattggtggatttggaacacagacgataagaacgttattcttccctgttcgcgtacatggcatattgggtggaatcagaacatccc

SEQ ID NO: 453036 - DNA, 815 bp, Homo Sapiens
cttgaaggggttgattttttcatttaatgggcaccagttccgaagccaggggtagggtgcttggcaaatgaccttcatattaggaaatgatatattgctcggaaaggtgggaaaaccatgccttgacctagccattgcggtagaagcttttacccactcgagaaaaatttcccctacctcttttgtttccgcactttcctaagggatttaacaaagcacaaaaatattcccgtttggtgagatccatccctgcagtgaatgagtagaggtgtattcttgtgatgcttgttcccttcagaggaattcttctggggaagtttttgtttgacgacctgaatcatagagattaattccttgggttctgcaggaagctgctccacactccagtttgtatattggtactggtacacagttcgagagtctttcctcttggaatgtctcagttcaaagacacgaagggtataagttgaagatttgtctgtgtctttcaggtcaacttcaatatctccatatgtttgctttccttctccccagtactgagcacagatttcctggtctccatgtttcagttctgtcagcataacaataactttgacttttctttggaagatcatctgccaaaagtcaccaatggtctccttcagtggtccctgagcagcaatcatcacttcaggtttccagtagctcattataaaagatgcattgatgtatttgcttggttcctctgaatcactgtcatcatcagaggattcatctgaatcatgctcactctctttactcatttccagctcatgtttaagtggcactcttccggg

SEQ ID NO: 453037 - DNA, 861 bp, Homo Sapiens
aaccatggttttaaaaaccttttccttggtaggactttaaaatgtattaaagatgggtagttctaaatgagcttgggggtatgtttgctttttgttcaactcttaatgggattgtgctaacagtttatacaaatgctagaaaacggaggtgtcatttagccgtcattagccatgaacaaacctgaccttttattccatcgtgtgtgtaacgtggtgtgacatggttccctttaggctgaagacagtgggagcagccgagttcagtccttgctctccaactaggcaaggttctctcaactaaaccaagggtataggagtcttgattactttcagtatgtttttttaataacctgatccacatggtctcttcccttcttgcagctgctactaaattttcattcagaatatcaagctatggtcctttttgtaatcttaactccaaattctaggagtgtaacctctcttttttaattaccgcaaaatccagctgtggtaaactgaccattttatcattacatttttttacttgtagcaacagcattttactccttaaaaaaatgagagagagaaaatctgctttctggacttgtaaactctggtggagaatcataggttttccccttgctgtttgcaggttcagaccctagacaagtatgaccaaatctgcatttgcagcctctcgcagaagctgctttagcactttaacgtttttctctacccagactccccaacctcgaacagccagaaaacaggttgtctcctgggccttggacacagccagccaggccattgaaggaaaagcaaagacgaagcgaaccatctctctccattgtgggggccaagtagctgcagtagccttca

SEQ ID NO: 453038 - DNA, 457 bp, Homo Sapiens
  misc_feature (373)..(382): n is a, c, g, or t
tgaagtcatgcaccattaaataagatgaaatatttgtatttattgtcctacttcctaagccgtaacttcttttcctctgtgaatttgcattgagtcactcatgctacactacatcgctttagtatttgagatggcatttatgtttcctctcgtttatcatgaaatggggtcagattccatcagattccacctctgtcaggtggactcttgtctgccttccatgatgagattttttttctccttcccctttctttaagagaggctgacagatctaggtgtcaatcaattggaaaccagtctctgattttttttcattagttattttctatcattagtttcactgtgtaaattagatatcaactgcacttctttnnnnnnnnnntacatctccctattacctccttgaaagatttacttctgtaggcctttttcaataggctcatgactgcagacaagg

SEQ ID NO: 453039 - DNA, 408 bp, Homo Sapiens
aagtgcgggattacaggcatgagccaccatacctggcccatggcactgggctcttctgtatcaaaggccaagcggcaagggagcagaacgctgtgctctatgtgcatgtgacactgcacaaaacccaaagtgggggaagtaaaccccagggtatatggtgttggcacagctagcatagctatatgctatgatacatgctatgccaacaccacagattgcatcaaaatacatttatgtgtttactgaatgaatcaatgacctagtttcactagagtcaggattcgtgatctggcaggcagtttgttattgtttgttcatttgaagtgaatcttcaattgaaaaccaatctgatcaattttatttttaaaatttaacacaaaagtgatacacacacatacttgggaattg

SEQ ID NO: 453040 - DNA, 444 bp, Homo Sapiens
  misc_feature (42)..(42): n is a, c, g, or t
ccctgaagggtcccccaacagcaaagagttaagaagacacangcccgggacccagaacttactgaaaaagcaaataatcccaaggtctgacttgggtttctgaggatttgcctcagttatagatgtcattctcgatttggcctgaagagggcagacacttgccattcatggaggtgaagagcttgtttttaaggctggactaacatctcccaataaggtcatttggttctagtgagagttgcagctcacaacattcttgactcttctgctgcaaatatgctactggaaagacactgaagttcacagactgaagttcctttagttccaactctggcactgtaataggtgaccttgcacaggtcacttcacctctctgagtctcacttcttgtgaagtaagatctctactccgtgactgagaaggtggtattggggagtgatatgt

SEQ ID NO: 453041 - DNA, 1239 bp, Homo Sapiens
  misc_feature (588)..(636): n is a, c, g, or t
  misc_feature (686)..(745): n is a, c, g, or t
  misc_feature (892)..(918): n is a, c, g, or t
  misc_feature (998)..(1006): n is a, c, g, or t
  misc_feature (1130)..(1140): n is a, c, g, or t
  misc_feature (1187)..(1196): n is a, c, g, or t
tgcctaaggtagcgaggccgggtggcgaatgcgggacgagggtgaaaggtggctgtaccgggagccccgcggaggaggggcgcggccctggctgcccccgcgccgagcctggtttgtgctcacgcgggactccctggatcagttcagcagcagcgggaaaggggcgcggcgtctcgggagcctcgtgctcaccagcctgtgctcggtgaccggcccagagcgcaggcgtaaggagacaggtctgtggtcagtgactgtgtctggtcggaaacacagtgtccgcctctgctccccacgccaggcagaggctgagcgctggggggtggcattgcgggaagtgatcgcctccaaggcacccctggagacccccacccagctactgctcaggtaccatacaggaaagttgcgggggacccaagagtgccgttgccctcatttacctgaggaaacccgattctgagaacacacttgtggagccttgtttgccccattcctggccctgccctatggagtcagcgccccaggtcccgggctatgcaccccctgccgcgaggaggccggtggcggcctgtttcttttggcgccttnnnnnnnnnnnnnnnnnnnnnnnnnnnnnnnnnnnnnnnnnnnnnnnnntttggattgcccaaggggttggtggcctttcccaaaaaacccttggcgcnnnnnnnnnnnnnnnnnnnnnnnnnnnnnnnnnnnnnnnnnnnnnnnnnnnnnnnnnnnnaaaaaccctttccctttttaccccgcccttggggccacaaagaacccttttggggggcccctttttaaaagagcccccaaggggaaaacaccctttttttcgggggggtggacccccccctatgggcccacacaggggggttctcannnnnnnnnnnnnnnnnnnnnnnnnnncccttatttttccccccggtgggggcccttataactcccccccagaaaaggataaacccccctttttggtgcgcgggggnnnnnnnnntttgggcgccgggagataaaaccctggggggggcgtaaaaattttctctcgtctccacaccctctgggccaatttggggagaaactttgttgctaccacttttttttcctacaaaccccctgtnnnnnnnnnnnaaacacatctgtttcgccccgagagggaggtccaaccacatttccannnnnnnnnnacacccatcttggtaaagagagggaaaccttggaatcctcagg

SEQ ID NO: 453042 - DNA, 730 bp, Homo Sapiens
  misc_feature (292)..(300): n is a, c, g, or t
ctattttttataagccgaagagttggtagtccttttgtgccctccgttttataggccgagttgtgtgtggtatcttcgctttggggagggaggttatgttggttttgcgcacattatttcagggaagttcgaattgtggggacttggacaaggaccaagggcgggtaataaaagacgcacagaacgcaaagcaaaaatttacccctttttttagagaggtattgctcccctgggagggcccatctttccagattcaggggccacgtttccgaggggggtggttataggttannnnnnnnnaaaagtaattttgaggatagggaaatgtcttggaggcttgttgaaccaagtttccccccggctaagttgcaaattgtggggggcaaaaaacttgtgagagttccgtatggatgattcattttcataagcaaataagggatgacaggcacaaacgggaagaagctgccagtcacgtggaaatcagagtgagacttacctaaaacaggagccggtaaggccaagggggaccttctagattgtttggttgctagaccaaaccccactctccatttacgtgaaggcacacagtaggtttctgcaaactcaattattcaggtcttaaaaacctactagcctcaatcaaggagttacatctgcttgtcaaggacaggtcatagccgacttttcatctacatgcccggcataaagttgaagccaaatacttgagggg

SEQ ID NO: 453043 - DNA, 908 bp, Homo Sapiens
  misc_feature (337)..(460): n is a, c, g, or t
  misc_feature (543)..(572): n is a, c, g, or t
  misc_feature (609)..(646): n is a, c, g, or t
tggagtatgtgtaattttagagacatgtgacatgatcagatgtactcttaaagagggtctttggggcttcgcccatgactctctttggttcttcttccttacagtctgcaacagtgaaagattgtttcctacatgaaagtctgtgagagagagaacaggtttgcatgttgccaagttatcaaagaaaatacatttccttcaaaaccaacttatcccctgaagctgctagtaagaaaaatatgagcaaaatataccacagaataaacttaagctgcattttaaaaagactattatcttgtatgaaaataattcataagttaaaatgttaaaaggccannnnnnnnnnnnnnnnnnnnnnnnnnnnnnnnnnnnnnnnnnnnnnnnnnnnnnnnnnnnnnnnnnnnnnnnnnnnnnnnnnnnnnnnnnnnnnnnnnnnnnnnnnnnnnnnnnnnnnnnnnnnttagccaggcatgtgacggtgcacgcctataattccgcactcctacttaggaaggtgaggtgggaggatcgctggaaccgggnnnnnnnnnnnnnnnnnnnnnnnnnnnnnnctgtattccatcctggaagacagggtgagactctatnnnnnnnnnnnnnnnnnnnnnnnnnnnnnnnnnnnnnngatatttcagtgtaattttagtaacacagaaaactcgatatatttattacaactcaaagttataataataagaataaaactacattgtcaaggcaccctatgaattaagaattaaaacggtcattagttaagcagcagaacgcttaaggagaagtcaatgaataatgagatttactgcactttgggagggcctagctctttccgcccattgaatagacattaccattggggtcactctacttactataagtgcttactatcg

SEQ ID NO: 453044 - DNA, 967 bp, Homo Sapiens
gaaactctgcgcggcccccagaggacgtaggtcctctgagtcagaagccactaaccagatgatccagcagcaggactgagggtgcctggggcaagtgccagcccatgccctcactgtcacagagccctgggtatgcttgaccattgagggccaggaggttaactgtctcctggacactggtgtggccttctcagtcttactctcctgtcctggacaactgtcctccatatctgtcactatcagaggggtcctaggacggccagtcactagatacttctcccagccactaagttgtgactggggaactttactgttttcacatgcttttctaattgtgcctgaaagccccactcccttgttagggagagacattctagcaaaagcaggggcaattatacacctgaacataggagaaggaacacccgtttgttgtcccctacttgaggaaggaataatcctgaagtctgggcaacagaaggacaatatggatgagcaaagaatgcccatcctgttcaagttaaactaaaggattccacctcttttccctaccaaaggcagtacccccttaaacccgaggcccaacaacaactccaaaagattgttaaggacctaaaagcccaaggcctggtaaaaccatgcaatagcccctacaatactccaattttaggagtacagaaacccaacagacagtggaggttagtgcaagatcaacttcactgcctagcagcagtagtccttcaaaatcaaagagctttagacttgctaaccaccgaaagagggggaatttgtttatttttaggggaacctagctgttattatgttaaatcaatccagaattgtcccccagaaaagttaaagaaattttgagaatcaatattaatggtagagcagaaggagccttccaaaacactgggaccctggggggccctcccttcaagcccaaatgggaatgccccttggggaattt

SEQ ID NO: 453045 - DNA, 930 bp, Homo Sapiens
  misc_feature (237)..(289): n is a, c, g, or t
ccaccacttggagttttggcgttttcccccctgggagaaatgccacccctttagggaagtctcccaaatttattcagtctgttaactgtcggagcattacagagggttcatctatcttagcagttactggcatgtcactggtacttaattcagtcagccactcagccttttggggagcatttgttgagtgcctactctgtgccaagggagagctaatattgagcataagcacagggnnnnnnnnnnnnnnnnnnnnnnnnnnnnnnnnnnnnnnnnnnnnnnnnnnnnnataatcacataaagaaagaacacattaaagaagtgcctggcaccctgtaggccttctgcaggtacctggtgagtgaacacagctgcaatcagggctgtgaaagatgtacggagggtgggcacttccctgaggaggaggtgtaaaggaaaagcaggggtgaacaggcgagtgggggaggaagggcactccaggtgtgcaggtccctgtgccagaaagaagagtggcctacaggaggacctagaggccggtgtgactggcgtgcagtgacaggaacacagttcaaggtgaggctggagagacagatgggccaggcaaagcagggcctttaaggccttcaaaagttttgatactggcagaagagcaaagaggcacctatgaaggctttcaggtagggagtaactaaccagcctgtattttgaaattatgagccatgcattggaaggttcactgaatcaatggaggaggccagttaggaggctattgctagagttaattgggttggttccatctccctactaaatggtaagtgccctaggacagaacctgtgcctggtacccttctaaaatcacagaaacacacacacgcacagagcccaggctgagcatgcacagaaatccggagaattccggaccggtccagc

SEQ ID NO: 453046 - DNA, 827 bp, Homo Sapiens
  misc_feature (654)..(698): n is a, c, g, or t
gtggaatgaaaaactattggttcatttctttaatattaatataagtttttgctattatgtcaaaagtactttccaatcttaatttcttagtgtctggggtcctgggcattgatttccaagttattttatcttagaatagctcatatgagctgaaaaacaatttattctcttattaagcttctttcttcagaaaagtacccaatttagggtctgcattttaagaattattaacaaatatcttcataaaaatttgggaaaaggagtgtggatagatttaaacataaaaatatggagaatagttctaacagggtttgaattatagcaacaatggattgtgtaagaagtgaatcttatttttatttttaaatgttctaaataggacaatcagagatgacttggttgtagtgtgggaaaccagtagggaccttggggaagctgccaaaccctttctagctctggggctcagctgtaagaactgctgattcctacaggaacacttggacaatccaatacctaaatgttaaacatcaattaacccagtaaaacctgcaagaagggaaacaaaaattttgttctccacgagttttcaccgtggattattttaaaggtaaggggaaattttcagcctggtttaaaggttccggtccttaaaannnnnnnnnnnnnnnnnnnnnnnnnnnnnnnnnnnnnnnnnnnnnggtaacccactttttggggggccccattaagccaaaactgggggggtctttccccatttggctggcccttcccaatggattttgagaaaaaaatctcccccccaagaaattttttcaggtggtgggcgg

SEQ ID NO: 453047 - DNA, 907 bp, Homo Sapiens
  misc_feature (254)..(254): n is a, c, g, or t
ctttcccgctgggaaatttttgaaaataaagcgtggccgggccatccccgccctttgggtggaccccattggtttttataggctcctccccaggtttttccaaggccatttccccttcccccttcttcaagtttttggcaagctttttttgctccctcattgtccaaagatgactctcattttcattgaaccctttcaagatcttctgtctctcgatctggatatattcttccaggcggttctctcttgtctgnatgtcatcttccagcttctcagcctcttgatctctcctttaatcagcctctgcagggctacctgcagcttttcctgacattccttgaccacctcgtttatgcggaatgtttggtgaccttggtgttcctgagacagttcacaaacccagcaaatgacttttccatcctccttacagaagatctggagtttttttccgtggtgctcacagacatctctcttctgcccctcctgtgggctcatcttgacctctgttgactctctcaactatgttggccagatgccgattaggtcggaggttcccaggctggaatctggtctgacacacaggacagctgctttcccctcttgagatgatcactgactccttgatctttgcagtgatgcaggcttggcagaagctgtggccacaatctaggctcagaggttctgtcaggagctccaggcagatggggcaggtcacctccttctctatgtctacctttactgagaaatccattgcactgctcccttggcttccttctgtcttgactcttgaagttcttggtcacaaactcctgcagtgcttcagtccaaagcagaggagtcttgaatcaggggagaagagtgaaggcagggcaggagccggtgtaaaccagattcactcaccaagcca

SEQ ID NO: 453048 - DNA, 647 bp, Homo Sapiens
ttttgggttttggaaggggcccttctttaaaaaaaagtgaaggttgccccaaaaaaccccaaattttttccaaaccaaggtttccggggtttagaaaatttttgaatcctattcaagtttaaaacctttgacatacagagtaacaaacccatcacactcacaagggtgataactgatctcccagtagtcaatatgttatttctgcagtcttgatttaattttctggagtttctatgttatttctggagtcttgatttaattttctcaattctacttacccaagaagtgtttctattttcaagtactagatcaagtcctaattcctccagaaaatcatctttgattttaagtgtcttccaaactttaatggcaattattatctgtatcattcatttatctttcaacctataaaaattattctaagtttccgacttcataggcactaagtctcttggaggcaaggtttgtgtattacaacaatttccatttccagtgcctagcataaaggaaagcacatttataatgacagccaacacatactgattaatattgaaatcattttattattttaaaaggtaactacatacttttttatgcaatcccaaatattatgaagtgataccattaaatatgtttcctgaggccac

SEQ ID NO: 453049 - DNA, 951 bp, Homo Sapiens
  misc_feature (128)..(138): n is a, c, g, or t
  misc_feature (648)..(660): n is a, c, g, or t
aaatttcttttaactatttaccaatggggttacccccccaggggtaattaaaagaaccaatttttcccaaattaatccctttccagttttttccaaagccattaatgtgtggggctgaacccattttnnnnnnnnnnnaggacctcaaccacttttttaaaaggtagtttagttcccaggaaccagatgcctttccttagccaaggggggcccttttaattttttaaatgaaaagtgtttcccaaagtaatttttcatttgaggggaaaagagggttaaaaattaattcaaacactggtcgataagctgtgggagtccccaaagcctggatctctgtggctggtgatggcaaggacagtgaaggacaggacatcattagataccgtcccacctggatttagcccttgggctgtcaaatgccctgtagacatacaatagcatgcaatctaaagaagaaaaactcgtgctagaaataatacaaagccttttacctgtttagaggcagagagccaaaaagatcccaatcttcccttgaagtaggttgagtactgtgacttttctgttttcctatcttcctttttatagggaatttttccaggacattgaaatctttcctgctggtaaattatactgcaaatggactatgcnnnnnnnnnnnnnaatggtaatttttaaaaatcctcacataaagccctttaatggtgtatgtaattggaacaccccctggtatatctgttagatttacttaagtgcagccattaaaacctcagctaaaacttttatagctgaggacacaattcaaagagattaaaatccagctagattggattcccttgaggaaaccagcagacctatcaagagttcaaggaaaatagatgtcttagataaagtgaagtcaaatgcatacataacttccacaaaggaggctatacaacaaatataggacatcca

SEQ ID NO: 453050 - DNA, 897 bp, Homo Sapiens
tttcttccaaaagtgaaaattttcggcctggcttgaagaaaaaaggaaacccggtaaggggcctttgcatttttcttcttggtggttcaatgccagtccttcaatgcttttaaacaggccccagaggagggcaagtttatagacctgacacagaccatgtatatatttcttaaaagcccttcaaaaaccagagctcactgcttaggcattatggttataacacagacatgttcttggaagcatatctaaactacctcctgtttgacacacattctaacttgggttggttacaaaactttgtcaagttgttaagatcacacttggtcacattttccccatttctgtgaatcttgcaacttatctttgcccagagcaacagcctagacatgaccaccccaagcagggactgcactgcacccaacattgccccagcaggtcagtcctccttgaacaggaactgtttttgaggggctccaatttccaggttctagaatggggtggctcacttaccaagttaaagaggctggctacatagaatgcagtattgagaagccccccaaggtagatcctgggttacaggaaagaaagctatactgatgaacaaggtttgcttccacaggcatgggcgtgggggagggcagcaatgccgggggccaccccgagatcactgctgtcatttacatttgtatcacacttcacagtttacagggagctctgcatgcttagccccatgtcattctcagcacaaccctgtgagtgaggtctttctggatgggaacactgaagttgtgtcctacatctaaggtcccacagccaattgcatcacatccacggctgcctccaggacctcaggggccacctgaaaccactgggggttccccctggctccccttctaa

SEQ ID NO: 453051 - DNA, 1068 bp, Homo Sapiens
  misc_feature (102)..(157): n is a, c, g, or t
  misc_feature (526)..(526): n is a, c, g, or t
  misc_feature (601)..(601): n is a, c, g, or t
ccccaatccagagggaggtcgggacatcaatgggactcaaccggggtgtgaggtcgggcagggggtgctgtgtctcctgagggggcagggggtcgccgcgcnnnnnnnnnnnnnnnnnnnnnnnnnnnnnnnnnnnnnnnnnnnnnnnnnnnnnnnntgaacaggtcggggctcctcgccctccgcatctggagtccagagtggaggtcggttgtggggctgggagtgagcagcctgggtctaccacgacctctggagagtcgagtcacttccggtgattctgagatgcgcccctcttcccctctgctcacctccgggggaccaccggggccgccggggccctccccgggctggggtcgtgcaggtgacctgggttgcccatagtcgtccccctccgcacgggaggcccggcccagcgcccgtagccagccccgcaggtcttctaaggtgtcagcggccaaaacgtaggtccttcatgcccggggtgctctgcggtgaaaggtgaggcgccgccctcggggggctncccggcccatctggtctaatattgtagctggggagcaggacgctgcctaggacactctcctcgcggctgtcctgntaataaaagaggcaatggccggagaggacgaaccagcggcgtttccagagacggagccccgagctgtcctgcttatgaagccagcctcggatgtgcacgggaaggttgggatccctcctgagcgcattgcctctcttcccaaaggcgtggatcttgtttactgcccgggtgggcttcttggggctcaggctgctgagcgaggagatggtggaggcgctgctggccaggctcaggctgctgcgaggtcggctcccctccatcaagggccagctctggggtcccagtgacgggggggcaagaggacggtgtgggtgctgcggcacctaggcagtctcccgcctcctttgtctcttagctgctgtctctcatagttctcaatctctctcctcacctgctcactcacactttttgtctctttgtctcctgtctcttacggtctccctcgtgccgaattcgccacccaggcc

SEQ ID NO: 453052 - DNA, 1302 bp, Homo Sapiens
  misc_feature (888)..(1046): n is a, c, g, or t
  misc_feature (1159)..(1223): n is a, c, g, or t
tcggggtcccttgggcttataggtttactttgtgccctacctttgaaaacaagggaccctgtccaggcttctttttaaatggccaacctacctttaatgctggccagtctatcttaccacaaagtttaaagttttcctgggtgtcatagcactccatagtctcccctcagattcttttttgaaatttgtcaacatagttcctagtggggtgggcttattcgtgcctgacctatgcttcttcaagacaaaacaccacgctcacaccacaaacacaccacaaaacaaagaaccggtaaaaagggcgcacacacagttttgcagtttgcaccaaaccaaaatcagagtatccagaaatccaagccaggtcaaaaccaaaaccaaagtatcaagcaatccaagtcaagtcaaaaataaaaaccaaagtgccaggagaggcacaccatgggtgatcaggccacacttccactcaaatggagtaggcaagttcccaagaccaatcctgtcaagcaattcaaaccaaaaccaaagtgccaataaaggcacgccatgggtgatcaggccatgcttccactcaaatggagtgggcaagtttcaaagactactcttaccaagttttagatgtccagactccaagtgcccgttccttaccgggtgttcaggccactgggttgatcctccatgggggcttgccaatacagtgttctggcgaggcttccccagtggggcaaattcctaaaccaggcgcgccctcaggatccgttttgctcgggctggttggagtcccctgcagggatgttccccagggcgggtttaagccgcctaaggagctgccttgaccatccgccattcacctcgcttcccagtcagggaaccaagaaatcgagctgnnnnnnnnnnnnnnnnnnnnnnnnnnnnnnnnnnnnnnnnnnnnnnnnnnnnnnnnnnnnnnnnnnnnnnnnnnnnnnnnnnnnnnnnnnnnnnnnnnnnnnnnnnnnnnnnnnnnnnnnnnnnnnnnnnnnnnnnnnnnnnnnnnnnnnnnnnnnnnngatcaattgagcaagcagggggtacgtgactgggggctgcatgcaccagtaactagatcggaacaaaacaggaaaggcattgtcacagtgcttttctatacaatgtctgtaannnnnnnnnnnnnnnnnnnnnnnnnnnnnnnnnnnnnnnnnnnnnnnnnnnnnnnnnnnnnnnnnctggggtgtctgcttgtggatgtcatttctgccctttagtttttactttttctttctttggaggcagaaattgggcata

SEQ ID NO: 453053 - DNA, 1145 bp, Homo Sapiens
  misc_feature (83)..(108): n is a, c, g, or t
attatcaaattccaattttcaggaaaagtgttatcccttttctggcccgatttattgaacagtaattttttaaaccggccacnnnnnnnnnnnnnnnnnnnnnnnnnntccaggataaccttccccttggttaaattttgcccccccaaaactggttcttccaaaaaggccccatgaaaccactaattttatagaatcatgggccttgcgctcgtttccagatcagttaatccccaaatgctctctttaggggggaccgcatgactggctcgcttccaacaggtgtcgcatcaagaactgcaggggctgttcgcatctccacgtcttcatgaacaactggagaacttgcacagtctgagttgtggccattttcagccagaacttttggtatcagcaacagctcagcatatttactacagccaagaagggcactaagtgacttcatagcaccgaggtaaagataggacagctggactgctctgatttctgactgggctacatcatggtttttggacatgtgttcatgattttttcttttcccttctgttatttgatgttgggattccacacttggcagtgttggatctaaagaaaatgaagcgatttcattttctgatttggagcttgtggtactctgacttttgacgtcatcagatgttaggcctgttcgcatatctaaagcggattcactctcaggtttctgctcaacatcccctttctcctcggattcatgtcggtgtttcttttcatgtcgtttggtgctctgtttgcccatgtcttcatgaacgccagtgagatatgttaggtccagcagcacagaagccgtcaggcctcggaatcgcgccacatcaaacggcaatggttcacagggttccagattatacaatggagtatcactaggcgaccaaaaagttgggaagctgatagtaatttctgcttcatcccattggaccttggcagacgtgctgccctctttgaccactcccagcagcgtggcatggcgcccagtttgcttgtgaacacaccgacctccaactctaagaccagcatcaactcctcctatcacagccagcacgggccacacctctatgcaaagagtcctcagctgcagctctgagaggtcagcgaggccatgcctagtatcc

SEQ ID NO: 453054 - DNA, 903 bp, Homo Sapiens
  misc_feature (811)..(811): n is a, c, g, or t
ctatgattgtggctattgatgagatctctatgttcctggatacagaggtgctgagcagtgatgatcgaaaggagaatgccctgcagacagtgggcacaggggaaccttggtgtgatgtagtcctagccattctggcagatggcactgtccttcccaccctggttttctacagagggcagatggatcagcctgctaacatgccagactccatattgctagaggcaaaggagagtggctacagtgatgacgagatcatggagctgtggtcaactcgagtgtggcagaagcacacagcttgccagcgcagcaaaggcatgcttgtgatggactgtcatcgcactcacttgtcagaagaggtactggctatgcttagtgcctctagcactttgcctgcagtggtcccagcaggctgtagctccaaaattcagccattagatgtatgcatcaaaaagaactgtcaggaacttcctgcataaaaaatggaaggaacaggctcgggaaatggcagatactgcatgtgattctgatgtcctgcttcagctgggtgcttgtctgggctgggtgaagttctaggtgtctttggggactggtccagagctagttcagcgctccttcctggtggctagtgttctgcctggccccgatggcaacattaactcacctacaagaaatgctgacatgcaggaggagctaattgcctccctagaggagcaactgaagctgagtggggaacattctgagtcttccactccacgacccagatcatctcctgaagagacaattgagcctgaaagtcttcaccagctctttngagggtgaaagtgagaccgagtctttctatggctttgaagaagctgacctagatctgatggagatttgagtgttggggtcatgaggggtggg

SEQ ID NO: 453055 - DNA, 1109 bp, Homo Sapiens
  misc_feature (55)..(55): n is a, c, g, or t
  misc_feature (269)..(280): n is a, c, g, or t
ggctcggtggcggtgtcttttcggcgctattgtgggttgtttctgttggttatgnggccctcccacttgtttgtgttgttgtgcgcgtgtaggtgtcgatccgttgcggcgcctacggtggcgtccctccaccacgcccacctctggcggttgcggactgcagtcggggtgtgggggcttgttctgctggacggaaagaaacggctgtcgtcgagggaaagagtggcggggcgcttattgtggtccagattgggtccaccggctagggnnnnnnnnnnnntggggacgtttcctgggaggacctgggtatttttgccccccaggaaaattccccggggttgtgggtttagccagggggggagggttagcgttgttaggctgaaccagaaaagcttgggctggcttccccaggcctgcgtttttgcagaaaagtagtaacagtgctcctcggacaacacccagcttggggggcactgctggcatctggctcctgctcttgaggccaggaccacaatgacaaccccagagactgccaggagcacagccatgaacgccagggcccagtacagggacttcacgtacatgggtagccccgtaagcgttacggcccggggcagcttctcgtcgccgtccaaccccgcgcggggcaacagcgccgcatcctccttctccagccccagctccttgcagcggcagcacgtgggggagcccggggagccggcgcttccttccgcggggctggcccggccctctgcgtcgcagccgctctccgtccgggctgcagccagcggcgagcggcggccccacgtgccgccctgggatggtgcgcgcagcaggagctggtgcgccgggtccgcgtggcgggagaaggcaggggactcgggcaccggcaccttgaggaagcgcgtggagggcctgggcgatggcgtgctgctgccaccggccgcgcccacgggcttcacgcgcacatctacctgcagctccatgggcgcccaggcgctgggcgcaggctcagccccgggcgcctcgccattccggggcagcttgaccaaggcagggcccggtgacggcctcgtgccgaattcgccacccaggcctcgctaccttag

SEQ ID NO: 453056 - DNA, 928 bp, Homo Sapiens
  misc_feature (125)..(180): n is a, c, g, or t
atttctttgccccaaaccccaaggcaaggttcccccaaaaacgccaagccccccaggggggagcccttcaggagggccagccccaaagaaaggggtttaatgttgaagacgggtggccccagggnnnnnnnnnnnnnnnnnnnnnnnnnnnnnnnnnnnnnnnnnnnnnnnnnnnnnnnntcccgcccaggggggcaggccccaaggggtgccagtctgttctcgggatttaacgctgggattcagtcgccagccagccaggctgcagggccctgctcaggagggcgcgatgctatgcggcaccagcagggggcaccacaggcccacccttagctgcacgttcccactgccgttgtactcccacccctggggctcaggctgcctagagaggctcagtgggcagcaagacccagacactcccaaggccttgggcctatggaacgcctccacggagtgaggaaggtacttcctatgccagctctgggtggggctgggggcacagcaggccctccagctctgacccagatgcaggtggactggggaagcccagcccaaaccccaggtagaggcagcagcaggtccaggcaacgccaggcttggccatggggtcctgccgtcccccaacccttgcctaccacatgggggtttcatctgctctctgctgcccgaggcggcagcccagcctcggcccaccgccccaccacggctcagtcaccgtggcacaggccgtcactgggtgtcagggtcctggaagccccaggcctccacggcagcaatgaggaagttctcggagcagaggggctggttgttgaaggtgtcgcagtggcttgtgcggccccggttcaggtccccatcgatgtagagcgcctggccgcctcctcccccgacgaatgaggcagtcgctgccccccgccatgaacatggactc

SEQ ID NO: 453057 - DNA, 937 bp, Homo Sapiens
  misc_feature (55)..(55): n is a, c, g, or t
  misc_feature (682)..(877): n is a, c, g, or t
ttcagtgatcaacatttagacaagacacttgccctagaagcccccagacaagcancacaggcacagggcgcatccaagactagagtgatgctcttgttctaggtcctaagaagacagaccaccactcattcacccctgtaacaagtatttgttgtgggccaactggcactgggtaagatgcagtagatggggtagtgaatgataggggagctttctgtgtaacttacagacttgtgaccattaaagaagactggtaggaccagggtttaggcccccattccacctggcaggaactatgtgtcctgaccagggtttaggaccccattccacctggcaggaactatgtgtcctgacacagggtttaggaccccattccacctggcaggaactatgtgtcctgacataagttacttcaggtctgcaaggcttttcctcgaggatgaaatgagtaaagattaggacctatcccagaagtggctgtggaattaaatttaactacatctccacaaaaaaactgtacaagaatgttcgcagcaacatgcttcgtaatagccaaaaagtggtaacaattcaaatgtccattaactgacaaatggataaataaaatatgatatatccaggcagtggaatattatttggccataaaaaggaatgaagggccaggcacagtggctcacggtcnnnnnnnnnnnnnnnnnnnnnnnnnnnnnnnnnnnnnnnnnnnnnnnnnnnnnnnnnnnnnnnnnnnnnnnnnnnnnnnnnnnnnnnnnnnnnnnnnnnnnnnnnnnnnnnnnnnnnnnnnnnnnnnnnnnnnnnnnnnnnnnnnnnnnnnnnnnnnnnnnnnnnnnnnnnnnnnnnnnnnnnnnnnnnnnnnnnnagacaccacataagatgcataactcatttggcaagatgccattctcattttcatcattca

SEQ ID NO: 453058 - DNA, 1142 bp, Homo Sapiens
  misc_feature (434)..(434): n is a, c, g, or t
  misc_feature (750)..(806): n is a, c, g, or t
  misc_feature (889)..(990): n is a, c, g, or t
  misc_feature (1099)..(1099): n is a, c, g, or t
ccattaacttctaagtgtccttgtgttcaatgaatatcctttacctattgggaaatagaaggtaaattagtaagagaactggtgtatagctttgtggaccatagggcttatttgctgagagttgtctatattcatgcacccagtcccctaagtagcctcttttaatacttcatttagctgattcagaaaaaaactccctgggaattaggagatttaaggttcagtcttgcttctcctacttgtggcttcactgagctagtcagtttcctcaggcttaggtttctggatttgaagtggaattttttcaagaatgaaacttttatagctgaaataaactttggagcttatctttcattgggaaaaaccaggggtggtttcagtgagttaaggacaatatagcatggactgggctgccagtctagccattttgtttnccaaattcattcatgttacttttgggagtatcttccatctcctctcattttcccatcttctgccctttactattctgggaaaatggcaaaaaagcttcacatgtgtccacaaaatgacaatttgtatgtttataaggaattcagtattctgtatcagttactttttccaaataaatccaaatatttaacatttaaaaaaatgcaatctaaagtataccaaactgtaacttacctagtaaatgagattagaaactattgtcagggtcatcgtagtgaattattattattattattttttgagacagagtcttgtgcnnnnnnnnnnnnnnnnnnnnnnnnnnnnnnnnnnnnnnnnnnnnnnnnnnnnnnnnntgggctcaagctattctcccacctcagccgcctgagtagctgacactataggcaccaccatgccctggctaattttttaaaannnnnnnnnnnnnnnnnnnnnnnnnnnnnnnnnnnnnnnnnnnnnnnnnnnnnnnnnnnnnnnnnnnnnnnnnnnnnnnnnnnnnnnnnnnnnnnnnnnnnnccacatcctagtaccaactttatcacttctgatggcattaggacacacaggccatttataagagcagtgtttgaagacctcctgtgtgtcactttccaatcctcttggncctttcatactaaaagtcactggctgtgggcaaaccagttttc

SEQ ID NO: 453059 - DNA, 949 bp, Homo Sapiens
  misc_feature (50)..(50): n is a, c, g, or t
ttaaagttgaaaattgaatgtcagttttattatggtggattttctcccgngtcttcacgactcacagcgctgagtgtgctaaccaatggtgggcttaattggggtactaggctcaggaaatagctgccattcttgctaccaaagtggcctcacataattatcttaaggcatctcttgagctgaaacaggtggggctggtaattggcagcctcaagtaaaataggaggagagataggctcagagtgggttgcagaggaactggtgaataaattcttgagccttcttcttctctgtcatatcaagcttttggtgaccagctgggtttcgaagcaataagctgccaaatatgctagctagaatattctcatgcaaatgattttttgctgaatttttcagcagttctcgcaaaaacgccatcaagtagtggaagacatttttgtggaatatggggagagtagaaatgacctgtttgcttgctgtgtagttgccagaacactccaagcagttatggtaggtgctgtaacagatgacaggctctggaaggctctccaggaaaagcagcagggcttcggctacagaatgattgctggcagagaggttatcaatcattccagtatccaagcagtccctgatatgttcaaattctgacctcaggcctggttgctgaaacagatcttcctgctggacagcatttcggtacaggtaatcaaccatcatccagagctctttggggatttccatggggctatccaactggctcccatcatctccagtccatactggcatcagagtcagctcactaatggtttcaagtggtaggtccaagattggctctctcatgtaacacagtgtatgaatgggagacccaaaacagctgggcaggtagttcccagacacagacaaaaagtatcctttcccctgtcatcccgggaatccggaccggaccagc

SEQ ID NO: 453060 - DNA, 1088 bp, Homo Sapiens
  misc_feature (1034)..(1034): n is a, c, g, or t
gcacctgggtttctgacaagtgcagtcagacatacacatccatctgagagctgcttgccttgttcccgtggtaaggccatggctcccacatactggaagcatatttttgtgaactgttttcagaattgggaacatattcagtggaatgtcttaaacgctgacacatcttcctcctttgaggggaagtatattttcagaagcagctaagacatttagagccaaaattgctgataggtggttcagtcaagttggctgatggcatctgaggtcaaaaactaagatgtgacgattgagttcttaaagaggtaactcttaaagtggggcccaagggagaaggcagcatctttgggactcctaggctggatggctacccaagaatatgccattgaaggatgacacctattcagatgtgaaagttcccagagcaggcacctttgggtcacccaccacgtgtggctttttggtgcctgcatgaaactgtgttgccccctggtgagatgcccgggtgtcctgtaagccgatttaactctgcctgaggaagaggagctgtccactccagttgcccttggctaagtttagcctaacacacagggttttgacccatagttctaaaatacacaaattttgagactacagcacttctttggaaagaggaagaatgcaaagttcagtatttcaatactttgtattttacttgaaattacccttagtaggcatcttttttttcctgtctgaaagcttttgtgtggatgagaagggacatttcatttcctcccttaacaaagtgtcattctgaggttctcatgtgtgtttttggaaatagagatactggttttgtagagtttgcctttgggtatgttttctttttttcttaaatctccaaggaagagaactgactaaaatagtaggaacatgaaagtattaaatgccaattaatttgttgtagtaaagtatcttcattagcgttatactccatcatatctggtgtaaactgctcacagaaaaccctatgaaaccaaagggggaccattcanggtctaaaaagcgacagggtcccgagactggggtcctgttcaccctggggcatt

SEQ ID NO: 453061 - DNA, 762 bp, Homo Sapiens
  misc_feature (46)..(277): n is a, c, g, or t
  misc_feature (284)..(469): n is a, c, g, or t
  misc_feature (492)..(598): n is a, c, g, or t
cctttaaatttaattcatttactttatttcattaaatttattgggnnnnnnnnnnnnnnnnnnnnnnnnnnnnnnnnnnnnnnnnnnnnnnnnnnnnnnnnnnnnnnnnnnnnnnnnnnnnnnnnnnnnnnnnnnnnnnnnnnnnnnnnnnnnnnnnnnnnnnnnnnnnnnnnnnnnnnnnnnnnnnnnnnnnnnnnnnnnnnnnnnnnnnnnnnnnnnnnnnnnnnnnnnnnnnnnnnnnnnnnnnnnnnnnnnnnnnnnnnnnnnnnnnnnnnnnctgatgnnnnnnnnnnnnnnnnnnnnnnnnnnnnnnnnnnnnnnnnnnnnnnnnnnnnnnnnnnnnnnnnnnnnnnnnnnnnnnnnnnnnnnnnnnnnnnnnnnnnnnnnnnnnnnnnnnnnnnnnnnnnnnnnnnnnnnnnnnnnnnnnnnnnnnnnnnnnnnnnnnnnnnnnnnnnnnnnnnnnnnnnnngggctcaacagccaggcaatagnnnnnnnnnnnnnnnnnnnnnnnnnnnnnnnnnnnnnnnnnnnnnnnnnnnnnnnnnnnnnnnnnnnnnnnnnnnnnnnnnnnnnnnnnnnnnnnnnnnnnnnnnnnctggaagccatgcaggcttcctgcattgttcaggcttcctttcaaagaactttcaatagctcactccatctttacatagggccttcaacaactacgttgtcactgccctcctttcttctgggttataagaatatggaaggttttactgaacacttaaggctttg

SEQ ID NO: 453062 - DNA, 905 bp, Homo Sapiens
  misc_feature (35)..(35): n is a, c, g, or t
  misc_feature (37)..(37): n is a, c, g, or t
  misc_feature (43)..(92): n is a, c, g, or t
cgaattctccttggaccctcggtgaatcccacccngnccttgnnnnnnnnnnnnnnnnnnnnnnnnnnnnnnnnnnnnnnnnnnnnnnnnnncggccgcctttagttatcttgactctaaatctgcttctttattttcttccctattggaataaatggcagcacaataccagtcatctgaagaggaaacccgtgagctattctagattcaatctctcttgcttattcatctggcatttgtaatcagtcaaaacgttttggtcatttagtctggtagataggtctcacagtcagcctcttaacaggtctcttgtctccctttctattgatccctcctccgctactgtgtttattctggcactagagaaattcttctaaaacccaatcctgataatcttgctcttctgcttaatataatatatgtcagtaccttttcatgatttttataaaaataacttggactctttagtgtgaactacaaggcttgttatctgcttgcctgagccccaactcctctcttcagatagaccctttgatttacgtcttatagtctatttccaattattttccgaaccactataccattcttaagtaccaactttagattaaaaagagagactgggcttctgcctggtagaactgtttcttacctcccacaagtggtgaatttatgccagtaattattaaggctaagctgaaggatcacatcctctcaaaggcatttcttgtcaaaatgtcatgtcagcagcaacaacagtagcagcagaacactgtgttatagatttcttctttgcagttatttaaatccctgtgccatattatacaatagtatcaataaaaacaaaatttattgtagctattgaacaatgtcactgacatccggaaaattccggaccgtaccagcct

SEQ ID NO: 453063 - DNA, 317 bp, Homo Sapiens
ctgtggcctgttgccacactctccattcaagtttccttccttcaaagacactgttggttgaataattttttgcatgttcatgaactcacactcgtaggtcgtgatggactgaaatcccactacagacatgtgtctgcttctctgtctctttgatgcatggattcctgtgctgacatgattgattaactgtgcaaatacaatccttttctggaccttccatcgtctctttgatgtgccagtttgaggcagtgaagctgtggagagtccagcgtgtctgtcatgagccttccatccggagaattccggaccggtccagc

SEQ ID NO: 453064 - DNA, 289 bp, Homo Sapiens
ccaagccttggccagtagaatggggtataagtgaggctgcatggtttctgaggctcggtcaaaaaggtaacatggcttctgtctggctctttcttgcttcctctcacgatgcctgctcttcgaacagtgccacccctacgtgaggaagtccatgcaacatggaaaggccacgtgtttgtattctgaccagcagccccatatgggcacccagccagcattaaccactaaaaatgtgggcaagcaaaagccttctgacgattctagatcccaggaatccggaccggtccag

SEQ ID NO: 453065 - DNA, 875 bp, Homo Sapiens
  misc_feature (17)..(17): n is a, c, g, or t
ggctcattcattcacancagtgcccctgagaaatgagtatctcagggccagtctacatgtaacatcatgcttttgctcccacacttctttccaaaacctaccaagacacagggagatgctgtggctggctgagaaggctgcagccaaaaaaggaaaatagggtactgcaattactcaactccacttccaaacaccagccctcactaagttttgcagaaaactgctatttgaccgtgagtggcatggatgctgatatgcacagcgttatctctgcaccatggcctgtacttctggagaggtggtgccctgtgactttagctatgctcactacattcccccagctagataaactgaaagaattctcacctcactcacacctgggaaagtgaccagaaactcacctctccagtatcaagcaggcacatggtaataatgggagggacactcacccggacaaggtccatttcttggctgttctccatgaaggtccagatcttggggctgagttcctcccacatgccttccagatcatggaacacagccagttcctggaaggtcttgttcacctggagtcaggtagggagccagggaccgcagaaaaaggaggagaagcacagacaatgagcgctttggctcctccctgaaaagataccccatcacagcagccctgcgccagtcctccccatccccaagaaatgcctgcttgtaactatgattctatacccacgactggggagctggcccagctctggtctgcatcagacttgaggttttcactctgggaattccagaagagccgtgagtatacttagcgcacacctctgaagctaccttgagttttttgcccccagatcccgggaatccggaccggtcca

SEQ ID NO: 453066 - DNA, 884 bp, Homo Sapiens
ttaaacctggaagtggttttctggaattataatttttcagccaggtgggtccaatgattttttctacactttaaaaagcccagtagaaaaaaaatgttccgtttttaaaggaaagtttcacccatcactaggctcctgagcagttggtgaaatcgtcattcattgaacagaccgcttcaggtgggctgagtctcctttccatctttcttccccagctggtcccagagggagaccatataattaggttaaactggggacataaagatgtaaacagtgacttgaacaaatgcatagggcaaggaatcttttcttttgaatggaggcagtgggaactaattaataagtagaaattcatatgaggagtaattgcaaaaaataatagttatagccatcaaaagtgaaattacctaacagcttctcttgtgcttggaagcagaaactgtcttacagcttataaaatatggttatgtgtatcatcacatttggttttcacaactctcactttgagaaagtttgaatcatgccatgattaaattgatggagaaagtttgcataggggtggggcacacaccctggtctctgtatgtgtgatcttgggcaagtcacttcacctgtgagaggctgagtaccctgcagtatcacatggaaataataaaaatacctgcttcgggggtcctatgaagaactatcaagataatgcatgttgaaaattcactatactttctagtacacagtgaccacataagaaatattatttttgttgttataacaaccataaaaaattaatttcagccccaaacctgactttggatcccataatttaaacctttggaagtttggaagattttatcagttgtcttttttctcacacttagtagatatta

SEQ ID NO: 453067 - DNA, 963 bp, Homo Sapiens
  misc_feature (32)..(32): n is a, c, g, or t
  misc_feature (195)..(203): n is a, c, g, or t
gaaaaccataaaagtgtatcaaaacttcttantttgtggggggaaaaaaaggaaggtaggtgaggaataggcgtgaaatagaaatgacccattgcaagtgactagagacgagggcataggtgggtcctattgatgcccccaacccttacctttcccgggatggtggggggctgggccggggcggggagggttgannnnnnnnnagcctctttacagggcctgtttttaatctgggaagaaacgattttccccaaagcttaaccagtaagagttcctgtaatgtctcattagccaaaagtgatttacatgcctgtcctaaaccagttgctggcagagagaatggaaatcatgaccactggtttagagcaatcaaagtttaagccaatcaaaatgcatcccgtggtgtggaaggaggggctcatctttgctgagcacattgccatctgtctgactgctgaataaaattggagttctatttattagcaatcggggaggaaatggctctcttaaatagagtcaataatatttgaatatattgaatctatattcagtaggtgaaataatattagctatagctttgacttcgctagctctgcatttctcacaatagctagtaagatttcaattgggtagaactgctttttgggacaaaattgactacttacattcaacaaatattaaatatctatgataggcactgtcctagagcttagatacacatggtgagtaaaatcagatggcatccccaccaacaatataaaaataatagataacttcactgcgtagcaggtagagtgctaaaaactttacaggcagtatcttaatcttcaaccctataggataggttctattaaaatcactatcttttaatgagaaaattgtgaccccacaaagaatgttgtcaccattctttgtcataaaggtgactgagatcccgaggaattcccggacccggtacccagc

SEQ ID NO: 453068 - DNA, 367 bp, Homo Sapiens
  misc_feature (111)..(138): n is a, c, g, or t
acccttttgtaagatagcttaaaacacaaacacattgtacagctgttcaaaaatattgtctttatctctttattctatgaacttttttcaaaatagaaaaaaattatttgnnnnnnnnnnnnnnnnnnnnnnnnnnnnaattaaaaacaaagtcacaaacacacactttagccttgacctacacagggtcaggaccatcagcatcactgccttccgcctccacgactcatcccactggaaggtctgcagaggaaataacaggcatggagctgccatctctatgataatgccttttcctggaccctcctgaaggacctgcctgaggctgtttcacagtacaaagtctagctgttgattatcgagattg

SEQ ID NO: 453069 - DNA, 418 bp, Homo Sapiens
gccctccttgggccacattttgataatagctgagaataacgtcacttggagcaaattttaagagttgggtgtcataccccatttacgattaaatttccaatagaacaactatcattgtcagcaacagaaacacagctttcaaacatcttaaggttttgtcaacaaatggagccacaaatgtttagaaaattcaacaccatctctctttcctttctctagcaacaatgtgcctggcttatgctcaaataaggtataatttcatcaggagataaagaggtgattgcttttgtttgactagaagtaaagcacacatgtaaactctccttaactattgcactgattaaaggatagagacttaataatatgagcttctatgtttttgttgatatgttgactgatcattgccagtcgtttatgc

SEQ ID NO: 453070 - DNA, 908 bp, Homo Sapiens
  misc_feature (68)..(83): n is a, c, g, or t
  misc_feature (157)..(169): n is a, c, g, or t
tatttcttcccaatattttaattccatctggagctttttttcaaagaaccgtgaatttgtggttcccnnnnnnnnnnnnnnnnggctccagggtttaattttttaaggcttttggtcaaagggtttgggattaagaaaggattttcacaagggaatnnnnnnnnnnnnncttggtttcttaaaataaggctcatctttgttttttcaggttatttcctccaagttattttatcaccctcccttccatataaatggaaggtctttaaacaactttttttcataaacatataccttctgtaaccaactctgtgcttagctttagaaaaggcacccctgttcttctatgctactcactggctggactggcagtacccggtgtgaaaattcggctcccacagccccactcaatttgtctgagtcccatgtggttgaaggaggtgggagtgtccagagttggtaaacttggcccagagtaagtctctcactttttcttccgtttcccttgggcctacacttgcttctaatgtttcctcctctagcagaacagtcaggaccagggccacatctttaaaggcagcattctcatgatcacaatacttatagaagatcaaagtggagccggcagggaaggattcgaagtggtgtaccacagcagccttctggccattctcaaacccatagctcagctccaggtcaaccaacagcttgaccgtgtcactgtcctgccaggtccttccagccccatcaatctgaatgggagagactttctgggaagaggtgtaggcatctgcaacatggtggctcaggcacttcagggtctctcttccctcccgagctgctgtaaatatgatggtggctggctcagtggggttggaagcattgaggtgcttctggagaaacttccatcc

SEQ ID NO: 453071 - DNA, 962 bp, Homo Sapiens
  misc_feature (188)..(230): n is a, c, g, or t
atgttcagacttatttacagtggatttacttccatggcagttctttcagcaaatgggcttaggttcctccagttagttatatgattagatggaattgtataacagaaggagaactggactgcgggtcaagaattttgacttttgttttcaactcagctatttaatagttgtaaacataagtatggctnnnnnnnnnnnnnnnnnnnnnnnnnnnnnnnnnnnnnnnnnnnggaggacaattgctctgccagcttcaaaaagtcaccgcaagaattgaattagagagctgcaaaagcacttggctagtggtaacccagcacacaaatatgaagcatttctatcttatctacttcatcccaaaggatcacattttctccaaataccattaagacttagagacctctaaagaaaggcacatactggcatttccatacatatgacagttcttactatcatttttatccagaatgctgagacccattagataaaattaatttattttcttctcgctgtcttcactaggaagatgaaggcacaagtagaaaaactcttcattctttcttttaagaatataagataaattaacctaactgaactgtgcatcctttcaccttttaaaattatccaagacttggaatttagtaacatccctttggtcttttaaatcaagtaaaggctttttatggaagccccccttctattaagaaataaggaaccctggcccaaaagggtaattttcccctctgaaacttaagcaggtaaaaccattttagttaataggtttccacccaacttttttcctgaatcctcccttttttcatcgggggcgtaaactttgccaatttttccctcctatattccctggggaaggcggccaatatataacccgttttcaccctagggaaactttttcttgttctctcccccccttaatacgtggaaacacacagtgtgcgggcata

SEQ ID NO: 453072 - DNA, 980 bp, Homo Sapiens
attccagagtatccacctacgcggttgcctctactcctgggggtgcctggctgctgttgtgcgctggctctgatgagtgcatgttgcctctgccctttcagaacttattctctttcccatttgcgctagagctgctggtgctgctctgcaaagacgccctgggtgggttctccctggtttcatgatagattattgccaaattctgccttgcaactcagtcagcatttctgacctcaaggctgctgtggcggttctgtccctttacgccatccagtgacgtggtggggagccgtgtgcttgtgtagggacagcttttccaggcggctccccagcctctcccaagatgccattgctcctcaggagctgctgggaagtgggcagtgtggaaagtcagcccctacttcacaggagactctgggccaggcacgtcctggcacctgcttcagccgccctgccatggtgcctgccgccggcctgagcagggcgtttgtagccacaagtggaaagcagagccaggaatacccaaggcggaaaaagcaaacacgacagaacgttagctgccgctcccttgagctgagggtcttagggtgtgtgtgactctattttttgttgtttcagtaaaatgccggctgttctgtgctttgaagtttattagtgtattcttcacatttctgtggggaggaacaccccgctctggaaagctttttggctttaagcctgagggctgctgtggggaccccctccatctctccacgctcttcttggtggcatgagctgcaggtcaggcctcatcgcagggaatcccaaggctcacatccttaaaatagattatttcagagggaaaagggccttgtgccctggcctccacagcagtccccatgaagggcctgcaggggacttgcccctgcctgtgtctgacactttgtccaggaagaggggttctgtctagcctggatccggagaattccggaccggtccag

SEQ ID NO: 453073 - DNA, 920 bp, Homo Sapiens
ttttggggataactggcaaacaaactggtgattgggaatgtaaaaaaccctatgggttttctaaggggattacttaaggtcataaaatactttttccctacgggtaccggtagtttggtggtcaacgtttcataaagggcaaaaacgtgcaaaatgtcaggagggttggtgaaaaattaggacgtaaatttttttctcatccaagttcaacagtattcttgaatttatttacttctcctcgggttaagaacccctgcaggataaggttgcccttaggggccaacacctcactggagccccgcctcatgtcctggaggcaggagccttcatgccacctacacagaactcggagctgtctcttggcccagcaagttctcccacacaactagttctgaaaggtcccggggctaggaaagaacggcatcgtcgcctgagctccctggcgccactttaaacaacccatccttgacttgcgtgacttcttccacaagctctcctggtcacctgggcaaaatcctaggtgatctggggacaaggcggaacttcggttttctgatctgcaaaaagaaacacctacctcataggactgttaggatgaattgaggtaatggctgggttgtgtacattatacagcactatcaaggtgtgcgctgtgatcatttttgagggttgttaggtgtttgaggacccagaacagtctacacagctgtagtccccaagtgttgggcacgccttaagcgctccataaacacctgtagaaatgaatgaatgacgtatgcatctgcacgtgggcccacatctgcaagaacaggctgctcaggccatgaggcccggtgcatcacctgcacttctctttataacgggtagtaaagtctccctcgctctgtgctaatcggcaaccacaattctgtccatccgaa

SEQ ID NO: 453074 - DNA, 759 bp, Homo Sapiens
gggcttgggtttttttccatgccctgggcttaagggttccccccaattgccaaccaaacggtggcctcagagcctctccttccctggggctgtaccctagcctgtcacctgacctggccctggctgtgcccagacctgaaatcaaaggagatggtgtcaatggagatgacaaatttgcggggcaaaaattctgcagagtgcctgttaagaaagcctgggggaagaagaatccactgatccagaagacagctgggatgccatcttggatccaggcctgcagaaagtccaggcgttgcagcaggtccatgacccatgatgacagaggcttgagcgatgggtaggccttggcactccagagctcaggcacagtattgttgtacaggctggcagccatcagctccagctgagaggacatcactaccagccccttgagtgccttgagtaggtcttgcagtgtctgtgtgatcacctgcagcagccgattgtacctaatgacctcttgtactagtactgtgttcattgattcctcatacagcactgggtacttggccatcacccattgcaagttgataggctcaggcaccttgagcagaatgttttgggtgacgtcctccactatctcctcccggccctggctgcctgcagaagatgatttgggttgcagctggatgatggtgcccaggagggcgaacgtctcgttctgggcaaaggtgatgttggcattgtcatgcaggccaaagatctcaggcatatcattga

SEQ ID NO: 453075 - DNA, 1091 bp, Homo Sapiens
  misc_feature (1042)..(1042): n is a, c, g, or t
ttcggggaaaagggccatgggcccgggtttaaaaaccccctgggagggaaccacgggtaatatttccttgaacttcccttggccccccttgcaaggggtaactggaagttaccggtgagataaggaaatctcaaaagggccagtgaagccacaggtggaaaaagagccttctggatccccctggaaccagacctggagacggagcccagctccaaccacagagcttctgccaggctctttgggtctgggtcatctgtgtggtcagcagtgcccacacagaaggggtgggttctgtgcagtgagggagccccgctggagtgaggaactaggggctcagagcctgcagactggagctaggtttccatagttcttgcttccatgcacaccctgccctaggattgggaccctgaggacaacctggggctatgacatccttggcccctgatctctgcaactttctctgaactgggccagactgcaagccagacaccaccaccccgggtagcatttttgagcacctcatcgaaggagtctactgtcttacagcagagacttcgctgcaggacgcagggccagaagaggttgagaggcttggctctgcgcacagcctctgggagtgccatggcctcaggtgccttgtggttgccaatgaagaagtgatagagtttcttttccagctgtcctttgccacagtcaccccgtgtgtctctttctccaggtcagcttccacctttagcatctgtcctccccctaccacaatgatagtcagaaagaccagctttggagagaataaagagaggtggggggctgctgagctggcacccagtgtggcaaatacccaccacgctcgggacccagtacgttggggaaaggacagcagaagggggtgcacctgagtgagaagtgtagggtgcagctgagtgagaagtgtagctgaaaaagtggctaattgtgtttctctatgccaccaagtacccatttccgtgtgacagagacgttagtcactcgggcctcgaatttatacaaggtcttttctccaaantagtataaaaaagtggcagccatggtgggaccactattgtgcaggatgc

SEQ ID NO: 453076 - DNA, 663 bp, Homo Sapiens
tccggatcttgaatatatgtttgcttgttagaacatattaagatatatttatttgccactagtatttaacattttgtgcacattttcataattacattcttacctttcaaattttgactcaaagtggataggctagtgttgatattggagtgcaaatgtatatactccaagagctagttcttaattctgctgagttggaaagccttttattattgtctgtatccttactggttttatctagttcaaaaaaggtgacaacgtctaaattttgatgtggacctctctccatagagagccgctcctaagtgcaagaaattccaacaggtgtcagtaggacttggccctgggggacaacaagtggcaggaacaggatcctttaaaacagtgtcaaacttctcatgcatggagcatgaattcttactaatagagactgtagttttttttcttgtctttggtaaatatataaaagaccttaatttttcttttttaatgaatggagaaaacatgagaaaaccagatggacctgttagtactacatttttaaggcattttatatttgatggtgccgtacttttaataataataaaactgaagttttttagtggcaatactgattttattttttaaaccagaaagataatccatattgattactttactacc

SEQ ID NO: 453077 - DNA, 889 bp, Homo Sapiens
  misc_feature (213)..(213): n is a, c, g, or t
  misc_feature (220)..(220): n is a, c, g, or t
agtttcctgcttcggaaaaaaccaccaggcttgccatgccaaaaactttccttcagggctggccattccaccaggcccttggaataccagcgttttgcacatggaccaaaatgagggttcctagcagcttcagagtcggtgttctgaatcccagtgtattcactctctgtagcatgataaagaaacccaaaaacaaaatttcttatgttcttntaagtanagaggcagaagactcctatttggatgcattccacattttggggacagaatgtggtagttttgcacagaacctctcccatcaagaaacagcttagaaaaagttaaaactgcagtttaaaagttcctttctcccctcccttggcaaagagacatgatgcacacatgactggaagggactcaggaaggcagagtgtggccactatagtttcaagtacgatctggttcttgcaaacggatcggggtaactgcaggtggattcaggcaaaccagaaattcaaaaatatccatcaacttctttaatataagaagctctactggaagcttttcttacaacttcatgtagctgacataccctttactgtaggaagggatatcctcttcttttttcaaatagtagataaatggtatttttggaacttatcataggccaagaactggtctaatctgattttttacctccctttcaatcctccctttaaactatacagtccttttttctgggctcagggctcttattattggtaaggctcattctaacaacctaaataacacaaagtcctttccaatttcaacactgttcttttttgccactacaggaagactccagatggtgttataacactctgtagtagataatccagttttcaagctgttatgcagcctagttaag

SEQ ID NO: 453078 - DNA, 894 bp, Homo Sapiens
agcccagttccctcaaggcaagcccccttgagaaagcccaaaaggcgaaaccacatgctctacttctttcccctggacccaaaaagcagctttcgaggtgcactggactctgcctactgtacggtgggtccttctggcgcagtacaaaccacccagctttctcttgttctcagcagcccccagggacctagaccatgccaggtcccatcagtgcttcatcgagtgagacaggaacgagagtcttgggcagactccagaaaacctagaatgctggactcatgctccaactccttccctcccgagaagagcagggagagggcaatgaggagtcagtacgtgctagtttcaccatcccatttgtcctcagaggtccccaacctggtgccctttcctgtgagacaagacagaaaccagtcccttgagcagcctcctgaaaggtctgaatattagatatatgttccagtcttatttttcctccccagaaagatgccaggagttgggagcttcctcccgatcacatggtgctgtgccagggggaggaactctggagagccagcgtcacaaattccccagcctttgatgcaactggtttctggatttctcacagagagaaatggtccttccgttgttgttgaactgttctctctatgggaaaaagagggtctggagctttctcttctgtcatcttgacactaccccacaccacatgcctttacggctttttctgcaagtgatctaactactcacatgtttcactgaccacaagaagctacatggctacctccaagttcagcaggccatgtatattcctcccatagacaaacaaaaacatatgtggtgttcctatttgggatcttaagagccccatcccgggaatccggaccggaccagcct

SEQ ID NO: 453079 - DNA, 1212 bp, Homo Sapiens
  misc_feature (29)..(29): n is a, c, g, or t
  misc_feature (40)..(40): n is a, c, g, or t
  misc_feature (478)..(493): n is a, c, g, or t
  misc_feature (886)..(898): n is a, c, g, or t
  misc_feature (942)..(1082): n is a, c, g, or t
tgtaaaaaccactgtggattgccaattcngtcttcccatngaaatgaactttttctatcgaaatggtttaacttaaatattttaacataaatttatttacatggatctttatgtataattcatccttatatataccccttaatcacgtagtccatgagaagataactttgctttctttacagaaggggcagagaggaataagataagaaactgaaacaagcaagaatgaagagagatgtgggggagagactgctggtctccagaccacagcaatgtgttttaagataagatgaaatattttaactgcagaagggatataaaatctatgtaattacatgctgatgggatccattgcacccaggtttttgaccttggcctgtaaatgctagactatgatatcttgttattctttttctcctttgggcttttaaaaaataatttcattctcagatcattttctgtactgtttactgaggcnnnnnnnnnnnnnnnntctgaagtcaatcatggtcttctactttctggactgagcatttggcagaatgcagtatcttttcctgtgttttgacatgaaatagcacatggcttctacaagatagttttaacttgttggggtcaccgggagttatatgatggtcaaccccttttcccaaaattcattgtggtagttttagtggaaaacgtaaatcaagaaatctcatatcatactttaataaataaataccaaatacatagtgacatataggtttgggaagaaactagtctgtggggaccattataagagaatcacattatatattacacagtatatggatattggaatgtatcacttgtggggggttctcttcattagcaaaacagtcatgtctgtctgtatataagaccnnnnnnnnnnnnnaaccaaactagcatttcattttgtgagtgacaattgacattttnnnnnnnnnnnnnnnnnnnnnnnnnnnnnnnnnnnnnnnnnnnnnnnnnnnnnnnnnnnnnnnnnnnnnnnnnnnnnnnnnnnnnnnnnnnnnnnnnnnnnnnnnnnnnnnnnnnnnnnnnnnnnnnnnnnnnnnnnnnnnaatttaaacccaaataagtgttttctggggccaggcacggtgggccccatgccctgtaatccccagcacctttggggaagccccaaggaatttccaagacccagccctggcccaaaatgggcaaaaaccc

SEQ ID NO: 453080 - DNA, 814 bp, Homo Sapiens
  misc_feature (342)..(350): n is a, c, g, or t
ccccggaaaaattgaaattcccaaaccaaaaatttaggggtattccccaaaatttctaaaaaatcctagacttcattattgtgaattgtttgggaggagttagagctgcccctaggcagctgcaggttgtgcattgcagagctcccaggtggcaccattcgcttagagtgcagtgtgactagagtcctgagtagagcaaatactatctgaaggggacccgaattcccccccacgttctttcaacctagggttactttgtgcatcattttcagaaaagttcctgcttttgaaatataagaatggcctcaagccatcaaagtggatttaagagtataactacgnnnnnnnnngactttggaaggaagaaaatacctgaaaattaggaggatttgacatatattgatcaaagttgtgaacttttccgtaaagagaaattatttaacatgtgatataacctcatgttactcatcagttttccaaaaaacactgtatttctagcaagcgtttagaaaatgtctacctgcagcagaatgtatagcagatgtacagcagtaaaaaggggggagtacttccacagtgcagaaaatataagctatatttctagccttttctctttgagctacggtttttaaaaggacaagtagcagcagagagctcagatacaaaatgcatgtacttccgtgttcatgtaattagtaattatttttggttctctaatcctaagtattcattcagtgttgtcttgaccaagtgggcaagctatatagcatagcttctatatctcctaagagatcactggtatttatcctaaata

SEQ ID NO: 453081 - DNA, 769 bp, Homo Sapiens
ataagttttcattttaccaaagaattaaaggaaaaaagaagaaactagttactaattaaggaatagttagggaaattccatattgctgggagtgcaagtggtaaaaattctctggaaaatgatgttgcaatattaatccagatcttaaatatatttatatacgttaactagataattctccttctacagttttatcccatagaaaatattaaaaatgtggacaagatttatgtccaaagatttttttatctaaattctgtttaattcatggcaaatgtctgtatgttcaacaatagaatactatgtttaaaaaaattaaagtgtatttatgtgatgaactattatttcatggaacttgtttcctgtcatcagaattcatgggtacagacctaaatatactttataatctgtgagggtttgtgatcaggggaggatggtagcaaagattaaaatgaaatatataccaaaaacttaatagtaattatctctcagtgtgttatatgagttattgttatttttttctttaggtttccttttatttcgtaagttttcaatgataagaatgcactcccttatattaaaaagagtgtatattactttgaaaactggggacaagtttgggagtttttctgaaaaagatttaaaccatgggtccctatttttaaaagcgataaccagttggggggggcacaagggggttcatgcccgggtaatccccagcactttttggaaggccccaaggctggttggaatccaccttaaggcccag

SEQ ID NO: 453082 - DNA, 857 bp, Homo Sapiens
ttgtcattgtttcctggtgagggggcacatccagccagagtgagatcaatagggaaaagtcaggtggggcggggccgactgatctctagggcctgatcccagggactactactagtttttctgcaagagttggttttatagtttctgcagaactgacagacctctgatattgattagtccatgcatgcctctgatatatttctaactctaaatattagcaagcaaaggagaaggcggtacagcctattccttggttcacctcaagtatggaaaagaaaagtatgtcaggatcaccaagtactcagagaacaataaaaccctgtgtgttatattttgctggattgtctccccaatatttccttagatcatgaactgtttccctggctacaaagaccaactcactaggacaaagagcacagaggatgtatcattccaggaatatgtaatggcaaatgccaagcttttgaatgaatattgtatatatgtgtcgtaaccattggaaagagacttattgtagacttataaactaatatagctctcaaccactttgtaatctgctgctttactttttttcacttagtaaattatgaacatctgtccatggttattaaatgttcttctacaaatcttccacagatatatttgatcaaaatgacttagataaatttaagaggcacacatcaagtttctgtgggttgtttaaaaaaatgagatagatctcccttttctcatattgaagagtctccaaaaatttagtgtaaaagagccaagggggttaggcacagtggtttcatgcccaaaaattttggacttttgggagggccgaggcccgaaggattattttgagccccaggagt

SEQ ID NO: 453083 - DNA, 893 bp, Homo Sapiens
  misc_feature (781)..(789): n is a, c, g, or t
ctacctagaaaagggtatatttgataaacagtaaatgattatagcttcctttcagatttgcaacagattttgatctaaatattgagtataaaaaataaaaggttaaatttaaaggatgagactgataacaatcataacttctcaaatctaaatgaatatttcctgcagataagtcaatatatatgacctcaactgggcagctttactcactcttctctaacataaagacacgctcttcccatgaaggttcacatctgtatacattacaattgctggcattttaagaggctaatgaaacactctattttgcgctattgacagaaggcagatttctaaaaatcagagttaagatgttccataataaacacgggttaactttgtaaaataaaaaggggtgggggcagggatgatggtagggggagaagtattggttagtggtcaagaatgccttgatttggattcttgctccgtccaccgggtgacctgacctctctgggagccagctcctttagtgtaaaatagggataatagcgctgttgctgttcaattctggagggttaaaagattctgcgtgaaaaggactgtagcagcactttaacacaataaatgttgaataaatgtaagctattaatatgaaattagaattgaaatcctgtctcgagataccattttgcttaattgagagaacttgtcatgtctctgtccagcacttgatctgactcttagctagaaaggttcatactatcagctgtgcctatctcactggcttagagaaaggatnnnnnnnnnccctgcagtacaagctgggggtggcggtgggggcactgaagccacgctccaggtgaggtggggaggcacactgatgatcccgggaatccggaccggaccagcct

SEQ ID NO: 453084 - DNA, 884 bp, Homo Sapiens
  misc_feature (45)..(45): n is a, c, g, or t
  misc_feature (50)..(132): n is a, c, g, or t
  misc_feature (370)..(445): n is a, c, g, or t
  misc_feature (447)..(447): n is a, c, g, or t
  misc_feature (614)..(615): n is a, c, g, or t
tttcttcacaaaggccgggcaagaggccgctttaggcgcgggccntagtnnnnnnnnnnnnnnnnnnnnnnnnnnnnnnnnnnnnnnnnnnnnnnnnnnnnnnnnnnnnnnnnnnnnnnnnnnnnnnnnnnngttaggggaaaattttttccaaaattacgcccacccccccacaggagctaaaggtttccttttcccccaagattccccaaggttggcccgtttttccccagtcctagaagtttgtaaaaccgagggcccagggccctaggtttaaaatacggactccgttatgggggcccctttttacaagaaaacggggaacgtgtaaccttgggcccctaagaggaaacttttgagccgccccccnnnnnnnnnnnnnnnnnnnnnnnnnnnnnnnnnnnnnnnnnnnnnnnnnnnnnnnnnnnnnnnnnnnnnnnnnnnntnttttacatgaagtgggtttattacttacagattggccctgaggcacaacagaagcccggaattcattgtgagccaatctcccaaggctcaagaaagctaccgagggtggatggattctcacaagtggggcatgtgtcccacttgcactgcagctgaggggacactanngaaagcatcccacactggatttaataccctggggaccacatgacacgctgggcaaaagtgttgatggacatcttgtttctcagaggcagacaggaacagagagagcctgtgagctgttcttgtcagtccctctttatcgcaggatgttgcattcccagcacattctacagttattgttgagaacacacgtgagaaagagggaagctctgggcgagtctaaggtgacctggagaattgtcctgcagcttgttcttgaatgttcatatcaa

SEQ ID NO: 453085 - DNA, 864 bp, Homo Sapiens
  misc_feature (784)..(799): n is a, c, g, or t
ctttcaatttattaaggccccaaccccattccaggggttggtttcttaaataggtgtttttttccagaaagattgttgtccttgatttccccaaaaacttttcctgcagccctcccttaactatcttgctaatttccttgacagaaacttcatctggtacccctactttttatctgccatgtacaccatgtaaccgaaaaatgttgtttccctattgccttttgagccaagagtaccaaaatttggtgcccgcaatttctgaatgcacttcctctaaaacaaatcttcgtagtaaatctctcttgaacctggcatacccttttcttttcacacatttacgttataaattcacatctttgctttctcacccctctgacatcctgagagacagtataatctacacagtgagttaaagctgctctgccttttgcctccatgggaagttatccaagaacaggccaggcacttgccctttctcacctgtgacatttatgggcaggcactctatcaatgaagcttccagacccagtttatgcttgatcatcctggaatgcaaatcagatcaaatgttgatcatttggcaaatcatttgagctaccaattagcttgtgcagaagccttgggaaataggtatttccaggcagttgaaaagattttaaaagtagtgcaaattttaggtaagtggaagtttatgtatttccagtaaatgttagatgggacctggttaagtcaaagcagtagcccagcaagttgctacctttgaccagtgttcttctgagataannnnnnnnnnnnnnnngccctttcaaaagaatgaaatgaacagctaaacacattttataataaggaatctatggcggaact

SEQ ID NO: 453086 - DNA, 835 bp, Homo Sapiens
  misc_feature (122)..(122): n is a, c, g, or t
atcactaattatttctaccctgattgttctcatcttcctgctgaaattcacatggcaatgtgaggtcaagttagggaaagaacagtcaaggttgaggtcagcagatgcagataagttgagtnccaaggggacaggcagcggggcgggagggttagtaatttaagaagtcgatcccaactttgacactcttcgaagtggctatatcaatggctgtggctttgatctcggtgtccccgaactgcataagggtctggatctccctccgggcgggcaccgcagtgccactggtccctgtgagatccaggcggagcgtgccacacttcttcaccccgggatcagtgatgaagctgacgttgtcgtgctcagagctgtagatgttgatgacaatgaccagctgggagggcttggccggggtgtagctacgcttgaccagctcacccagagccacagactggtcggcagagatgaacttgtcaaagacgtcggtgcaccaccgagtgccatccttcaccagcagcttctcaggcgggtgcttgccctccacgtagcggttcagcacgcctaccccgtaggtgagcggcgaccggcgcaccttgatgaccgcggggtccaggccaaagaggacggcacccttgaggatggtgaggcccacgtcctgggggatgatgatccggcactggtccccaaaagcagcctgcaccgcctgctgcagcaggggcgcctcggcaaagccgcccaccagaaagaggaacttgacggtggacacctcggtcttctgaaacaggtcccggagatgctcaatgatgctatcgatggtcggcttaaaaagggcgtt

SEQ ID NO: 453087 - DNA, 902 bp, Homo Sapiens
  misc_feature (61)..(400): n is a, c, g, or t
  misc_feature (405)..(453): n is a, c, g, or t
  misc_feature (503)..(511): n is a, c, g, or t
gggcatagtaacgttcccagggctttcatagttaaatcaccaacccaatcaataattaacnnnnnnnnnnnnnnnnnnnnnnnnnnnnnnnnnnnnnnnnnnnnnnnnnnnnnnnnnnnnnnnnnnnnnnnnnnnnnnnnnnnnnnnnnnnnnnnnnnnnnnnnnnnnnnnnnnnnnnnnnnnnnnnnnnnnnnnnnnnnnnnnnnnnnnnnnnnnnnnnnnnnnnnnnnnnnnnnnnnnnnnnnnnnnnnnnnnnnnnnnnnnnnnnnnnnnnnnnnnnnnnnnnnnnnnnnnnnnnnnnnnnnnnnnnnnnnnnnnnnnnnnnnnnnnnnnnnnnnnnnnnnnnnnnnnnnnnnnnnnnnnnnnnnnnnnnnnnnnnnnnnnnnnnnnnnnnnnnnnnctgtnnnnnnnnnnnnnnnnnnnnnnnnnnnnnnnnnnnnnnnnnnnnnnnnnaaactttataactcattgtgggtagatattaccccatttcacaaaacagnnnnnnnnngtaggtttggtaaattaagaaacttatttaaaatcacatagctggttaagtggtgaagccaggattagaacaaaggtctgtgtaaatacaacaatgctcttcttaatttctctgagaccaaggttttatgttatcaaaattagcaatattagactacccagatactccccagggagtcagtctgctgaaacccagaccaccacaggaattccagacccaagggctccttcctcaggaaagcacaggcattgatgctccatcaagctcaggtgggactccataggcaattacttgttccaggttctcttccaggaggttttctagccttggtaccagacattccttactccctctctgccccagatcccgagaatccggaccggaccagcct

SEQ ID NO: 453088 - DNA, 669 bp, Homo Sapiens
ggggggatattattatttttataacgtatttcttttcccgattgggtttttccccattcctttaattttcggtctaccctaataaggttgcagtgcccagatggaaaagtttttttaagcatttagatagcttattctatagcatatgtgtgcatatagcccccccataaagctttgtctcttttctggatatatttaacaagaggctagaacagagtccaaaatgtcagaaatgtttgaacattccatagaaatgaaggaggtgtttccaaatgacctatgtttctatggcaataaatagaacttgtgctgcgttggatgggtcaggagtaaggaatataaacagtgtaagtatgactattccaggcagaaatctaccttgtaagaacagctttgtgcagtgagctcaacaacattgatcagttagcagtctggttcagtacaacattgatcaggtagcaagccggttcggcagtgccagtcggagacacagatggggacaatcaaagaagatgcaggtcaggacaaggatgcagacatgtacctgtcactaccatggacttcagcgcttcttagtgagcaggtttatgattaaagaagaaagacatcgttgatatgtaagcatgttacaattaatttgctgtttagttattagcaaactacatccag

SEQ ID NO: 453089 - DNA, 583 bp, Homo Sapiens; identical to SEQ ID NO: 325258

SEQ ID NO: 453090 - DNA, 505 bp, Homo Sapiens
gcgtggtttagattggacgactgattattggacagaatggcatcttgtcaacacctgcggtctcctgcattatcaggaagatcaaggcagctggtggaatcattctaacagccagccactgccctggaggaccagggggagagtttggagtgaagtttaatgttgccaatggaggtatgtggttcagtatatgccttaataatcacgatttctttcctcttatattattatagtctcacagtgaccctttgatgatagacaagcaaggtgcagaggacctagctcagaaaaatttagtgaggtgcccaaagtgatccaacaaagaagtgggcatgatggggctcatgaacccatttgggtgggtctcttgggtcccctgtactcttcagcataaactattgaatagttgatgcttatctgatatgggaggactctgaattttaacattaaaacataccctgaaggtcattgtctaaatgacatgaccctcatttacacatgaaca

SEQ ID NO: 453091 - DNA, 950 bp, Homo Sapiens
  misc_feature (532)..(581): n is a, c, g, or t
agacgccgttgtttgtaataaaaacccccacataatgctgtgcccagtttgtctttttcgcaaaaccccccatatcaaaaaggttttcaaggggtttcgttcccccaaaattgtccaggtaaccccacttcttttccatggacggctggcccaaaccccatatccaggttttagaacacttggagaatgaaatgaagctcacccctccaaaaattagacttcaaaaagtttggcattggttatcttcactcaccctgtaacccaacttaaggtgggagaagggagtgtctgggcgttgaaggtgaccgtggagggaggctgagactgccagcgcccacacccgtgggcccccatgaagttggaggaaagttctggacagttaaaaatccagcttcaggaagtcgaagggacgggccttcgcaatccaccgccgagcaagggaggaattgtaatgtatgggggccctcctccagatttggaaggtttgtggagttctgtaccttaagagcccctacctcaagccaggaaagannnnnnnnnnnnnnnnnnnnnnnnnnnnnnnnnnnnnnnnnnnnnnnnnntgaccctggcagcgcagccctagtcgcaccccgcagtgctgaactcgccccggagctggcgcccagccgtcccgagcacccgtggtagggagaggcgcgcgaggacgaccaggagcgctgtgcggttgcacaccagttttagctcctttgcaatactccgaaaagggcaagaaggaaaagcctcaaatggttaaaccgccctaaataattaaaaacttttgaaaaagaaaaacgcgtgatcggtcgtcatttaaatacaaatatacttacaaaaatcttacacaggctatttacaatcataaaagcgaacagtcctggtaccagagtgtgagggcaagaggtctgtccatcctccctctggcagtcggg

SEQ ID NO: 453092 - DNA, 311 bp, Homo Sapiens
ttgatggacttcaccttgtttccatacgcggctatgatgacagacctgctgtggacattgttgtgtgtctttgggttgacctaacaccctttcccataggtctttacctaggactggagctgacagcctgtctttgcaggttggtaattaaactctgcaggattttggggctccattagccatttctgtcagtgggtggagggagaatccacgttgggtgcatatttgaatgagctgttcctcccagactcctgactggtgaaggtcaggggaggggactccgggcagctccagatcccactgaaccgaat

SEQ ID NO: 453093 - DNA, 809 bp, Homo Sapiens
  misc_feature (236)..(246): n is a, c, g, or t
acctcctgtggttctcccatttttgtgtgcacgcctctctgaagaggaccatatatccgctttgtgtggaagagaataagcctcaagattctcagatggttgaggttccgtggttttttggagcccaaaggggtcgcatcgatgtgtgttttataaaaaaggggtggtcaacacagatctataaagtttctcttttgcccataagggtgaagggttagaattttctgggcctgacnnnnnnnnnnngtgcagatagattttatgaatttttttgttgtgcagtgttccaatgggggaataaagttccgtctttatattagaaaatccggaaaaaacctactaatttctaaagtctttaaattgttatggttgccaaataattcctagaacccccaggggggcttggccaaaaaggatttttaagttattccagtcttttttgaataaaaatttaaataaaggttttttaggcattctgtgaggagaaagaggtatagaggtgaaggaacattggggaagaagtggtttttaggcaagtgagcatctggagaagtgtggaggttgaggcttgcatggtcaccacggccagctgactgctttcaactctttgtcctttgtatttgtttttttaaaagtttatttcacatagaagaatttaaactgttagtaaattaaaatcatattagtttcatccaggtagttttgaaagtatgcaaatcaagctgttttgatcgctattcatgggaaagcacaatacccaatgtggtaaataagaataaacaattaaggcggggcgtggtggctcacac

SEQ ID NO: 453094 - DNA, 739 bp, Homo Sapiens
  misc_feature (97)..(133): n is a, c, g, or t
  misc_feature (247)..(255): n is a, c, g, or t
  misc_feature (318)..(466): n is a, c, g, or t
  misc_feature (655)..(665): n is a, c, g, or t
ctcttcgggtatttttaaatttttgtagagagcgggtctccataggagaccctgtcacaaacaagctggtctcaaacttctggcctcaagtgatctnnnnnnnnnnnnnnnnnnnnnnnnnnnnnnnnnnnnngagtcactgttcctgattcctttactactattgagtctgattcagtagagccttctggtatagatttcctaaacgtctctatttaaaatcataaccatccctccagtccttggnnnnnnnnnatctttctacttgctttattttttccctatattatatggtaaatatactatctaattttcaannnnnnnnnnnnnnnnnnnnnnnnnnnnnnnnnnnnnnnnnnnnnnnnnnnnnnnnnnnnnnnnnnnnnnnnnnnnnnnnnnnnnnnnnnnnnnnnnnnnnnnnnnnnnnnnnnnnnnnnnnnnnnnnnnnnnnnnnnnnnnnnnnnnncagagctgagagtggacattcttttgtacccttaaccaaaactgaacagcttactggaccgatcaatctgaaattgaatcaggcttggccttcagggccttcccaaagaattgctttctgtccgggcaaccctgctggttaaaacccttttgggcaagctaaggccccctgcctgccccatagggtggnnnnnnnnnnnaaaaaaaggaaagccccatccccgggaaaaaatggggtgaaaatttcccttttttaaggggttttgggggaaaa

SEQ ID NO: 453095 - DNA, 854 bp, Homo Sapiens
ccaccattatccttccaatgccctagaaacaggggcccaggggacatggtttagtgctccagtatggggttgactgaaatgaatgtggacatttattaccattcctcccctttataagatgctgaagacaattctccatagatttctttctacctatctgtgagcagaggcaatgactgcctttgttttgcaacatcttttcaaggatatctgtataacaaacagctttgggagacagagtgcctctttcaagagaaaatggtagactgcttactgtccaataaggatccctaagtccaaggttcttctcctctaatacaactcactgcatgcacaggctttccctggtcttctctgcattatcccataggaacagatactcaggggataagcacaaatgcaaatgcactggctactgctactgctgtaagaaactggcctttgtgtctgacccaggagactcgtgtctttgaccagtatctgtgaaaccgtgggaggttagggttaatttgttagcctgcaaataaggtaactctcaggccccccctcagtgtttgccaaaggagcaaagtgagagcaggtttgtgttggtaagttcttttaggctctacaaaactccaaaaggtttgtcatagttttccaagaaaaaaggatagtagagcagtgaaagtaaacccttttcctcaagtactctctaatcattgtatgggatcatcttttctataacatctgaggtaaatctgtcattttatttttgtaaaataaattttttactttgtgattacaacattgaaagttgggtgtttttctttgactattatgctgagaggcactccgtacactttcttaacggt

SEQ ID NO: 453096 - DNA, 929 bp, Homo Sapiens
  misc_feature (119)..(119): n is a, c, g, or t
cccacattgggccatttatattatttaccaaccctttgtttttcttttcaaaaattccaatttatttttttgtgagaattggttctaataaatgggggtggttttctaaccatcctccnccggaaattggaaaattccctttttagggggtactccctttttggtaccaaaatgtcattttaacccagtggggatatttttcccattaattttttataaagaacaaagcccctgcccaagagcttcgttttcctggcacctgccaatttccatgaaataagcggccaaggctttaattctagtgagctcacttccataaccaagcagcatcaattcacatcaacctataaagtcctgtgccctgtgaaaggaataggcttgaagggcggatgaaggatctaaaaccccttgtttaacggtggtatcattcaaacctaggtcttcctctttggggattttcaaggtcatggtggtccacactttaaagaattcagaatagtgatgaattctgcatttcaagccacataaaaattggtgttagtaactaacagaacatgaagactctcactaagtaactaatcccaattcaagcactttgaaactagctataatgaaaatcacaccaggagaaggacatcagacgtccgttagcaaaacaaagcataatgaaaccctttactttactctattatgagtacccaaatcacagggtactgaagagactttatagaacaccatttctttctttcttcctttttcaagaatgttattgatgtaacaacacaaaggaaatgtcaaaaatagaaaatgtgtcctataatccaactcttcaatatgcatcattactgttcaagccttgtgctaaagattatatatttttaagtaggtaggcataaattttcatcccgagaattccggaccggtccagc

SEQ ID NO: 453097 - DNA, 1429 bp, Homo Sapiens
  misc_feature (1157)..(1158): n is a, c, g, or t
  misc_feature (1192)..(1209): n is a, c, g, or t
  misc_feature (1241)..(1257): n is a, c, g, or t
  misc_feature (1259)..(1265): n is a, c, g, or t
  misc_feature (1277)..(1277): n is a, c, g, or t
  misc_feature (1288)..(1293): n is a, c, g, or t
  misc_feature (1296)..(1303): n is a, c, g, or t
  misc_feature (1305)..(1305): n is a, c, g, or t
  misc_feature (1344)..(1353): n is a, c, g, or t
tgggtggcgaattctgcacgaggccacgccctccttccctgtctcccctgcctactaccctggcctgagcagccctgccacctccccgtcaccagactccgcagccttccggcaagggagcccaacaccagccttgccagagaagcgaaggatgtcagtgggagaccgggcaggcagcctccccaactatgccaccatcaatgggaaggtgtcttcgcctgtcgccagcggcatgtccagtcccagtgggggcagcaccgtctccttctcccacactctgcccgacttctccaagtactccatgccagacaacagcccggagacgcgggctaaagtgaagtttgtcctggacacttctaagtattggtacaagcctgagatctccaggtagcaggccatcgcgctcctcaaggaccaggagccgggggccttcatcatccgcgacagtcactccttccgaggcgcgtacgggctggccatgaaggtgtcttcgccacctccaaccatcatgcagcagaataaaaaaggagacatgacccatgagctggtcaggcattttctgatagagactggccccagaggagtcaagctcaagggctgccccaatgagccaaacttcggatcgctgtctgccctggtctaccagcactccatcatcccattggccctgccttgcaagctggtcattccaaaccgagaccccacagatgaatcgaaagatagctccggccctgccaactcaactgcagacctgctgaaacaaggggcagcctgcaatgtgctcttcgtcaactctgtggacatggagtcactcactgggccacaggccatctctaaagccacatctagagacgttggctgcagaccccacgccagctggcaccatcgttcacttcaaagtctctgcccagggaatcactctgactgacaaccagagaaagctctttttcagacgccactaccctctcaacactgtcaccttctggtggaccctgggatccacaggaaagaaatgatgaaacagaggtggtgccctgctaagctctcggctcctggcccgaagcagggagcccccggaaaagcctggccaccttttgggtgaagctgggccccccaaaaagggcggggcttttgggggcatgggaaaaaaaattttnnccactagaaggcctttgttaaaaggccgcgcccnnnnnnnnnnnnnnnnnnccccgggcctcctttgttccccccgggggggnnnnnnnnnnnnnnnnncnnnnnnnaagtaaaggagnttagtagtggnnnnnnaannnnnnnngnccccccgagggggaggagtcctctcgggaccggccctcnnnnnnnnnnacaccccccccagagagagaggggggagggattatttttttgtggggcgccccctttattttgttttgtggggggg

SEQ ID NO: 453098 - DNA, 940 bp, Homo Sapiens
agcggtatccgtcccatacccataaagcttcaaatgttcttgctaaaaatttgataataaaaacttatgggacagaaatcatagataagacttaatataccacttaccaaataacaaacagtggtatgaatatttaatttatgtaattgcctccaaaattctaaaaggtatttattatatgcctatttcatagccaaggaagctgagacagagtttaagtaacttagatttagattcaataaatggcacaacagggataaactcagacagaattgtagtggttgtgctcttattcacttctgtatatggttctcaaataggatataaatatcctaaactaatataatattagagtaaaacatcaaaacttagaatcaaagtccaaagagactatattaataagaaaaaattagatagtgtagcatactttaaaatgtcaatcatctcgaagcaaacaagaacaatgcaagagtagcaacaacaaaatataatttaaaacaaaaatgtataatatagcttaaatattgactattttacactgatgagaaaagtgcaatttattaacatatagcagtcctctgcttttgtgtatgaaatgacatagtaaacaaacaaacaaaaatgttcactacaagtataatttgacagaactgtagtccagtgggaaatcctcttagaatatgacagatcaaatacaaaacttcagtaacacaattatttgactttgtgaaacatatatgaatttgtgccctcccctctctctcaacaccaactgtttagggtaggtgacattaactcaatggtctttttcttgaagagtattttttcagggttttatttgtgttcagatttaagaggaggtgtcagacagagcggaatgccagttaaggggatatttcttgaataaaagagccaggtgaggagtgaaaatgcaggggga

SEQ ID NO: 453099 - DNA, 893 bp, Homo Sapiens
  misc_feature (80)..(361): n is a, c, g, or t
tttcacatttttagaagagacgaggtttcaccatgttgaccaggctgatcactaactcctgacctcaaataatccacccnnnnnnnnnnnnnnnnnnnnnnnnnnnnnnnnnnnnnnnnnnnnnnnnnnnnnnnnnnnnnnnnnnnnnnnnnnnnnnnnnnnnnnnnnnnnnnnnnnnnnnnnnnnnnnnnnnnnnnnnnnnnnnnnnnnnnnnnnnnnnnnnnnnnnnnnnnnnnnnnnnnnnnnnnnnnnnnnnnnnnnnnnnnnnnnnnnnnnnnnnnnnnnnnnnnnnnnnnnnnnnnnnnnnnnnnnnnnnnnnnnnnnnnnnnnnnnnnnnnnnnnnnnnnnnnnnnnnnnnnnncaattaccaactaaaaacataactccagtttggcagtttgcatattataaggagataaatgttaaaacatacttgactactttcagaaatgttctcctggtactttttgcatttctacattcagataaaaagatttgcatgcacctggctaacgccaagggaacttcatttttttcttcactattatgcactttcatggtatagtctttctcagttcttttaatttttgttatttaacatctttaatagcacagcaaacatcttttcagaaattttcagttaaagcctttgaattacttatctttgatttaatttacagccagcattttgccacgttctaaataatatttagctcaactgattcatacgtattaatgaccattctagcaaaggcctacaagtggtgtgggaatcagggaaaggctgcctctttggtatctcaactggtattgattattgctatcaactatttgggggagaaaaaatcaaaatgaagccctgtccaaatttttagagtactatcttttggtcc

SEQ ID NO: 453100 - DNA, 1178 bp, Homo Sapiens
  misc_feature (142)..(432): n is a, c, g, or t
  misc_feature (612)..(624): n is a, c, g, or t
  misc_feature (1040)..(1107): n is a, c, g, or t
acttgggtgtgggggagcccggagacccccaaaaaaccccggaaagtccactttggcccaaaagtgacttttcaggtgagtgggagggagtccagtacttcagacgccaggccaagatcatccaaaaattccgcctcttctnnnnnnnnnnnnnnnnnnnnnnnnnnnnnnnnnnnnnnnnnnnnnnnnnnnnnnnnnnnnnnnnnnnnnnnnnnnnnnnnnnnnnnnnnnnnnnnnnnnnnnnnnnnnnnnnnnnnnnnnnnnnnnnnnnnnnnnnnnnnnnnnnnnnnnnnnnnnnnnnnnnnnnnnnnnnnnnnnnnnnnnnnnnnnnnnnnnnnnnnnnnnnnnnnnnnnnnnnnnnnnnnnnnnnnnnnnnnnnnnnnnnnnnnnnnnnnnnnnnnnnnnnnnnnnnnnnnnnnnnnnnnnnnnnnncaaaacctgcctcttgaccaccagtctgttccatgtatttctaatatgagcaacagctcttagtcatgcattcccaccatccacccacccaaaaggagagcagccaatctggggtcccaagtttaatggaggaagagaatttacccagaatagtttgttcatattcacacagtggttttnnnnnnnnnnnnnttgattctgctccagaatattctaggtgcattttctgaccttctttttctattgcagattaagaaatggggccaggggagggaaggggggtgtgatttcttttcaggttattttttaatatttatttttaaacaaattccattatttggaggcttctggtgtttagacttcaaatctactaatcttagtccataattcactcatgggacagtccctaaacatttttccagagacagttctgagacagggtttgtttaaaactctgtgacaaggtgagaaaagatctataagtcagagaaacaagactccatcatctctacaaaaaaattttttaaattattaggtgcgcgtggtggcacatgccaatagtgccagctactcaggaggcttgaggtgggaggactgcttgagtccannnnnnnnnnnnnnnnnnnnnnnnnnnnnnnnnnnnnnnnnnnnnnnnnnnnnnnnnnnnnnnnnnnntctctaaaaaataacaaaacttggggtcaagtgtggtggttcacacctgtaatcccagcaggaggatcgct

SEQ ID NO: 453101 - DNA, 893 bp, Homo Sapiens
agcggagcaatctcgggaaattggagactgacgcggctgctcctgcatgttatttatttttcctctttccctcccgtggagaccctcctgttggaaagagagctgcagcacgggacagagacaggcaggaagaagcagagaggactcggtgacgcccccaccgagcagcccctggcccactcctccagcaggggccatgagcaccaagcaggaggccaggagagatgagggagaagccaggacgagggggcaggaggcacagcttcgagaccgagcccacctgagccagcagcgccggctcaaacaggccacccagttcctgcacaaggactcggccgacctgctcccgctggacagcctcaagaggctcggcacctccaaggacttgcagccgcgcagtgtgatccaaagacgcctggtggagggaaacccgaattggcttcagggggagcctccccggatgcaggacctgattcatggccaggagagcaggaggaagaccagcaggacagagattccagctcttctggtcaactgcaagtgccaggaccagctgcttagagtggccgttggcacaggcacccaatacaatcggatctctgctggatgtctcagccgcctggggttagagaaaagggtcctaaaagcctcagctggggacctggcccctgggcccccaacccaggtggagcagttggagctacagctggggcaggagactgtggtgtgctcggcacaggtggtggatgctgagagtcctgaattctgcctgggcctgcagactctgctttctctcaagtgctgcatcgacctgggagcacggagtgctgcggctgaaagccccgttctcagagctacccttccctgccctttgtaccaaagacctgggccag

SEQ ID NO: 453102 - DNA, 1171 bp, Homo Sapiens
  misc_feature (550)..(585): n is a, c, g, or t
  misc_feature (1138)..(1138): n is a, c, g, or t
ccaatcttccccacagctaattctgtaattaccattttgtttcttctgtaacaacaaacagtttaaataatttccaattataaagataggttaacatcatcatcgttttttaacaagataacttttatgaagcttccaattttaaaaaagaaaaacacttatctattcagtagggaagaaacaatcttatttattaatggcctgcatatttagaaagggtttaaaaacacatacatttcctgggacacaaacttacttaccaaatgtatgtccttacaaaataacttcacagatcaatagtcttggaacttacacaaaagacatatatatgacatccattaggttaaatatacatttcaaatgtttttgcagcaactttctaccagaaagtacactaatgtgagaatgtatgtcctctttaaccccttaaaaatagtaataaaaaattacaaaataatgtaaatgtaaaattaaggctgagactacatattctagtattaataaagtcaaacaaacaatagttataaaacttggtgctgctgaatatttnnnnnnnnnnnnnnnnnnnnnnnnnnnnnnnnnnnncacacacacacacacacaggataagtcttttgaaatttgaaatgctaccactgtcacaagttcactcattgatttaatgttgttctgggtatcttaacatttcaattcccaaatacctgtgcttttaaaatttttatcctgaattctgcattgagtttcctcacatatttacaattaaacatctagcctctagaacctcccttacacaaaagacaaaacatctttgttaaataaattcacgcaaaagtaataaaaaggttttcaagaaatagttctgacatgttcattatatttatactgaaaaatagtacatgtacttttcttcaggattaataaatgccatgtgccagttttacagtcactgccacattagcacattttcctcttacacatttgcaaggtagtgacaaccaaagggcataatgtctggaataattccagtaaatccataatgtccagtaagattcataaaattgaatggttgtttccagtcccatctgaatcgaaatggaaattcatgcccaggtacttgtattgtccccagaaatactcnagtctggtaagtcaccctcttggtcttctgaaa

SEQ ID NO: 453103 - DNA, 1058 bp, Homo Sapiens
ggtgtacacaaatgccaaaatggtgcgtattctagcagtagttttatggacatcaaatgcctgaaagaaagatcaggaagttgtatgtacagttgatctgaaatgcaacaacttgattaggaaaagtgatacaggaaacttttcccactgcaccttccagaggcactgaggttcggttcctgccacccctgccagtgctttctgtggtgccaggaccacatccgtcagtgtttctgccaggcgtcatggtgcagtggggtttgagttgatgctctttctgtccactttgctcttccaatgttttatagaactggttagtactgcagaaaaaccacgacttaaagaaggccttatacatgaacaagacacagttgctcagttcggaccacaaaaagaaccagtaagacagcagattcatcgcatgttcctcttaagagtgaagctcatgcatttcgtgaacagcttgcacaactacatcatgaccaggattctacacagtacagggctggagtttcaacatcaagtcgaggaagccaaggatttagatcaattgattaaaattcactataggtatctgtcaaccatccatgaccggtgtctgctgagagaaaaggtcagctttgtgaaagaatctatcacgaaggtgttgaacttggctctcatgttcgcagacggttggcaagtaggcctgggcacttggcgaatggaatctatccataaaatggaatctgattctcaaaactgccatatgtctcttgtaaccctttttaaccaggtcgtcctgtccagcatccctttcccccacttttaatcttttaccccctccccctctatggtcttttatgccaccccttttatcccttttcttccgccgtaaattaaataacgtttaaattctggtctttccccccctgtaccctttccccccaagttcgtatttttataaccgcgaaaaaatccgttcgctctgttattattcggtaaaaccccggccttaatcatcccataattaaactcagacttccccccttttttcccttacctagcgaaatcatatg

SEQ ID NO: 453104 - DNA, 1311 bp, Homo Sapiens
  misc_feature (146)..(146): n is a, c, g, or t
  misc_feature (874)..(894): n is a, c, g, or t
ccccccagcagccccacacagttttggcgggctcttggggggctccccccaggtcccccaggcttcagccacacattctcaaaggaagcagagctgtggcgtttcacatcctcgctgctgctgctgctaccgccaccgccccatantgctgcccccgctccaaagggcactgtgttgcccacccgggtggcactgggtgttgaggagaaagtctcggagctatgcctccgccggcacccttgtgggtctgcacggatcactttggcactctgtttgcggttaggactgaggttcacccgggtgaaaggcgttcatgcccccaggtccttgtgggcccccccagcagggacgagtgggcagccagctctgctgccccttgaggcccagtcggggaagcagaggctgctgaggatgaggaggcagcagccatggtggccctgggcaggctcacctcctctgcagcaatgcctgttcgcatgtcagcatagcttacaggggcagctggcgaggtgtccacgtagctctgacggggacaactcatctgcatggtcatgtagtcaccccggctgctgggcactgcccgggtaggcctgcaaatgctagcagccccgggaggtgcagggcccagtctgcccatctcgaccccagtgctctcctgccaggctgccctccggcccggccccaggtccatcttcatgtactcctcagtgccagtctcttcctctctgggagctggctggagctgggatggacacctgacagaaggtgagctgtggaaagccaccgggccagacaagtagccagactgatcactcccaaattcaatattgacatattccccggggctcttgggctctggagggtgcagcaaggnnnnnnnnnnnnnnnnnnnnnctcgggcccgaggtaaggtgctggccttgggatcccccagggacagcctcgtgggccgggccaggcggctattggtctgagcagctgtgtccacctttcgaggcagatggggctgcagaacctgatggtggggatgtggaaggctgggctccagcctagccccgcagtatcccccacccaggctgtcgctgctggtggaagaggaagaatcatctgctgttgcagcatagagaaggcgaccagagctagtggaaaggcggaggtgctgatgccgggcaccctcctccggctccccggggcgctgggtgtgcttaaaggatcttggcaatgagtagtaggagaggactggcttgtgctgggggtcctcagggccgtagtagcagtcggaggatccggagaattccggaccggtccagc

SEQ ID NO: 453105 - DNA, 863 bp, Homo Sapiens
  misc_feature (236)..(377): n is a, c, g, or t
  misc_feature (532)..(616): n is a, c, g, or t
  misc_feature (618)..(653): n is a, c, g, or t
ttccacttggaacccaagtttggaaattttgctacttcttgttaagctaggccttttattcttgaagttgctatttctcatacaaactcattttatgcattagacacacagtcactattgttatggagaacatagttgtatcagaagaggtatagctttgggtgtggatgtgcgtgtgtcaggggaaagatattctgattatatgatgattttcataaaatatagtatgctgagtnnnnnnnnnnnnnnnnnnnnnnnnnnnnnnnnnnnnnnnnnnnnnnnnnnnnnnnnnnnnnnnnnnnnnnnnnnnnnnnnnnnnnnnnnnnnnnnnnnnnnnnnnnnnnnnnnnnnnnnnnnnnnnnnnnnnnnnnnnnnnnttgcagtaatgagttcttgctctatttttcctcccctggaagctgattgtttaaaggagcctggtatcctccctccctttcttctttgcttcctctctcttgctgtgtgatctctgcacacaccagctcccctttgctttctgccatgagtggtnnnnnnnnnnnnnnnnnnnnnnnnnnnnnnnnnnnnnnnnnnnnnnnnnnnnnnnnnnnnnnnnnnnnnnnnnnnnnnnnnnnnncnnnnnnnnnnnnnnnnnnnnnnnnnnnnnnnnnnnncagtaaattacccagccctcaggtattccttaaccaacccaaatggggctaagaacccaggggtccatagggaataggcaggcaccctgaagcccaaacccaggaaccttagaatcctccaaccggttaaaggccgggaaagatttttgtaatttgaaaccccgggaatttttatcactggcccccctccaaagggtttgggggtcccac

SEQ ID NO: 453106 - DNA, 835 bp, Homo Sapiens
  misc_feature (312)..(355): n is a, c, g, or t
tcactacggtcacacacatccttcctagatagctcagacaccgttctcatattgaactacagtcacagggccggtaaacccaggtccctttgcaactttgtgcctggcctcactcctttcctaacagatatatcacataatgtctagaataatgaattcttcctgaggaaaagtttagctaaaggagcatttgcagccaaaggcactatctgaacctgggagaccccatccctggaaaacaccttcccctgaaattactgaaatgtcaatcacggagttttaggatgtcctgatagacccacgggttcaacnnnnnnnnnnnnnnnnnnnnnnnnnnnnnnnnnnnnnnnnnnnnttttgtgcacccctgtgggcacacttgaattttcaactagtcatagggaacataggggacaatgttgactgccaaatgagacacctgagaaaatagtcctgccccccaatataagcgaaatacaaagactcaaaatgatggaataactgtgctttttaaaaataaataaataatggctcagggagacatctgtggtccaagaatcaggacactccagcctccacagctctgatatgaccttcctgcatgactttgcccaagtacacattcctctcggagcattagcctccgggcgtaaaatgaaggaagtgctccttttcactctgatgcttcttgacttatggcttcccttggtaaacctacctaggctcagatgttttggctgaaagccttttggggtggacactgttgggaagaatatccaatacagaaaatggtcttgccaaccctcgtgccgaattcgccacccaggcctcgctc

SEQ ID NO: 453107 - DNA, 898 bp, Homo Sapiens
  misc_feature (760)..(760): n is a, c, g, or t
  misc_feature (763)..(764): n is a, c, g, or t
  misc_feature (833)..(833): n is a, c, g, or t
ggaattagtgagcaagccctgtctccctgagcagcatgggtggtcctctgagcacgccaggcacgagtgtgcagggagctggtgcaaatgcctctgtgtgcgggtgagcatctgtgttgtgactctgcccacgcatgtgcttcagtgtgccgtgtggctgcacgccccagatccatgcggcacgtgccggccggtgagggtgctgggcaccgggaggtggcggagagggcgacgtatgcgtgttgtttgtgggcatgtgttagagtgtgcatgcgggccgtggggcctcacagcatgtgtgtgcacaatctggcgtgtgcgtgtgtctgccacccccaggcctgccccacccatgcatgggacctgccatgtgatttgatgctgtctttcagaatcactatcagtggcccctgaggagcgtcagccatggtaggtacatgtctcactgcctgctgcatgaatggtctgcccgccccgctgccccagctccacacagggggcatacctggagcctcagagccaggctgcctgcccctcccttctagagctgcagacttgctctttcctctttctgtccttgtgctgctggttgtctcactttgctccctgtgagccacgggactcagtgccactgctcaaggtctccatggctgagcctgggggctcttacaacaggctccatgcccaaggtggcagatgtggaaccatcagagagggcacagagctcatggtttatggtgtaggggctgggagcttgganggnngtttgtgtggggggctgggactcaggcgggccagaggcctggggcacatcattcctgggacacgcccgntacctggtcatggcaagtctgaagtcatgcctgcccagggggcagggtaatccaggctccccaac

SEQ ID NO: 453108 - DNA, 484 bp, Homo Sapiens
  misc_feature (146)..(146): n is a, c, g, or t
gggatggacttgcctgacccgatcggcaatgttgaggctcctcaggggtcactgaataatgaattctgaaaagacagcacgaaaatcaacatggcagttcacacgcacgggtggggccggcctgggggtgggggacacacacacgncaaagcccgggcgtgcacacatatgctgtgaagccccatggcccacatgcacacgctaacacacatgcccacaaacaacacgcatacgcctccttccccgccacctccccagtgcccagcaccctcactggccggcggcgcgtgcagcatggatctggggcatgcagccactcagcacactgaagcacacgtgtgggcagagtcacaacacagaagctcacccgcacacagaggcatttgcaccagctccctgacactcgtgcctggtgtgcttagaggatcacccgtgctgctcatggagatagggcttgctcgctaaagtccagctgtcatttctc

SEQ ID NO: 453109 - DNA, 890 bp, Homo Sapiens
tgggtacaacagtgccccaaaaaggctttagaaaatgccatttatgaaacaatagcttttgctagttgttaggaaaagcaatttatgagttgggaattattgtggaagacttgatggatgattatagctctgggtcactaacttctttttatgaaaacatgaataatactagttataactcaaagtcaaaatagtgtaaaagctgtggagtgcttttgtaggggggtatattaaattggccagaatattgcagaggctcatcttggaacaagaagtagaatgctgtttcagttaagaggactgggctgtttcaggcaacagcctgatcatttcgcatcacagtggtggctgggttttccatcagtcattactaatggcaatgagaaaaagtcaggcggcttgtgtgactcccatgttaacagcaccataaaaaagttttgccctaggaatttgggggaaagggaagaatgcggactgcctttgttattacagaaatttcacaacttacttaatgacaaccccgaaagttcacctgtggcatactggctgggaagagaaacaactgaagcaagccaatgctaagtgcagattatggcactacctgaaaataacagatctctttaagaagtttatcaataactaagtgtagaggatattcacatactgccaagtcatagggaaaggtctctggtttcgtaagttcctaatgccacccctcaagaaagagagaacaagtcttccctcccccagctcctgctctgacaacagccacaagaaccctggaaggccccctaggctaagtgaagtgtctgtacttgtgactgctttgagaaggttctaagcattcacttttttgtttgattttttgatccgcgggaattccggaccgg

SEQ ID NO: 453110 - DNA, 938 bp, Homo Sapiens
ccctccccttttctcggagatgaagcgcagtttcggcgatctcttcatacaaaacatttctagaatgcggcgtcaccccggggggtattgaaacccctggcctttcaatctttgggcgcgttgaagaaatattgggccatggggtaccggaccccggcaacaggagtgtcttttctttttgcgcctgctgcgggtgccagtattgagggagggttgatatctgtagggtcaaaggacggtaaattccttctttaattttagtggtagtagccaaggcctgggcaattcggctttcacccagtagcgcacactgccatgtcggccttggaatgaggtagcgagtggtgtctgtggaagctcgaagctgaatgcatattcatgccttcctgaatgaatagtgtggaagccttcttcggaattatcatcatctctttcgtgcccaattaagatgtctttatggttgaaatactctacttcttcagtgtaattctgtgtataggcagtattggagccggcgtttctagattcagtccagcgtactttcgcatgtcctcttgcatgaattttaagagattttactctgatttccccagtaacttctaaatttacccttcctgagacggtatccccactagaatacacagggacattgctgtcattaagacagtcaaagcttattgtcaaactcttcacctttcccagcaccatgtttataacaaaatctataaaaatataatgtaagacaaaaaagtcaagatcgcatataaaatgtgatcttcacttaacactgatcgatatttttgccgtgcaaaatgcttgcaggccggatcagtgattctctacaaatagttcattgagatttcttaaaaagtcagggcagcagaggctgctgctccgcgctcccgctcgtctcagtggtctccttacaaagacccgct

SEQ ID NO: 453111 - DNA, 794 bp, Homo Sapiens
  misc_feature (311)..(319): n is a, c, g, or t
  misc_feature (716)..(752): n is a, c, g, or t
caccactctgttctgggcccagcccgcctggctcaggcaggctcggagccgtgctctcctggacctggtgcatctggctgcagccagcactgggcaggaaaataccgctggagcagtgccaggtgcaggacgtccccactacctgcttcctcctgggtctggagggccaccatgagcccacaatcccggccaggcccaagccggtggctgaagtgggcagctgtgtctagaagtaaggcaatgaggtaggcggcttcctggggctctgggtcttccgctaggtactcttctaggccgtcgagcagcagaannnnnnnnnctggccccggggcctcatgggcagagcacaggagccggaaaagctctcgggttgagggtgggtactggaagcggatcttctagaaggagaaacagaaggaaagggccggattcagcacaggaagccagactccttaaaagtaaccctgcctccttgcatactttccttggttccaggatgaaccagttcagagctgttaaatattcttatattcgcccgtttttccagcactcatcactgccgagtattagttgagggcaagccatttttgcttgtttgtttttggccaaatctctagcgcaatttttccacggaaaaccctcccccagcattctcggtctgaccccatccttgacccgctctcgacgaattcgagctcggccgatttggcctgatnnnnnnnnnnnnnnnnnnnnnnnnnnnnnnnnnnnnncggccgccccgcgatgagctgcatcgcctatatagtcatctt

SEQ ID NO: 453112 - DNA, 1165 bp, Homo Sapiens
  misc_feature (68)..(68): n is a, c, g, or t
  misc_feature (87)..(88): n is a, c, g, or t
  misc_feature (119)..(119): n is a, c, g, or t
  misc_feature (271)..(280): n is a, c, g, or t
  misc_feature (424)..(842): n is a, c, g, or t
ggcgactcgtcggacacatcgggtaccgtgccgtaccggctttgccgcgacacggcgtagctgtcgcnacgcgattcacgctccgtnncgcctactccacctcctattgctgctttccnactatacaggccacctcaaaccggtgcgagaacctatgcgcgcacaccccgacaccggtcgtctgactacatccgtcgtcaacagcggacacgacgcaagcccctcatccagccccccgtttgcgcctcgtcgtacaccgcctcggccggtnnnnnnnnnngccaacgtccccggaacgcccgagaaccgctctcccggatcgccgtcggaacgtaccgtccgggtgcgcccgctttgccgaggggcgcgcgtctatcagctctctcgcccggcggtggataccgcggcccaaccccttgtgtgnnnnnnnnnnnnnnnnnnnnnnnnnnnnnnnnnnnnnnnnnnnnnnnnnnnnnnnnnnnnnnnnnnnnnnnnnnnnnnnnnnnnnnnnnnnnnnnnnnnnnnnnnnnnnnnnnnnnnnnnnnnnnnnnnnnnnnnnnnnnnnnnnnnnnnnnnnnnnnnnnnnnnnnnnnnnnnnnnnnnnnnnnnnnnnnnnnnnnnnnnnnnnnnnnnnnnnnnnnnnnnnnnnnnnnnnnnnnnnnnnnnnnnnnnnnnnnnnnnnnnnnnnnnnnnnnnnnnnnnnnnnnnnnnnnnnnnnnnnnnnnnnnnnnnnnnnnnnnnnnnnnnnnnnnnnnnnnnnnnnnnnnnnnnnnnnnnnnnnnnnnnnnnnnnnnnnnnnnnnnnnnnnnnnnnnnnnnnnnnnnnnnnnnnnnnnnnnnnnntaaggctgactgtagatgtactcgggatctctcgtcgacttgtcctcaatgaccacgctcgagcgtaccttcacctgctttggagaaatcctgaatgtgtccccagaaatgagacgagaagtcttctcctgatcaaaggtcttttcttgattgaagggttcgtggtttcacaggctggtggagttctgctggtctccacttctggagcagtctcaggtgaggcaaaagtagaaggaggcttctcagcagagtctccaactgcttcatccgtcatttcatcctctttctccaggctttccacctcgtgccgaattcgccaccca

SEQ ID NO: 453113 - DNA, 1072 bp, Homo Sapiens
  misc_feature (827)..(827): n is a, c, g, or t
acccaacttccccagtgtgtggcaatagataaacttaagaagtgcaaatcatcaaatttaattatacttgaggaacatttaaaaaacaagaaggaattcgatcataattctaacataaggtacagatgtagaggaaaagaaggatggatacacacagtctgcataaatggaagatgggatccagaagtgaactgctcaatggcacaaatacaattatgcccacctccacctcagattcccaattctcacaatatgacaaccacactgaattatcgggatggagaaaaagtatctgttctttgccaagaaaattatctaattcaggaaggagaagaaattacatgcaaagatggaagatggcagtcaataccactctgtgttggaaaaaattccatgttcacaaccacctcagataggaacacgggaaccattaattcatccaggtcttcacaagaaagttatgcacatgggactaaattgagttatacttgtgagggtggtttcaggatatctgaagaaaatgaaacaacatgctacatgggaaaatggagttctccacctcagtgtgaaggccttccttgtaaatctccacctgagatttctcatggtgttgtagctcacatgtcagacagttatcagtatggagaagaagttacgtacaaatgttttgaaggttttggaattgatgggcctgcaattgcaaaatgcttaggagaaaaatggtctcaccctccatcatgcataaaaacagattgtctcagtttacctagctttgaaatggcatacccaggggagagaagaaggatgtgtataaggcggggtgagcnagtgactttacactttgtgcaacatattaccaaaatggatgggacccagtaatgtaacatgcatttaatagcagaatggacaggaaagggccaacatgccgaagacccctccctgtgtgaaatcccccccacccgtaccaaaaatgcttataataagtggtccaagacccggaatgagttaaaatattccccttccgggggggaaagaggaaaccctttttccaaggggtgagggagcccccctt

SEQ ID NO: 453114 - DNA, 1743 bp, Homo Sapiens
  misc_feature (1106)..(1122): n is a, c, g, or t
  misc_feature (1136)..(1136): n is a, c, g, or t
aaaacatatggaaattctcttttgatcaaaaggagtgtctcccaattagtttacgtgtgttagtattgctgacatattattatcatcacaaaattccttttatatctagatggtatcaaataagaaaaaaatgcatcatttggtcaattgcttattgaagatcccagctgaagcctttctttggtaaagagcgcagaaagagaccatagctattcttggatgagaaccttgcctctactaaatagtttctgcttttcctctctgtagccagacagctcaatagcctagggagagtcgatgaaggatatgcaaattacatttttcccattctcagaacaaagacagcaaccaatgagccagaggtttcttctctctttgaaaccaaataggcacgctggaatttaggggctatgacaaaaatgttgttaaagcaagagcaaaatcatccttcctatgggattccttttctcagtgtttacttaattctttttgcagtttgggattgggagtttctaggtaatgataattaatgccattttacatgatagcttcaatgcagaaatggtgtgagcctgagttacaaatgacatgactagggatacaaacttcgtctgtactaacatcctaccaagcagattggaaacaaatactactaccactaatattctgatgtaattaataacatctaatagaaaaatagaaacatcgtgcttagcatgaaaccattgcacaatataaacctgctcccaaatggcaaggatttttgctaccaatatttgttcttaattctccagttattttaagtaaataagtttcacatctaactacctcagctactgttgttttatttagaaacatgaaaccatgcactttgtaatcaataagtcttttgtttaacatttcaaaaggatatttggtgcaaagcaattttcaaaaatttgtacatgatatacaccacccaacctcaggaggttgtacttaattttgtttgtttgtttctaaggttggttttgggtaaaatcctcatttccactcaacatcaagataagctgctctatatttgcttaatttgccttaaacattttgtgctcctttccctgttcaannnnnnnnnnnnnnnnnaaatctatctctgnaaaaaaaatggaacaggtggcaggtgaacagcaaatggaagagaatggaccagtaatttctcagtcccctgttgtcaactatctgcatgacattctgattgtgcaaaaatgccattcctgtgcttccccctccattacagaataaggtccgagagaccccacgagtgtgcgtagggaacggtgtagacatttcccccagtatgagcacagtgcctggacctgaatgatcatcttggcagttcttgtgcttttactttgtaaacattgtacaaatgtatttggaattttatttgaaatggagacttaaactagttattaaatttgtttccttcctgtaaatatatatattcaaattccatgtatccaaacatccctttagcgttcagattgtaagtgtgtctttattcgcgggaggccactgtcagcaggcagtgacccccagtgccctagtttgaagcacagtgtgtggagtatttgatgtactacagtaccatagttattttggtctgttaagtaagttgcaatttgtgatgaaatgaagtggaaagtagtacttcataatgaacaaatttccttggttacatggtttttcttgtaaaacttaaag

SEQ ID NO: 453115 - DNA, 926 bp, Homo Sapiens
  misc_feature (65)..(65): n is a, c, g, or t
  misc_feature (150)..(150): n is a, c, g, or t
  misc_feature (573)..(859): n is a, c, g, or t
ggccaggggttctggctgaggtttaaaatgaacactccacggtgaatgataaaagggagctggangaggaggggctgggggtcagcagctcagcatggccaccctgagaaagtgcccagccaaaggggcctcccaagcccccgggcatanttcagacccggggtgaagagcactgcccactgaaccctccactgtctgctctgcgcaccagcgcacctccgggctgctctgtctctgacctttcctccagtcattcccgctcaggctggggcttgcttctcctcgccaccctgtctgtgacaccttatctagctagcatcctggggcacggtgttcatgtgaaggcggtgctgactctgggggctggggtggtgcaaagataacaagactcagtgtcctcctccaaagcacttttaactctcaacaaaataattcatttttaccaactgctgattgcatttcaggcaccatgctaacgacatctcatgcagtatctagacccatccttgccacaaggggagatggtgttattgttaacctcatttcttgggagagaagctggtgttgtttcgnnnnnnnnnnnnnnnnnnnnnnnnnnnnnnnnnnnnnnnnnnnnnnnnnnnnnnnnnnnnnnnnnnnnnnnnnnnnnnnnnnnnnnnnnnnnnnnnnnnnnnnnnnnnnnnnnnnnnnnnnnnnnnnnnnnnnnnnnnnnnnnnnnnnnnnnnnnnnnnnnnnnnnnnnnnnnnnnnnnnnnnnnnnnnnnnnnnnnnnnnnnnnnnnnnnnnnnnnnnnnnnnnnnnnnnnnnnnnnnnnnnnnnnnnnnnnnnnnnnnnnnnnnnnnnnnnnnnnnnnnnnnnnntgagaagcctgtgttcctcaccactgattccatctccctctctctgcctccacctcctctttccaga

SEQ ID NO: 453116 - DNA, 1197 bp, Homo Sapiens
  misc_feature (46)..(46): n is a, c, g, or t
  misc_feature (462)..(479): n is a, c, g, or t
gaaaaaaacccaggagttcccatgttaaataaaattattaaaattntatgaagcttccccttaaaatggaccagtgatttgtaattaccataaaagattaccccaggcaaagtctttcaccattaagtgattcatcatgaaaaatatttattgaactgaatatacttatttggtatcactagttttctaaatcatctttcagcccaaaacaggctttcatataacttataaatatttccaattgctacactgaggcagcaaatgtcatatctatgtttgtcctagttgtatgtcatacaaatataaagtctatgaatcttatacttttgtctaagtcaccattgtagagaatgtgctggtaagtgaaatcaatacaaaggaattatttttcatttgtaaaaaatgaaaatcatttacaccttgttttaaagttctaaagcagcatattcaactcttaaggcnnnnnnnnnnnnnnnnnnttactataaattataaattctggtaacttttcttctggcattaaaagccacaacacaaattctaatattttaatagataatatattagtgtacatctgaatatacatttgccaaaatgttccattagtatgaagttggtctgaagtggaagtgaagtgcagtggtgtggcagggtaacatttaatggccgtcctgggcatcaggggacatggaatggctgagtcttgaccttccattcacagatattgtatttgatggagtggtaacccttttcaatttggcagcagcctctcccgaacggattgcagtcagcaaactctgtcgcatctgttctgggtcagagctttggaatgttaaagaactttgtctcataacagtgaatgatgggccatcagttggagttggtatttgggaattctgttcattatgtgcagagttattttccttatcagacacaccaagctgtgggatgtccacaaatttatttacagaatgagtcttcccttcctctgtgttggctggaggttggaccaatgcactggcactaggtgactcggtgcgctctttactgaaaaactgtgaccttttcactacagcaagagcaaacggtgcaccaccagaatcccagtcaggacgtgggcaacaacgccagcaaactagccagatccgtcagataactaagacagccccctccaagccagactaacacagacagtac

SEQ ID NO: 453117 - DNA, 1006 bp, Homo Sapiens
  misc_feature (45)..(45): n is a, c, g, or t
  misc_feature (178)..(178): n is a, c, g, or t
  misc_feature (899)..(925): n is a, c, g, or t
ttcttgaatggttttccattggttggtgggggggtcttttgtggncgacataagttgacccataacccaagtaaccatttcttaagaatgttataggaatagatggacttatgaaggaaagtaaaggtttcacaactccaagacttatgacataatctctacactggggcccatcacntatgatatttcccaatgcccacactgcttgctcacagacattctgatggggtgaatggagaagcctcaggaaaagtggcacagcattggactgaactactgcttgagtttgttcagaagttccagatgcaatgtttgtcaaagcccatgcagcttcaaactgtaaagaaggattgtcatctctttcaagacaatggactaaaatgggcaatattccagattttattaagtcatcaattggtggatttcgatcactggacaaaagcttcctagcagcttgaactgcacttaattgaattccttggttatcacttgaagcattttgaacaatagcttctagagaggtattttgcactctataatcaccatctatatcagagtcttcacagatatcttcatgtggtacattccttctctttaagagatgttcatctcttttattcttccttaattcaactacaacttcatttcgttgtcttctcatagtctccaagtcgcggcctttgttcttgaaattcttgagccgttggttgtccagtttctcgttgtccgccatggccgggccggtgactccttcccccgcccgggccccgcgggatccgccccaaccaacgcgccgcaccgacactcccaggaaccgggccgccgcctgagctgctgtgcccgccgcgccgccgcttccttcctcctctcacctgcctccgccgcggccttctcctctnnnnnnnnnnnnnnnnnnnnnnnnnnnagcgcgactgcagctccggcaaagacaactgtggggccgggcggcggcaaggcgacggaatgtgctgccggctgagagggg

SEQ ID NO: 453118 - DNA, 952 bp, Homo Sapiens
  misc_feature (78)..(129): n is a, c, g, or t
aattagctgggcatggtggtgtgcgcctgtaagcccagctactcaggaggctgaggtgggaggattgcttgagcccannnnnnnnnnnnnnnnnnnnnnnnnnnnnnnnnnnnnnnnnnnnnnnnnnnntgacagagtgagacactgtctcaaaaacaacaaatacaatgggtaaaagatgcaaacaacaaagatatggggatagtaagtgagcacatgaaaagatgatcaatatcactggtcactaatgagctaccaaatactcagtgcatgcaggaaagacagagtggccagctgccgctttaagtgtcatgtccctgcccagtaagtcaggctcagggacacacagttcacacttccctccctgctgccgctattattctactctgcttaggactttctactcctaggcttcttgtgttagacaagaaacatcactggatgaggagagcaactgagtacaatcctctcacatgggccaagattagagtcaactgggcacctgagttcaaatctcttctcctagaccatcagtttctacaaggtagaaagtaagttactttatactctagcaagatacaatataaaacatgggctttagggacagacacagctaacactgaaggccctctcttacttgctgtgagcctgggaaagtcactctgattcatgtttctcatctgtaaaagttgaagtacctttgagaccagatgctgcttatccaacagcccttatctcctttcttgctagtagacatgactgaactttctagtctacacgactcaaaggataattcattaatctaagccactcctgatggatgatcttacttgctttgccaatgacaggagtgagatgacccatttctagcaaagccatgaggccgtatctgctggagcttccaggggaagacttccttgctttagcctcgtgccgaattcgccacccaggc

SEQ ID NO: 453119 - DNA, 1115 bp, Homo Sapiens
gctccaaggtgtaaagaatttaattttgaatatcaaaaaattgaaaattgagattgctaaaccatgtcctgatagttacagcatgtagaatattaaatgtcttcttttttaactaaagtaaaaaaatgaagaaggcatggttatttcacttgtgctgattaaaacagatgtccacgtgcaacttctgtgtgtgagcctccccatgctgccatgccaccagatgctttcccttcaccttgctaatcccactagatgttttcctcggtagaatcctagctcatgggtttccatgtgcatgtttctattgtaatgaaaattaactacaaaatctgaacgttttctgctttcagaaaattctagtgtaccatgtacagcttagatatttctttttcagttaaaaaaaatagtgcaaaaacatatctgatagtcaaggtgatagttcaagtgagttcttgtgccaaggaacacagacaagcttctcctctagctgatctgtagaaactgtatgtagtttttgggaaatattccagattttcccataagttctccactcatccagtcatcatctacagattccagctctgttattatatctccagccttgaaggaaagttcatcttcattctcccctcggaaatcatataaggctttggccttcctccccttcggtactatggccaacatactttttgcctcagctgggcagggcctcacaaacactgctgggaagatcccctccctgtcctgcagtctgcccctgcaccagtcagaatccagacgttccagaatctggatccggtctcccctcttgaatgataagtcatcactggtctctgctgtaaaactgtgaagagcttcacaccattctgccggaagactgttaacctgagagtttgagccagaatcttcttttttggttttcagtggtacctttgtgcttaaaacatttgcaccagaggtgggataatcctcaacaggctccacaaagttcagggggaaaatcccagttctgcctcgaacttctcctctggcccattcctcattcacatactctttaagaataataatttctccctctgagaaactcaactcatccttctgctctccaattcgct

SEQ ID NO: 453120 - DNA, 881 bp, Homo Sapiens
  misc_feature (116)..(116): n is a, c, g, or t
aaataccagcgtggccctcgtctgtatatttaaagaggtttcttataacagccctagtctgtggcattcctagtgagtagtaccttagtggggtttacaaaaccacttctgtcgcnggtgatgacatactctgtgtggttctgggagctaaataaaacaccgggaaatagatattaaataaaataaagaacacgcctatgtaattattgccagaaatgaaattttgcaaccctaaatttgaatgtggtctaggcacctgaagattcctgtagctaaacaaacatcatttcccagattaaaatttcaggaaagcaacgtctatcaagtgtcttatttgggtaaaatattttgaaaatgttttgactgatcacagggggaatgggaagcagatggtaagtgagacaggtgcccctaaagtccacatccccttctgaatggctccatttcctattacattagacagcaaaggccactggcccaggccaatgtcacttatgttctgctaggggacttttggccaactcagaagatattggtccttactgtggaattgttttgtgattttaaaatatagatctctttaaaccctgaaaaaatatatttttaaaaggactaattttttaaacggcagtgatccaatcaatatgattgcagtttgagcttaaggggcactattctcactcaagtctttggatttttctgtagcctttcccaaaagtgagctaatgttttgaagtgtcagttatttacttcggttctgtctggtagaaaatacacaagttgtctcatttaatcatgaaggtaactctcttaggcattttgcaggtaagaaaattgaggctctaagaggtgaagtaatttgcagaagccactggaaagtg

SEQ ID NO: 453121 - DNA, 870 bp, Homo Sapiens
  misc_feature (92)..(92): n is a, c, g, or t
gtggggcttttctccaaaacataggcccttctttaattaccccaaaatttatttaggtcctttataatttaggttgacaagagtttttcacnataccttctcaatttgacttctctactaaaaggtagttttagactgtcccattttataagtgaggaacctttgtatatcctgcccaagggtgccgtaagtatggcagagccagcacactaactcaattcctttgactccaggtccagctttcctccctatgttgtttagcacaacccagaaggagacagcagtgtctcctgagggatcccttcctttctctgtgatgcagtactgacagtaattattcactttggacactgctaccatcatggcaaatttaggccatttagataaaagggaattaactaattataataaaaggggatatattatgaaatgtataaagcactttgttccttttttctgtagtaattttgtgacctagtccttggttacagtagtgagggttcagaaacctgggagctttttgagtaaatacaaagcacaacataaaacttttatgtttgactctattcctgttcaaagctatttctgttaactaagcttatctgcgcattctagttgggaactattactacaatgttagactgctccatgtaaaactaataaatggcagtaaaaggtctcagaagcaccaagggttttgatcaggtcaggagttagaaacttaatgtcatttgtattcatttcttgaccaactgccaaagtttatatatttttaatttttctaacataccacattgtctgttgtcttaataccagttcactttttgttttctgcagaaaaatccagaggaagacaactcagggagaaca

SEQ ID NO: 453122 - DNA, 887 bp, Homo Sapiens
agaattttttccctgggacccctttcggggaattcccggccccggcctcttggggtcccttccccaaaaagtggctggggatttaccaggggggtgaggccaccggcggccccggccccatacttttctgatttttaaaattacacctgtgaagctattagtaatcaaaaatattgtggttagcataaaataggacatgtagaccaatggaccaaaataaagggcccagaaataaatacacacatttacagtcaattgatcctcaacaaagataacaagaacacacaatggggaaatggtagtttcttcaataaattgtgtcagaaaaactggatgtccgcatgcaaaagaatgaaactggacccttatctcataccatctgcaaaaatgaactcaaaatatacttagtacttaaacatgagacctgaaactgtaaaactactagaagaaaacacacgggaaaagcttcttgacagtggatctggacaataattttttggctatgaccccaaaagtacaagcaacgaaagcaaaaatatacaaaatgggattgcatcaaactaaaaagcttttgtacagcaaaggagacagtctatggaatgggagaagatatttgcaaataatacatctgataaggggttaatatccaaaatacagtcatgcatggcttaacaatgaggatactttcggagaaatgtgttgtttggtgattttgttgttcagacatcatagagtgtaatcacacaaacctagatggcatagcctacaatacacctaggctatatggtacagcctattgcttctagactacaaacctatacaccatgttactgtactgagtaggcagttataacacggtggtatttgtatatttaaacatggaaaca

SEQ ID NO: 453123 - DNA, 339 bp, Homo Sapiens
gtctgttgcttagtgtagctactttcatgaatgatgttagctacatcttctaggtagtttactacagcttctatatcagcatttgctgctttcccttgcacttttatgttatggagatggattctttctttaaatcttgtgaaccaacctctgctaccttccaacttttcttctctagcttcctcacctctctcagccttcatagaactgaagagagttagggttgctctgaattaggctttggcttaagggaacattgtggcttgtttgatcatctatccagatcacttcgtatcagcaataaggctgttttattatcattaccgggttttcctctta

SEQ ID NO: 453124 - DNA, 750 bp, Homo Sapiens
  misc_feature (83)..(83): n is a, c, g, or t
ttcagacactggaatgtcagagtcagtctctcccttgatgaggttaccaagggtgtaacagggaagtatacaaatacgcacangctagaatgtaaggcacaggccgcaggagaagtgcatggagaagggagagaaattgtacctggcctcctgaaagacgcagcctctgaaatgaatattgaagactggggaggatttaaacaggtagagacggatggaatggtaagggactttcccttcttcatattcagaaggctgtgagcagaagctagggagcctgaacatacacagggaacagtttcatttggctggaggaggggagaagtgaggtaagctgagtagtagacagggatcctatcatggaaggtcttgaataccaagctaagaaatttgagctctcttctgtggaactgggggagcagtgggtggtttttgagcaggggagtgacctaagatttgtgctttagaacaatcactctaaaaatggattgtatgatgacctggaggaaaaggctggagtgtcataacaagttaggaaactgcaataatagtctgcacaaagggctctgggggatggagtaccggctcagttgtcagaggaagcatttcttctggttggtaatatgtgaaatctaaaaaggtaaattttgacccggggcatgggtgggctcaccgtcctgtaaattccccggcaccttttgggaagccccaaaggcaagtgggaatcaacctgaagggcccgggaagttt

SEQ ID NO: 453125 - DNA, 1360 bp, Homo Sapiens
ggttaaacattttataaaaattcaagcaaaatttaaaacacagccaatttcaacatttctacaaatttaaccagcattattttggtcaaatccacctttagctgaattaatgagaacaaggacaagggacattgaagtattctcctcaccacaatggaggtttttctcactttccacactgcatagccactacatgggaaactcccaggatgatgagcaattcagtcatgctctacacttttcttttcaatgaaaagtgatgtatcttcttgttttgcttttgacaaaatatgaactaaatacaagtctataataacaagaatccaagagtagctcatacacaagtcaactatgtgtatgtttttattatttaaagcccaccattcagcttatctgtctaaagagatgataacaaacaatttgtttctttttcactaatgatactgatgaccagtcagtgttaagagagggaaagtccaagacagctgtttataatccagtccaatgacacacatataactatttcaactttcaagacttctgacttattgcctctgccctaaaacaggtcaaacactgatggcagataaaacggcacaaacccttttggcatatgaaagtttaatacaggaatgatccaggattagtccctgcaccaggtctcctcagcagcccccttggtttcttcatctgtcacgtgtgacctgtttaattcccaaatggtcaactcataactggcacacaccatatactccatttcgagtgcgtgtgaacactcctcagttaaagccacatgactgaggtaaaacagtgcatgactgtgctaggaaagaacagtattcagtgacgaacatccctttaacgttaactttcctaaagaatgtaataaaaatggaaaacttttttccttctggctgaagttggacttattggattctggttgtcagaactggtaccacttcttatctttgtatttcaacataatctcatgagcatgtttagaaaatgactctgcacttgataacatggccgcagttctttcttccagatcgccaagtttctgccctctttcatctagtgccagcctggctcgtgctaattcaccaacaactccagatgctgccccttttacgccttcaatgccaccagggccaggaatatgctgtgcaaggctccttgaagcctttcctgaggacgattctccaaatagttcttctctgtcaagagattgtgcaccacctccaaataagcctttaaagaatcccctgtttggtgcttcaggtgtttctacaggagtgaagagttcacccaacatttcctgaagattttcatcccggggaattcccggacccggtaccag

SEQ ID NO: 453126 - DNA, 921 bp, Homo Sapiens
gccaaggcttggggcttaaaaggaattagggccccttttccacattttggggcttgggcccccaggggggcccaaggtccttctggctttgagaaaagggggcctgtttatgtttagccccacttaccataaagcaaaaggggatgatgacatagaccccttgtcttttaaccacactctgcttttgcttggcctgggcagtgtcagtgcgtggccaaaggctacacaggacctccatggggtggtcgataaagtgtgaaacccaagtcagggaatactggtttcactggcatctcgagacttgagaaaggaaggtactccactctcacatccctatctatgccaaatcgtcatgtcacatattaggggcccgtcagtgcccactcttaactcagcctcataaaattcagcatcgtatttacacaaatgaaacagctcgtggtgactggggctgccctgcgctccacccctgtgcccattcactccagtccaattcctctgaaaaagacacttcagagccagcgttggccccaaaggcaggaccagaacctcctgtccaacctcaaaagcatccttgcagcaaacaagacggcttgccctctcagtctggcagagagctgggatcacacattgctgtcgacctctttgcccctgcaggcggggagctgtggaggcttcatgccaagtggcggcctcacaagcaggtggctggtggcagcagtcttgctactcatgcgattctcttctcttttcgggagagtagaatacagggttgggggtgaagggggagtggagttgcctaaattctctttttctcccctctatgtgcagtggagctttaggaaaggggacaggacaggcagctggagccacctgggcctggctctgctcctgacatccgaggaatccggaccggtccag

SEQ ID NO: 453127 - DNA, 317 bp, Homo Sapiens
ctggaccggtccggattcccgggattatttttctatgcctctgtggtttggtaaaaatctgccatgttgatatttgattcctttatctccctacattgtgtcattgttttataagccctgtgagttttacacattcatgtgttttcatgatggtgaatatacatttttcactttcatgtttgaaatgattttgggcatttcttgtagggctagtctagtagcgatgaattttctcaacattttcttgtctctgaaagttgttttttttcactcatttatgaagattttacttgctggaaaaaattcttgactgacag

SEQ ID NO: 453128 - DNA, 986 bp, Homo Sapiens
tgggtggtgttaaatgccagtgcggacatggggtggcaagggtttatcccctctgaactccgagcgtgataatttagtagtaactttgtaagtgtgaatccagattggggtttttttgtttcgaaaaaaggaattgttagattatcgccattggggaaaatttgttggggccttgtccccaccctttttttgcgggaataatggtcccctggacaactttggaacccatggacacattaaatagggttgcttcagtaatttgtccaaatgaaaggatttcataaagtgttgtgaatcacgatgtcctgtcttttttgggtgggcctttgggattctttgattctcacttagaggagaaatcatgattttcttggtattcatcagaaaataatgtatctaccaataactgtcaaacacttccagtcacctctgttatctctgttattcacttgacaatcattaattgagtctctaccatgtgcttatgattatgctaggagcagacagagatatgaaataagaattagatgagtttttggctctcaggaggcccatggttaatgggacatacagatatacaacatatggtgggatggatcactaacatatggtgagataagaagaaaaaaaggggtcagcaggatgctatgagaacaaagtaggagaagtgatgaaacaccttgccaatgtggaagacttcatggaggtaagctggaaagatattccaggtagagggaaggggatgtgttttgtcatcatgccatgttcccagaagaatgagcagctcagtgtgatagacgtaggtgaagagatgaggctggctgttcaggcaaaagacttattgaggccatccctgtgccaagctaagtagcgtagcctttataatagtgaatgacaaagagttctaagcatgaagatttcacaacaggtaaagctcatttaaattagtaggagatccgcaggaattccggaccccggtacccagc

SEQ ID NO: 453129 - DNA, 808 bp, Homo Sapiens
  misc_feature (279)..(328): n is a, c, g, or t
  misc_feature (366)..(760): n is a, c, g, or t
attaatttttaaaaattagtcagtattggttgtttatttgtcttaaatatggtatgtcccctcttcatctttttagtgttatattctatttctctatgttaaataattttaaaaattcttgatttattttgtgttgctatttattgtttgctgttgttgcatttcaagttaaaccttgcaaaaaaattatcttactcagggatattacttgcctgaaaactgggtggattaattgccctgttttgattttaggattcccctctcagattttaagctgtnnnnnnnnnnnnnnnnnnnnnnnnnnnnnnnnnnnnnnnnnnnnnnnnnngatctgaggggaatggaaggtttgcttccataggtaannnnnnnnnnnnnnnnnnnnnnnnnnnnnnnnnnnnnnnnnnnnnnnnnnnnnnnnnnnnnnnnnnnnnnnnnnnnnnnnnnnnnnnnnnnnnnnnnnnnnnnnnnnnnnnnnnnnnnnnnnnnnnnnnnnnnnnnnnnnnnnnnnnnnnnnnnnnnnnnnnnnnnnnnnnnnnnnnnnnnnnnnnnnnnnnnnnnnnnnnnnnnnnnnnnnnnnnnnnnnnnnnnnnnnnnnnnnnnnnnnnnnnnnnnnnnnnnnnnnnnnnnnnnnnnnnnnnnnnnnnnnnnnnnnnnnnnnnnnnnnnnnnnnnnnnnnnnnnnnnnnnnnnnnnnnnnnnnnnnnnnnnnnnnnnnnnnnnnnnnnnnnnnnnnnnnnnnnnnnnnnnnnnnnnnnnnnttggaggaagaaattgggcataagacaatacgaggggtgtctcctccc

SEQ ID NO: 453130 - DNA, 990 bp, Homo Sapiens
  misc_feature (21)..(21): n is a, c, g, or t
  misc_feature (76)..(392): n is a, c, g, or t
gaaggcttgggtaccggtccnggaattcctcgggattgaaagctatacattaaaaatttttattagcacacacacnnnnnnnnnnnnnnnnnnnnnnnnnnnnnnnnnnnnnnnnnnnnnnnnnnnnnnnnnnnnnnnnnnnnnnnnnnnnnnnnnnnnnnnnnnnnnnnnnnnnnnnnnnnnnnnnnnnnnnnnnnnnnnnnnnnnnnnnnnnnnnnnnnnnnnnnnnnnnnnnnnnnnnnnnnnnnnnnnnnnnnnnnnnnnnnnnnnnnnnnnnnnnnnnnnnnnnnnnnnnnnnnnnnnnnnnnnnnnnnnnnnnnnnnnnnnnnnnnnnnnnnnnnnnnnnnnnnnnnnnnnnnnnnnnnnnnnnnnnnnnnnnnnnnnnnnnnnnnttagaagacccacattcccaattcatccagctgcatcaatcgttcactgtgtttccataatcttctcaaagagctactatagtcaatttccaattatttgtgtcagtggggaacaggaacagtctgaaaactgaaacccacaaataatccatacatttaattttggtggatgcttccagccagtatgaaaatttcccactgtgaatgtcaccgttgttccctgcccctcctctgtggcaggagcaaacattaccaaaacatccccattagcagggcagaagggaaaaccagggttcgaaggatctggggacttggctaatcccggcctttatcagaccgccaaaaaatgaagccctggactgaacccctcaaagagggcattcgccccaattgttggcggcccaaagggacaagagtcggaaatttcggaacggaatccccactcccggaaaatttcccaaccctcagaaactctcggccccctctcttgacacccacccctgggaccccaacattaagacctatatattgtcagtgaacccatcttattttggcctctccaccttactcactccgccaaacacgctgtattggcctt

SEQ ID NO: 453131 - DNA, 878 bp, Homo Sapiens
  misc_feature (806)..(814): n is a, c, g, or t
acctggaagtttccacaaaaattgtactttctaaatggtagggcatttcttttttctccctttgccatgatttttgaaaaatgttcccacagcctatagcaagcttcctggaaacatcttgggtttacaaatggcattttaattggtttaacttaattggattgtaggatattgcactctccaaagaagaaagcattaagttcccctaactgttgattgttctgaatgataagcactaggtaaagagagagaagaaaggatttaacagatttttaaaaggaatgttgtattttattttctttgttctagcaaaactccgttggctaaccacaatgaccgttgttaatagcttctcatacaattgcctatatattattgctggaggagaaaaaggaatctgtttaactgtagaaaagaaaaatataacaactagcagaccttgactgacagaataacacggtcattgaaagcatatgctggaatcagattgcctgaggccaaatcctggtttaccatttactaccacctggtgaccttggacaaattacttaaactattttcatctgtaaagcatacggtcacatgttgagtccctataaggactgatgataacaattcatgtaaatacaccatacataggacatagtacgtgcttaatacaactttgctttcattattatctttctggttagtgcctaccaggtgtgatttttagagaacttttgtttagtggttggcagagactagttggagtcttatactagaatagatcatttaaacactttcctcattgaaatacccaggannnnnnnnncttaaacagctaacaaacatttgtcattgaaagtacatcccgggaatccggaccggtccagcct

SEQ ID NO: 453132 - DNA, 153 bp, Homo Sapiens
ggtccggaattcccgggatgaaagaattttaaaatgccatcctctaatacagacgtttataaaacttaaatgaaatgattgggcttgaccatatgcaagaaagtctgcagaaaataaatcacctagaaactataaatagaaatgtgctgctga

SEQ ID NO: 453133 - DNA, 1107 bp, Homo Sapiens
tttattgttgttttcggtgtgcttgttgggctcccccccgcactgggacggaccggaattcccggatccaagttgcgggtcatggagtcccgaaccctcctcctgctgttctcgggagccgtggccctgatccagacctgggcagattacaattacaatcaaggcagaaatgatctcatttttacattacaactctggaaaaggcaatagactgagatgcaagtgtgcccccaagtgatgggcagaaggagagaaggtgttttggatgcattctagaacacaggtaatctaaggagagttgatcaaggccgtggaagagtcctccagccactattggccatcaaaggagtcctctgtgtcccaggaatggtcctgctttggtgtccctggtgtgacccatcacccgctgggaacagcctgagaagaagtagggcctctgcaccaatgctgctgaggatgtcagagcacaggaacgaggccttgggaaattacctggaaatgcgactgaaatcttccttcctgaggggtctgggctcttggaaatcaaaccctctccggttgggtggctgagacgattctcctcacacttacaatgggaacaagggggtaacgaggagggcccccaagggcatcccctggggttcccacacgaacctcccgcctaacccctcattggggggaccaccgaacctatgcctttcctccctgggggaatccaggaatccacttacccctgtgaccccggaaaaacagaggggggaactccctctattcaccaccccccctgggatctcctgggcacacccttaaccggtcccccaatccccccctgtttggcacacctgatccaacggtcgtaattttctcacctagggcccacttcacccttggccctccccctttttaccgaggtagccgcccccctgtgtaagaatccccacggggactccttgtaaacccctcgatagaaaaagggagaggtcctgtgatcgggaaataccaagtggcgagaaaactcccccaattcaacccaggttgtttgagctcgataaagcagcacgtggaaacattaaattaggggagcgaatatctctccaactttcccaa

SEQ ID NO: 453134 - DNA, 1320 bp, Homo Sapiens
agccggaccagattcaccggcaggcgggaaggttggcagcgtggatggcacggctacgacaacgagctcatggacatgcggggcatcttcctggccttcggacctgatttcaaatccaacttcagagctgctcctatcaggtcggtggacgtctacaatgtcatgtgcaatgtggtgggcatcaccccgctgcccaacaacggatcctggtccagggtgatgtgcatgctgaagggccgcgccggcactgccccgcctgtctggcccagccactgtgccctggcactgattcttctcttcctgcttgcataactgatcatattgcttgtctcagaaaaaaacaccatcagcaaagtgggcctccaaagccagatgattttcattttatgtgtgaataatagcttcattaacacaatcaagaccatgcacattgtaaatacattattcttggataattctatacataaaagttcctacttgttaaaaaagatacaaaccttgtttttccagaaggtaggaaaatcctagctttccatttgttcagttatatgtcattttctcctttcttttcacgttactcaggatgaactctctgagcagggacctgctcctgcagcaaccaaacttggagtggttattgcagacagacgtggctctgggcccctctctgtcccaccttgcacaaaggaccccctcagaccaggcccttgtctgtgccctgtccacacccaggagccatcctcagtgtctgtggccacaatcctgtactgttccttccatccctgataaaaggaggtctacatgaaagcaaaagctactgtctatttctgacccagctcatggaattttttcatcttatactgagctccagaaaggacgtaacttagcatggatcaccaatcaatcaaaaaataaataaatcactaaggattggagaactcatagaacaaggtgaaagacatgagtgccctcccaaagtctgagtgcacgaaaatttctctcttgccttgaggagcagaaaagcttctgatggacatgggcttctgtgagacttatcacacatagtgtatcgtggcatgaagcccggcacatagcaggccctgcatattgatggaacaatggatgggctgcctgccttccctgtccgttcacctgtgcaaaggcttcctcagacatgccactctgtgggctccaatatagggtgcagacaagagccatcccctgaacatgacattatagcctggggaaaggcctgggctcactggattgagaatgggggaggccatcaccaaaggaatctccggtgggggttgcctcaaa

SEQ ID NO: 453135 - DNA, 905 bp, Homo Sapiens
ggacggtgcccaaagggccctataggtctttaaatattaccggacttcctctgtttggggggccccctctttttacaaaagaaaagctttgggttccgcgttaaggcttgggccccccggaggggattatttaagaggcggccgcccctttttaaatgttacgaggagatgttaaataggctggggcggttgtttcctcaataagattattagtataaaaggggagataggtaggagtagcgtggtaagggtgatgagtgagagcaggagagtgtctcagttggaagcaagcacagcagtcaccactacttcattcaatgacgtcaagatttattcaaaagcattggcctggggagtgtagggaacctggactaagacaaggaatggggcacagcttggagaaaaaggggagagtctcagggcagaaatagagcatcagccttaggaattatttattgtggcatcagaccaatgactacaaggacatcagcatgcaaggggcggtgttagcccccgggagtgagcagctgtcttcagatgaactttcagaccacgtcatgctggaagcagaactctcacatggagcagtcagggatttgattgagtgtggttggatgtatgtgcttaaataggaagagaaagtctaagggacagtgtgtgtgaagtgaaatgtgaatgttttatttgaactccctgcagttctccccctccctgcagcatctgggaccctccgctgttgaagacagtggttgatgatggggaacagcaaagggcaagcaagtggtcaaattactttctctccacatttcagagaatgcactgactaaggatctggacaatctctgacctatcaatgcagggggtggctcttgggatccgcagggaattcccggacccggtaccag

SEQ ID NO: 453136 - DNA, 853 bp, Homo Sapiens
  misc_feature (141)..(141): n is a, c, g, or t
cccccatttagggcaacaagggcccccgtttccaccctggattggccaccttgaaggttaggggccttgtcccaactgggccctgggtgggccctggggagttcctccccaaatggcacccatagtatacggggcaggagnggtggaagggcacttcgaggaaaaccccaggtctgttgtatgtttttgcttagaccaggccctccacaagcagaaggggatgaaggtgacgataatgagaacgatggagcccaggacgaccccgacaatcagatagggcaggtcgctggagcgagccaccatggccccagtgcccaccggccgctctatggtttcaggaaggggcggctgtggtggggccagagttgggggttgcatttgaccaggctggccagaagatttccgagctttggtctcacagatcatcacgttgctgaactcgctctcccctccttcattgaagcactgcatcttaatgtcgtaggaggtctctggctgcaggtggctgatggagtgccagtacttgtccccttccaccatatccttcttgtagtcactatcattgtcactgtctgtgggtcgataatagatataaaagccatggattggggtgttgttgttacttgctgggatgtacatccacttgagcatgatggtggtctcattgaccgcatccgtgaaggtgatataaggacctgccacgggcctctcgtacacgcgaccgctgtagcccgacaccacgtagggccgagagggggcgctgggctcgctctcccccagcatgttcatagcccggactcgaaacttgtaggaggtgcctttctctaggcccgtgatctccacggacagccgc

SEQ ID NO: 453137 - DNA, 859 bp, Homo Sapiens
  misc_feature (573)..(626): n is a, c, g, or t
ttaggagcaaatatgggtttagaaagataaggaatttgcccaaaagtcagtgaattttgttaggagcttggattagagcctacttaattgcctcagcatgtttcatacagtgaatatctgttacaaattcattaggtatttattaaaagcagacctttataaaagtatctgatattactagctgttggtttaggaactgatactaaaaagtaagaaaataccttcacattttataattgaatgtggctttgacccaatgtggtaggatctatgatggtgcttgtttattagtcaggcttttggggactgaactatctttcaaagaatctttatatatgaactctgttaaattatattagcagtagtggtacctctatattataaaatatatagtatttttgaaaacagaaaccccataatttgcatttttaatgaataacttacctgcttctggtattttaacaggctccagatttggcagaaattctcccttgacattaggaccatctccacgttcacccccagtctttgaccgagtcagttcccagagataggctgccaggcctagcactnnnnnnnnnnnnnnnnnnnnnnnnnnnnnnnnnnnnnnnnnnnnnnnnnnnnnngaatgataatattcactccctcaatgttatgaaataaaagcctataggctagtgtggtaatacacgcaatgcataagaatttcaagaacattatttcaggactcttaccagaaaaagaaaacaaaattttccaaatcttatcacccttttcttttcccacaactgccccagacagattagttgaaccctctgtaggtatatgatcccgaggaattccggaccccggtaccagc

SEQ ID NO: 453138 - DNA, 569 bp, Homo Sapiens
  misc_feature (118)..(118): n is a, c, g, or t
cccattattccaggtgggacttttccccttcttttttaaccccagtgttcttggcccccccaatatattttgaaaacaccccttgggaatccccaacccccaccctcccaagccttcntggctccctgctgcgaaagatttgctaagtcctgtctccccccctcagtgtaaagtctctgcctccctttgcagatgctgtccctttggtaattgaaggcctgttatgacctggagggagttgggggatggattctgcgtttacgtggagggcataccttgcaaggtctcaagcaatgcaaatgttagcccttaatgggacacacaggccactcctgtaggctcagagggttggaggcatctagggagtcaagatttccatgttcactggccccggtatcctggccctggtgttcagagacctgagcttgccatggcagatttgctgaggttatgaattcagtcttctctggggccccacgaccctgacaagaaagtagtacctccacttctcagcttcttctgtcctccagtcaaagtagagaataatcctgagattttgccaaggaggg

SEQ ID NO: 453139 - DNA, 494 bp, Homo Sapiens
  misc_feature (455)..(455): n is a, c, g, or t
gtaagttccaaatgatcatgttttgtggcactgtcttcgtaaagtggccgctggtgtgatggaaagcattgctaaactcaagtgagacaactgctgttttgctttggattttccctgtgaaaagagaagccactgcctgttcgtcttgttagaaagacaagactttgaatgaagttccagactttgaatgaagttccagactttgaatgaagctggttgttgcccagagtagaagattcaggcacctacagcaactcacagcaactcctaactcttaggagggctccctcctattggccgtgaagctgcaaaccagcctctctcttttccctggatcttccttgcccctagttctgagccccagcccagaggcaggcctcatggctaataaaccagctagaggacagctgggggcctgtgggctcccttctccatgtttggcctttcccttgtgnccccttgtcccccggtaaggaagtgccctttataattac

SEQ ID NO: 453140 - DNA, 524 bp, Homo Sapiens
  misc_feature (358)..(372): n is a, c, g, or t
ctgtgaacaccagctaaagaaagtttacaaagaagaaatagagaaacttcaagtaaggcaattaaatgaacaaattaagagctaagaaacaacaagatggggtattgaggttgtagttatggcagctaatgatagaatggatccaggcagagagttcaggcagaactgtatttgcagagagtagaagtctgagggtgaaggtgtcctaaatgaggccaatttggaagactttattttattatagaatcaaagacaacgcacgggaacacaccatgccaaacccaaacaggctaagctggtgctctgtgcaaaggtatataggtttacgggaagaaaagctaccattataacatcaagnnnnnnnnnnnnnnnaaattaaaagaatcacaaatgtggcagttctagtcagggttaaagttaaagttatatttgaggtttggttggtggatgtcacaaagcaaaaagtttgttgccaagaagtgggtgttctagtttgtatccgagagaatccggaccggtaccag

SEQ ID NO: 453141 - DNA, 945 bp, Homo Sapiens
  misc_feature (66)..(66): n is a, c, g, or t
tgaggggttggtgtttaccccccaaagagaccccataaaggccccaccccgtttcttgtttaaaanaattaggggtttattttcaaaccagtttgtttccccaagattgagggaaggcttccccagagtttctaagagccagagtttttggttagctgaaaaactccaaccttatgtctcctatgggctccaaggtcccaaggtccattttcttaatttataattcctttcttttaccaagtcatctgtgacttctgatagggaggaaacacttcccaaaaaagctttggattgcacagagcagaagacacaggcacaaatggaatcatcaattgacttcactgtcatcaagaaaatgaccagtttcttgagggtaagggtagcatatcatttaccatcttattcccagtgttttggataatatttgacacacaagagggatacaatatgctattattgaatgattccatttattcataattgtcaaacgcatgaacaaatgaatggatgaacacaacgctgactccccagtggaaaatataggagttcatgaggaaaatgctggaggttattgatcatgcaagtaggataaacacataatggcaaaattttgttacatttaagaaaatgtacaaatcttaatacagaatctgaaattttaaggatatggtattatgtctctttaagacataatattttgtggagcaaaatttgttctggttataaagttttatttttgaaaataaattgggcttctccattttaatcctaattttcctgtgtttgaaatcaggcacattcttatcactgtgaatagatagagggctggatgagggagaattcaaaggatcaaataaagagagctcagttaaaacaaaaagaatggagacagcaccatgcgttaagagcaaagcagaaattccagagaatccggaccggtaccag

SEQ ID NO: 453142 - DNA, 842 bp, Homo Sapiens
  misc_feature (221)..(221): n is a, c, g, or t
atgcgcaaataggggttatggaattattaattcccttttcctggggtccttcggggaaggggcaggatttcgaatttcattttggaatgattctccaaaaaaatctaccctttgaggggtctttcatgaaatgtaagggcttaaacccaaatggtatggaattatattcctttttccttttgtatctctgtgaggggcagatttatttcatttgacccatncattcatttgaccagagaccattcatttggaatgctctcaaaaatctaccctcgaggttcttcatgaatgtaaggcttaccccaaaaggccttcctggccttcttgataaaccctgacacctagtttctaataatctgagatttggtggcaaagtctctggtttcctgatccttgcctttcatagtttgtatattttatgcattggctaattttccttggacgtaaaactggttgggcaaactatagaatactaagcaaggttaaaaaaattaaagaagcaaaatagtggcatagcgtgaaagcaatggagaaagtcacttgaggcctaaaataattaacagctgtatcctatatatcctatgtctgtatctcccacatatatcccattattccaggaagtttacttttaaataggatactgaactggccttcccccaccactccatcatcatgcatcttttggctggatacgatagctgagaagcaggcagctgcactgcctgatttcttgagacttcttgttggttagacaaaatatccacagctcttgacttgagcttcactggtgttaccctgtttgacttcatgcaggcagtcatgtctgatgtaccttttctttt

SEQ ID NO: 453143 - DNA, 947 bp, Homo Sapiens
  misc_feature (858)..(858): n is a, c, g, or t
agcttttttcttttgttcccctaaaaaacagggcttaaaaattgtttccttaaccaaaaaaaggaggcctggggggatctgaacttgatttaggataaggggaattataaaaggtggtttttttgacccttctaaatattcaaatttgttaggtcaaaattcctttttaaggcaaaaaagctgattggtggtgtctgcaactggagaaaaatgatagcaatctctttttggaccaagggcatgaaccaggaggcatgcaacactccaaaataataatcctgcttttatctgtcaaaagccatcttctacttctctgaaactgtggttagtcatcctgacacttcttgttttcctaccctgctgccagaactgcttttctagttgaacagactgtgaccaaactcaccaaagaaacatggcaagcagttgatatgagaaaagagactgatactaacttacttatcacagcctatttctttggcaaaaaatcagtggatttctgaggtcacttccagaaattatgcctctaaaagtaagtgtcagtagtccttggtcatcagctagttttttaatgtcctcctgctggtgtctggggaattagaatgtttgtgttggatgagactccagagagcatttggctcaactcccttgttttggagataaggaaaggtagcttcatggtatggtggcaagatccagagctgatggctgcagtcagctcacaggccagagctctttgcagctcagcaaatggcctcccattccttctccatttgtcaggtttccctcccttacttacacccacttttttcagtctctcacttgaaacagacaaaatgacaaaagggaggggaagantaacaacatgaataaacatattttggggtgagtatgcactgtgcactatagagtatacatccgcgggaattccggaccccggtaccagc

SEQ ID NO: 453144 - DNA, 910 bp, Homo Sapiens
ggctggaccggtccggattcccgggatgattgttttatgtcttaagtggaaataatatatatgatgtgtctgcctgtagcggctacacagtagcagtcattactattaatattccaacagtctagaatgttctgcttctggaagcagcaccaacagaaactgatcagcgtaaggagggtcatgatagcagaaaagagcattttactcttcatagttgagtcactcactctttccattaggcattatttcattgtatcacaagcccaaaacctttttatggggctaggaaaactctattaagtatttttaggtaaaaaccagacttgtgtgcttctaatattagattgccttaatcagactttggaaccaaatgtgtgtcttttcccaccacccagcttcatttcagcttttgcaggctaggacctacccaaggctcctggccatccttacttacaaccctgtctctggtgggtgtcgattttatgctagaaattcttcatacactacccctttcccgtccgctgtgtgggcttggccacctgggattccacaaacagttgcctgggccctaggttatgaccaccccatgacccggtaagcaacattcccaaaccgaagagtatagggcgactttctcaacttccctggacagcccaagggaatgttggaagagaaattccccaccaagaagcccccccagtccctaggggccaagtcctaccttattcccacccccccatgttcctcccttggaggggagtaaaaatggaaaagccatgggcccggggggggtgaacagggacctgaatatttcaaaccccttagtgtgcctcccgttttaaaatgttgttttaaaggcctactgtggatatttttaaccgcaaagccacgcgtagacccacctgctcag

SEQ ID NO: 453145 - DNA, 863 bp, Homo Sapiens
  misc_feature (79)..(88): n is a, c, g, or t
  misc_feature (581)..(610): n is a, c, g, or t
  misc_feature (629)..(756): n is a, c, g, or t
aagcatctttttcacataataactttttttgttctgggtagataccggtagtgggattgatggataaaatggtagtccnnnnnnnnnncataggtttttggggagcaggtggtatttggttacatgagtaagttttttagtggtgatttgtgagattttggtgtacccgtcacccgagcagtatacactgaatccagtgtgtagtctttacctaagtagtatactaaattataacataaattaactcatggtgcattaataaccacatagcagaaatcctgcattgatgatttatgcatttttatggaaatgcaacatttactaacaattgggattacaaggtcttcactgtttgctaagaaggcaaaaactgctgagatttgagggaaaagaagatttatgaataaacagagaaaggcggagttccactctaatcaacaccctagattctaccacttgaatttcttctaatatgggaaggatagtttaagttctacaattatatacgttaaaagagattgtttagttcttcgcttggtatgatcagagagaacaaaatgtcagtatgattcggtaattcnnnnnnnnnnnnnnnnnnnnnnnnnnnnnngagacagagtctcattctnnnnnnnnnnnnnnnnnnnnnnnnnnnnnnnnnnnnnnnnnnnnnnnnnnnnnnnnnnnnnnnnnnnnnnnnnnnnnnnnnnnnnnnnnnnnnnnnnnnnnnnnnnnnnnnnnnnnnnnnnnnnnnnnggctacttttggaatttttaagggggaaacaggggtttctcccaggttgggtcagggctgggtcctcaaaactcccggaacctccaggggggaatcctgccctgcca

SEQ ID NO: 453146 - DNA, 911 bp, Homo Sapiens
  misc_feature (202)..(202): n is a, c, g, or t
ggggggttcctgttccattcacattcgggttggggtttgggttttccccccgggaaatttttcaagccgggggcttttagttctaatttcaaaggatggaggggactttcttcgttttggaccagtagccattttgaaattcaaaaaaatggtgagcttttcttggcccactttggttcccctaaaagcagccccaggccgncagtggcccctggttaggtccttcatctcccttaggagagggagataaacagttactcctgctgagccattcagacaagggaatggcagcagattattttgttacctctttcccatctcattctgtctaaaaaactggatgttgctgctactgtctgcaagctctgggtattgctccacgggaagcacgtaatatccctcgtacccttgcacgcgcccggtgctcagaagctgctgcttctcgccctcagtccacaggcggctcccctctctcccgtccctggctttctgctgctccttggcccaggccgtgcccagggccctctgtctcgcctggtccaggacgcgggccttctcttcgtccagggtgtcgggggtgaggccatagcggatgctgagcagcagcgtggagtactggaactcaatgttcgtgaaccttcgagtcctgccgttgaccagcagcgtgggctgggacacggtcacgttcaccccgctctctagcaccttgcggccgatggtggtgcctagtgtgaccaggtcgccatcggctgagccaatcttcacaaagtagtgggtgtccttgccctcgatgctgtagtgcatcttgtccaggtagtaggcgttgttcagcacagatgccaccttgcggctatcttcgctggcgatgctggacacgcccgtggtcacccgcccttctttgatggcaaaca

SEQ ID NO: 453147 - DNA, 937 bp, Homo Sapiens
  misc_feature (241)..(269): n is a, c, g, or t
  misc_feature (405)..(405): n is a, c, g, or t
gctttcgttaattttagtactcgccagttcgctattccacgatttgtcggagaaatgtcgggccgtggctggaacagttcgtcgcgcccaatcggacaattctgtctcacttgtgggaagggggcttgcgaatcaagcagttgtggcttcatcccgcccattcattcgcgttccgctgaacacgacgcacggcaaacgataggtttaaatgaaattgctcactaccaaatcaagactcttnnnnnnnnnnnnnnnnnnnnnnnnnnnnngtcataacactttcacgtgtgacagcctaaggtttctttagttttaggatggggtggggtgggagtggttttgcatgtttgaccaggatgtgatgcctgtctttattccttgataagaagtagctgttacagcatnttcaagcaaattattttaggtagaatagaacttactgcccaatgattatttatttaggaaaaattatttctccaacttttcgaattcacgatttttctaagtgcatagagtagttttttacattgtcgacgaaattccttgatacctttttttaaaatggaaaatatatggacgagtttcttacaaaataggttctacacatgccatgtttagtgggcagattgaaacggatgctgagtctgaagatgctctggtgtgatgaaggagtaggtgaccgagcagctattcggctagcggggcgactttgaaaagggcgggaaccgggacggggcgggagcggagggagtgggagcccgccccccgcgccagcggattgagcggactgcctctgactctgcgccgggatggatttgcgtccccgcacgacacccccgcacgtgcgcgggcccggcgggctggcctgcgggcagtggtgcaagggctcgcgtgaaacaagtagcggtgagagtcggcgctgcggggtatcgaggag

SEQ ID NO: 453148 - DNA, 1160 bp, Homo Sapiens
  misc_feature (557)..(659): n is a, c, g, or t
ttttggtggggtggtcgggtgccccccacggggttgcttttcgcccactctctgggcccccaaacttaagtaatttgggagaattttttccccaatacggggggatttcccagggaggggggtggaacacccacaaaaccgtggggattaaggccattggattttttggggtaaaaaggcacgccaaagtggggggggtctgggacacttaaatttggtggtaatacatggaggggaacggatctggtaataaaggtttttttaccaatcgttgcggaataaccatcactggtttggcaatgggccctttggagaaagttattaaaatttttcaaattggaacgtggaacaaataattaattggaataaaaaggtagcaaggctggccccaaggttgtggtgggctcaccactgggtaatcaccaaatactttggggaggctgaggccaggagggatggcttgaggccaagagtttgcgataggccttgaaaacaaagggagtcaccatccctacagaaaaatacatgaattagccctagtgtgggggcatgttctnnnnnnnnnnnnnnnnnnnnnnnnnnnnnnnnnnnnnnnnnnnnnnnnnnnnnnnnnnnnnnnnnnnnnnnnnnnnnnnnnnnnnnnnnnnnnnnnnnnnnnntgacagagtgagaccttgtctcagaacaacaaaaaaagtagcagctaacatcaactgaccttttacctggtgcctattgataccatagtttaatttcttataactgtttcttatttcacttaccaactctgtcttcagttactcccagatttttactgtgtgtgtacagatgaccttttgtttagattgcattgtctccccagaagtaagattactgtgagtcatggtgaataggacattctcattacccttgatgtaaattgacaaggttttggatgcctcccagctatcctcttagcactctgggaggctaagagaggaggattgcttgaggccaagagttgaggaggcagtatggcagtatgctgagaccccgtctgtatttatttaagaaattatccggagaattccggaccggaccagctgctgcttgcgggtctcggggcgggtccgtctcttggctccgttcccggactccgtgcccgctcgccgtgcccccgc

SEQ ID NO: 453149 - DNA, 555 bp, Homo Sapiens
  misc_feature (80)..(178): n is a, c, g, or t
aaaaaattgcactaatggcaacacaaaatggtagtaatgatcataaaaacaccaataggttattatgtattaaaattacnnnnnnnnnnnnnnnnnnnnnnnnnnnnnnnnnnnnnnnnnnnnnnnnnnnnnnnnnnnnnnnnnnnnnnnnnnnnnnnnnnnnnnnnnnnnnnnnnnnaatgcacatagtgtctgtgtgctggacaacgcacaggggtagtgagcctttggcccagtgtctcacagggaggagggcgggggatggtggggacaactggtagagtgggtggcatgaccaaaggctttctcacgtgttacattagcagggttattccacagatgccacggagtaaagacagaatggtactggtagtctttatgtattcattaaactaacccacacaataaaaacatctacaccaaaaacaagatcattcagaaaaagtgatttttccactcttcaaatttgcctctagaatgacttctgatattctgtaagcagagagagtgatcagtgggctaggtgcagatcgcaagaattccggaccggtccag

SEQ ID NO: 453150 - DNA, 526 bp, Homo Sapiens
  misc_feature (17)..(17): n is a, c, g, or t
  misc_feature (33)..(33): n is a, c, g, or t
taattttaaggcggttnggcactgagagtagcngaaatcctgcaaggcttatagtcccttagactcaccttgtcgattctctgagtaaagtcttgatttcaataattgtgcttctcatgccctgaatctgctggagaggagtgttgttattttcaggtaacaacattcgttagcacaaatatttcagaccaatattagtgctctccgaccccaccttttgttatcattttcatttcaatttctctcattcttttttattttggaaaatcatattgctatagtgtgtactttaatctgccagcagataccatctacactaacatttgtcccacagcatcctcaagagaaaaagttgttgcaccttatatatatctcaagcaaaccaaaatatgatgctcttctgctttgttttattctaaattgttgtatcatatctttctgaaaccattctgaatttagttgaaattatcaatatttatgcttttaaccttaatttctggattcaagcctgtatataaatcttttg

SEQ ID NO: 453151 - DNA, 915 bp, Homo Sapiens
aggaaaccctggggtgcaagggtggaaaggagggctgttcagattggcccaaaggggttagaaaaaaaggtggacccgcggaaaaatttaagccaagggcggggatttaatttggggtgaccccgaaaagttagtccgaatggaattgtttttgcaaagactgcgggcattgggcattatgtgggaggttttggagcaagtgagaaggggaaggtggacaaattttccgaatgcagaaataagttttggagattatttattatagataattggccattgggctagataaaagccgtaagttttactcctgagctgtgggctgcagcataactttctcccaaaaagtaaggtattgaagaggaaaaacagagtaactttgtagtgcactaacctgacaaacattaccttagccaggtgatcaatgtaaacatcaattgtaataattaatgttggtagtacacactgtgttgttgacataaggtaataatactttttataaaatggcactttatctctgtggtctatcactaaaaaacccatatttaataatgataaaaggaaaaaagactagacaaatcccaactgaaggacattatacaaaatactaggccagtactcttaaaactgtcaaggtcattaataacaaggaaaatctgaggaactattacagccaagacaagcttcgagagacataatgactaaatgccatgtagtaatctcaataatatcttaaaatagcaaaaggatatcaggtaaaatataagaaaatctaaactatggacttcagttatcaatattggttcattaattataaaaatgtgccatataacataaggtgttaatagagaaaactagatttagggtgtatgggaactcggtaaatctcgaaatatcgaagaatccggaccggtccag

SEQ ID NO: 453152 - DNA, 933 bp, Homo Sapiens
gctggaccggtccggattcccgggatcacagggagacccatgacaagacacattataatcagagattcaaaagttaaaacaccgagaatcttgaagtcagcaagaaaaaagtgacttagcatgtacaagtttacccctgcaggatgaccagcagatgtctcagcaaaaaaacttacaggtaagaggttgtaggatgacatactcaaagtgctgaaaaaatggcaagtaccagccaagaacactatgtctgccaaaactatcatttcaaatgaattaaaaaataaaaataaagaatattcaagatcaacaaaaactgtataaatttatacccactaggcctgtcttaaaaaatgctaaatagtcattcacattaaaaaatgaaataatgatgagagcaacacaaaattatgtaaaatatgacattttctaatagagaaaattatgtacacaatcataatattctttgtaattataatgaagatgcacagaatactttaattctgttatatatttgagacaacaaagacttaaaaatgactataaatctgtgccaacagattcacaacacaaaatgatataatttgtgacatcaataaaacacatagggagccataaagaggcagggttttatatgtaatagtagttattcttggtaatatctatagtaacaacaaagaaaaatacctacagttcttaggattttgagactagtctgggtaacatggaaaaaaccctggtctctatgcaaaataacaactgttagcccaagagtagtgggggcaccatcttgtggtccccccagtactcaaaaaggcctttgcgtggcgaagaattggtttgaattttgaccctgaaaagggcagagccttgaagtaaagccggagaattggtggccactgcaactcccagccctgggttgaaccgaaccaagaa

SEQ ID NO: 453153 - DNA, 586 bp, Homo Sapiens
ctggaggggggaaagcccttgtggttggggggcatgaatttcagagttgtgccgtggaagggtcccctgtggcaggagaacaggtggagagcagacgccgaggggccgctgtccaggcaggagtgatggagcatggctggtggggacttcagacacatgtgcaaggttctgaggatgcctgggtgctggccatgtggcaaggtggaaggcagtgcctatgactggacagctgggagggagcccactgtggtgatggggagggtagactagcaggtctgtttgggtatgctgacttgggggcactcaaggggagctgtcagggaggccattgggtggaagcaattccagagacaaaccgctgctccctaaaggaaaaggagagtgcctttgcctttcaacctgagctccatgtggtcctctggcccagcctgctaggcagcctcgccctgctccccacgtgatgtcacacaggtgtcacaaaatgaacatctgaaaccagagcttcattttcctagatttcctagcctttctccttacagtgaacgtcaccaacacccacccagtatgctgaaacctggcatcatcc

SEQ ID NO: 453154 - DNA, 1108 bp, Homo Sapiens
  misc_feature (307)..(307): n is a, c, g, or t
  misc_feature (309)..(309): n is a, c, g, or t
  misc_feature (315)..(315): n is a, c, g, or t
  misc_feature (975)..(975): n is a, c, g, or t
atcatgtgcttgcaaacaaagatttcctatgccactaaactcaataagtgagaggcttgcacattatttcattttgctatagctacgatacatatcaaatgacagctactcctggtccctcatttgtatgttaaattccttgttaattttatgacaagattgttgatcttggatttcactttcattaccgtcttagaaacaaattggatttttctgctcccagatgccactagagtagctttgtaaagctcatttttcttatctttacttagtttctgtctctaactttagtttcctttttcaggcntntccccntggaccttaaatgtgggtccttaacctccaaattatccttttaaaagagggggacaccgctccccgccccggcgcggcgtgccgagaggcgcgattgtgccgctgtggcgcggacgaacgcagaccggggtaccgacggcggtcgacggaccgctcggccggacaggccgagcgtgccggcgccgggcggccatgaggccggatggtcggcacgggggcggcggcgcagcgcgaaaagaacgggcgtcccggtgctgcttggccgggtgcgggggggtggaaggctcgcgcccctatatgaaatggcagacgcgcgcgtcccccgcgcagcggcaccgcaagtgtagcggcggcaagctagccgctgaacgaacgcgcgaggcggcattccatcaggctgactcttatcaactacctagcgacgcgagactcaggtggggagccacacgggcaccgggcctagcgtgcccgctgtgggacatcgcatagggtcacggcgcgccgcgccggccgggggaagcccaccagcgcgggagacccgcgcggctgacacgagaatgatgcacgactagagcgcattctctcctacctgatcgccagcgcacacatgccgcgcactacgtcgccgtcggcgcaccgggacggagcatcgatcgaggncgatcgtaccacaagctaacggcgccgtgctcagctgagatacgacgagggctgaacctggcggcgagtgcaagcggcgaaggatgtacagagaagcacatcgacgtgtggcgtgggtcctccgtgtctagtg

SEQ ID NO: 453155 - DNA, 1620 bp, Homo Sapiens
atgagaaacaggaggatccttttctggtgaatataggttcctgctttaagaatgtggaaatccattgctttatataactaatatacacacagattaattaaaattgtgagaaataattcacacatgacaagtaggtaacatgcatgagttttgaatttttttaaaaacccaactgtttgacaaaatataggaacccaaattgggtacttttcttaggaccagtgtaacctcacacctcagttttgcttttccaaccctgacttgaaaggcatatttgtatctttttattagtgatagtgaagctgtgacactaaccttttatacaaaagagtaaagaaagaaaaactacagcgattaagatgagaacagttctgcagttgttgaactagatcacagcattgtaggcagaataaaaaatgttcatatctgagaatattcctttcgccatcttttcccaaggccagacctcctggtggagcacagttaaaagtaacattctgggcctttgtaatcggagggctgtgtctccagctggcagcctttgttttaatatataatgcaggactgtggaaaacagttggcatagaatattttcacctaaaaaagaaagaaaagacatacaaaactggattaattgcaaaaagagaatacagtaaaataccatataactggacaaagctagaagaacctttagaagatttgtctgaaaacagatttcaagagtgagcttttatacacctgctcactaatttgcttgattactaccaactcttcttaaagttaacacgtttaaataaggtatttctggacttcctagcctttcagcaagcttagaggaactagccattagctagtgatgtaaaaatattttggggactgatgcccttaaaggttatgcccttgaaagttcttaccttttctctagtgatattaaggaacgagtgggtagtgttctcagggtgaccagctgccctaaagtgcctgggattgagggtttccctggatgcgggactttccctggatacaaaacttttagcagagttttgtatatatgtggatttttctgataagtagcacatcagaggccttaaccactgcccaaaagcgattctccattgagagtacatatcttgaacttaagaaattcatttgctctgatttttaatcttgtaaagtttttgctaaactcaaaacaagtcccaggcacaccagaaggagctgaccaccttaggtgttcttgtgatttatccttacttccctatgttgtcatagttgcttctaaactcagctgcactatggctgtcaacatttctgatacttattgggatatgtgccatccagtcatttagtactttgaatgggacatgagatttataacacaggtaatagctgaaggtaccagtatggtgggtgagactcacacttagtgatccaggctaaggtaactgatgttataatggaacagagaagaggccaactagatagctaagttcttctgaacctatgggtatatggaagtaacaaatcatgcggtccttatgggggttaaaacttaatctgaaaatttacattttttcataggaaaaagggaaacccattggttggcaaaattttcttttt

SEQ ID NO: 453156 - DNA, 1337 bp, Homo Sapiens
  misc_feature (97)..(97): n is a, c, g, or t
  misc_feature (277)..(285): n is a, c, g, or t
  misc_feature (365)..(365): n is a, c, g, or t
  misc_feature (1060)..(1093): n is a, c, g, or t
ggggttagaaggagtttttgcgcggattacacccttttaaaggggtgtccaccatgcaatttgagaggaatatttttgtttccccccaccacacaangaattggtggggtgaagacacacccaaagggtgtatgttttcctattttttgcacaccgattctcaaaaaggttccacagggtttttctcggacaatttagggaggtttgaaggtggtgcacagggggaaccgggggtctccccttatagacaagtgttttcccaaaaagagattgtggnnnnnnnnnttatggccaacatcccccatgataaggagggctcccacaagagaagaggcccccttggggaaaaagaagcgccccctctngactcaccccggggggaaaaatcagattttccctcccatttcggaagggagacagtatgtaaatgttttttaacgcgtggggagggttttcccctttcacagaggggggtgtgtgccgaagaggtcctctttggggggggccccccccaggggccaaaagaaaaaggaaagggttaaatattccaccctcttgggggggtctttccccttgggcaatgttgtggaaggcttgatttggccccaaaagggccaactgtttttgggtggggttcttgcaccaggccttcacccccccaggcaggagggaaagtgccggttcttagccctttacctcaagatgaccctttttggaaaaaggtctgatttccaaatctttccttctgatgagttcggtttgaatttggtatccatttttctaaattaaaaatatagcttaaaacataggtactactgtgtcatcaaaattcctttggacctgggctgcattcagagacttacctgaaaagggaagaaagtgctcaatatatactctttgtattaggctattggaaatgaataaattcagaatatggacctagagcaacatgacaatactagatgccagctgtagtcatatgttttttaaaaagtcaaaagctgctttctccttttcgtgaaaagggctgaactttggtggtcatcaaatctaacccttnnnnnnnnnnnnnnnnnnnnnnnnnnnnnnnnnnactgcagccccatagtcagccattccttcctaagcgcaggtgtcaactcagggcagggattatttttttatacagccccaagctcccacctgtaaaccttaagagctctgcatgggcaataaataaacagatgaaagtaaccgtccacagtggatcgttgtgtaagaaaaagttttccacagagatccagggaatccggaccgtaccagcttgttttttaagcgggcggggtaggtcgtttttc

SEQ ID NO: 453157 - DNA, 1173 bp, Homo Sapiens
  misc_feature (625)..(992): n is a, c, g, or t
acgccccaagtcctacaatcctgtacgtggctaattctgtcactcacagccatcagcaaagagtgcaaggcagattaatcccaagagaatagcagttaacatcccatagtgccaaacctgctcttagccagaagcgactttactgagagggaccttactgagaggggcctctaaccccctaaatctgagaagggactctaaccctcctgagttgggcctctaacccaaggttgagcaatggtcctttcctttccttaagaggggcctctaacccactgtgtcttaggacagactctaactcccctacgttgggcctctaatccaatcccatcctttacccaggtaccccaccacttattcaaagtcggctaaccagtggtgcagtctacttcttttggggttgaggggtctcctcagtatcgtcccttccatgattcaccagaaagacgttaccagaccctaccacttacccaaagttactctttgggtctggggtttccacactattgtcacttctgtggtcgccagaaagatgttacaggaccccatcacttaaccaaagtaaacctttgagtcaagggtttccacactatggttctttccatggtcaccagaaagatgttannnnnnnnnnnnnnnnnnnnnnnnnnnnnnnnnnnnnnnnnnnnnnnnnnnnnnnnnnnnnnnnnnnnnnnnnnnnnnnnnnnnnnnnnnnnnnnnnnnnnnnnnnnnnnnnnnnnnnnnnnnnnnnnnnnnnnnnnnnnnnnnnnnnnnnnnnnnnnnnnnnnnnnnnnnnnnnnnnnnnnnnnnnnnnnnnnnnnnnnnnnnnnnnnnnnnnnnnnnnnnnnnnnnnnnnnnnnnnnnnnnnnnnnnnnnnnnnnnnnnnnnnnnnnnnnnnnnnnnnnnnnnnnnnnnnnnnnnnnnnnnnnnnnnnnnnnnnnnnnnnnnnnnnnnnnnnnnnnnnnnnnnnnnnnnnnnnnnnnnnnnnnnnngcaagctttcccttttttggcagccctgttttttttaaaccaagggtctttttaactgaactggaattcttgggtggcggaaacctccctaattcttaatccccggtggaactttgaaaaacttaccctaaaacccattgctggggaaaaatagccaccccccaaatgagaggtctctcag

SEQ ID NO: 453158 - DNA, 1070 bp, Homo Sapiens
  misc_feature (216)..(502): n is a, c, g, or t
  misc_feature (990)..(990): n is a, c, g, or t
taccccgggttcctttccccaggtacccaatttttaaaaccaaaaattacctttatttgtgggaactaccggcccccaataggaaaatttaaagggtgggcaaaaacccgttatccatttagtaaaagtaaagtgaaaagccttaggtcttttttgtttattccttattcccccaaagggagttactaagtgaaggaattttccagctgcctttannnnnnnnnnnnnnnnnnnnnnnnnnnnnnnnnnnnnnnnnnnnnnnnnnnnnnnnnnnnnnnnnnnnnnnnnnnnnnnnnnnnnnnnnnnnnnnnnnnnnnnnnnnnnnnnnnnnnnnnnnnnnnnnnnnnnnnnnnnnnnnnnnnnnnnnnnnnnnnnnnnnnnnnnnnnnnnnnnnnnnnnnnnnnnnnnnnnnnnnnnnnnnnnnnnnnnnnnnnnnnnnnnnnnnnnnnnnnnnnnnnnnnnnnnnnnnnnnnnnnnnnnnnnnnnnnnnnnnnnnnnnnnnttccagctgcatttctgaggtcacaagtatggccttaaatgattgccctcaagaacacagcttttgaaggcaatcatatgcaagtaaattacaatcaaatggaactgtatgattattttattattttaatgctaaactgaacagtgaactgaaatcagaggagaaagaaaatcaagctagtggctcactctcaatagtgtcctctaattttattgatgcttcagttttcataaagtgcaataaacaaaataaatagatgaaaaaagctttgaagatttatatacagttttgaggttaagataaattactgactatattcctttcagccttttaactctgtgaaagctgtaacgtacattaaaagcacattgaactaggttaaataatgatctttcccccttagatcaatctagtattaaggagtatataattatgcaagttcattctataacacgaggctagactaaaaggaaaatttttgtgctacngactaaatccagatacggtcaggtgctgagcagtattcctggcttcaaaataggaggtatctgtttcatcatctggctgg

SEQ ID NO: 453159 - DNA, 867 bp, Homo Sapiens
ccttcccgagattttctttagggaggggtgtgaaatgaataggggttcccttggcttaggtaaacccccagggatggaaagtgcccagttggttgtaatacaaaaagccttcattggcaagccctttgaccttccctgggggcttaaaaatggcttttttcctggcctttcagcccttcccaaaagttaggtggtggcccaccaggccatgtggccacccatgccctggctaaatttttttaaaaaatccttttatgttttggagagaatgggggtcgcccctgtgttgcccaaagttgttctgcaactcctggcctcaaagggttcgtttgtccctccttggcctccgaaagtgttgggatttataggtgtgagccaccatgcccagcccaaactcattttttaatgcagtgatagtgtatgcaagtatatatatgtatatagatataaatgatcatgtgaaaaaggagttatttcttgtgttactatttctcctatagctaacacagatgactaagctaaaaatatttcaacttcaggctcagtggctcttctcaaagttatccaaagatcttaggtctccaaggtggtactttggccaaactgtttcctaatcaaacgaccagttagttggtcagtgactgggactctgctccatcatgctctctccattctccacccagcaccattttctttggaattctatgccactcaaagactgttgttgagcaagccatgctgcaggggtactggtgtccaggattaaggcttagtgcagttcctctctgagcaacccaccgagatccttgctgatgcctccacattctcatcagtgagccagccatcccgggaatccggaccggacca

SEQ ID NO: 453160 - DNA, 1330 bp, Homo Sapiens
aatccccaaccccctgggtcaatggcccaagattttctcaagggaacacaggttatgccccacgtttcactttactgaatgggggcccgaggggccaaaaggaaatggttctagaaaagctttcttgaggggccgaaggccggccgacaaggaaaaatgcgaaggcatgaagggcgcaccagtttgggatgcccatttgaaatctttattagttggcaaaaaaatctaacataatcatcagagttttaagtagtagtgacagaagataaaaatgcctccatatcccaaattaacatctccgtataccaagtagctaacttttattgttttacaactaaagtcagggtttttattttcagagacaattctgcaaacttgacattaaagcagtagtttggcatggtttaaaatacattcaaatgtatactaaatgttttagaaaatattccattgttgaatacatttcacatggaatttatgtgaattaattgaattgatagtgaaatattataagcaccatgtgaacatacacaaacatattcttgttgttcacagaggctagaatcaggtacattagatcgaaattaacttagacacaacacaataaatgtcaaccttgcagtttaaacaattatatacactaagaaaaatagtgccagtcttggttcgtgcttggctgccagactttattgtcattcacttctaatcctcacttcaaatcaactttcctctttcttggctcatatttgtgaaataaaattttatttaaaatggaagataattatctaaagggttttgtcattaatcaatacaatgacaggtctatcaatatatttagatagataaatgtttctatctacagatatttagatgtctttgttcatctggagagttccaattttacccctttatgtttataggattagatggttcaggtgggattttgatgggggtacaaggtagtggttttgtagtttctaacattcagggaaaagtaaatggttgatggcccatacaatattctctctttatctaaggactttctttgccctcagtaggctatctctgtaggatccaaagagttattttgaaccccagacctgcatctggcttgtgggatagaggcattttgtcttgttaataggtcttgtggtggtgaataattagattgaaagattaatgatagtgctttaaatctgagtaatataatttcatgttgggattggtgctaaaagaaaggtggtagttctgcactcatgaatcacatcttgtaaatgacagaacactttacaacatacaatatactattgctccaccatgtcgtcaatcc

SEQ ID NO: 453161 - DNA, 1964 bp, Homo Sapiens
tccaaataacaaaaattgttacagaccccctgtgggcgaagttttttaaaaaacaatattttttagctacccacttaaggggaaaaaaagcagttggccccaagtcttttggattccggtggcttagggcttgcccaaaactctttattgatccatttcaactttttaatgcctccacttgcaaaatccaacttttcctgttttcttgggctccatattttgtgaaaataaaattttattttaaaatggaaggataattatctaaggggttttgtcattaatcaatacaatgacaggtttatcaatatatttagatagataaatgtttctatctacagatatttagatgtctttgttcatctggagagttccaattttacccctttatgtttataggattagatggttcaggtgggattttgatgggggtacaaggtagtggttttgtagtttctaacattcagggaaaagtaaatggttgatggcccatacaatattctctctttatctaaggactttctttgccctcagtaggctatctctgtaggatccaaagagttattttgaaccccagacctgcatctggcttgtgggatagaggcattttgtcttgttaataggtcttgtggtggtgaataattagattgaaagattaatgatagtgctttaaatctgagtaatataatttcatgttgggattggtgctaaaagaaaggtggtagttctgcactcatgaatcacatcttgtaaatgacagaacactttacaacatacaatatactattgctccaccatgtcgtcaataattctgtttagtagattcttcatatataaaagaaatcgagaaattttattttggccaggagctgaagttggttgtttagtagtagtagtttgagtagtgaccgaagtagtagtctggtgtgtgggtgcagctgaagtttcagaagtgtcaggtgcaagagtagttggggaagaattaggtgtggtaattggggcagctgtggtctctttgtggagctggggaaggtcggtggaggctggtgtagttgcagaaggtgtgggtggggcagctgtggtctctggtggagctgaggcggatgatgggtctagggtagttgcagaaggtgtgggtgggacagctgtggtctctggtggagctgaggaagatggtggagctggtgtagttgcaggaggtgtgggtggggcagctgtggtctctggtggagctgaggaagatggtggaagcttgtgtagttgcagaaaggtgtgggtggggcagctgtggtctctggtggagctgaggaagatggtggagctggtgtagttgcagaaggtgtgggtggggcagctgtggtgtcttgtggagctggggaattcactggtgctaatgtagctacagaagagcttgtgttaacattttctcttgaagatatggtggtggcattctggggaagaaaagtcacatttggaagggtagtaattttggtggaagctgatgggaaagtcacagatggaatttgggttgtagccactaaggtagggttgaccacactgctatttttatctggatgtttaggtggctggtgaggatttgggaatttgggggggttattaggtgaaggtggaagcttaggcctacagcgtttgtgcagacatttataggactttctaatgaacggcttctggtgagctagcagtccaggataatgtggtaattcaaagtgagatttgggtgattggtgatgatgccttctgtgacgtagttcatgatccctttctcgaccttcactgaacgagaagcaagcactcagtgcacagatgcacacaaacagcggcagagttttcattctttctgatgtctcctggtgcagtgtgaatctttcttcttagggtgttcaatccagttgcttgcttttagccaatcctttgaggatggtaactagaagcaaaagaagagaccc

SEQ ID NO: 453162 - DNA, 819 bp, Homo Sapiens
ggaatagagaaaataattgcgcgggattcccagtgggggaacacattaattcctccctttttttgccagcgcaaggggaagcgaattaccaaggggctttttttcaggcggtgtttgaatcccccggcttatttccaccggaactttggttggatgaatttgggcctgtggttttgtccccagccaagggaaaattgagatgagctggtttgggttcactggcgcatttctccccaggacgggcaacagggctggtgtgtctgggggatcagtttcaattgtgactgcggtcaggaggtccaaggaggctttcaggttgataatctggccaatgatgggcccggccacagtgacattcgcggtgacagggaagctcaggttaaggcctttgccatcatcgatcggttcagctttgacatccaggatgagggagttgctgattttcaacccaaaaatgtccgtgttagttggaagcagcttagaaatgacattgttcagcaatttctcagcttcctgggccttctgcttggccagttgccaagcactggatttctgaagcactcctaggtcgaccttcagtttctcaaggatgcctttaagagtattgtcaactgtctcaagtccctcgtgaagaacaggttccagcttatccacgacattgcttaggtcattgccaagattgtcaagaagagactctgaggtcccagtgagcacgccgcacaggagaacaagtttccaaagctgaagcatcttttgtcttgacacgcgtttagaggaggatgctcatgaaatccttgccccactgcacagtctgctgcc

SEQ ID NO: 453163 - DNA, 506 bp, Homo Sapiens
  misc_feature (47)..(118): n is a, c, g, or t
gaacaaaattctttcccccaagggaatatttagaggggggggaaagnnnnnnnnnnnnnnnnnnnnnnnnnnnnnnnnnnnnnnnnnnnnnnnnnnnnnnnnnnnnnnnnnnnnnnnnggaaaacccaagttttaaaaaaaatggaacattttgtttcaagcaaatttttttcaagctttccctggggccttttttggtttgggcccagtttgccaaggccactgggattttttgaaggcactccttaggtttgaccttcagtttttcaagggatgcctttaagagtattgtcaactgtctcaagtccctcgtgaagaacaggttccaggttatccacgacattgcttaggtcattgccaagattgtcaagaagagactctgaggtcccagtgagcacgccgcacaggagaacaagtttccaaagctgaagcatcttttgtcttgacacgcgtttagaggaggatgctcatgaaatccttgccccactgcacagtctgctggcccc

SEQ ID NO: 453164 - DNA, 1226 bp, Homo Sapiens
  misc_feature (69)..(70): n is a, c, g, or t
  misc_feature (172)..(172): n is a, c, g, or t
ttttttcattgacccgggatttttccttgggagaaacaggtaatgaccccatgtttccatttcccctannggggccccggggggccaaaaggaaatggtttagaaaagttttttcgagggggccgaaggcgcccgaccagggttcttggggttggattgttttttattttantaatgcagaaaatgggcctttattgccaggggcaggacaacatgtgtagaggctgctgttctgactgtgaggagaaggggtatctgggaaggtccttctggtgggactcaggctttcacgctggttaggtggtggcagcagcttcctggagggagatgctataagggggtggggcaagccactgggaaccaatcagcatgcaccacagtggtcctcctcattcgtcctcttcagatgagggtttgcagctgggttttgtgctgaggattatcgacgacctgctgaatgacattcacatccagggagtggatgaagatgcggatcagtggacatatctccttctgcagcagggaggatacagtgcttttcagcgtgttgatcacgctattcacgaacttgttgatgatttggctgtgtttgtccagcaaggaaagtgagatgctggttgggtcactggcgcattctcccaggacggcaacaggctggtgtgtctggggatcagtttcaattgtgactgcggtcaggaggtccaaggaggctttcaggttgataatctggccaatgatgggcccggccacagtgacattcgcggtgacagggaagctcaggttaaggcctttgccatcatcgatcggttcagctttgacatccaggatgagggagttgctgattttcaacccaaaaatgtccgtgttagttggaagcagcttagaaatgacattgttcagcaatttctcagcttcctgggccttctgcttggccagttgccaagcactggatttctgaagcactcctaggtcgaccttcagtttctcaaggatgcctttaagagtattgtcaactgtctcaagtccctcgtgaagaacaggttccagcttatccacgacattgcttaggtcattgccaagattgtcaagaagagactctgaggtcccagtgagcacgccgcacaggagaacaagtttccaaagctgaagcatcttttgtcttgacacgcgtttagaggaggatgctcatgaaatccttgccccactgcacagtctgctgggatccc

SEQ ID NO: 453165 - DNA, 739 bp, Homo Sapiens
tttttgggtgctcaattctttattttggctcatttggtataaatgttatgtctgcatgggttttttctacaatttctttctaagattatttctccccaaagctcagcacttttggaatttttcattctcatccaaaaatggaagcaattttatgtaaatgtctcttggaagcagtgttggaattcatattttgggtagcagaagcagtagttacaagggtagtggtgtcttttgtggtggtggtggcacctgctgcagttgttcatatttggggtgcaggagtagggagggtaggatcagttggagaatttacagggaaaaatggaggtccaggtggatagggtcttggtcgggaaggaggctgtggataacttggggcatcaggatggagtggtggaccttagggttgcaggagtaaggagggtaggatcagttggagaatttacagggaaaaatggtggtggaaatatccctggaccatagggtggaggagaggtggtggaacaaatcctgggccaaaaggttgaggaggagccagcggtccaggtggatatggtcccctggggcctctttgactctcaccaggtgtgaaacacgctgcaagagcccaaaggcccaagatccaagtcagtgatttcatcctttcagttgcctctttgtgtgaggatccgtcttacagttgattaatctgctggtcaaaatgactcttgccagttgaaagacggcaaataaaggtccc

SEQ ID NO: 453166 - DNA, 811 bp, Homo Sapiens
ggggccaacagaaatccattacaatatataagagctaagatttcttgtcccttttcacctttatttgccgtctttcaactggcaagagtcattttgaccagcagattaatcaactgtaagacggatcctcacacaaagaggcaactgaaaggatgaaatcactgacttggatcttgggcctttgggctcttgcagcgtgtttcacacctggtgagagtcaaagaggccccaggggaccatatccacctggaccgctggctcctcctcaaccttttggcccaggatttgttccaccacctcctcctccaccctatggtccagggagaatcccacctcctcctcccgcaccctatggtccagggatatttccaccaccccctcctcaaccctaaggtccaccactccatcctgatgccccaagttatccacagcctccttcccgaccaagaccctatccacctggacctccatttttccctgtaaattctccaactgatcctaccctccctactcctgcaccccaaatatgaacaactgcagcaggtgccaccaccaccacaaaagacaccactacccttgtaactactgcttctgctacccaaaatatgaattccaacactgcttccaagagacatttacataaaattgcttccatttttgggatgagaaatgaaaaattccaaaagtgctgaagctttgggggagaaataatccttagaaaagaaattgtaagaaaaaaaccccatggcagaacataaacattttatacccaaatggagggccaaaaattaaaggaatttggagccaaccc

SEQ ID NO: 453167 - DNA, 734 bp, Homo Sapiens
  misc_feature (391)..(498): n is a, c, g, or t
ttggtgctcaattctttatttttgcctcattggtataaatgttatgtctgcatgggttttttctacaatttctttctaagattatttctccccaaagctcagcacttttggaatttttcattctcatccaaaaatggaagcaattttatgtaaatgtctcttggaagcagtgttggaattcatattttgggtagcagaagcagtagttacaagggtagtggtgtcttttgtggtggtggtggcacctgctgcagttgttcatatttggggtgcaggagtagggagggtaggatcagttggagaatttacagggaaaaatggaggtccaggtggatagggtcttggtcgggaaggaggctgtggataacttggggcatcaggatggagtggnnnnnnnnnnnnnnnnnnnnnnnnnnnnnnnnnnnnnnnnnnnnnnnnnnnnnnnnnnnnnnnnnnnnnnnnnnnnnnnnnnnnnnnnnnnnnnnnnnnnnnnnnnnnaacaaatcctgggccaaaaggttgaggaggagccagcggtccaggtggatatggtcccctggggcctctttgactctcaccaggtgtgaaacacgctgcaagagcccaaaggcccaagatccaagtcagtgatttcatcctttcagttgcctctttgtgtgaggatccgtcttacagttgattaatctgctggtcaaaatgactcttgccagttgaaagacggcaaataaaggtcc

SEQ ID NO: 453168 - DNA, 734 bp, Homo Sapiens
  misc_feature (404)..(497): n is a, c, g, or t
ggtggctcaattctttatttttgcctcattggtataaatgttatgtctgcatgggttttttctacaatttctttctaagattatttctccccaaagctcagcacttttggaatttttcattctcatccaaaaatggaagcaattttatgtaaatgtctcttggaagcagtgttggaattcatattttgggtagcagaagcagtagttacaagggtagtggtgtcttttgtggtggtggtggcacctgctgcagttgttcatatttggggtgcaggagtagggagggtaggatcagttggagaatttacagggaaaaatggaggtccaggtggatagggtcttggtcgggaaggaggctgtggataacttggggcatcaggatggagtggtggaccttagaattnnnnnnnnnnnnnnnnnnnnnnnnnnnnnnnnnnnnnnnnnnnnnnnnnnnnnnnnnnnnnnnnnnnnnnnnnnnnnnnnnnnnnnnnnnnnnnaacaaatcctgggccaaaaggttgaggaggagccagcggtccaggtggatatggtcccctggggcctctttgactctcaccaggtgtgaaacacgctgcaagagcccaaaggcccaagatccaagtcagtgatttcatcctttcagttgcctctttgtgtgaggatccgtcttacagttgattaatctgctggtcaaaatgactcttgccagttgaaagacggcaaataaaggtccc

SEQ ID NO: 453169 - DNA, 613 bp, Homo Sapiens
  misc_feature (426)..(487): n is a, c, g, or t
gggcacctttatttgccgtctttcaactggcaagagtcattttgaccagcagattaatcaactgtaagacggatcctcacacaaagaggcaactgaaaggatgaaatcactgacttggatcttgggcctttgggcctcttgcagcgtgtttcacacctggtgagagtcaaagaggccccaggggaccatatccacctggaccgctggctcctcctcaaccttttggcccaggatttgttccaccaccttcctccctccaccctatgggtccaggggagaatccccacctccttcctccccgcacccctatggttccaggggatattttccaacccaccccccttccttaaaacccttaagggtccccccccttcctttcctggaatgcccccaaggttattcccaaaggcccctccttttccccgnnnnnnnnnnnnnnnnnnnnnnnnnnnnnnnnnnnnnnnnnnnnnnnnnnnnnnnnnnnnnnggggaaaaaattttcctcccccaacatgggagtttttttaccccctctctccccaaatattcttcggggggcccgccccccaaaaatatttgagaaaacaaactctggccccccccaaggggggcg

SEQ ID NO: 453170 - DNA, 696 bp, Homo Sapiens
  misc_feature (31)..(31): n is a, c, g, or t
tttggtgctcaattcttatttttgcctcatnggtataaatgttatgtctgcatgggttttttctacaatttctttctaagattatttctccccaaagctcagcacttttggaatttttcattctcatccaaaaatggaagcaattttatgtaaatgtctcttggaagcagtgttggaattcatattttgggtagcagaagcagtagttacaagggtagtggtgtcttttgtggtggtggtggcacctgctgcagttgttcatatttggggtgcaggagtagggagggtaggatcagttggagaatttacagggaaaaatggaggtccaggtggatagggtcttggtcgggaaggaggctgtggataacttggggcatcaggatggagtggtggaccttagggttgaggagggggtggtggaaatatccctggaccatagggtgggggaggaggtggtgggattcttcctgggccaaaaggttgaggaggagccagcggtccaggtggatatggtcccctggggcctctttgactctcaccaggtgtgaaacacgctgcaagagcccaaaggcccaagatccaagtcagtgatttcatcctttcagttgcctctttgtgtgaggatccgtcttacagttgattaatctgctggtcaaaatgactcttgccagttgaaagacggcaaataaaggtccc

SEQ ID NO: 453171 - DNA, 692 bp, Homo Sapiens
  misc_feature (238)..(345): n is a, c, g, or t
gggacctttatttgccgtctttcaactggcaagagtcattttgaccagcagattaatcaactgtaagacggatcctcacacaaagaggcaactgaaaggatgaaatcactgacttggatcttgggcctttgggctcttgcagcgtgtttcacacctggtgagagtcaaagaggccccaggggaccatatccacctggaccgctggctcctcctcaaccttttggcccaggatttgttnnnnnnnnnnnnnnnnnnnnnnnnnnnnnnnnnnnnnnnnnnnnnnnnnnnnnnnnnnnnnnnnnnnnnnnnnnnnnnnnnnnnnnnnnnnnnnnnnnnnnnnnnnnnccactccatcctgatgccccaagttatccacagcctccttcccgaccaagaccctatccacctggacctccatttttccctgtaaattctccaactgatcttacccctcccactcctgcatcgcaaaaatgaacaactggcagcaggtggcaccacccacccacaaaaagaaaccacctaccccttgtaaactactgccttctgctacccaaaaaatgaaattccaacaactggcttccaaaaagaacatttacataaaaattgcctttccattttttgggaggaacaatggaaaaatttccccaaaagtggttgaaacttttgggggcttaaaaaacatttttaat

SEQ ID NO: 453172 - DNA, 826 bp, Homo Sapiens
  misc_feature (238)..(331): n is a, c, g, or t
gggacctttatttgccgtctttcaactggcaagagtcattttgaccagcagattaatcaactgtaagacggatcctcacacaaagaggcaactgaaaggatgaaatcactgacttggatcttgggcctttgggctcttgcagcgtgtttcacacctggtgagagtcaaagaggccccaggggaccatatccacctggaccgctggctcctcctcaaccttttggcccaggatttgttnnnnnnnnnnnnnnnnnnnnnnnnnnnnnnnnnnnnnnnnnnnnnnnnnnnnnnnnnnnnnnnnnnnnnnnnnnnnnnnnnnnnnnnnnnnnnnaacactaaggtccaccactccatcctgatgccccaagttatccaccgcctccttcccgaccaagaccctatccacctggacctccatttttccctgccaatcctccaaatgaacataccctccctactcctgcaccccaattataaccaccgcacccggtgcctcgccccacccacaccaatgatctctacccttttgcaaccggctgctcccgcgcttactccctagttttaacttccttacccccggccctcctcccaccatattaccctatccacatcctcttttttcatctcctcccacatgcttacatataaataacccacccttcctatttggatgcctccgccacaagactactaccgtaatattaatcgttctcgctcccaccaacaataaaataaataaccacgggcttgggcttatcccctgataattatctccgcctcccgcctgagcccacgtattacaatattatctggagttgcgtctggg

SEQ ID NO: 453173 - DNA, 767 bp, Homo Sapiens
  misc_feature (242)..(242): n is a, c, g, or t
gggaaaacggctttatgccgcgctttttcaaatcgccttccagggggggcccgggggccaataaaggaatattttaaaaaaaattttttctaagggcctcaagggcggcccccaaacaggggggccacactgggttgggggataaggcgtcattacagcgtggtgtgagaacaaatgtggggttcacccgccgtttgggcaatacagaggccatttaggttatcagcgaacaacattcgtgnaggggtgctcaattctttatttttgcctcattggtataaatgttatgtctgcatgggttttttctacaatttctttctaagattatttctccccaaagctcagcacttttggaatttttcattctcattcaaaaatggaagcaattttatgtaaatgtctcttggaagcagtgttggaattcatattttgggtagcagaagcagtagttacaagggtagtggtgtcttttgtggtggtggtggcacctgctgcagttgttcatatttggggtgcaggagtagggagggtaggatcagttggagaatttacagggaaaaatggaggtccaggtggatatggtcccctggggcctctttgactctcaccaggtgtgaaacacgctgcaagagcccaaaggcccaagatccaagtcagtgatttcatcctttcagttgcctctttgtgtgaggatccgtcttacagttgattaatctgctggtcaaaatgactcttgccagttgaaagacggcaaataaaggtgaccc

SEQ ID NO: 453174 - DNA, 1009 bp, Homo Sapiens
  misc_feature (187)..(187): n is a, c, g, or t
  misc_feature (276)..(276): n is a, c, g, or t
  misc_feature (396)..(396): n is a, c, g, or t
ttaaattatccaaaatgatttctttattgagattaactacatagatttcacagtactatggaatacttatatttagctaaagtcacaaacacatttcaacattcaaaatgatgagcatcattaccattctaatctacaaagctcatgaataaagaaaaatacaaaaacctcaagttttaccaaaaanaaaaacttttaagtctacatacattaacaataaaaccatttcttccagataacaggtaaaagtataaaggcataccactgacttttttntttctagatagccaggaatgaacgaatgtttaatatctacgacgcttattagggccttcaaagttgcccccttgacttcctctaccaaagccaccaggaccaccactcacaggacctacnccactcattggtgcttgaggggtttcagaacctgttctactccccataggtgaacccatctgagatggtggtccttgaggaatctgtcattggtgcattgctccattatctggcatcattgggagttcccatatttgcggctccttctggtcccatgggcaggaccaggacccattggtgggccaggtatagttgctctgttgttcatattcatacccatcattggaggaggaccttggttaccagcaggggctgggctaaacgcatctcccatgtttattgctccacggggacccatatcacccattctcatttcctgttctctattttccatgtagtttggcttaaagccctcttgctgtcgcctcagttcctcctgttctctgtgtcggatcatttcttcctcacgccgccgatgctcctcttcatgtcttagttgtatttgcttccgtttttgcaactcttggtttctgagttcttccaagcgtctgagttcttcttgacgcctcattagatcttgcctcattagcattaattggtgttcatgcctagctgcttccatttctgcctccagtttctctttggcttctctgatgtttctatcaacctgccc

SEQ ID NO: 453175 - DNA, 1990 bp, Homo Sapiens
  misc_feature (275)..(285): n is a, c, g, or t
  misc_feature (1754)..(1754): n is a, c, g, or t
  misc_feature (1822)..(1822): n is a, c, g, or t
  misc_feature (1929)..(1929): n is a, c, g, or t
ggttatgctttgtacctagaaaacaaaaaattacattcgttgggctttttttcaaggttgggattaccacaccacctggaatatcatactgtggtttctgcctaaaattggcacatgtaagtattgaagaaaatggttatataattcagttgaaactcttggttattagatgttaggcatctcctgtatgtaagacacaaggccaaccacaacacagaacgatgttgacctgttaagtattctctgaaacatggccaaaatgcattttatgagcnnnnnnnnnnngctattgtaaatattagtggtttacaatgcgctttagacatatttctttaaaatgcaagcagtgagaaataagacctctctgaattagtagctctaaactgttaacatagaatgttacttggaaaaagtctggaatatgtggtgtacacaagcagtgcttcgtgaatgagtttcttagcttttatagtgcgccatgtttctcaaagtttgtttttgttgacaaaacattttataatatatatcttatgtttattttttttctcaactaattgtgtactgcactgtaaggtgaaaattagccatccattatttatcttctgtggcaatgcatttatatggttgattgggtgggggaattttttttgcagaaagatgcaaagtgattgggttttcgacttcctatcgcagggagcttttaagaaatattaatttcctatacatttttccaatccccatgcaaactgttcctgtttacataccttctctgttgtatcagtactttgagtgagaagacagtttatttaaaacttgagcaggctgttcagcattttttctgcttctgaaatctgtatagtacactggtttgtaatcattatgtcttcattgaaatccttgctacttctcttcctcctcaatgaaatacattatatattatctttatgtactcttaagaaaaacgagcaaggaagagtatcttcattattctcattttctctgagttggaaacaaaaacatgaaggactccaactagaagacagatatttacatttaaatagattagtgggaaaactttaagagtttccacatattagttttcattttttgagtcaagagactgctccttgtactgggagacactagtagtatatgtttgtaatgttactttaaaattatctttttattttataaggcccataaatactggttaaactctgttaaaagtgggccttctatcttggatggtttcactgccatcagccatgctgatatattagaaatggcatccctatctacttactttaatgcttaaaattatacataaaatgctttatttagaaaacctacatgatacagtggtgtcagccttgccatgtatcagtttcacttgaaatttgagaccaattaaatttcaactgtttagggtggagaaagaggtactggaaaacatgcagatgaggatatcttttatgtgcaacagtatcctttgcatgggaggagagttactcttgaaaagcaggcagcttaagtggacaatgttttgtatataattgagagtttacgacacttttaaaaaattgtgtaattgtcaaatgtccaatttttgctcctaattacgctaaaaatcaaacgatttgatatcctagacagaagcgccgaaaaaccaaaccaatcaccctccacaaaatataaaaaaagtattaaaaagacaacgaaaacgaccgagaacgacacggccttaccttcaaatnaaaaaaggacaaaagaagtaccaagaacatgcaaagaaacagaaaacgaaaacataaggaatacaatnaacaataaacctgacacacataccacggaaagagagacaaaatgagaagtacagcacgaccagacgcacaacatgcacaaggacaccgacaaccacaacgacgactnacacatacgccaccacacaagagatatcacgagacacgacaccgacatcaaaaacggagaa

SEQ ID NO: 453176 - DNA, 811 bp, Homo Sapiens
gggggttctttctcttcttggacttttaaattgtggctacctaaattgagtatctggcaagagtaagattaagcagtaatttgttccaaagaagaatcttctaccaaggagcaactttaaagaatgaaattaactttcttcttgggcctgttggctcttatttcatgtttcacacccagtgagagtcaaagattctccagaagaccatatctacctggccagctgccaccacctccactctacaggccaagatgggttccaccaagtcccccacctccctatgactcaagacttaattcaccactttctcttccctttgtcccagggcgagttccaccatcttctttctctcgatttagccaagcagtcattctatctcaactctttccattggaatctattagacaacctcgactctttccgggttatccaaacctacatttcccactaagaccttactatgtaggacctattaggatattaaaacccccatttcctcctattcctttttttcttgctatttaccttcctatctctaaccctgagccccagataaacatcaccaccgcagatacaacaatcaccacaaaatccccccaccactgcaacaagcaaccaccagcaccttcaccaaaacccacaaatgaacgatcagcctccctccaacaggtaacctattctctttctaacaaccagaagccctggcccaaccttccattattaagccaaccaaacccccccggccagccatccttacttggaaaaataacctaacctcaaaaatttcttcggcacaaacccgggttccctc

SEQ ID NO: 453177 - DNA, 681 bp, Homo Sapiens
  misc_feature (315)..(403): n is a, c, g, or t
  misc_feature (421)..(525): n is a, c, g, or t
  misc_feature (531)..(562): n is a, c, g, or t
  misc_feature (587)..(625): n is a, c, g, or t
ctgctgacattctttaaccacgtgggctgccagatgctgaatctggggcagcaggtggaacatttctgaagcagcaggtagacatttgtagcagtcttttattttaaacaacacatgctcttttattttttgagcacctctgagtgctctcttctgtacttggatggcagggaagggaggactcagcaggaaaagatttctgagaaaagcaaagctatgcttatgaatcaaaatcatatctgcaatgcaggcacataacagaccaccaagtgaagatgaaaatcacttcctaccactgaactgctttaaattcgnnnnnnnnnnnnnnnnnnnnnnnnnnnnnnnnnnnnnnnnnnnnnnnnnnnnnnnnnnnnnnnnnnnnnnnnnnnnnnnnnnnnnnnnnaatgaaatttcatttacnnnnnnnnnnnnnnnnnnnnnnnnnnnnnnnnnnnnnnnnnnnnnnnnnnnnnnnnnnnnnnnnnnnnnnnnnnnnnnnnnnnnnnnnnnnnnnnnnnnnnnnnnggttannnnnnnnnnnnnnnnnnnnnnnnnnnnnnnnttagaaggagcaagattacatgatnnnnnnnnnnnnnnnnnnnnnnnnnnnnnnnnnnnnnnngcgcctcgtgccgcctcgtgccgaattactggcctcgagggccaaattccctatag

SEQ ID NO: 453178 - DNA, 860 bp, Homo Sapiens
  misc_feature (442)..(442): n is a, c, g, or t
  misc_feature (450)..(450): n is a, c, g, or t
  misc_feature (831)..(831): n is a, c, g, or t
  misc_feature (838)..(838): n is a, c, g, or t
gagggaaggaaaggaagttaatatttattgagtagcttccaagtgccatgcatatgcgagggacgctgtgtgcattctctaagttaaagagaataacctagcccccagccccgccacacacacatacatttttatataggtgagttccagagctgggattaagtactgtgttaactaaaatttctaagtatacctgttttttcacaaatgcttctccctaaattgcatattctgtacctctgacttgtgtatttcatctctaggattcaaaaagttgcaagatctcttacctcttcaatttctaattatttttgaatctgtattttttcttctcagtttacccattctgcccagcttgttgccagctatgtatttgtttagttgtctgttttgctcctgaatcttcatgatgaatagaacgaccgtgagatcttgggcaggntactagancctttctctagattgacgttgatccatttgtcagtactgttggtcaagttcttcaactatgtgctgatcccctttgctgccttcactcactgggctgaagtccacatacactacactgaatgaattcattgtttgccttttatgaaaaagtgtggtctatatgagctatcactgtttttccttagtgctcacaaacatcccctttaataattgattttagaatctttgccctcatcctctaccaaacttactgatgtggagtttgcaaaaataaatcttctactttattaaaagtattatatttgcccctttccagtcttctcagccataccagattcttgcatatcactgatattcctcgtgccgcctcgtgccgaattnctggccncgagggccaaattccctatagt

SEQ ID NO: 453179 - DNA, 763 bp, Homo Sapiens
  misc_feature (453)..(453): n is a, c, g, or t
  misc_feature (460)..(460): n is a, c, g, or t
gacaccccggggggagcccggacgagggggggctggccatcgtgcccaattgaaaccttcccaaaattttaaggtttcgtcgaagcaattggatgtaacatttattcattccggtggaaggacttgaaatccccattggcgtcccgggagaatttttctttacttccccatcccaatgatgttggtctgctttgagcatcggtctctctagctttttcctgaagcggaatccagtcaatcaatgctttgaaatctcttacatagttatccagcatcattagcacctccttacattcgaccacactctgatctgattcgcaagttacatagatttcatctactgctcggcgaagattatcaaaaggaaatgcccagtatcggagctcttagatcaattttccgggggtgccttgttttagtgggacttttatcaaagtgtttatctcccagtcngtagacngatgttattttacagtccactgcagtactctgtttagtagttttatgagtgccttgaatggtcctcttagattttccaccagtttgacatttaggttttccatcatcatctttgctttctagtggaacactccaagctattaggtttcttgctgtacgaccctcctctgcaactattctccttactttgtcatgactattggagcgctggaatgaagccatcattctttaaattctcttctatgccaagatcatttatcacataaacccatggagtatgactcccccgaccgccctgcttccc

SEQ ID NO: 453180 - DNA, 789 bp, Homo Sapiens
  misc_feature (311)..(311): n is a, c, g, or t
gaggttcataaacatttattagcataaagtgttgtagaggaaatgtaacattttcaagaagaaaaacttgtaatttgcatagttccacctatgtttacatggaatcatggtggacaatcagctccaatacacttattacaatgcattaaattacaagggctttccttaaaagtgataaagcagctttatttttaaaataccagtatttatgatacactggcaattacatctttttcaactaattttaggatttaaaacttcaagttatgaaagttttaaagaattgttttagttgtaacataagtaaaaancttttaattacttaataaagtcaaaactttattaagatcaccacctctctaagaacaaaatgaccaagaaattacacagagtatttagagcctaaagtaagtacattcaccactggctcccaaagtcctcaaagtggtatctaatttctatcacacatgagagctcactattaagaccaatctggatttgaattcttgtttcgccaccaattcttgctgttataaccttgggcgaatcactgaacctcttgggcctcagtttcctcatctgtggagtaggtttaattattaaactatctctcaggttgctgtaaggattaatgaaatatgtgtgaataggagggtttaattattaacctatctcacagggttgctgtgaggattaactcccagatgaaatggaggctaaatcaaattcccaggatccatctttgaatctttaagaaatatcacaactgaaacttacagaatagatgcc

SEQ ID NO: 453181 - DNA, 904 bp, Homo Sapiens
  misc_feature (756)..(777): n is a, c, g, or t
gcacccattttaccccatcccattctctgtcccctgaggcagagttctgaccgggcatgggtagtcctcaacagtttctctgagctctgccacaggccacatttttcggatctgtctttcaggggtcacgggaaggtgggcaaaggtgagcagagcagctgagaagtgcacatggtaggttacctggaaacaattcctaggagaaaaaaggaggaggccagagtaggaagcatctgaaggccaagtcataaaacaggaatggagaaaaacaaaattaagaaatgcaaaattaagaaggccgctctcctcttacagtcaacctttggagtgggtagtcacagatactcagggctccaagagccacaccatggtgagaaaggacatgggtagcttctgaggagcatggtctcgtggatcttgtgtatgtgccaacaggctgtaagagttagaagttagtgtgtaatttggaagtagggtgaggaggggagtgagaagaaatcaaaagctcatcccttcctgcactattagaaattaacagtcatcagagaagcacagataaattattcttaagggcaggaaaaaactaatgtaaacccaggaaagcagcagcaaaggtttcacttactaaaaatctattatataggaaagaaaattatttgtcccacaggggaaaaaagtaatcaaatcatgccagttagagactttttccaagttaagattttctaagaccttaggttttcattctctagtgccatnnnnnnnnnnnnnnnnnnnnnngagtagaataatgacttcaaggcctgagaaggttcaggctaaggtaagaaacatatatgtgtgagcagcaatgaggtacagatctgaattaatgagataatggcaagagaaacttagtgaagcaaag

SEQ ID NO: 453182 - DNA, 981 bp, Homo Sapiens
  misc_feature (53)..(53): n is a, c, g, or t
  misc_feature (62)..(62): n is a, c, g, or t
  misc_feature (239)..(239): n is a, c, g, or t
  misc_feature (614)..(614): n is a, c, g, or t
ctgatgttctgtctgtcgtggagtggtgtgtttagctgctcgtgtggcattcnctgaagtantcatacttcttccacttagccgcggcgcatagctcaacgtgatatcgcccgatcatcatacggacattatattgtatagtgtatgcgtatttggggcgcttcttgcctccttataatatcgatcgattcgatgtgccatagttgtcggtgcggcgtgttatagcctttttgttttcnttgtgcgcgttgatgtccattgtggtagtgcgtattgtcgtaggcggcggttcgattcctcggcgttggtcgttctactttttagggcattccttctgcgcggtgcttcctatgtgttggggatgagcgcattttgcctttctatcttattcgtgggtggtgggggcagagagggtgcgtcccctgtgtctggtgtccagtttttattcttgcccgagttttctttggatctagatctttttattaccgttactgggcttgttcttcggaggcggctctccatcttgccggtttgtccgctgtacggggcccccccttttccctttctgttttcttgcggcagtggtcttatcgcgtacgggtcagggattttcntttttgtccttcttttgttgggggggctggctcctttcttcccgctggttttccagtatggtttgtgcggggccgacaccgcttctttctccgctgaccatgaaggctgacagcagccaagtcacaatccccatcagctctctggatgcgacacatattcactctttccaggagccttctggaaatatgatgtgaaacctccgtgcaacagctggaggcaatgggaagtatggcttctgaggcatgtagggccgcacagacagccaaggccacgatggcgagtcctctctgctgcattcctgcctgccctactggcactgacagcaacacaagtgaggctgttcgatcaggaaatgaggctaaaggt

SEQ ID NO: 453183 - DNA, 757 bp, Homo Sapiens
cccattggccccagattttccctgaggttcccatttataataggtcaataaggtgaacccgtttccttattatttgtaagggtttgttacatatccagtataaattcttctcaacattccatgctgctgacctctgtgtttttcagaaaaaacacacttgtcagaccctgtaacgtgaaaccagttgttaaattctttgccatttgaccacttccatgggtgaccagggttcctttttcagtccaacccagtgttcctctctacctgcgtatcgttttagaaagttcatgtccttttcagaatcaatgacagcaagagtagcaccatgttcagaacaagcattttgggctgaagtccagctcctcttcacagtagaaataaagtagcatttcctctggtagccaacccagtcctcagagcatgaagaaacatggctgtctgatggcattgagaatgtgtattggcctggacaattgtattggcccactgataaggcaatgagagctatgattaaaatggtgatgaagaccacattcattacagcacacaggacaggaacttggaaggacccttcatgacgtgttgagaaatggggactggtggcatcattttcttgtccactctccggatgcaaagagctgttctctgctacgaaacaattttcagagctcatctttattctcaagattccctagttaatctcaggtcaagtcaagctacagtgaaagtctttgctggagctcttgttgagtctccc

SEQ ID NO: 453184 - DNA, 807 bp, Homo Sapiens
aatcgcgccggtttgtgggtccaacccaaccccccctttccacaaaacttttggggcaagggaacaatggaacaataagttcccccctcgggcgaaaacctggggcccccttaaaaaaagggtgcccgggcccgggctccccgttccacctgccaggcccccgccagggaaatttttggggagtccttcccgcaaggtggtcggtgcaagggtgaactcctgggaggatctccctggccgaaggtgggtggtagaaggtctaggagccaggggtaggccggtgaagcggaacgtaatccccccgggaggtggcggtattctccctccatccagtcgttcaggtggtagttctgccaggggatcctgctggccgtggcgctgtgcagcaccggcagggtgattctgaagatgggggccagggtgctgtgcatctgggccgggatgaaggcgggccgcccgttcatcttggccagggcgtacagtgtggcgtactcgcccatctggttccccaggcggcctattgcattgatcgtccacatccccctgagctggctgggtcccagtgcctttgatgttgaggctagcactggtatctgcaccggtaactcccacatggcttgaatcttcgctagccgctgctgaacgtgaaatatagtggaaaccgtaaagacaaagaggatgaagtgggcacatgggaaaggagaaaggcatctgaacgaccagcatggctggtcctgctgaaggaaaccgggacagagtggttgggcaggcacctcagtgttccctctgggtctctcttcactcccc

SEQ ID NO: 453185 - DNA, 697 bp, Homo Sapiens
ggattctgcagaagctttatttattggtggattcagattcagcgtcccgattcagttactccagtaccatcagccaccaccacacagatggcctcagctcggatggccccataccccaccctaggcgacccacgggtgagtttgctgagtatgtgagattaactggtggctcagtggtcggctcctctagtggataattccattcaaagccaatgctcttgatgccaaggagttgatactggccatagatgcccaccagcacctgcccctcttggctggggtaggcagaggagatctggccatcaagcttcccaaaatagaaatagcggtccttgctggtgtacatgaccataccccggaggaaagcttggaaggcgacaaagacttttgtgatgtattcgcctggctgcagggtgacttcctgggtattcccacctaaggctcccagtttcacgtcccaggagtctccaagtttcacctggacacttttcaccaggagaagacctacagacacccgcagccctgtgatttcatggtcgtagtcttcagtggtgctgaaatacttgcctcctccagggccatacatcttccctgcccaggtggggccccccaggagggcaagcgtgagcagcagcagcatggcctctggccggtgcatcccagggctctcgcctgtgactgggcgtctggttgtccc

SEQ ID NO: 453186 - DNA, 1420 bp, Homo Sapiens
  misc_feature (339)..(360): n is a, c, g, or t
  misc_feature (760)..(760): n is a, c, g, or t
  misc_feature (778)..(778): n is a, c, g, or t
  misc_feature (808)..(808): n is a, c, g, or t
  misc_feature (924)..(924): n is a, c, g, or t
  misc_feature (951)..(951): n is a, c, g, or t
  misc_feature (956)..(956): n is a, c, g, or t
  misc_feature (965)..(965): n is a, c, g, or t
  misc_feature (971)..(971): n is a, c, g, or t
  misc_feature (1005)..(1005): n is a, c, g, or t
  misc_feature (1072)..(1072): n is a, c, g, or t
  misc_feature (1095)..(1095): n is a, c, g, or t
  misc_feature (1105)..(1105): n is a, c, g, or t
  misc_feature (1200)..(1200): n is a, c, g, or t
  misc_feature (1218)..(1218): n is a, c, g, or t
  misc_feature (1319)..(1319): n is a, c, g, or t
accttctctccacacggtactttaaaatatttttttatctcactttcatttcttgttcattggaaatagggtgtcctgcacagggccctgcccatgaagctgtggtttttcagtcatggtttggaggctcaatgtgtagtcagagaaaagagtcttggcagacacttaactgagaagctgagagtgtacaagcctcctaaacatacaccagattgaaatctttcttttgagaaagactctagttaaccacggcaagcccatctttggtttcatttgaataaattgaaaaataatccttaggttatttttctgtgcttagaactccccgtgtattggtannnnnnnnnnnnnnnnnnnnnngtttctgagacgcatctctctgtgtcacccaggctgtagagcgatggtgcactcttagcctcctccgcctctctccattcggtagacatatccttcttttgccctattccctcacactacttattaatgtaatgctctttgctcctcagcctgtcttctgtttttattcatctttgagctcgtcatacgacgcttttaacctccgtcttctgactcgacttgttcttattattcccgcccacgaccgtcgtggcattgtatctagtaggatctcgccacctccaaatccattgtatgggatatgctcgcgtgtgtcgacatcacatcgcgtagaatctgcccaccataatttctctaccgccgttgcacgcacctagtgctactcgtattcgtcttcgangacgtgtactctgctgtngcggagacgcctatgatatctctctgcgcncgtcctcgttcgatgctgtgttctattgttctgcgtctcacaggatatcttttactacagcatcatatctttctgcactcacttcgacttagacgctatccaagcgcttgacacgntacatatcatctgatctgctcacctcntaacncgtctcatngtcttnatacgactctatcttgctagtatcatgagagcancgttgtcgtcgacctctgctctctcgttagctgacctccccagacacacatctcacacgatctactnctttcataaattatatatacttnaatacgcacnctctcgaattcgtgtagatcctcatttgtctgcccttaatgtgtagcgacggtatgttatatgcctctgctgacagtctctgcatgtgagacgancttgcacacttgcttgtngtttgtcatctctcacgcactctactctcatcactatctccacacctacactcacaattcacatctttacgtacactccatacgccgcgtactctgtcgcnctacctgtagtcgacatgatgcgatacgttcattgattcgtcgtgaacctgactatgtcagtcacacgctcgtgtgtggggatattctcgatagagcttta

SEQ ID NO: 453187 - DNA, 1017 bp, Homo Sapiens
  misc_feature (20)..(20): n is a, c, g, or t
gggctccatccaagcgggangatgtggaaagtttaccctgaaggcagaagacgggcaagaaagaagtcttttggttaaatattccaaagaagggtcttttccccatcaggggcaggtaagaacctgggcttgcagcgttgggatttgctgaatgctcccttgagaaatttccgtggagcactgtattcagagtttgttggcaatttccagtcattttcattataatagtctgatgatacaaagagggcctgcatggcttctcctgtgctaaatgtgtttccaatgagaccattttcttttttctcagaacagaatcttttctacccagtgactttgtataaatactgatgttctttaaactgccttcatctgctttgatctgcccatttattagactcttcttcacacaggtcagagccaggacagccattgcaccagtatctactgagaactggctaccaaaataatagtttttattttcaggagtgaagtggttgacaacttcggcggttgagtagttcccattgaacagacacaaggccaaaacgtccaggctgagctggtagtagttagtcaggggagtgccattgtgtgcttccatattttcaatttctgcttggaatttattttctagcttgtcgatcaggtggtaatcatatattaagttttcctcagcgttacgacatactcccaaagccagtataatcaaggcaagctctcccgagcttacatctgacaatctgcttttcacattgtatttgatttgttggatcatcttttgcatcagggtttggatctggattccaacaagtttgagggacaacacaacattgacagcgctggttcccctgttatagtttgactggatcattgtattcaacagaggttttaggcggatgtagttttcttcacttacctcacaaatctcgcatagttggcttggaataaaagaaaacagtaagagccccactaggggcagctggtgtgactgtctcatctctccaacagtgtaccccc

SEQ ID NO: 453188 - DNA, 691 bp, Homo Sapiens
aagggaagtttttaggagggaggaaattgcaattaggtgaggggaataagaatgtggcttaatatgaaaaagatgtgtttaggaaaatgattcgatatcaagggataaagcgggaaattaaaagaaaaatgtcactttaatgatgccggtttaatatagatcttattaggtacataagtggaaaaggtgaaaaaaagaaggaagcggggattgtcgggttggagtgtttttccaggggcaagtgatttattagagcaagacgttgaaacctttacattctgcagtgaagatcagggtatcattgaaagatggtggaaactagcattaaaaactttttacatctcagcgatcacatttctctgctatttttcccaatgtttttgtaattagcactcttttctcataggccatcgtatccacgcatttcttcacttccatcttggctgcaacagcttccagaggtgccttaaatttggcaagttggaacttgaacacaggttttccagctaataagaagcctgtgatttcagaaccaagagcttggcagaccactgcatttgcccggtagcagcaaagggccagcgtgagcagcaggagacacaccgacagcctcatggtggcttattctgctgtgagctcggctttaaccaatgatgagtgatttagactcagccccgggagcctcctggcc

SEQ ID NO: 453189 - DNA, 384 bp, Homo Sapiens
  misc_feature (326)..(326): n is a, c, g, or t
cattccctcccagccttgtttttcctggcagaaaacctgccaattggactgtcacgtccccaatggatgaagcagttcccatcttggtatttccccaggttgacaaaaacaacagatactccatgttcaggaagagggatccgcttcacttacctgggcccccagaatattcttatgaagatgctgcagccttttccagatctggcactgctatggctacatggttgagtcgacccaggttccacacagaccctgtcacttgatccaagggctgtgatgtggaagaagctcttactgttggaatgggagcttgaagtctggaaaanaagccctacggcattcgcggctgcagccttcagcacccgcgccattttggaaagcccc

SEQ ID NO: 453190 - DNA, 1186 bp, Homo Sapiens
  misc_feature (825)..(825): n is a, c, g, or t
ggcacttacaccaaggatggattttggacatacattactcagattgccacgtgttcaccttggatgttttggatgttcctgaacagtgttttccacttcatgtgggtggctgtattactcatgtgtcagatgtaccagatatcatgtttaggtattactacacatgaaagaatgcatgccaggagatacaagcactttaaagtcacaacaacgtctattgaaagcccattccaccgtggatgtgtaagaaatattatggacctccctgaagcatcatgctataccatcttttctcgtttcctcatggacagcgcgaagcgcaatcccatctaccacttcccactatctacaactctgtttcttctcctttagtagcgcccttttccatgcttctgtggactgcttccttctcggtcgtcatcctccatactatccgcccacccaaacgcaccactaattcctatacttatatatactatcgctcttcaacgtgcctccccttcgtccgtcctgcgtggtttcctctctatttcccgctttttcatctgttattatatgccctagtcttaaacactatgtttaacgaagcctaaacacacgagcataagaatccgcgcgccgccgcctacggtcgtcaacgcctcggtattcttattctctcgatcactcccagtatcctaaactcgcacgccattatgcgaacaggtgactattcctccctgtctctacgcgcggagacagtatatcacatatttgctgttccctagcgcgctgaattacactatcggcacgccgttacgacactgaacctattttgatcgacanctattctagcgacaaattgctgttggattctgatctgtttaacacatctcacatattactacttccccccgtgccttacgaccagaacgcgactagtgttgcgtcacactctatatatacctacacaacttatacaataatccacactaacactatcaaaactcatatacacctcccgtcttctctcgtgctgcgcgcgcctcttggcttgtgtctctacacgctcccggtccccgtgagacgcgctcttctcttgctttcgttctatccaagctctgccgctccgccacagatacactcgtttcaccccacttatatttattatgctcgctgctcatccaccgaatcataaagtcgatat

SEQ ID NO: 453191 - DNA, 843 bp, Homo Sapiens
gagggttaaaaagaaatttatatttccaccaaggccatgaagaaaaagacaaataatctcatttttgaaagaatgctgagggtgggattagtaacaacagcataaaaattatctcagaattctttatcaaagctaatcagtcatcaagtatttcacagcaattatctatgcccaaccactgttagattcacgagtttaagaggtcatcgttgcttacttcataattgggaaggtaagatcatggagcctcctcccttcctcatggttttgccgagggctgtttcaaaggatgggcacctggagaaagccttgccatctgctccctttggacagcctgaagtttgcctctgctggaagtgagcttccaaaattagtctggaacattaaaaacctcggtttccattaattcagctcaaggtccccaaggactagcatatttaatctagatttagctgattagcctgcatttcgctgtgtaattcccatccttggctgctaaaatgggaggaaaaaagagcaagtgaaagtaacaagtcctgtcgggatttggctcaaggcaggagttagagaagccaggtggcagactgcctgggaggaagtgcagagtgggaagcaagggtgaggcagaggtagagtgtagagttgaaggtcagtgaaggtgaagaatgagtcttatgaagtagttattgatgcaagggcaggaatctagctactgacagatcatcaaggattaagagaaaatcttacacaatacttaccagagaacaatgacattgaactttgttcctctgaccggatgtgggtctcaaaatgtgaggtcaagtgtgggagccaagctagcac

SEQ ID NO: 453192 - DNA, 1318 bp, Homo Sapiens
  misc_feature (599)..(607): n is a, c, g, or t
ggtgaatgagaagaaatgattcataaattttgaactaacagtaataacttcttgaaaatccaataaaattggcaaaagattgtgaaaattctggaagaataagggaaacagataatcttcagagtaatcaggtaaagcttaaacaagtgttttaaaagatgagtttttcctacattctgaaaagcaaacatgaaaaactgaacacagtttttacagatacacaatatggagtgacttatatacaaaatgaccttaaaaatatattaaactcattatagtagttaatatctaagtaaaatatggtgaaatttaatggagaattcactcctcccaaaagcaccttcatggaagattcctcattaacaggcagtcctttagtatgctgatttatgcaagatgctgaaaagaagagaaataccccaagttcttgaaaaaaaattttttgatatgactactctaacagtgataactataaatctcacttttaataatttaaaacaaattaaagtgatatatgagttaaatgaccaagcagacttgattctaggaatgttaaggaatgtccattatttgttttggataatgaagtcagcagaggnnnnnnnnntatgaccatctcaaaagatgccaacgttgtctttgataatatttaatatattttttaaaaaacaattcttgtaaaatacttttttgattagccttctgaccatgattaaaatggtgtacctcaaagtagctgctaaccttatgtgtatctgcaacaccctgaaaaattatctaatgaaaaggcacaaagaaaaagcttgtccatgttgtggataattagaaagtgaataattttatttactattagataaaacaagcaccatcacggagatacatatattcataatgggaaggagtaaaaatttacccacccccatggcagaatctggttttttctggccccccaaaaaataaacaagaagaattcccaccttcaggggtaaaaaaacggaaatgggaaaggaacaacccccttcgttaattttaaaaataaaaattttatattatcaattatcccccgtttttcatttaaactcccaacccttctctcaaaagaaaatccttttaggtgaaatctaacaaaaaatggaccacaaccttccggttacagctttgtgaattaaaggagaaaactcgaattccatttccccacaaaggggaacaccccaaaaaaggggccctcaagcttccttttcaaaaaattttttccacatggaccccacttttgtgagtcaaaccgccaaacgcaatcctcgagacttatatttttttt

SEQ ID NO: 453193 - DNA, 971 bp, Homo Sapiens
  misc_feature (823)..(875): n is a, c, g, or t
tttaccatcacttttttatttggcagtaatagtaatacatccatgttacagtgcttattttggctaaagagccagtgcaattttttctgctactgtagtgttttacttttacacaaattaatgagtacagtccttacatttaggagacagaaacatttactgacatcagctaagtaaagctaatacatggttgttcacaaactaaacaaaacaataacataatatactcattaggaaccaaagtaggggatgttcttatttccactaaatcacagattatataaattcttaaatttcacatacatatttctaaatctaagcaaaaaaattaggattcagcttaattcctataatcattttgaaatttacatcaaataatttctgaatatatattcacattaaaataaaagtaaatgggttatataaacataatttaaaatttctgattatgaaaagttatagagaagtacattaaatgttactttggcattcctatttcctaggcttacaggaattattaagaattcctttgtaatgcaaataatcactctcttggaaattaaatttaagtagaaaatgttacattttaaggcaagaaaacatttgtaaatatttttataaaggcatttaattcaacaaattaacggaatcatagtaaatggatgcaaataaagaatattactttatgagaaagacaaagttctttggagcttactgtgacagtatggaaaacttgtcttcttttttaaaagataattccattttgatacttaataaacataatgttaaccttcaagaagaaataagcactcttagttgaacnnnnnnnnnnnnnnnnnnnnnnnnnnnnnnnnnnnnnnnnnnnnnnnnnnnnngtaaattgcctcaaaatttatcttctttcttctagaaaaaaggatattttctcaggagtgacttaattgaagtccctcttataatttacatatgcc

SEQ ID NO: 453194 - DNA, 1109 bp, Homo Sapiens
  misc_feature (328)..(328): n is a, c, g, or t
  misc_feature (380)..(380): n is a, c, g, or t
caaattagttttttaaaaaataaatgtttatttcaagtatgaaaagtaatgtttaaacgttgtcccaaaattgtgttcagtttcacaagtataaaataagacttctgaaaaaaagtttacaattagttataaaacacttaagaatatattttgacattcacatcacagtgggcatttttgaaaaataaattttgctaatatagcttagaaaccaaaacatatttacagtcccatttaaataaacaagtccttaactgaggaacgggtcctccctcaagatgggtagaatttcaaattgatttgtataagcattccttttaaaataatnggtaaatctgggttcaataaagtagaaattcaaataccttgtttccccggtngaataccatccatttcttacacatggctacccaaagttctcaagccattttaattaagcactttcaatgaaatacaatgaaagtgggaaccaaactctgagaaatctttatcatggcatttctcattagtttcagcgaaatattttgaacagaaaaggaaagaaatttcccagtggcaattacaaaaccacatcttgtaattattttacaggactgctaccaaggcttctgcttctcttctccaggtacatctgtttgtaggtttgaaacatttcttttgaatcttttactgggttttgtagcatctcaaatccatctgcactgaagcttctcttcgagagtcttgaattaacattatctctctcttggctgtctttctgtgtccttttctttgtagcaccaaattttaccaagtcttcttttgtactttttattcctgaaccttgcagaggggcttgctccttcctaggatgaggctttacatccttccgttcttccacagagtttgtattctttagtaagatatctggacataatttaaactccagcatgtttgatttttctgtgttacctttcaccggtaaaaaggtcttatgtttattttcctgtctcttatctttatgaagcttcctgggtgaactttctaatttggtgagagaaatgctttcacgttcagtgcatttaaacccaactctattcagatataatttcttttgatccttgtctgct

SEQ ID NO: 453195 - DNA, 682 bp, Homo Sapiens
caataggccaggaaaggtaggtcttccttggggaaggaaatccctttttgccattaaaggttaggcataggcgggtttattggccaatcccaacttaaaaaattaaggagactggaccaaacataactttgcatgccatggataggagttccccagaaaaattgacccactctgcattgagcaggattgatattccccattggaaacctttcaggaaatagatactcatgaaaggcatggcactgcacacaagtaagtttgcagtcacaaggtgtgacaggtagatgtgcgttgatgtttttttacctatttttgttaaaaatatccattgagagagagtgtttccaaaaacaccaacaatacaaaggaggatgtaaatgattggtaaagccatggaagagatcatagatggttgaatacatgttgtattgttgttcatttatgtcaggttttcttgaattttgtcacaggagcttttctaatcacgattgtccggttgaaataaagacaaaaagttacttattgtgatggataatgcctttgtctgtatgagtagtttatgccaactaaggttatattgttcagggcagtgatgccaaatttcagacttaaaattctctgatcttcactcttccaatatctttagtcagtgtgaatagattcttgcatgacaccaactccc

SEQ ID NO: 453196 - DNA, 988 bp, Homo Sapiens
  misc_feature (62)..(62): n is a, c, g, or t
  misc_feature (226)..(226): n is a, c, g, or t
ttaatattgaatctttccttttagctttccctcagttcaatgctcttcttaagtagtcaagnaatttctcaattcttatgtaggtaaaactggaattcagagctagaagtgtattcctgattcgggaagttggattccaccactctgtggttcaggggctgggtcctgcggtaatcgttgtggatggtcttgttgcggtgatccagtaaggaatttctccagcttnccaaacctgtgtcctggagagcttgacaaaatctgccagcacaaaccagtggacgttctcagtgcagggaggcgtggtgagtgagccatggtaggtgtagtagtgctggaggttcctgggcagcatgtccttgaacgtcaaggccagtcagggttgttctttgtcctgggtacttgatgttggccagatgagaaatgaagttgctgtaataagtgttttcagggtaattcttcacctcaacgaaggctgccagtacagccaaaccatccggcgcatcttgggctatatcatagctcttgtatttagaattgtagtgaacaatgtgaatctcgatcacatgtctgatcccgtccacggtgtgctcagagccgctgatctccgaggacgcacctccccagtgaaagtgcatctgctgggctatgtatacagtgccgtcagccactgtcatgcgcatggtggagggcaggctgatctgcactgtgtggccattgttgaccatggggaactcccctgcctgggtctcatagcctgtcatattgagccccttcaaggaggggttgtaccgcaccttcgtcctctgtaggttgataggcgactgtctctggcccccacaggcggggtagtgctgtggccagtgcgcttcgtccagtgccccttctgagtaggtccagtcagacacatgctgggcctggccacccagcaggaacagggacagcagaagcaccagggccctcatggtgctgcacatctgtaatgaagccc

SEQ ID NO: 453197 - DNA, 497 bp, Homo Sapiens
tttctgggtttttaagtattacctctaagttaagtcttctaggatagggttattgccctggaagatttttaaaattttcaaatgtgactttatttaaaattaaatttttaacaatatttcaaagtttattggatttaaaattactttcataactactattaaaaaataatctttaacaacaaaaatattaattccctgctgtctttttctactcattatacataaatcactaatggttaatctataatatataggtcttactgggatctctaataaatagattctataaaaagtacatgaatattcatcatatatactcaaattcatcatgtatacaaatactcaaactattatattatcattgcaattttaaaattagatgaagactatctacagagaaaaaaatactaataatttgaaaaactaaagtgctttatttttcattattttacttgaatatcataatttctataagagcagttagtgattcttatttc

SEQ ID NO: 453198 - DNA, 515 bp, Homo Sapiens
  misc_feature (331)..(331): n is a, c, g, or t
caacgatcaactccatgtgtcaggagtttttttggcctggcattgacctgtctgagtgtctgcagtacccagacttcagtgttgttgttctttataaaaaagtcatcattgcctttggcttcatggttcctgatgtgaaatacaatgaagcttacatttcatttctgttcgtccaccctgaatggagaagagcagggattgcaactttcatgatctatcatctgattcagacctgcatgggcaaggacgtaacccttcacgtttcagcaagcaaccccgctatgctactgtaccagaagtttggattcaagactgaagaatatgtattagnatttctatgataaatattacccattggagagtacagagtgtaaacacgcattctttctgagggctccggcgctggatgcgaatacagctcacagaggaaacgcatgtgctattgggaggaccaggtctttgtgggagatcctaaaggcagtgattgaatttcacagggagctctaatctctgtg

SEQ ID NO: 453199 - DNA, 867 bp, Homo Sapiens
gggtccactcttatctgtcccctgtctgctaatgcctagggactgcatccacggactcctttgctctctggcttctggttggatttgaccagtgaaatatatcacaggagacagaggaaggaggtaaggtatgttggagcatttgttgccttagcttccttctggccatgggtcagtttgtccctctagaagggctcagcacctgccaggtgtctgtcttccactgttcttccattagtggatttataactgcccctgtctcctcaccacctttcatgtctaaggttggcctggagtattgcatataattccttagtcgtttctctaaaatctgcctacacttttataaacagttcctttattcaactctcctcaagtcacccggtttgtgtgtgccatctgttcaagtaagtcaataacagtacattgttttaatcattgtcattttaaacatgttttaacatctggtaggaaacatactcaagatttccacaacctccaaacatgctttgctatttatttattcttaggttagaactacattgaaatctaaaatataatgcattaaattttaaaaatttataatataattaaaccctgaaattagtttaaatgttttattttcccaactgaggacatgaaatgccttcccatttactcctgtttccttcactttctgctgtgaaagttgacaatcttcttatacagatctgcatggttccctgttattccctgggtccttgtagaggtttcaacaggggtttccgccaatatggaaattttaatttttcccccgccaataaatttccaaccaaagcccaaacctgggtgacctaaaatataaccggttcacatttttccaaattc

SEQ ID NO: 453200 - DNA, 203 bp, Homo Sapiens
caccgcatgtagatactttattgaaggtaagtggctattttagagaaaaagatgaccatagtgggcagcctcgggtgaggtttttggggagctcaagggctggtcacttgctgtaggtcttagagcctggttcctggaggcttaggagatcttctcttagcccagatccagccgtcaactcctcctcttcactctctgctgcc

SEQ ID NO: 453201 - DNA, 1004 bp, Homo Sapiens
gcataggcagtggctgtggtttctaccccgggtggccgggggcagtgctgagctgggactgttgtttgcccagcctgggctgcagaaagcagcagttaaagttcgtttctggtcactgctccaggaagccaccttactctgagggtcaagaattgccgcttccttttagttactgtaagttcctcctctgcccctggtttgtttcccgcggcacttctggatacccccaggtcccagacccttccagactcaaaccatgaactttcggcagctgctgttgcacttgccacgttatcttggagcctcgggttcccctgcagtcgcctgtggtggtccccgtccctcgacaccatctcctcggtgggctcttggcgtggtcggtcctccaagtccccggcccactggaatcaggtaggtgtcagaggcggagaagatcgtggggtaccccagtgtccttcatgagccttcgctgcctgctgagctgacgagctcagcaaccatcgctatgcaggtgctggaagcttggtgggcactcagcaccctctgcttaccacagccaggggggcttgtacatgacagctggaatagccctccagttgaaggggcttggtggtgctccttatctctaaagcagctgggccagcagcgtgaacacttcatgtcagaactatgacatggtcagtgggatctaactcatgtcaaaagaaagtttggcagagatccacggagctaattccatatcgctctccttgtacatccgtggcatacggtacctttcaattgccgttgcaatcatctgaatggtccattgaacgacctgcatttggacataacacttggtaaccctgagtggagacttttcttctagcaaatgcctgcaatggattagctctgctcacgaaacccaagtatttcacttaatggccttatggcaatatccactgcacctggaaatacacctggctcctgtcaacgcccaagacatgtcagatgcactctgatgt

SEQ ID NO: 453202 - DNA, 497 bp, Homo Sapiens
aaaaccagcgtggttctgagcacacggttaatttcaaagcttttcccatggagctccatctgatccactggaactccactctgtttggcagcattgatgaggctgtggggaagccgcacggaatcgccatcattgctctgtttgttcagataggaaaggaacatgttggcttgaaggctgtgactgaaatcctccaagatattcagtataaggggaagtccaaaacaataccttgctttaatcctaacactttattaccagaccctctgctgcgggattactgggtgtatgaaggctctctcaccatcccaccttgcagtgaaggtgtcacctgggatattattccgataccctttaactatatcccagctacagatagaagaatttcgaaggctgaggacacatgttaagggggcagaacttgtggaaggctgtgatgggattttgggagacaactttcggcccactcagcctcttagtgccgagtccgctgcatt

SEQ ID NO: 453203 - DNA, 492 bp, Homo Sapiens
ttttgctttcatgtttattaaagaagatcactaaagatattgactagagaatgctgtgtgctatttcaattacatttgtttttcttttattaacaggaattttgattcttcaaggaagtggctcaatttcaatttcaggtgaccaggtttatcgtgacttttccttcttgtttacttttcgctaggaaggggagttgtaggggcagattcaggtattggaataggaaaattacgtctaaaccatggaaatcttggaaatggaattggtggaagtgggcgaaatggatatgggtaagggaacacaaaaaaccctgaagctaattcatcgctgtcactgatacttcttttttctcgttcctggtcttgagagactgggaaaccaacagccactgccaagatggctgtgatcaggaggagaactttcttcatctcaaacgtttcagtcagttctttctctctgacgctgttatgagaaatggcaagtgactcccc

SEQ ID NO: 453204 - DNA, 1018 bp, Homo Sapiens
tcatataggatagtctatcgggtaatgtaaagagcaacccctcccgtcggaagatacccggttaacaagaaagagggttctgaggaagttgcgagtattttcctagcctttcttttttccgggaaaagcatcctcagaagtgaatactccgtagcttatgtttctcctgtccattcagaaaaagcatgacagctacgcatctccaatgtttcagctactacaacaccctaagagttagtgtattttacaatttatccatgtatctttatttgaaaaattatcagcaaaaaactgaggatgattccagcttacataaacactgatacaatataatctctatggaaatgaaataacaaggcatacaaaaattgcttaaataaataaatgtggccagaaaaagaaaagccacagaagtcaagcaattcagtgttaaactgggacctatctttgaattgcatcttttagtaattttttcttactgttaagcttctgttaaaaatatgtttcctttacatacttacgaggattggtaacaaggtgaagagcctgagacaagagactggttacagataacttcctaggattttaagtatatagcacatcaatttagagcttgaacttgtctgattcaaagaaaaattctgtttgacaatgtgataaatacaggttattttctcaaaaccatcccaagctattactaaagttataaaatatttagttcacttttagaaggctttataacgttaaattgtctcttgagaaaatcctatctgacaggaactactttaccaagttcccttattaaaaaacaaacaaaatgaaacaatttgtcccatatcatgtatggtcatttgaccaaagaacagaaatgtaagtcgttttaagtcagtgcttcaactctaaaggcctaaatttgttgcaacatgtagccaattagttgagtcattccctctgttcagtaattacagaactgggcaactttttataattaatgaaatctgatattatatctatgtga

SEQ ID NO: 453205 - DNA, 636 bp, Homo Sapiens
  misc_feature (507)..(507): n is a, c, g, or t
  misc_feature (528)..(528): n is a, c, g, or t
  misc_feature (547)..(547): n is a, c, g, or t
  misc_feature (597)..(597): n is a, c, g, or t
tacaacttgatttggttttcagttttaaaaggcaacatgtgggttttatccattttatttatacctttagatttcagaaacatcttcatgttttagatgcattctacagacatcatgttacttaaaaactcagggcccctttcatccctttgtacactgaaaaagttcaattgttagcaagtaagcaattagatccagttgaatatttaaagtgtttgttgcacagttcatttaatgtttcatcttatttgactttttcacatagatataatatcagatttcattaattataaaaagttgcccagttctgtaattactgaacagagggaatgactcaactaattgggctacatgttgcaacaaatttaggcctttagagttgaagcactgacttaaaacgacttacattttctgttctttgggtcaaatgaccatacatggtttgggggccaattgttttcatttgtttgttttttaattgggggactgggtaaggtggttccgtcnggtggggttttcctcaggggncatttaacgttttaaggcntctaaagtgaccaatattttataccttaggaataggctgggtgggtttgngaaatacccgtattttcccttgccaccggatttttcttg

SEQ ID NO: 453206 - DNA, 887 bp, Homo Sapiens
ggaggacattgacctacagtcttgtttgccagaaggggcaacagaagcaacagcaggtgcattctgaagggtctctgcatgtcatgatttctcgggcccatacaatcagtgacccggaggacgaagggccttagtgtccgataggcatttcctggtaaagtcatctgtgtctttcggttacaatgtgagaccatctggtctgagttgtttttaatatcatatctattattagtttcgaaacatgtcatcatttccagaggctctaaatgctgaagaacatgtatgttgtccaactgaactaagtattccagaccaggagggcagtttgccataggagttggccctggcatccatgttattggaacagactgatttggcataggatatttgccaggctgataccggacaggatggataccaccaactggctggtacaaagggaaggtactgggttgctgtggactgtagtatcccataggcaagcctcctgggtagccagtaggtggagggacagctgttccagggggtcctggtaaaaaatgagaattgtattcaggaggagcatcaggccttggatctggtggttttgtttgattttccatttcacctgcaggctgttcaggggctgtgggtaccacacctgacattttgaagaattccaattaatccgcctgccccgcagaatgctgggcaccggggacgccagacgccgggtctagttgtactggcagaggaaagggaaaggaaaggaggcagggaagggagacggagaggatttttcaagttataaacaaagtaagcgcgcggaagggagggctaggcgcgggttctgggggcgggtccggcacgcctggaccctccttccccgcgcgcggctaccccccgct

SEQ ID NO: 453207 - DNA, 786 bp, Homo Sapiens
gtctgattggtgttatatgcatatcgatgattagtttcaaaacaggtcatcagtttccagaggctcaaaatgctgaagaacatgtatgtttgtccaactgaactaagtattccagaccaggagggcagtttgccataggagttggccctggcatccatgttattggaacagactgatttggcataggatatttgccaggctgataccggacaggatggataccaccaactggctggtacaaagggaaggtactgggttgctgtggactgtagtatcccataggcaagcctcctgggtagccagtaggtggagggacagctgttccagggggtcctggtaaaaaatgagaattgtattcaggaggagcatcaggccttggatctggtggttttgtttgattttccatttcacctgcaggctgttcaggggctgtgggtaccacacctgacattttgaagaattccaattaatcctgcgagtggcctggcctgagtccgtgagagccgcgccgtagaaacgccagagacccatgagaaacccaatcaagcgagacctgtcacgcagagcgaaacgaaagggccgcccccgtgaagtgcagccaggacccccatccctgggcaggaaactgctcgctcccaaaccctctgcgtctgcagtgcagacgcgcgcccgacaccacgaaacttctgcaaccacctgaggatgcgacgcgagcgcagtgtccgggaactgctagcgcaggacgccgcgcaacctccgcgcctgcccgcaggcaccgcgcccgct

SEQ ID NO: 453208 - DNA, 859 bp, Homo Sapiens
  misc_feature (73)..(102): n is a, c, g, or t
  misc_feature (140)..(141): n is a, c, g, or t
  misc_feature (160)..(161): n is a, c, g, or t
  misc_feature (164)..(164): n is a, c, g, or t
atccgcttttgaaaaccccctgggggaagggggggaaaaagttttccccaggttgaggcttggaaatttccgnnnnnnnnnnnnnnnnnnnnnnnnnnnnnnaggcgggaccaggaagtggaggctttccggttttcccnnaccggccgaagaaacgcgnnatnttctgggcccaggtttataggtcccattctccataggtgttgtttaggactataatttcttccatgggcttagaaaaaatgcctggccagatagggaaatggtcaaatattattattattgataagatgaccattttggagtttagaaaaccattttcaatgcttatgaaataacaactccataagccattcccttaaatccagtagactgaattctcacaagtcctcatcactcatcatttctacatcctgctgatttacaaatacttcttcataccatggtttatgtctttgcttaatatcaaggaggatggattccatggtagagccaaactcaatgatactacgagtctcattttggtaagtataagcaaagccagcagcatgcatggccaccaatgaaccttttgaatcaaacacaggggagccggaagccccaaagaaaaattcagtgtcataggtaatcacatcagggttgtgaactattttctggaaacttctttgagtatacatatggacatactctggactttctgcttttttagactgaacacgttcctgacatttctttgctcgctgaccctgagggatcacagcacaagcatcaatctgctttttttctccatatggatggccaataatatgtatcaacccactaagtggcacaggagtgattccattatatagttccatcc

SEQ ID NO: 453209 - DNA, 1105 bp, Homo Sapiens
ggggaaatagatgtaagtttctgctacttgaaacctacagaaccgacaaaaattagggtgctaaaaaaatgacagtgaaatctcatcgtaaggcagctagttctaatttgcatttgaatgtataacaaattgcatcacttttcacaaacttaacacctgcctggagtaaaaatctgatttgacccctctgctcatgtttcatcatatttgtagctctgcatcatttagcatttttatgactttttttgctttatataaattattgtaaaatccagattgtttttaccacatgatgacgtgactcaggattaaatcctgagctacagtttcaaaaggaaaatcatttttttcttatgcaaagatggtaaaacactgttgtcattttttccagtattcaataagtagcctttgtacaaatttaaaaccaaaaactattctgttgtttttcttcacctactagccttagtttttaaccaagtatccaaggatgtcaacttgacatccttcccttagcatgccaacaagccattagactgattcttccacctacttttatgaacctccaggaagaaaaacacttgccaaaacattaagagaactttgattctgccttaagagggtatagaactaaaccatttgaaggcacagcccataagactatacttgattttgccccaagattctgacttctggctacatttcacctgcagttacctgggctatcggccgtgatacattttttaattcatttgttttccaccattaaatttttatacttttcagttagatatacttctgcataaagagtatatatacagtgtaggataaaggcatatcgtacatggcaatgctgttaaacatggtaagactgaggttctgcagggataaagtccagattaagggtacagaaagcacaccttgatactgaggccctttagagcaatttggttaatgagtggtttagccatcacccccagtggccccccggttcaataaaattggctaaccacccccggtgggaaaagtcttcctaccccccaagggggaagctgttaaaaatggggccaaattcttttgaaaaacaccttttttttcccgggtgggg

SEQ ID NO: 453210 - DNA, 751 bp, Homo Sapiens
ttagggccttttctgaacctgaacttttaaatccccggttgtccatggggattgcaaaattgccttaagcatcagaaaactggctgccattttccagtacatgaactatgctttgggtttacttaagaaactccttgttgaaaaatcttcttgcctcaacattactaagggaaacagagcaacgagatggattctgtcttctatattcaatgctttcaaccatggcttcttttatcacatcaatgttgttcagagtattgaagtgcataagatcatgtagtcttttgaatgcttgatttggatattgaaaattgaaggttgaaaatggtgattctgggtcatcaaaaatatcaaagtcagcgatttctttctcttcctcagtttcccttggaacacctggagccttgtactttctgaagttgatgttggccagaacaaagtggatgatggttgggcaatctttctccatatcaggattcttgggtttaaagacatagcactccttcagcccttcccgatcaaacacataaggatcaatctttggaaaggggagcttgttcattttagcccacttttctgcaagtagaagttccttgaacggaggactagagtcacttggccttgcagaaaagtcaaaggagattatgagatcaacccctctctgaggtctcagtatcaagggatacggcaggttaaatgtgagcccactgtccactacatgaatctttttacttttgacatccagaggccc

SEQ ID NO: 453211 - DNA, 999 bp, Homo Sapiens
gaggatcctcggtcatcccccttcgttcagtgtttgcaaagccagcagatgtaattggaacatcgatgaatcaagcaatctgtattccattgtatagagataccagaagtgaggattctacacgtagattgttcaaatttccttttctagtggaataataaaacttcaaatctacattatcttctttttactattctagaagattcactttataaaatgtgcatcttaaggagacatactgatatttctcagtaagtattaatctgaagtttgaatcaaagagataagattttattatttgtaagaatgaagcatacagccttccagcatttcagattttaaactactttgtgacttttagatgtgtcatttaattgttagttttcatgtcattaaaagggtaacactgaattaggaagttatatgatcttgttttagattatttaatttttattggcatataatcattgtaggactttttttagagttaggaaaaatatgacagctcaggatattatacttcattttttagaagttaaaaacttccgaaaaactaaaagttaaagaagttttaactttttagaagttaaaaacttctaaaagtggctgccttatagaaatgatttttgcctagggttaagtatgcttttcattaaacaagaggccttgcctaacagagacttactttgaaattgaaagtagaaggtctgaaaaataaatccatattttagaacgccacttggtagcttaaaaaatggtttttacaacctggatttctgaacaaaaactggttgagaaccctcgaatgtgtactatagaagaaattaaattgtggtttactttctcattccccaattgctcatttggtcacagtgttgttctacttctgaacccgaaaagtcgtctctttcactattccttgtctatttgttataccgtctttccttcatcggtctcactaacgactaacttcctaccgcatcagccgtcagtatctta

SEQ ID NO: 453212 - DNA, 910 bp, Homo Sapiens
agagattccatcttttaaaggggggctaattttttctttccaattttactgacttctttgccagaaagctccctttccggttaataagaggttgcctggaagctttcctctttctcgggctcattttctttcttccagaaggtcaaattcatggctgaaagttcttctttacttatttgtctggctgggctcatctcatcataattttgtttaaggccagaagaaacttcattatcttcttccacctgctctttttttgcttcctcagctctggataataaatttagctgttctttaagagtcttaatttcaaccccaagagaaaacttctcttcattaagctgaaccattttctcagtcatactaaagctgatttctgtcacttgttgatcctttttcctggatggtttgttggaggggtttcccacatctctctttttctctagtaagaagctgatccatttttgttatttcaagttctttctgtgaaagagcctgggacagttcttccactttacttgagatatgccttacacgttctgccccctcaagcacttcactttccttattttgcagctggctttgcaggcttcttatcagggtactctgctcagaaaactgaagctgcacatcatccagttcattctgtaaaacttcaattttcacatctttagatttggcttctatgctgagactatggatctgttcagtgagcaggttgtcatgggcagtttggctttcataatcaagtcttctttgcctttctgcttctgcaaggttcatttccagttgctttacctgagccctcaattctgttaccatgctaagttccctcacctgagagagaagctggtctctttcttcagacaaagcagtgaatgcactgctgttgttgtcagcatttttctcc

SEQ ID NO: 453213 - DNA, 750 bp, Homo Sapiens
  misc_feature (260)..(394): n is a, c, g, or t
  misc_feature (450)..(466): n is a, c, g, or t
  misc_feature (585)..(603): n is a, c, g, or t
ggcatataggtagaggtagatgggtagatgtgttctatctatgttcctgtatgtatgagatgtatgtatatttaacacagatgataggttaatttaattgaatttatttaaaaaatattagtgttccatgactccatagtgatcatctaaaatacgagcaggggctacttacagaagaatgcagctaataaggaatgcataatagaattagaaaatcatcattttgtcactcctaatacaattgttgactcagttgaaannnnnnnnnnnnnnnnnnnnnnnnnnnnnnnnnnnnnnnnnnnnnnnnnnnnnnnnnnnnnnnnnnnnnnnnnnnnnnnnnnnnnnnnnnnnnnnnnnnnnnnnnnnnnnnnnnnnnnnnnnnnnnnnnnnnnnnacccatacaggtacaatctctgcctcctgaggtgtagtattcttgaccgaaaatgnnnnnnnnnnnnnnnnngaagcagggccttgctctgttgctgcaacctcgatttcctgggctcaagcaatcctcccaacacctcagccttctgaatagctaggactacagggccatgccaccacacctagctaggnnnnnnnnnnnnnnnnnnngagacatgggtcctccctctggttgcccaggcctgggatttgcagtggtgccatccatgggctcaaatgccacccgccaaaccccatggggctcctttttgaacccgtcccagctccgtcctccctggggtagccttgaaacctacc

SEQ ID NO: 453214 - DNA, 901 bp, Homo Sapiens
ggtccagccaagaagtggtgtcctgcctccgccagaagcctgccaatgtcctcaatgatgcccagaccaagctcttggccgtgagtggccctttccactactggggtcctgtgatcgatggccacttcctccgtgagcctccagccagagcactgaagaggtctttacgggtagaggtcgatctgctcattgggagttctcaggacgacgggctcatcaacagagcaaaggctgtgaagcaatttgaggaaagtcaaggccggaccagtagcaaaacagccttttaccaggcactgcagaattctctgggtggcgaggactcagatgcccgcgtcgaggctgctgctacatggtattactctctggagcactccacggatgactatgcctccttctcccgggctctggagaatgccacccgggactactttatcatctgcccctataatcgacatggccagtgcctgggcaaagagggcccgaggaaacgtcttcatgtaccatgctcctgaaaaactacggccatggcagcctggagctgctgggggatgttcagttttgccttgggggcttcccttttacccagcctacgaggggcagttttctctggaggagagagcctgtccctgaaaatcctgcagtacttttcccacttcatcagatcaggaaatcccaactacccttatgagtttctcccggaaagtacccccgttttgcaaacccccctgggccttgactttggtacccccgtgcctggtgggagaagaaacttccaagggaggtttcggttggaggctggcttccccccaaatccaaacagggggcctgggaaataaaagcccctaaactgggccttccccttctcggggtccccacaaggtgaccattacctcgcggttct

SEQ ID NO: 453215 - DNA, 771 bp, Homo Sapiens
tggggggattttccccttgaattctggaaaagaaaagtggggaaaaaaagttacttggcatggattttttcaggcgaacagggttttttcttcctcccaggagaaaaacctgcccccttgttagggctgggttagaaagggaaagcccccaagggcaaacctgaacatccggccagcagctcccgggctgcccatggccgtagttttcaggagcatggtacatgaagacgtttcctcggggccctctttgcccaggcactggccatgtcgattatagggcagatgataaagtagtcccgggtggcattctccagagcccgggagaaggaggcatagtcatccgtggagtgctccagagagtaataccatgtagcagcagcctcgacgcgggcatctgagtcctcgccacccagagaattctgcagtgcctggtaaaaggctgttttgctactggtccggccttgactttcctcaaattgcttcacagcctttgctctgttgatgagcccgtcgtcctgagaactcccaatgagcagatcgacctctacccgtaaagacctcttcagtgctctggctggaggctcacggaggaagtggccatcgatcacaggaccccagtagtggaaagggccactcacggccaagagcttggtctgggcatcattgaggacattggcaggcttctggcggaggcaggacaccacttcttggctggatgacatggggcaactgacctcctttgccaaagcaattgcctgctgctgagccccc

SEQ ID NO: 453216 - DNA, 877 bp, Homo Sapiens
cacaaaagtctttactgttattctttatgcctgttggataatgtaagaaaaagacattttacagagaatttcatcagtagaaaacacaatagaagtcgatctgattatgcagaaatacacataaaaatccctttacaagcagataaaaagttcccttttatgtataaagcagtagacaatagtacttcatcattaagttggttgaatcctgggagatatattttttaatcaaaatagctgttttcggataatctcctatacattcaaatctctatgggacctcagaggggaaaatgtagcactgaaaattttaagaaaagctattttttctgcttttggattgtttccttgttttcaaattaaaattcatacaaacaataaaacattggaacatcaatgcacaatgattacaggaggctcatgtaacataggagatcagtaacactcgaaatgtattttgtatttattaggtaaatgtaatgaaatctctgtatatatgtatactaagtcaaactgacatacttatcaacatatagggcactggagggataaatgatgtaattccatgtagcacatagagactatgccattatcaatactgaaacaaaattcaatccttcgggtgtctttaagaaacccagatggttgatcttgcgctgataacacagtgaaataattaattgattccagttttattccacatcttacacatcagacggtcagtaaatacctaaagtgtttgaatagggtcaaagacattgtaaaaaaatttggaacacttagttatgccatttatttatttgaacgtttaaattccacaatatccaaacaggaaaaaagtgtttccatgatgccttgaagtataagaaaattcccc

SEQ ID NO: 453217 - DNA, 786 bp, Homo Sapiens
  misc_feature (164)..(248): n is a, c, g, or t
  misc_feature (417)..(465): n is a, c, g, or t
  misc_feature (577)..(593): n is a, c, g, or t
gggcaggcattataatccctagtttaggctgtaacccagatttacaaaccagaattcaggattaaacccattgtagtgatcattaatcctatcttttcagaaatagacacatggtttctggttgtatttcagaagaaaaacagagaagccattctatctttagnnnnnnnnnnnnnnnnnnnnnnnnnnnnnnnnnnnnnnnnnnnnnnnnnnnnnnnnnnnnnnnnnnnnnnnnnnnnnnnnnnnnntgatgtcgttttcaatcaagcaagacattctcaattggggacctgggtataacttttctctagaaatgaagtacaacttcattcactccagtgtgaaatatatgggaaaagtccccaagatcaaagcctgtgttgtatataatatctagaaaattgttggcacttaggnnnnnnnnnnnnnnnnnnnnnnnnnnnnnnnnnnnnnnnnnnnnnnnnncctgtatttttcagtatgtacattccaaatgaatgtttttatattgagttcatttagaatgctttgtctttaaaaattcactttaaacacagactactataggtagttcaannnnnnnnnnnnnnnnnaagtggtcagagttcagttaaagattacttactttacacactgctaaaatttttgagaaaaaatataaactcattttaatcaccatggttatgtaagcacatcaaaaaaatttttactcagaatagcactgtttttatgtcagattttacacagatcatacctatacatgcctccatgcaatgatcatttccc

SEQ ID NO: 453218 - DNA, 442 bp, Homo Sapiens
  misc_feature (312)..(313): n is a, c, g, or t
tttatttcagcattctgtttcagtgtttcacattggccacttagctagatccgtttgtcttctgcagtactgtgctgatccagagtatatgctaagacagaaagtgctttggaggtaaagtttaaaaaatacaagggcttcaaaatagtactagtaatttgatccattcacaaaaggacaaaggctggacagagacgtgaagaaatgaatcatttacgcaatgattggggtgtgtccaattatgtgtgattttgtggttttctgcccgtttcatttttgtatttgctataaatcattttttgaccaatgaanntacaaattcaaaatagccaccccaaaaatttggtgaaagggaataaccggaaaccctttcattttggaatgaagtttccagggaaataaaaacctgggtggggggttacccccttaaaaaaatgggggt

SEQ ID NO: 453219 - DNA, 1109 bp, Homo Sapiens
  misc_feature (408)..(408): n is a, c, g, or t
acaacgttcagaaaaactatgaactactttatacttctcttgctcttataactattgaactggctaatgaagaagtagttattgatctcattcgactggccattgctttacaggacagtgcaattatcaatgaggataatttgccaatgttccatcgttgtggaatcatggcactggttgcagcatacctcaactttgtaagtcagatggtagctgtccctgcattttgccagcatgttagcaaggttattgaaattcgaactatggaagccccttattttctaccagagcatatcttcagagataagtgcatgcttccaaaatctttagaggaagcatgaaaaagatttgtactttctgaccaacaagattgcagagtcgctaggtgggaagtgggatatagtgttngaggagattgtccagttccgtatgttaccacaagtaacagatgaagatcgactttctagaagaaaaagcattgtggacaccgtatccattcaggtggatattttatccaacaatgttccttctgatgatgtggttagtaacactgaagaaatcacttttgaagcattgaagaaagcaattgataccagtggaatggaagaacaggaaaaggaaaagaggcgtcttgtgatagagaaatattcagaaagcaccttttgaagaaatagcagcacagtgtgaatccaaagcaaatttgcttcatgatagacttgcgcaaatattggaactcaccttacgtcctcctcccagtccatcaggaacactgaccattacttctgggcatgcccaataccaatctgtcccagtctatgagatgaagtttccagatctgtgtgtgtactgatcggcgcatgaagacctcagcatatgatttgtaaaagcctaaaaattaaggccaagctgaacttttcagggtttactttatggtgtatttaacataacttccttgaaaaataaatgatgggaaacatatccttttaaaccaaaatggtttgggcaatacccaatatttaaaaaagtttttgggaaggctattaatataaatttttccgaagataaccttttccaaaagaaaagagatttttaagtgccccatgtgttta

SEQ ID NO: 453220 - DNA, 936 bp, Homo Sapiens
  misc_feature (136)..(163): n is a, c, g, or t
  misc_feature (740)..(748): n is a, c, g, or t
  misc_feature (867)..(894): n is a, c, g, or t
ggaaagtgacaggaaagaagagaaaatacgctagaagaaggcttatcattaccaccagttgttaacatgaaatacagtcctacccgtatggcaaactaaaggtcgacagcttaaaatactcatctaagtatacatnnnnnnnnnnnnnnnnnnnnnnnnnnnntttaattggctctttctttgttttctaaacaatccctaagtagaatgaaactatattatcacccaagaatgatacttgtggttaaaagaaactaaacacttgtgagaaggtgatgccctcgcacctaaggcggggatggggttttacaaaagcttgcatgtcaaggacaccatattcagaggacatgactttgggaatatttcccagacttcactgttttttggctgaaaggaaattcttcagtgagaatcatccagcacaagtcacaacgatggctggacattgggtgcccacaacactaagcctaaataaagggcttgcatcagcccacgatggattctacataagtatcaagtggccatggtttgaatacacgggtggcattttaaaggcagaagaaaaaaagcacagcttgttttacagagagaataaatgaacaaactctagtgctcctgctgttgttaactggattgagtagtctcaactttttagatcttctctatctctatgagaatgtacagcactgtctctttagattgggtgggggcatgggtgagggagatggaagaagaggagnnnnnnnnngagaaggcactgtccaattcaaaatgactgcatatatcagtatggatttttaaggacaataagtggccatctcaaaccaaatacataattttacatctgagatccttcagtagtaagtnnnnnnnnnnnnnnnnnnnnnnnnnnnntatgtactctattagccagtgtatggatcatggcacagatcc

SEQ ID NO: 453221 - DNA, 254 bp, Homo Sapiens
ggtatcctgatggtcattatgttttgtttactgtgctgctagttttaatctacatcacacatagagttgttgcagctttcttataaggaaaataacttttaaaaatattttttaagttttggttttggagttttgctattctgggaaggtaccttttactacaacaagtaaacatgcataataaagtaggattcatccaatgtctgacctttctttgcatcaaaagaacatttccggccaggcacgggttgtca

SEQ ID NO: 453222 - DNA, 1232 bp, Homo Sapiens
  misc_feature (1186)..(1186): n is a, c, g, or t
ctctgtaactgtggcaaggagtgcaattcttacacagagttcaaagcccatctgaccagccacatccataaccatcttcctacccagggacatagcggcagcatgggccaagtcacagcaaagaaaggaagtggaagtgctcaatgtgcccccaagcttttatctctccttccaaacttcatgtctactttatgggtcacatgggtatgaagccccacaagtgtgatttctgtagcaaggcttttagtgatcccagcaacctgcggacccacctcaagatacatacaggtcagaagaactacaggtgtaccttgtgtgacaagtctttcacccagaaggctcacctgggagtcccacatggttatccacactggggaggaagaatcttacgtgtgattactgtgacaagttgtctatgcggacgcaggaactcatgcagtacgcgttcatccttaccctcctatcgccagacctagccctataccgtgtgactattctcgttcttccgaccacccatccactttcctcgtcgtactctcgccttctcctgaccgtctcgaagtccttatctcctccctactattccgtacccccgaattcctttcttcaaatttccctctctaacattctcttttttctttaatctccaaaaagcctataaccttaattatatttgatgtgactattactataattaaatgaaataggcatagataccattcccaatactaacatcgtttaatttttcttttttaactcactcagcttgttccattcagtacatcttaactcacaattccgggactcctgcttttatactcccggcaatgccttccctcatatccccttcactttcctttatacccgtaattcgtaataaaaatctcataagtgcgaccactctgttccgtcccccgcccctctttttaatcacctgctccaattaaccaccgtttattaccaattttatatccccccttctaccgacctgcttaatccgcagtcactccttatttccttagataccccttcacgtattacgtacttcctgaatttccgtccaccctgcgcccgcgtcttactccttatctcaccccctctttctctattctggcataatacctctcattaactgtcttctccctcacaccgcaataaataggatacacctccctccacgttatanccgcctctctctcctaccggtatatatcggcgctactcatatcttt

SEQ ID NO: 453223 - DNA, 796 bp, Homo Sapiens
tggatagaattcagggcgacccgcttatcctgtctcccaccatccacagtgcctcgttaagcgtccgctattaacaagttcctcaagcacagagtaaagaagctgctcctgaaatccatattttgaaatcaaagaattcacagctgtaggccgggtaatagcactgaatagtccacggatacgtgctttatgtcgagctacaaagcttccgtaaaaaattactccttctattatcaagatcaaatatgtccactgataattctaccaagtcgctgagttagtgcctgtgtcagaaagttcccaggaagatcataagttttacacagttctgatatggtgacctgaccactttcttgcaatttatcattgacctcttctgccaaccgatccaaataattctcatctatcagttgtcccaacactaactgaacatgcttttctgatttaataatgtcaccaattctattttcaatatgaatcaggtccacattaattacctgttgtagatcaacaatgtttactcgaccacctcggacatgtagctcatctctcatttctttactaatttgggctggagtaatatattcctttccatcgagtgtatgaactacttctagctgtttctgagcaatcaatttattaacaatctcaatgcagttccgctcggacaacctctgcgtggcctcggcgaactgcgcccgctggaagtcggccgccaaccgcctaatctcttcccaggcgtccgccatcacggcctgactcgcagtagacgcggaggaactgcagacacgtcccc

SEQ ID NO: 453224 - DNA, 932 bp, Homo Sapiens
tgttttgcatatattttattttcctactcttccctgagcaaatataagcagtaagcaagcaggctaggtgtgctcaataaactcagcaacacctgggatgacctctgcactcgaggggccactgcaatctttgtcaaaggcataggatgctcctgctctagttgcacttgacctaggcgccctttctgctacatgcaaatggcctctaagaagaacgaggaacgtatgtgtccaggttggcttgatttcaccagttcactcagctatggccacgatttactgacatcagctctgcaattgagaggtcctgtctccagggggaggctcgctgggcttgctcctgacgaggggacccccccttgagggtcattttcccagaggagagttggggtggttctggaaacccccgaggggcaacgtggaggagctctcctgtcgtagcggctggtcaggggccagttctgctccctggctccactgagctcgcctgagcctgtgaggttgccaggggttccctgtggcacggcaggcacttctggatgcagaggtggaggttgaggccgtgactccaggggcatgtttggtggtgcttggggctgttcctcatctgcggggaggcggaccaggacatgtagagcaagatgaggaagagcagcaccacgaaggcagccaggctaacccagaatgcgatcacgatggaatgtttgtgggctttcagcttcttctcgtccacgggaatgaggtccagatagtccaggtagtattcatagctgtagtatggggcagaggcgttggtcccgttggccatgtctgtggcactgggcagtcagcgtccgggccggcagcctcgcctcgagccaggcgccaagcccctgggaggagactgcctcactgatttctgcaggaatcgtccaagtgtgtctgtgggtccc

SEQ ID NO: 453225 - DNA, 735 bp, Homo Sapiens
gggacaagaggaggaaggatatggatcagtgttttcttttttgaagctactgttaccactcctggaaaagttcttcaggaataagtgacagtaagaatgacaagggattaggactggcttcctcttataaataataaaatccaaagagaagtgacttgagtctccaggtttaaaggagagcaactagaagtcgtccaaacacctgcatctcataaggagaagaaaagtccacctggatcttgtttctggactgagatggatggagaggccacagtgaagcctggagaacaaaaggaagtggtgaggagaggaagcaagaaaagataaaactgtgtccaagtttcttacttgtattaaacagagtgtttttctagatattgttaaccaagataaggaatccctaaagagaggcaggcttgatttagagctgtctgagggcttccaaaagagctgttcagtgaataagaaggaatccaaccatggagcatcagagtctaagttggatgtataggtttgtgtgtcttcagtattgtcttgtattttaagacagaattagatgtgcccatcagaaatgagtgtatggcatgaaaaagttgcagatggtaggccgcagtgaaactccattgtttggaaaggccttaacttgaacctttcctaagctagaaaaattttaaatggactggaaatgtttcctaatgtgccctagaagcttcctttttctaatgaaccccaggg

SEQ ID NO: 453226 - DNA, 925 bp, Homo Sapiens
  misc_feature (102)..(117): n is a, c, g, or t
attttgtttccacgtgtggccccccgcgaaattttctcccctttggggaaaaaaccccatctattggggcccccaattttttcccatttttcccccttctcnnnnnnnnnnnnnnnncgccccaaaagggaaatggggttttaagaaaaggattttctccaaggggcccgagagggggggcccgaccaaggactcaaccacatctcgagcgcggagaccagcaccggcctaaccactgatgtgggaaggtttctttttcctgactggaaacagttcccaaccaaaccacataccaagtgctgtgagataagcagaggcaaggccaagagggcttaattatacagtaagctccaacagtcaggtgaacctcgtgctttaggcatgaccagaatcaaagagcctctccacaagccaccattctcagggtttcctggtaaaatacaagtaactgcaaacaggaagatctggtatactgttcccaacatgcagtggccacagcaggtattgactgcaacttcagctactcaggaagacaccctatcatgactcaggaagacaccctatcatgactctgggatcaggattccttgccgcaaggctttgtcactgcactccacactccttgggattttccatttcatctccttcaaagtccggcttcaaactctttttttgctcaatttccacctggtagctgtagtgtgcagaataattgacccacttcctgacgtcagtcttgtcttctacagcgatagatctcacgctggctttggaggcagaagttgtgggcatgctgaactcgacattcacgtgattggcaaatctggaaggcacttcccggtcagagccgagttcaaggtggcaaaagaaacagtgtgggtgaccggaagctgagtttttgtccggcagtcggtttatcctcccc

SEQ ID NO: 453227 - DNA, 987 bp, Homo Sapiens
  misc_feature (257)..(257): n is a, c, g, or t
  misc_feature (284)..(284): n is a, c, g, or t
tttagggacctttggtcaaactttttcctttcgggaggccggtttggcttaagctccatcaaatttctttttgtaacatcattcaaggcatttcttgtgcgaagctcaattttgttctttaaagtccttccaatttggtcctctttttacatctaacttgttctgtaagtcttgatgctgaatcccaatgcagcatttgcttcatccaaacattccgtgtaatgatatcacttttccttccagattttctgcgtttntcttccattcagctataagctgttttngcttttcgagttcagcagaatacatagctttttcctcttgttggaaatgctctaggtaccatctgcaggttggccagtgacagagcatactgctttacttgttcctgagagaccgaaagctgcagcgcagtttcatccctttgcttggaaactacattcaactgttcttgcaatgactctacctgcacactggcttgatggcttgcattttccattgcattagaggatgaaactagcttttcctccaatactgtgactttctttcttagtttagcctctctatcttctgcagccagagcttcacgggtataagaatcttctgattctaaaagatgattacgcaatctctctagctcttggtttgaacgaaattctttgtcacgtacacgttgaacctcattctgtagggcagtattttccctttgtttttgtttcagggccaacatgacttggtctctctcctgttgaaacacaactgtcttctcctgcattgatttaactgcatttaaaagctgatttaactctccagtcttgccctgttctttctctttcaatagctgttcaaaagcaagagccttctccttcattgagtggcactcaaactctttttctcgcagcatcatagaaaacttcatgttagtctcttgtaacgcttgatattctgtttcctttcccctgtatgtttccactattttttcattcc

SEQ ID NO: 453228 - DNA, 974 bp, Homo Sapiens
  misc_feature (278)..(278): n is a, c, g, or t
  misc_feature (459)..(459): n is a, c, g, or t
acgggaatttttggtcccttttaagaaaaaccaggaaaactgcctttgtcgatattccctttaaaaaagtgcaattgcccctcctttgtccatttctttgtaaaagtctgagatgtttgtttctaaaacagcacagctttacatgaaaccatgcaagtaaaggaaagaaagtgctttagagggcaggttccatttgacacaagcagcacaggaagccgtacacttttgatgacagtaattcaaaaagtatattcatttgagtttctcaataaacgctntgagagaaaaggctttaatgttgattcagatgagtgttaaaataaagctttcttttctgaaattagattatggggtaaaccaagcccagattatctctggagatgacagaagcccataattattttgggaaatttcaatcactgttttggaattgatacctaaggctttcttctcccctanttatttatgggctttttaatgagatatttttctcgggagatgcttaggtaggaaatatcagcttttgaaagataaaggtacaattatcattagaatcaaaagcccattaaataagagtctcaaacaaaggttttctagatatattttatatacgttgttttcataaagatagaaaagaaattcctataatatctgtaagattatcctcacattagcccacatgaaagataaaataaagggctgagatggggggtgcttaaatactttgcaacagtgctattctagtgccaaagccataattaacttttcactgataacctgtttcttagcctatacaaaaaggaatggccacctcaattctggcggcttagtcactatctaatcccttcctccaaaaaccctggaattttgtgttcctctatgtaatggaacatccaacttatcaaatgatgtgtgactatgcaactactccttctatggcaccaagactgtaccatgctccacccatactgaat

SEQ ID NO: 453229 - DNA, 1016 bp, Homo Sapiens
ttactttggaacccagaaaagaagcatttcggctttttttccaggaccctgttggtttggggagcagctccactgaactccaggaagacgtggatgttctggtgcttggctgccagcagctggcccttggcttgctggcatcccaggagcctgtccagttcaagggctctggtgcctggaagcgcctctctgccagggggcggggcagcatatggaactccaaggaactggtccacttgcttccatgaggtacccacctggatggcctgggacctgcccagcagccggccatgggtggaaatgggcacagaaggtacagatgcctcatagctgagcagagagattcctggcttccggtagatgtgggtggcctcttcacgaagcagaagtcggcagttctgaccctgcagactatgtgtgcagctttgagtatcagcatagaacatacatctcacagccccaggttgggtttgcagagtggtgatgagacaggcctcatgttgggaacattccgacaaacagaggtctcggacagcagagaaattgctggtggcagcagtgctgacatgggcaacatcaaagtgcctaatggatggatcaacaaccactgaagagagggccagggactgccacgagtccagagacactttctctgtgagggaaggcagaacaaccaaagggcaaaaactgggagcattattttgagcaatgggcttctggtaccatccgaagggataggtgtggacttcaatgtcaggagagccacagtccaaaatgcgccaggctcctccattctcctcactgcacatctgaattcccaagctgttcagagtgagacatgtcacctctcctccttttaactgggaaacatttagaaatccaaagccagtgcagcatgggtccgcatcgcaccgtcgttcacattcaaagaacccattagaaatagatttttcagacatgggcactttatttctaatggatatccccatcagtttttggaacggcaggcgagtgcc

SEQ ID NO: 453230 - DNA, 1491 bp, Homo Sapiens
  misc_feature (1068)..(1105): n is a, c, g, or t
cacgtttttaccaccaattcggaggtggaataagagacatagtcatcttgtggagcgccggcccaggaagttatatttatacaccgtggcgaggtagataaaaagagttgagttttgggcgggcataaggcgcggtatacaaaatatggggcgttattactgcgcccccacgcttaggcatctatagagcgatttatacagagaatgtgttacggtttgttgtaaaaggggggaatcccacttatttaggagaaacggagaaagccggtgttaggaggcgttatttcgaacgattccaatatccaacggtttttgtgaccttacaggttgggcgggcggataacgtttataaatgttaagggacaagtgcgttgtggagcacccgcttttgggaagaaccgccccgttaaaatgaacgcttaaagaatgcctatcgatacggtttgtttttttagaaagcctgtagtttttccccaccgaagagtgttagtttatgtaaggggggaaaggcaagacacgcctgtttcttaagcccgaatttgcctatggggggaacacggaatgacgcgtattggaatttagcatggtgggggccacggggccacaagaaaatattggcaaaaaggagcgtttacgggggaacgggggggcgccccaaattctttatgggtttagtgttaggttttgctagcctttaatgttagaattttttttgaaggtgtgtgtttaaaggtggttggagttgtggtgtttttttagggatggctctgattggatatatttttcattactgaacatttctatgaactattatatagttttaatatactatgtatgtacaaaatgaattgcatttcattccaaatttccacagatcataaagctcagaaatttagctgaatcctagcagttaaaatcaggattcatacacagagaacctaaatagattttgtcacttgtcactctggcttttttccacaacatggtttttaaaaagatacaatatgagcttcaaaaaaaattaattgatccattatttgcaaatacattacagaatctcagatgatnnnnnnnnnnnnnnnnnnnnnnnnnnnnnnnnnnnnnngacatatcttattcggacacttaaaattttcaagtacttttgccttaaatatgaaaaggtaaaatacataggcaacctgagggcagggaaaatacaagatacactttttagtttttccttctgcttttccaagaaccacaatcactccagacatcgcttatgagaaacaagggtgggcagaggatgctgtgctgaaggcaatcaattctgcacagctcaccaagcaattgctgcacctgcaacacaggtatgcccatggattcagatcagtttatgacagttactaagaaacagcccttgggtaactgttcctgtaagaagcattctctctttagttttatatttaaaaatgtgaggactggatcagataatgtggcatgatgaaa

SEQ ID NO: 453231 - DNA, 793 bp, Homo Sapiens
  misc_feature (586)..(596): n is a, c, g, or t
tttttctatactactggtttaaatcactgtacagaccggatatgtaagcacattctggaaccttacaatctaagattactacttatattaccttaataaatttaaagccaaatacagctcttatccaacagacttctttcagaacaatctttccgaaatatttaatacagtgattttctgtttctagaaaagactagagtttccaatccttcccacctgaacaaaacaccactctctgactatcacccaaagagaaaagaagaaagaaaaggcctttaggatgcagtgggcacagactgtaacacccagacacagaggaaagtcagtctgcggagggagcctggaatccagcctccacagcttcctgagggggtgtgctggaggcccacctgtggacatgttcaggtgccgagcacaaaccagttttgtggagctggtagagaaaggtgttcttccctctgctgctctcacggtcggcctgctccatgaccagctttggatcaacctgattccactcgtagggcttttcatgccacttgggaacaatcttctcccttggttttgactgacagaaccaactaatttnnnnnnnnnnngaaattatcttaattatatattagtaactgaaaacactgctgtgatttttttaaagatttaaatcctatatgcttcccacagaattggaactagaataaactgtttaaaggtcaacatttatgcagttatgatcagaaaatattttaatctatggcatattcaaaagcagaaagaaatggagtgtgacagatctccc

SEQ ID NO: 453232 - DNA, 552 bp, Homo Sapiens
  misc_feature (181)..(189): n is a, c, g, or t
ccttgtccaagttcccccaatttgtgtggaagataatccaaagcaaagacaaggagggcttggggcaaatcagaaggttttggagctcaggcctgcccaaccctcatttcattcagactggtcccactgtcacctgtttcagatatggtgcttcctacgtaaacacttatttgaagactgnnnnnnnnngcatttgaaaaccattaaacttctccaaccactcatctttcagatgaggagactgaggtccagcagtgtccataaattattcattacctcctcagtcaatcattattcacccagtcattcacctggagggtggtgaaggcagggagaaccagccagtgcaagggcccctcatgtcctgcgctggcctttgcttttcctacctctggtaactgactgtgctgccaaagtaacactccgtgctctctcacctgggcataggaatgccctctggcttggggagccaaggaagaagcacaagtattcatacctgaccttaggacaggttgtaacacagctatcttttctgcaaatcaacaagtgggg

SEQ ID NO: 453233 - DNA, 735 bp, Homo Sapiens
  misc_feature (168)..(321): n is a, c, g, or t
cggccctgccctgctaccgtgcctgcgctccctcgggcgcgggcgctgaccttatctttgccgcctcgtacctgtccgctaccatcgctggcttgcgaacgagtcgtctgtccccccctccctgccccatatcacccttctccatcgtgaagggctctcctcttgtcnnnnnnnnnnnnnnnnnnnnnnnnnnnnnnnnnnnnnnnnnnnnnnnnnnnnnnnnnnnnnnnnnnnnnnnnnnnnnnnnnnnnnnnnnnnnnnnnnnnnnnnnnnnnnnnnnnnnnnnnnnnnnnnnnnnnnnnnnnnnnnnnnnnnnnnnnnagacaaaaagcatattccaatacaacccccacttccgacctacagacgctctgctgagcggctgggagaatccgtcgcgccagtcagggcccggcttcttccaacaacagacactttgcgagccttccagaagccttggctaagcgagaaggcagggtggaggccgccactgcgaggacggtccccacccagctgcgaggagctcgcggttccccagaggggcgggcctgcgtccgggtaaccgtgcgcgacgtccacgagtttttaggacgaccagcccttcagcctctaggccccgacgcctgcgccatttaagccacatatccgcccgcccggccgcggccaaggccggcggcagctacgtagccgccgccgcccggggccccacagcccacgggccggatggaccccgct

SEQ ID NO: 453234 - DNA, 991 bp, Homo Sapiens
tctttatgtgtaactccaaaactgaactataagataattcataagaatttgcctattgataggcaaatttgtctatgcttaggcatttaaggagcatttaaaaatatgtatatatgtgactgaatgtaagattaactttattttggtctgaacaaaccttgtaaagttccattgtattaacgtgtgtaagaagacattgggttacttaggtggtcagtccttttaaagtagttgtctgttaagtgggtataatttatgagcaggaaatctcaaactgtactgtattgtattaaaatgctgtgtttaaatgaggcctaagaaactatctgtaacatattttgcactttgagaaaccttgtatattaaattaccatatgtttttaggtttacagaagttctaccttagggaaaagaaagggaagtaaattgaaaaaggggggagaatttattgtagtggctgcctaaaaaccactggagtttttaaaagaagcaaggagttaaatgtcctgcaaaacaaggaagtgagctaagattcattccacttcactaaatgaccagaacttgtcaatgagaaaccacttgtttagaaaaaagccagtgtttatttctcaagagtagaatggggggcaacaggggggaagtagatagccctaagccaccccttattaacctttttatacgggtccttaaaaccccgcccccatttgcctgatgtccactaccggttggaggcttcattgattgagtgggcttggcttaaaagaaaaacttttcgtacgcgcatttggacgaggtttgaggttcatgaagggacattggaacctgggaccccttcactttgccccttgttcattgtatagcacaccagtactttggccccgttttttaaaaaaatttgtcgctatcactaactttttctggtgccgcaataaatattttcactccatcccctagccgtttctttgtctagactttttaccttcaccattct

SEQ ID NO: 453235 - DNA, 917 bp, Homo Sapiens
  misc_feature (184)..(184): n is a, c, g, or t
  misc_feature (221)..(221): n is a, c, g, or t
  misc_feature (715)..(735): n is a, c, g, or t
ataaatttaatcaataaaatatatactgaaatatcacataaaaattaacttacacttcaaagattgtgcagctgacaactcccccaaatcccccaaccctcaggccaaacaagataaaaagaaacaagaaaaaagttgtaacatgaaattgacttgttttgcttggaaataagattataaattngtaaatcaaaatcttgacctctcatgataatcgtggngtgctgcaggcatcacgatgaaggcggggctgtctgcactcctgtgcttgcgacactaatactgttcttttccactgcaccggaagcacttttgtttgggtatatatatgcctttgttacctctgactcacgtcgcttaaagaccagttttggcaaatgttgttttttaaaaggcttacttggtcaaaactgtgatgtaagagaataaaatccttggaggccttgatttgaagctgtgaacctgtagcctaccaaggacagtaaaaacattcccgttgtgaacactgctccagaagcagctgaggaactagaaaaaagtggacacccctccatcaccaattcagcgactcatgcttcctggcttgcacagttcctcaggacttccctgagagtgatgagaaaggtgcccctcttccccagcccaaaaggtaggcagagaaaggtaaccagttgcgtggttcattttggacaggcatgaggaggtggcttttttnnnnnnnnnnnnnnnnnnnnnttagtgacagaattttaagagactatgtgaccttacccgggaagccaggtgccccgcatcctgttgcggtcctgaaaactactgggtctaaagtaacatgattttcaccaaatctctctacaagacagtaaggctgaagcagttctctcctcactctgcaagtctgaattacaaatgggccc

SEQ ID NO: 453236 - DNA, 869 bp, Homo Sapiens
gggaaggcaattaaggcgcccatttcagaagagttacagccgtgaaaattactcagcagtgcagttggctgagaagaggaaaaaaggtcagaatgagagcgctggctgtgctgtctgtcacgctggttatggcctgcacagaagccttcttccccttcatctcgagagggaaagaactcctttggggaaagcctgaggagtctcgtgtctctagcgtcttggaggaaagcaagcgcctggtggacaccgccatgtacgccacgatgcagagaaacctcaagaaaagaggagtcctttctgcagctcagcttctgtctttttccaaacttcctgagccaacaagcggagtgattgcccgagcagcagagataatggaaacatcaatacaagggatgaaaagaaaagtccacctgaaaactcaacaatcacagcatccaacggatgctttatcagaagatctgctgagcatcattgcaaacatgtctggatgttctcccttacatgctgcccccaaaatgcccaaacactttgcctggcggaaacaaatacggggcccttcacaggaagcttgcccccaacagaataccacccccagaagggggccgcctccaacaagggtccctgggccacaatgggcttcccttccagatccaaggagggaacggctttccgtccaaaccctcaaagggtgggaaccccccggccttcctttggtaaaacccgggattcaccacacggcccccccggttccggggaggggtggacccacaaccattggtccttttccggctttttcaaaatcggagggttgtttccccacaatgtgaatgcacccgctttaattctcgggaccttcccggtggtggggc

SEQ ID NO: 453237 - DNA, 881 bp, Homo Sapiens
  misc_feature (200)..(212): n is a, c, g, or t
attttaattttttaaaccagaagacttaacaaagtcttatgcaagtaaatttgcaatgttcaggaaaaatttactgtacattttgccatggtcaaagaaggaaggaccaatttgaaaaagccaattttcaaatatttctttaacaaaaactttctcttgcatagtaaaagcatcatctaaacagcagctccaaccaaacnnnnnnnnnnnnncaagcaggggagatgggacagataactttctccaggttttccagataaaaacatgtggtcaccaggaattcaaggtaactaggtacttcaaaagccacatttaattcaaaataaaatgagcatttctgacagatgacaacagtatgaaactgatttttttctttcctagatacaaaaatgatatgggggcattttcttaacagtttagtaatcgtctaagaataattgtagaaataaccccaatcccaccatccccagccactggtataaaacaaataccttccatgaaactgtctttcacataactaaaatatcctcacttacttggaacaatttcatgcttacacatgatcacaaacatttgtttttagatgttgtggaattactggagctgagatttctgaaacaatatctgaatcttagcagagagataataatcctttcactatacattgcttgggcttccttaaccaaatctgagtaactactgtaataataatgctggtggtagtccatgatactctcaaatttttccctttaagaaatatataatccatgtaactctagcaaatatgttacattgtacactttcttaacaaggaatggctgttttcaggccttattaggaaaacaaacaaacaatggcagttactacctgttttttatcac

SEQ ID NO: 453238 - DNA, 558 bp, Homo Sapiens
  misc_feature (43)..(43): n is a, c, g, or t
  misc_feature (48)..(48): n is a, c, g, or t
  misc_feature (81)..(81): n is a, c, g, or t
  misc_feature (130)..(130): n is a, c, g, or t
  misc_feature (176)..(176): n is a, c, g, or t
  misc_feature (207)..(207): n is a, c, g, or t
cacggttgaaaccggatttttccctccccccggaatccaaaanggatnggggggcttcccctaacggtttgggaaaccgcnctaaggaataatggtgggaaataaccccccaaatcccaaccaaccccgngcccacgggtataaaaccaaataccctccccaggaaactgtccttnccacaataacctaaaatacccctcacttacntgggaacaatttccatgccttacacatgatcacaaacatttgtttttaagatgttgtggaattactggagcctgagatttcctgaaacaatatctgaatccttagcagagagataataatccctttcactatacattgcttgggcttccttaaccaaatctgagtaactactgtaataataatgctggtggtagtccatgatactctcaaatttttccctttaagaaatatataatccatgtaactctagcaaatatgttacattgtacactttcttaacaaggaatggctgttttcaggccttattaggaaaacaaacaaacaatggcagttactacctgttttttatca

SEQ ID NO: 453239 - DNA, 727 bp, Homo Sapiens
agctctgattctgtggacttgagtttatctggagcaagtcgcagtttagactgcaaaatcactgatgacttcttgtaactcagcctctgtctgaaaaactctctgacaaacggggcaacatgactggttttcgtctgttagctgagtaatgaactgggagtaaactgctgtggctccagccagcatggctcgctgttttgatgatttttcaatttcctctttaagcctgtctaaatcactttcaaaatcctggctaccacaaacatcaaacagcttgtcttcgtaactggacgactgctcttcctttctttttagttcattatttatatgatttttattctgctcagatgaagctagttccttgctaaaataagagcaaatatggattttcattttaaaataggagaaattagtttgaaaatttgagtaggcaaaaacaagacaaattctgccaacaaatcatgacaagagtttggtatgaccaaataatttttttcagaagttgagggactagtccacttctgccttaactctccccctaggacactgactcacctgccagtcctactcatgggcctgctcccagaaaaatgtacacagaattctgcctggtttctgggggttcatggtctttgatcccaggttaagcctcagcaagatgcttgctaggactattggacagaaagaagacaagagaacatccccgtaattccctttagtcctttca

SEQ ID NO: 453240 - DNA, 991 bp, Homo Sapiens
ggatgacaggttctaaagactcttttctggtccctgccctcattgccatgattaatcagttaagtggcccgaggttttataacagcacagtcttaaaatgcttctcccaagtttaatttctctccatttgaccttttaaggatgtgaattggctttaagcagtagactccctttagtacggcgctgtgagcctctcagtgaatctgctacatccattccacccacgggtctggaaacttgtctgtttacctttccctaaaaacctaagatatatttttaagaagtgccttgtaacttttcatatagcctttcccctactttgggtagactgtttcttacaggaatttggtagatctttccaaagagaattctgtatctgtatttttaaagcataaatcctgtcaactttggaggagaactgatttggcttgagttttctcagacatgggaacttttgacctaagtttgtattttacattgttgaaagggaactccgggatcccagaaaacatatggactgcaattgggtaaagcttctgttccagaaatgcctcttctggacatttcatacaaatggaaacatgcagcatgtagtaatttatgacagctttctttcccttagcatgaggtttttcaaagttcattgatgtgggtagcatttgtcagtacttctgtgcctttttatgggctgaataatattttatcatatggatttaccacattttatcattttatttatccatcatcagttgattgacatttgagttgcttctactttttgagtattatcaataattctgttatgaacattcctgtacaattttttggtagacatttatcttcatatttcttggatatataccctaggaacaaaattgcttccgtcagaagggaaatggctgtttaaaccttttcaggaactggtcaaactggtttctgaaatggggtacatttaatttttacatttccaaaccaccaagggtattgaacc

SEQ ID NO: 453241 - DNA, 757 bp, Homo Sapiens
gtgtatgtgttaaaaatttgttgaatttactaaatagcatttgagcatttgttcatataatcagaaattatgttagcctattgatgtggtatatagattttcttatggaactgctattttgttctgagaataaaccttccttggactaagtgtgatttattacattgctggatatttttctaacattttatttaaaacttatatttatcttcattggggaggctgacctgtagggtttgtgtggtgtgtgcttgtacatattccggtatgtaggttttaggtgttaatcaggttttgggttaggtttagatttgtctcattacaggaatgttcattatttgattccatgcaaaattgagagacttggtattctggatttctttgttgatgttctttaaggatatctctgatttcttccttaaatatatttgtgttcttctagttcctctactttcagttttagtaattttcgtgtagaaaataattaatttctttgaagatttcaaatttattatttatacatactgtatgttttagcctatatcaatttcatattttaaaatgcattctgtatttttataatctcattttcacctaattttgtaaatagatttttgccttctttcttcctttattaaatttacagaagggttatccattaataattttcaaaaaacggggttataggttttaaattaccattttggtcctttccaaattcatccttttaaaaaatttccaaatttccttccaacta

SEQ ID NO: 453242 - DNA, 863 bp, Homo Sapiens
  misc_feature (667)..(667): n is a, c, g, or t
ggtacataaggttatacaacattgaatggccggggaatgaaagtagaacagcgttttttatgggcaggttagtcagctaatggataagagacttgaaattactcttttgggattagcaaatagaagggaaaaacatgataagggcacagagcggtgggatgggggcgggttaccgggaaggggcgcgagtgcgtgctgtttagccctgtagggagacatgatttccagaagtctttaggaacccagaggccgccgcaagagtcacggaatccgatttcaacctgataatttctaagggactggccacgttcttttattatatggctattgcttcgtgccatatatggcttgaaatcggtagatcattagctagaatttgagaatcctacgacatacggtggttctacagaactaatagtgtaactgtccttaacaaggtactctccttcagtaaggagttctacttttgtccaatgaaaaggaatggttttttcaatataaacctcattaatcctatgagtataggggaaggtgctttcaccattatttttccgccaaattttaaaggacttgcatgaaatgatgggggtatatttataaataaaatttgatgaaagtcgttttaatatagtcgagactgttctaatacaaaaaatgattggacagnatacgtagagtggcatacggcaaaatatacagacactgccatacacacaattacatatggtagattaaaatttctagatatttcgtttcatatatactacattatataaacagaaagtgaaggaaataacctaatatattacacatacactcttatttctcttaaatagaagaatgctaggtgaaatggtgaacag

SEQ ID NO: 453243 - DNA, 752 bp, Homo Sapiens
  misc_feature (432)..(482): n is a, c, g, or t
ttatacaaagtggaacatcacaaataacagattttagtttcagtgatttaaattctcacattcaaaaaatgtatttcattctcagaaactgattttgggaagttcaggacttatgattctattcaaaaaaataataaatttaatttctaatcctataataccaagattaagtttctgaacattaaaaacaaacttatttaataggctgtttttgaaatgcaagacaataaaccttctaataaaattgtcactgctattattctattgtgtacaaaagcagtatattgtaggtcagcttttaagttccttcagagtttcacaatgttaactaaaaagaggggctctggtcaaaaaaagatttagaaacaatggactaaaagttctgcaggtttcgtttaactagtgattgactcatctggggctagtaaattnnnnnnnnnnnnnnnnnnnnnnnnnnnnnnnnnnnnnnnnnnnnnnnnnnntgcaggctatttgagctctgcccaattaaatcaaaatttctaatttaaaagccaatgaaagtatattgaagcacgtgattcctctcactttgaggccagcctttgaccactctctgacaatagagaaaaatattcaaatgttaaaggtacactctttcacgtctagcatttataattacctttctgcagtaactctctattttagtactactactaagacttcaaagagaaatctgacaaacagtatcccgtacctggttctgactcccc

SEQ ID NO: 453244 - DNA, 1194 bp, Homo Sapiens
  misc_feature (46)..(82): n is a, c, g, or t
  misc_feature (776)..(784): n is a, c, g, or t
ccctgtgtgacgagacgagcgcaggagtagtgagcgaggaagcggnnnnnnnnnnnnnnnnnnnnnnnnnnnnnnnnnnnnnagtcgaggtgccggacatatgcccgggaattcggccattacggccgggcaattagaaaagaaacttcagttaatggttgaagagcaagataatttaaataaactgcttgaaaatgagcaagttcagaagttatttgttaaaactcagttgtatggttttcttaaagaaatgggatcagaagtttcagaagacagtgaagagaaagatgttgttaatgtcctacaggcagtcggtgaatccttggcaaaaataaatgaggaaaaatgcaacctggcttttcagcgtgatgaaaaagtattagagttagaaaaagagattaagtgccttcaagaagagagtgtagttcagtgtgaagaacttaagtctttattgagagactatgagcaagagaaagttctcttaaggaaagagttagaagaaatacagtcagaaaaagaggccctgcagtctgatcttctagaaatgaagaatgctaatgaaaaaacaaggcttgaaaatcagaatcttttaattcaagttgaagaagtatctcaaacatgtagcaaaagtgaaatccataatgaacaaagaaacaatgttttataacggaacatggacaaccccaaagccactattacgaaccccaaggaattacgtagatacggagaagccagactttgaataccgacttaaagggattcccctaagctagaannnnnnnnntctggcaaaaaaaacgaatcccctcttggcccttccacagataatctaaaactctgtggaatgacaatactatactcctaccagctcccgcgtatatactctaattccctgcatcaaactgtgatcctacaagtaggaccctttatgcctgcagtccccgctcaccccattctatgtctctcacgcacgtgcacactctctgtctccgacgcaagacgaactcactcgctttggtacctttgcgcgcagtctcgtgcggacgctcgggtgagacttgcgcatcctttgtgccggcatgcgccttcgcacagccgacgctccaggctcgagtatgtgcagtataggttgcgcggtttatcttccgcgcagtaagacacgcgccccggctacgacaccagtgcagactaacg

SEQ ID NO: 453245 - DNA, 813 bp, Homo Sapiens
gggtagaggatgccacatctgaccttggataccatgagatcccagaagacccacttgtggctgaagagtactacgctgatgcatttgattcctattgtgtagagagtgatgaggaggaagaagaaatagcgttagaaagaccagagaaagaaatcaggaatgagggatcccagcctgcttacagaacaaaccaacaggacagtgatatcgaagcgttggccaggtgtttggaaaatgtcctgggttgcacttctctagacacaaagaccatcaccaccatggctgaagacatgtccccaggaccaccaattttcaacagtgtgttggccaggaccaagatgaaacgcatgagggaatcagccatgcagaagctggggacagaagtatttgaagaggtctataattacctcaagagagcaaggcatcagaatgctagcgaagcagagatccgcgagtgtttggaaaaagtggtgcctcaagccagcgactgttttgaagtggaccagctcctgtactttgaagagcagttgctgatcacgatgggaaaagaacctactctccagaaccatctctaggcaactatcaaaaagaagcagaagttcaagtggacaaatttatgtgaaaattcatttaacatataagctgaactctattatggggaatggatacaaaagcagagctcccatcttgactttcaattcctcatcagaagtactggcttctttagagagtagtaagcatggctgcctatgcttggagtcataagtgttatttggactataccctgagataagcttatagatcaagtttggc

SEQ ID NO: 453246 - DNA, 736 bp, Homo Sapiens
gggagggttaaaggagcttataatttatttaaccgagggactcagttgctatatatatagtcagtaaaacactccatataaaaataagattctaaaagtgcttcagaaagagaccaccattagcaggctctcagggagaagatgaaaggatggggttcaaattgtgaagctgacaacttttcatgttttacaattagtctaagagaccacttcttggctaaattattatatcaaatatattcaaatcatattcttaaactcatcgagccatttgaacaaaaattatttttgtttagcttcatgagtatctttggaaaataatttgttgaatatatatgattatgagatattttctgataaacactgaattttgaaacctgaactcactatataattgcagtgttttgaaggcctgcatccattagcattgcattatattcacactgccttttttagtgaaccaagacccatcgtcgggacgacagatttatcttaagatgaaaggttgtataacatgcccacaagggataaaaatgttaatgatgcaagtaagttctaagagtttaatgaccaagcaaaactctagcaccagatgctgactgctttgttttgcagtgttcagggaaacacccatttttcctgggctcttaaggcctttttgtagttgggaatgggaaaaaggggctgggcagccctttaggaacggggaagaatcccataagcgatttttggaaaa

SEQ ID NO: 453247 - DNA, 996 bp, Homo Sapiens
ataataaggaaacgtgttcacttattgactattatagaatggaactcatggaaatctgtgtcagtggatgctgctctgtggtccgaagtcttccatagagactttgtgaaaaaaaattttatagtgtcttgggaattttcttccaaacagaactatggaaaaaaaggaagaaattccaggaaaatctgcactgtgggcttttattgccatgagctagaagcatcacagggtgaccaataaccatgcccaagaatgagaagaatgactatgcaacctttggatgcactttatattattttgaatccagaaataatgaaataactaggcgtggacttactatttattgctgaatgactaccaacagtgagagcccttcatgcatttgcactattggaaggagttagatgttggtactagatactgaatgtaaacaaaggaattatggctggtaacataggtttttagtctaattgaatcccttaaactcagggagcatttataaatggacaaatgcttatgaaattaagatttgtaatatttctctctttttagagaaatttgccaatttactttgttatttttccccaaaaagaatgggatgatcgtgtatttatttttttacttcctcagctgtagacagggtccttttcgatggtacatatttctttgcctttataatcttttatacagtgtcttacagagaaaagacataagcaaagactatgaggaatatttgcaagacatagaatagtgttggaaaatgtgcaatatgtgatgtggcaaatctctattaggaaatattctgtaatcttcagacctagaataatactagtcttataataggtttgtgactttcctaaatcaattctattacgtgcaatacttcaatacttcatttaaaatatttttatgtgcaataaaatgtatttgtttgtattttgtgttcagtacaattataagctgtttttatatatgtgaaataaaagtagaataaac

SEQ ID NO: 453248 - DNA, 803 bp, Homo Sapiens
caaaaactttatttgccttctgctcattataattacatataatcttcaaggagtttaaatgacaaccaaatccaaggcctggcccccaaagaacacagtgataggattcagcatttggtgtttctaattatacaatgactacatatatatcatagacttgctctcatccattctccaccataaagtttcaatttcctcttaaaatatggcagtcaagtttagtctcattcaaaatcttatctggtcctacagcatattacagacttagactcactcttctgttttaattgatgttactgtgtagccgaagattttaaaaaaagatttatagatatacacttgaaattctgcagtcttgaaatactacaataaatttttcttacttatgaaaagccaacaacaacaaaaaaggccaggccaggcataagacagaggggaagggaagatgaggagggaggtttgagagtcccatcattttgccttgctgaaactgggtttcagtagaaatatttggcaagaatagtgtggaaaaggaggatggagaaagaggttactctgattttatgtaataattcagtttcaaaacatactgatatcaacctccaaaaatagtagttcacatctgcaatacaaataggcacacacggtaaagatggttaaaaagtagaatttaaaaggctatttgtccatcttcaggacattttgcaggcggccccaccctccccacatgtcctgtatttacattttactcttcagaaaagccccttttaaaagaatgctatttcttcctccattacttaggg

SEQ ID NO: 453249 - DNA, 1009 bp, Homo Sapiens
tcaaagtaaacaaagatgtttgtacattaaagtatttaattagtgaaataattattatcaatgtaacaagctgaaaaatacagcaacttgatacaagactgaggtaacaaaatacttcaccaaaaatcgaaagaaccccatggagggctgattgacgttcagtggttactgcgggtgagacgattcacaagaattagagaaagtccttacacaactgcatgcaggggtctgctggagaaaaagacagcccaggagagtgcaacagatttaacaggaaacgaattaaaatgtagaaactgattttcaacttactttcgaagagtacataagaaattgaaaactactctctatgcaacattttgaatgctaagtggaaaaccatgcattttggcacgaaatttattaaagattataccatactaattaattactattacttcgttactgaatagtcacagtcgttcagcaatggataaagagattaatggttctaaaatggacagatgatctcctgtgttgctgctgtaagcggggttttgaggctgcccagggggtgtacacgcttgtgcagcatacggctgccaggcggtctgaagtccatggtacaagttctccacaccccagaaagtgcagttctcgctcatattgtagttgtatttaacattgaaattaaaaacagaaacctatggagcagatactgtgacagtttgaccctactctctcattccacctttggaatccttggcgtgcccaactgcagctctgtgcctggctcttctgggccaagcagcctctaggatagtgacttcatcctcattgcaactgaattttcgcagaccaagaggccattcagtctgttgagccttttgatgcctttctagaggaatctatgcacaggatttatactcaggactaggagagaggcaaagtcttgcctaaggagataggtgtggtggggactgtttgtagtagtggtcaggtcctatgagggcatgagacccacacgggg

SEQ ID NO: 453250 - DNA, 790 bp, Homo Sapiens
tggagagaccccctttatccgaattcaaggggggccccccgtgaggttcaccccttaaccagggaatccttttctgggccttttgggaattttccttgccaccagaaccaatgtttttggggtgataaaaagggtttcgccggttgttagtaaacttgggcttgtggcaaaagttttcgaatttaggaacagtaaacagtgattttcttcgcagggtgttcggaaggtctttaatgaatctggattcggtggctcctccagcccggtaaccttgcatttggttccagatttaagagaggttttggatcttatgtggagcatcttgacatgtttattgagttttgcggctgtttgaagcttaaccagcatgatatcatttgattgaggatctgatgtaactcttgagaatggtataaattttttgatctccagtgtttgtttggaggcctcattctttgagagagagtgtgcgcctaaaaccacagtgggagactggcctttggtaaaccgatattggcagtgggctgctgtcagcacccactgtggatcaatcagaacacctccacaaacgtgatgtccgccatactggatggaggccataaatggcctggaatgaggtgacacttctttccctccaataatttccatattgaaacacacatgagtcatataagccccaactattaggaaaaacagagaaaaggaagaaaacttagtcattttaaagatttagatttaagaagcccagatgaaatgtgttgatcctgtgatgaaggaagaagattctccc

SEQ ID NO: 453251 - DNA, 555 bp, Homo Sapiens
aaggatgctttcgttttaatagctctgggctacaagggtatttaaggctttaagtccaatgatcccattcttttcagcttctcatgcccatggttttaatagactgaatttcttcagtaatttttgtgcaaattcacttccattttcgatgaattgttttccacctggcacgcctccgtgcattccttttcctgcttttgcaagggcttgttctgttagtaagatacttttctccactatggatttcagggggtttagttcctgcctgcttgaggtgaccttggctgtcccctgaactgctgccgccgaagtctcctgggctgttgtggttgtctctgggggtgaagctggttctgctggacctgagatctcttcattaggcttagaggtcccagcttcctgggcaggatcagcacccgtcgagtcagaggaggcatcttcagcatagaccagggcccctgctacagctgccaagaagaggagagtggtaaatttcattctttgggatgaggagtgagtataaccacagaatctgcagaaggtctggggaatccc

SEQ ID NO: 453252 - DNA, 885 bp, Homo Sapiens
  misc_feature (626)..(661): n is a, c, g, or t
  misc_feature (728)..(737): n is a, c, g, or t
  misc_feature (788)..(788): n is a, c, g, or t
  misc_feature (813)..(821): n is a, c, g, or t
ggatttaaaaacaaattcatgagcaagctgcaaatgagaatgtgttatatgccaaggaacaatgaagtagaatataatgtatactaagggatttcaagttctcagaatttttgagtagttgcttacgtgaagctcaagatacctgtagaaagaaatatggtatatttgtatagtttttaatagaaagatctatgtttataaaccagcacttggccaaaaacaaaattgtaaaggaaatttaaattctggagaattctacagggttgctctaagaactgtcttctcagcagttgatccagctgtacggaaatttagggtatttaaacttttaaaggatcatgagctgtttcttgggcgatgaatgttctcaatcagaaaactgacagtagaaatctcacttctggggaaaacagttgtggaattcttacttcattatgaatgtatttaaaaaacaaacaccaaataattggaatatattgcaggcattaagctcattaaaaacaaactggcttgcagaagggtccgatgtgccaagtgatcatgattctgctggaaagaggattttaaatattgtgggagttctcccaccctaagtcttacataatgccaccagtccatccaaaacnnnnnnnnnnnnnnnnnnnnnnnnnnnnnnnnnnnngttgaatggcagtattcaggctcaacgtacagtttgatcctgagtatgcttggtgtttgcctttcgnnnnnnnnnntacattgtaaaataacctcagctggggatgaggagttgacccgaatatccnaaataattttgtgggcctgtggaannnnnnnnnaactggctaagttagtgggaaattactgggaaaaaagcctttccatttcctggaaaaaagtgaa

SEQ ID NO: 453253 - DNA, 910 bp, Homo Sapiens
tgttttttatctcagaaaacacccccattaaaaaatattttaaatacaatggggtgccaaagggaaaattttataattttggttggggaggaaatggggtttatagaaaaagggaagtgttaaaggatttttttgaacaccaccgggaaaggaccttaggaaaacattttaattttatattaaaacctcttaattcaataaaacccacccctccatattcccatgaaattggggaggaaaattctttattttagaaatggcccatcattctgattagtcattccagtggcagttctccttcaatgctggacacacgggtttcccaaggatcaaagtcttgaggagtgctagatcaggaaatgggagaagcaaggcaaggagaagagggcatcaggagttggaatttctgaaatgtgcatttatctcacagaaggcttggcacaatgaggctggggtgagtgtggttttagtgattgttctttgttgcctccttagctgcagcaatcagtggagtgaggctggagaggggcttggcaatcttcaggaattgatgctgtagcagctctttagctgaacctctcttctccacatccatctcgagacagcggttcagaaagtcccggaagatagctgacagcttctctgggttctgaagttctggggtcccattggtggcaatgaggtacaaggctctcagagggttttcattgaggtatggaggctccccttcaatcatttcgatggccatgatgcccagggaccagatgtcaaccttgggcccataggcctttcgtgtcacaacctctggtgccatccagtatggggttcctaccatggtgctccgtttgctctgctctggggttatctgtgcacagaatccaaagtcagttagcttgacagagccatcccc

SEQ ID NO: 453254 - DNA, 759 bp, Homo Sapiens
  misc_feature (302)..(302): n is a, c, g, or t
caaaacgggttggggatttttattttcttaaatgcttactggtatcggagggatttctttaattcccaatttgcagaatgtttggctgtttagtgggaaattaaaagtgatctttttttcctgcaacctgttgaactcatttattactttttatggattctttagcattttctatatacaactatgtatcaactgtgaatacatatagtttcacttcttttgcagtataaacctcttttctttattagcttatttgatttttagatgttgaacaaaccttgaattcctaacctaactgctgnggctagaacttcaagtacaatgctgaatagaagtagtgccgagtgaacatccttgtccttcttcccaatcttaaggggaaaacattcagccttcagtctatcaccatgaagtataatgttaggtgtgggcttttcatagatgttatatttatcatatctaggaagattccttttattcctaagtttgttgagtgtttttatgaaagagttttggattttatcaaatgctgtaataagacaatctgtgtgggttttgtgctttattgaatatggtacagttgatcctcattattcaaggttatgtatttgtgagatttaccaacttgctaaaatttataaccctcaaattgatatccgtggcacttttgcagtcatttgtggatatgtgtaaatgggtgaaaaatttgagtcacccagtacacatgttcccagctgaggctgaacaagacgatgctcc

SEQ ID NO: 453255 - DNA, 308 bp, Homo Sapiens
ccttttgtttgtattatgaaatcacacagcctcctttgagctccttgaagggatttttgtcctctgggatgccctttaccagtggatcctcgccagatcgttcttcaacgtaatctcttacttcttcacaacatttggaaactagcattctttccagtgtcacttctttcttgagctggtcaacttccatcttcaatttgtccttttctgtcaggtcctcaatattgattactggcatctttttgcctgaaagtaaactgttctttgttttattttaaatatcccacgataaccaatttcatatcccc

SEQ ID NO: 453256 - DNA, 738 bp, Homo Sapiens
ggatattattttatatgttaaccatatactaccaggaaacatctaacagcactgacagttgggaattcgaatgcgtatttttctcccgtgttagtaatagaaggtactgagccttttccattctcttggttgccttgtgcctgaggaatctgaatttgtgaaacaacatctttgtggatatagaaactaatttatgtaacacttggctacaaccacctgtgcttacttacggactatctttagttttcatggcgtgttaccttttgggttaattcaaatccaaaatgttgttaacggactgctaattaaagtatttagaacttagaattacagaattatagagtaggatgagataacaaaagactgggggttatgacttgaccaaggtcacacagataatttgccaaagagctttcttatttatgaaatggttgctggctaagaaacatctgtgtgtgatatgattaaaagacaatattcgttcacttttacatctcatgttttgaaataaaatgcaaagctcacttttttgttgttttgagaaaaattaaagggtttaatgggctagtataaaaattgtgaaaggcagtaagtagactgccacctagtaacgtcttaaagggaaataattctttaaagtatcagaccccatttagttgaaatgagttttgtctgaagttttccaagtatgacctatgcttttttcctagcctaattttttaaccgggaaatgatgat

SEQ ID NO: 453257 - DNA, 985 bp, Homo Sapiens
  misc_feature (104)..(104): n is a, c, g, or t
  misc_feature (107)..(107): n is a, c, g, or t
  misc_feature (643)..(667): n is a, c, g, or t
  misc_feature (676)..(676): n is a, c, g, or t
  misc_feature (685)..(685): n is a, c, g, or t
actcaccccaaggtcacacggctcatacatggtgggactgagactcagatgcaggcagtctggcacctcagtctggattctaaccatttcactaagctattttngtnttgtactactttgacccacccctgaataaacctcaattgctggagtggggtgtagttattaaagggatgctttttaccttttgctgtttgctgtggcagattccccagataaccaaggaaaaggggccacccatacctggaaataggccatagggcccctactactgccaacaagccatggcctaccttgacacttgtttgatcttaaaattgtgtcttggtaacaaaagatttggacaggcatatctgtagctttcaagttaattaattgcaatatttttttcttcaggattttagctgctgaacaactttcagtttggagctaaaagagacctgtctcatggtctgcccttccctggggcaatagctagggtctttcctgatttttatggaattttaggggatattttgagctttgggttctcagtagtgaattgagacttggaggtgacttttcatgtttggagtatcatctctgtctgggatctgggctgacaaattaaaacctagagtagtgcttatgctgaaatgatacnnnnnnnnnnnnnnnnnnnnnnnnngccctcccntcaatttanaactgaagcatttttatatggggtagaaacctcttcccaaaataccctaaaacattttggtgcttaagtggaattcctttttagggtaccggggaacttaactcccaaaaaactgaaatcaagccacccctccatcaaattcccctaaaactttctggaaaaaaccatttcaaaataccccttggcgggaaaacgtggtttccctcctccctccacaaaaattctattttcccaaaaatggggaaataaaagcccccaaaaggggtccccccatataacccagcccctctgtggcttggg

SEQ ID NO: 453258 - DNA, 929 bp, Homo Sapiens
  misc_feature (46)..(46): n is a, c, g, or t
  misc_feature (110)..(110): n is a, c, g, or t
  misc_feature (840)..(876): n is a, c, g, or t
ggggtgtcaaccgtaaatgttgtgcctgcataccaccagccactgnctgagacattcctcgtcatatcatctgctggtagttagaaggattcatgatcaaatttggggcntttggcatcatgaggtgacccagtgttgcttgttgataagtcatttgttgctgttgctgctgattgtactgctgctggagccttctgttcataagtattcgctgaacacagctgattaacatctgttgttttgtcaatacatcattgtagattgcttctcttcgtttaacatcaagctcctggctggcttgtctacgttaatgctaacgcctgtacttgggcctctgagagattcatgttctccgttccatacagctgaaattatatcctcaagaggttgaatcctcactgctgtcacactgtttgttgcttctacaacttgtttctcttccttgattaatgaggtcctccagctgttgattactcattgctgacagggctcccaaattgaaaggaatataaggagtttgagagttgaaactgacagggggtaaattggtcccagttggtatgttgaaacgcatggtcagtcccttcttctctgcttcatactcagcccaagctgcttttctttcttcttcagtcaactcttcttcttctttgtggtccaaaagagaatcatgttcatggtatcctacaatgtgttctttatgtatctgaaggagctctgcaagtatggtatcctttggcagcatgggagtatccctcttcttcttcttttctgaattagggtcatctaataagtctggccgctctcgacgaattcgagctcggccgatttggcctgatnnnnnnnnnnnnnnnnnnnnnnnnnnnnnnnnnnnnncggccgccaccgcgttcagcccgagtcgccctatagtgagtcgtatacatcgg

SEQ ID NO: 453259 - DNA, 768 bp, Homo Sapiens
  misc_feature (322)..(330): n is a, c, g, or t
ggataactgatgatccttctttcattgttaatttcatgtgactcacaagagctgctgatgtctttgatgagacattttataactagtttacattgctttgagaacatttaacctccaacagctgctttaaatttaagatttacttaatactcagaaaattcagataaagccatagagtcctgtttgaagcttcacttctattttggttgaaggcatgatgtatgatgtcagaaaaaaaattgaatgaattatttctacatccaaactcaggtttcttctacattagattgaattgaaattttggtgatggtttgggtagacnnnnnnnnnatatcaagtataatttaaaacatcagattaaataattacactgttcaggcttttaaaaaaataccactgtgagaataaagcgctagtaagatacatcacttactgattttaaaaatacagaaagattttgagtaaattttgtgcccagcaagctgttagttttatttttgtaaagggtatgtaagttatttaatggttaatcatggccttttaaaaataaaataaagtgataccctttacaatgaagaccaaagtttaaaaacttttctaatacaaaccccatttttgggaaatgccttgattttttttctaatggcaatttgtcctggctaaacattttcttttgggaaaaatccctggccaatacctttctaaacattattccttttggattcccacgcttttttaaaaaggggtggttccaaatggcgccgggtg

SEQ ID NO: 453260 - DNA, 1044 bp, Homo Sapiens
  misc_feature (38)..(38): n is a, c, g, or t
  misc_feature (561)..(597): n is a, c, g, or t
atccaatgaaggatggcagatgcaataaaaagtttctngaggaagcaaaaaccaagaattagttaaggcttcataaagaattctataagaagatttaaatgtcaagaattcactgaaaagcctcaaagcctaacgggttattgcggtgtcaggctagctgaggtctagtgacatgttcccagaaataaagctaaagggggcatgtgagaacgggcgtggaaaattgaaacaattacgtttcaaatactttttgcctttcatgatgctgttttttccttaggagccacgggtgactctgaacttcaattattcatcaaaatcacaaaactaaaacaataacataagaaaaaagaccaacagcatctttaagaaacttgaacgtcctctcggctctagcgtgtaaacggtaggtctctaacctcaacgcacagcgggcactggaagcggtgattgtccaaaggcctgattgtccacgatctcaaaaggagatctggtatttttgtgatttggttctcattaaattcctataccaagtaaaatgccagttcccatggcctaaannnnnnnnnnnnnnnnnnnnnnnnnnnnnnnnnnnnnctgagagcaaccttactcagacttcacatttatcttagtacagcattaaaaaagatttaatagatgggttcaaaagccagaggcatgtagctcttgaacctaccctagtaaccatacttcacaagatacattaaaagtccactaacacctaacctaacgcacacaaaacccacgcctgtttaccttctgcaagtcgcatcggtccgcaatcccacagattaaagcaagttttccctttatacgcaaagttttagccaggtaagctattgtatgattaaaagcaaactttataaactaaataatcttaggaatagtggccacttacttttatatttcaggggtatgagagaatagttcatgaattttcaggaaaatgaatgtgtgggatcaacagctctggtctaacatttgcggggggggaagggtcagggatgagagtttttctcc

SEQ ID NO: 453261 - DNA, 789 bp, Homo Sapiens
  misc_feature (183)..(208): n is a, c, g, or t
ttttattttttaatttatttgttcacgttcatcataataaatttgtttaatgtaaaataaacaaatccttgacaagggtttaacaggattttcaacatctgtgcagataaatgtaatttattcctaaagaaaaaacagtttagaacatgccaggaaacctgcttttaacatttttgtataaannnnnnnnnnnnnnnnnnnnnnnnnnatccaggcaatacagtagtggtttcaaatcattctatttcactcagaagcctgcatgatgaattttatactgaaacagaagtttgcctgacccttctttagcatttcatcttctgcctctctcttttgatttaatggcaccccactcagagttaaaatccacacatgttgggaccaggtttgtgtccttcaaaaggaaaagcagcaggcatatttttacaaaccttctttggtagaaaataaacaaagtataaatgacatatttagtcttttgaaaaaaatcaagcaatgtatataagttaaagctgtctgcaaaaattacattgttgttattagtatttcccatatcatctattcaacattataaaagttgttatgtcagcatggcagggtggcgggggcaaatattttactaaatacgttttgggtacagattaatattcaacttcccgaaagataggtttattattaacttactgatgtttcgctttagactgaaatctgatttgcagtacataaaagtacacaaaagtgaataaattaaagtgaacaaatagaaaaatctcctttattttgcttatt

SEQ ID NO: 453262 - DNA, 719 bp, Homo Sapiens
ttttgataagggtgaagacagtaggaatgagccccctattatttgtctaggttttctatagaaagtcaaatttctacctgtgccacagtggtagagtaacttgaggtgattcactagggcccaagagtttggttctaagtgtcctgatgatttctaggaacgagcctacaaggtaacatatgagaaaagtctataaacactatacatgtagagaatgtgtcctattcattttgtactccaccacctagtataagtacatggcataggagcagtactccatcaatgatgagatgatcacgattttcaaaatcacagtccatgtaaagatggcaaaatatcagacaccataaagaatcagtgctgaaataccattacaagctaagtatattccttctctaaatttaatctgaaaaatctaatctggaaaattacactgtacctgagcgtttaactataaaagtaaaaataaaattctgttctaatcaggagtactaattaagaacacctaagcataattaaaatctatctctgaagtacattataagagtgtctgtacatacacaacacatagcagatttaccttattaattagattagtttggtttaaatatggacagtcaagaacaaaggaccacacctagctgccaatatttgagtatacattaactagcaactggaggaagagatgtttcagacttgagacgcagacagaaaaaccc

SEQ ID NO: 453263 - DNA, 1121 bp, Homo Sapiens
  misc_feature (930)..(963): n is a, c, g, or t
cccaaaatttttagggtaagggggataaggttgcttgggggccagaccttggcaaagtgcaatattcacaggggataatccccagatttggggaaagggtatttgggaaattttaacctttcttcccccggagtggaaaattcaaggttataaaacggcccaaaatagggcctattccaaaaggggcaagatttaaataattttaaaatttcactttccttccccaacataagaaagaatggtgaaggagggagaaaatttatttcccatgctcaaaagttttaggcaggtttgaagaaatggttttggggtgattattttaaattattggctatatttgttctgcttaaaatgtttcaatcaaagtgacttgaaagggcagagaccaactgcattaaagatacaattaaaaacttatttgtgactcagcctatgttaaatactacaacttggaaaataaagcagttttcttacagaaatatcattcttaaactgggattgatagttaactttaacccacgcatttgaagcttatttttttacatactaaagggtatgttgaaaagagccagtaattttaggtaattgatttcttcctaaaatgacgaattagaatttcttctaatttgtacaatctggactccagaattggaatataacgtaattgctaaacttttagtttgtagcatatggaaaacaaaagtgctgtgaactgcaaataaagacacaatgaaaactaatacaacattctattgtcagtcaagaaagcatatacagtccccaaataaacgatcagggcaaagaattaattactgttactcagtcatgtacttccattcacttttatcccagggcagggttgttaacaaaaattatttaataagtgcatatagaaacaatttccctccgcctattgatcttatttccttnnnnnnnnnnnnnnnnnnnnnnnnnnnnnnnnnnggtattttaaaccaagggttaccaagtaaatcctgctaccatccgactcagggaaagaaatctctactatcaggtcagtattagcactgaaaagcatttagtgtcttggcaggaaaagttgacaagaaaatctcatccacacatagaaatgtgcaccc

SEQ ID NO: 453264 - DNA, 1092 bp, Homo Sapiens
  misc_feature (591)..(663): n is a, c, g, or t
  misc_feature (730)..(858): n is a, c, g, or t
attcattttttctttatttcacaaaagagaaaacaaagttcagaagtgttaagtgactggcgaggtcaccccactaacagattccagagctggcattcaaaccctgtccacctggccccaaagcctgaactgcttggattacacggcatttcccctacggtctccatcttctggtcatctctgtatgaaagctgaaacaagagggtagagtgacttgttcttagttgtgaacttaaattttttaccactctgtctatttgcaaatgaccatgaaagcacatgagtattgatttggggattacaaataaatttgagcagctaagcaaattcagaaatgcagaatttgtgaatagaaaagattaactgtaaatcacttgaaatcccagataaccaccgtagaacaccatttcaggttactctccacatgtgttttaagtgatttttatataaaaacaaaatatatgcacattatatccttttttttaaacctacctgattcactgaatagcatttgttggattgctttctatgtctatgttctgttatcattttaaattgctgcattgtatttccttttctttttctttttgnnnnnnnnnnnnnnnnnnnnnnnnnnnnnnnnnnnnnnnnnnnnnnnnnnnnnnnnnnnnnnnnnnnnnnnnntgggttcaagcaattctccagcttcagcctcctgagtagctgggactacagacatgcgccaccatgnnnnnnnnnnnnnnnnnnnnnnnnnnnnnnnnnnnnnnnnnnnnnnnnnnnnnnnnnnnnnnnnnnnnnnnnnnnnnnnnnnnnnnnnnnnnnnnnnnnnnnnnnnnnnnnnnnnnnnnnnnnnnnnnnaccgcacggggcctgcattgtatttcattgtatgactatggtataatttaaccaagatccttaatggatgtgttttatgtatgtactatataaaataggtcatcacgtataatatgtactttttaaaaacctatttttcctcccagttagataaaaaatcccttgagtcccggaacctatttggattgaatatgttatcatccataacctttgcctggattttttgaacactcc

SEQ ID NO: 453265 - DNA, 1159 bp, Homo Sapiens
  misc_feature (85)..(85): n is a, c, g, or t
  misc_feature (131)..(131): n is a, c, g, or t
  misc_feature (172)..(172): n is a, c, g, or t
ggcttcactgttggtaattaaggacaatttcattgtgtttaaaagaaaattagatatcaatatgattaagcagctcccaatttantaaaggccatcaatgaccaccactgggacagtgagttctttaaagntgtatatcctagaagcaaacaccatcattggttaaaacttngtctaaagaagtcagtttctgtgctgaaaactattttcacaaaaactgaaggctactaaactgttttaatataaatactttgtcttctcattatcatatttatgaccaagttctttgaaacctttggaatttactctctctttaatgtgtgctctcgttccatctcacccatttaagatcaccacctaaaacgcagtggtgaaaaattcaccagggaaacccttgctcaccaggaatgttcagctgctgaacagtgatctagagccacaacggtgcagagctgtacttgacgagaacactcaggaagctctcatgctgtgagtgtcatttctgggaaagcagagaatctttccaaactgtgcacataattaacaatgataccattgctatgtgttgaagaggactagtaaatgatgttctcttccatgtcatctgtttgctggaaagtagtttgggtcaaggtaattgtaactggtgccctgagacacacagtagtctctgtctaagaatgtctctgacctataaataggttctaattggtgatcttccttgtgaatatctgtttcatgtagacagtctgaacaagaatcacagaaatccaaagacatttctggaggacaatcctggcaatgccaccgaacaccctggatgggttctatgccacagttatcacacttaaagcccacatgttgcacaaatccactttcagcttgcatttgctgaagtttctgcttctttaactttttaaactgtaatagttctttatattcaggtaaattcctatacatgataggaatactttcgtcatctgatgcatcttcaacagcagtgttcatgtggctatgaaaacaagatcggtcatcatcttcatccatatacactggcggttcatgtgaagtcatgaaagtggaaggcttaaagagatgcttattaagagggtgctgtcgtctgcttgttgaagactttttggagtatatatataagttt

SEQ ID NO: 453266 - DNA, 810 bp, Homo Sapiens
  misc_feature (64)..(64): n is a, c, g, or t
  misc_feature (127)..(127): n is a, c, g, or t
cagggaccagaggtcggccacacaggtatagcctatgttcttgaatcacttcagagccatccanaatggagttcctattacagtattgcgttttgccattgtatctgttaactgaccagccactccnaaatctgccaattttgcatgtccttctgtattgaggagaatatttccagctgtttatatctctgtgtatttttctcataaagtgcaaatattctagtccttttcaatgtagatttaagaatggttgcaatttcatcttctattaatgtcttgtttcgtaatctaattatgtctgagacagagccagcgccacagtactccataacaatccagaggtctgtattcttaaaataactgccatagtactttacaacatatgggctgtcacattgctgcattatggaaatttctttgattatttcctgaagatctgattcaacaggtacttgtttaattgcgacaacttgaccggattccttgtgtattgctttaaatacacttccataagacccttctccaagcttctctaatacatcaaaaacttcttcaggctgcttagtcaaactgtcttcactcagcttttttagtttactcttaggcgccggcggctgctccatggcggccggggacagagagagggacctggtggacggcgaaggccgaaaggaggaaaggagccggggcaccggccggccgagcctagggcaccacagagggaaactctgggaactcggaccaactttcccgtaactccgcggtggatctccctcccgcttaggagcgcggctcctcccaccccccgct

SEQ ID NO: 453267 - DNA, 744 bp, Homo Sapiens
  misc_feature (302)..(324): n is a, c, g, or t
gggtatttccgatttgcccaaaatactctgggaaacaagctctttgcttgcggtcctgatgcaaaagaagttaggaaggaaaatcaagcaaatacatctgttgtttgagacagtttaactgttgctatcctgttactagattatatagagcacatgtgcttattttgtactgcagaattccaataaatggctgggtgttttgctctgtttttaccacagctgtgccttgagaactaaaagctgtttaggaaacctaagtcagcagaaattaactgattaatttcccttatgttgaggcatgnnnnnnnnnnnnnnnnnnnnnnnctcagtttaaatacggagactataatgataacactgaattcccctatttctcatgagtagatacaatcttacgtaaaagagtggttagtcacgtgaattcagttatcatttgacagattcttatctgtactagaattcagatatgtcagttttctgcccaactcactcttgttcaagactagctaatttatttttttgcatcttagttatttttaaaaacaaattcttcaagtatgaagactaaattttgataactaatattatccttacttgatcctacttgatcttcaaggctatttacatgtatgtggaaaaacaaaacacttaactagaattctctaataaaggtttatggttttagctttaagaacaccttttggatttttattaaacagatgggggcaacatatttgtaatgaa

SEQ ID NO: 453268 - DNA, 736 bp, Homo Sapiens
tgtggctggagcttaggggagcaggcaggagacaggcctggaaggtctgatgggtcagattgctaaggtttgtggttccccaggaaaaacattttagtgtggaagtgaagtgataagatcctcattttagaaagattgctctttatgtaatagcaacccaggtaacacgtgataaagcaatgatctgagggagtgagcatgtagagggaaggtgtattagagaattaggccaattaagggcacatgcctgagaggagccatatagagaagttggaattgacaggacctattctctgactagatgtagaggggatctggggtgacagggagaatgaaggagccaaggatgaaaaagttttctgccttgggtagctgctgattggtgaagcagtgaagaatagcagttctgcacccagcccctggagttgaatcctggcttttctatttactaggatgagctactgtgattcagccttaaagacttcacctttctgtgacccagtttcctactttgtaaaagagagcatggttgtatcttcttcagaaggcagatgagatttaatgtttcttatggactttaaatgagtaaatgtaaaacaggacagggaatagtacatagtaggcactggataaatgttaattattttgattatggtggatcattagcataggaaaaacacaaggaaagcaagttgggaggtcagaaacagacctgtgagttagattttggacaccc

SEQ ID NO: 453269 - DNA, 895 bp, Homo Sapiens
aaccctgaagaagttttggtaaggaaattgcaatatcaaacaggatataaaaatatgttaaataatttacttcattaaaactcagaaaagggtagggtaagaaagatgtaaccaatgcaggcttataaaaaagatgaagtcacactgctatattattttatattttattcaattttaatatggtttccattattaacttttaaaacaaaatgatttccagtttaaaaaacaatgcactgaccacataattccttttttattttacacagttatacaaatattctaaatacacattttgtgttcaagatgatggcaaataagattaactgtacagtacataaggaaagaaaatattttaggtatatttagaagcaatagaaatgtctatacaaaacaagcaaatggaataaaattttttatttttaaagtattgcaacaggcccacaggtttgtaacaaaaatgtctttggcacagttcctcacaatgccccattaatagctaaagcaagacagcattttttaaaaaataatgtttcaaaatgctacacgtggtactactgtttgcacagtttgatcaaaataacgatctactttgagtcaagcaaaacctagaggaaatataccaaacaacttgaaaatcatttgtataaaaatcattgcacattattttactcgtttgaaaagtaaaaaagtgtatttacaaaatattttgcagtcaaaattataaagtgaatggatatctcgaagtaacacgtcttgatacagacagttcaaggaaaacacacaaatgctttttctttaagaggttttcagtgctccttccactgggaagtaaacatgatctactcaaatgaatttacaagatggtacacatactggagcaaatccaacaccc

SEQ ID NO: 453270 - DNA, 780 bp, Homo Sapiens
gggtgccagccagtaattttccctttttattccaagagcagggctggtgccaggactactacaaaatgtgtgccttcttggactagtcactcacagcataaaggcctgaagtttaaagagtttgaaaagaaggaaaagaaagcaaacagaaagaaagttgatgtgtgtttatagtccccgctctacctcaggtgaaggccagacatccacatccacagaaaggaacaactggccttttggacagttggaccagggattccagtgtccctttgggatggccgttttaatgaaaatggctagctccacttgtcctggccattcctaatggaggaggattccaaatgcagtacttagagtagttcttgctttagatctggaaatataggtagccagatacagtactatcagaaactctggttaaaatacacataaaaactcagaatctactgtgtttagggctttcttccatcttaacttagaatgttttagcttataaaaatggaaccttgaaatagtctcttaaaccacagaccaaaacatgtaggtggatgtgtatatacacgaatatgggtgtatctctgttcacacacacccagttttgaccattttgcttcattactacattatgataaatggtaaagcaaaaatcttatttaaaaaaagctgtagtaaacgacgcaatcagcagccaggtatagactctacatcccaaaccaaacacgatgctatatatttacaaagaaaatcattttcctcaacaaccctcaactgtaaaggtaa

SEQ ID NO: 453271 - DNA, 773 bp, Homo Sapiens
agcggagttcgggggtcggcggaagatggcggccggcgaaaggagctggtgcctgtgcaagttgttgaggtttttttattcattattcttccctgggctcattgtatgtggaactttatgtgtgtgtttggtcattgtcctttggggaatcagactgctgctacagtgaaagaaaaaattagtgtcaactagcaaaaatgggaaaaatcaaatggtgattgcattttttcatccatactgcaatgctggtggaggaggagaaagagttttatggtgtgctttaagagccctgcagaaaaagtatcctgaagcagtttatgttgtttataccggcgatgttaatgtcaacggtcaacagatactagaaggtgctttcagaagatttaacatcagattaattcacccagtgcagtttgtttttttaaggaaacgctatcttgtggaagattcactgtatcctcacttcacactgctgggccaaagtctaggatccatttttcttggctgggaagctctaatgcagtgtgttcctgatgtttacattgattcaatgggatacgcttttacgcttccctctgtttaagtatataggagggttgccaaagttggaaagctatgttcatatatcctactatcagcaccgacatgctctctgtagctgaagaatcaacacatattggcatttaataatgctgcacttcattacccggaatcctttttttcagcaacgtaaggctcatctactactaattattttgctttttatttaaggg

SEQ ID NO: 453272 - DNA, 745 bp, Homo Sapiens
ttttttactgttccttgaagctttaatatagttaagtatgaaatgcagaatcaagaagagatatgtacccacccaccctggcaatttacaaagaatcaagaggctgattgacagttgaacgattcttcgcccttctatagtaccttttacagaaagccttataagtgtgttatcaaaaccacctgtcaccccttgttaaaaatgctctgccttttaaaagttgtaaattaaaacttaacgctgttaataaaatcattgcctcatttttctttctaactagattgaaatttcaggcccaaaattctctagttgtcttcagagctccctctggcaggaaagaagacctgtcctcatcccgcataggagtagggagcaattcctttgacccccagaccagttatcttgaaaattccaccagcttcaggttgcctcaaaagaccctcggggtccatcccatcccgggcgcaggtcacatacatttcagagtaattcttccctccaaagcagcatgaagttgttttatcaacaggcaacttcacagtttgaagtcttttccctgtcacaggatctaaacgaatcactcttcctccattgtaacaggccacccagagcttcccctcagcatcaatacacattccatctgggatttgttcttccttttctagcttgtaaacacttctgcggttggagatctgtcctgtctgcaggtcatagtcaaaggcatccacggagtaggacaggctgt

SEQ ID NO: 453273 - DNA, 496 bp, Homo Sapiens
ggtcattaccaggttactatttattgttccttgaagctttaatatagttaagtatgaaatgcagaatcaagaagagatatgtacccacccaccctggcaatttacaaagaatcaagaggctgattgacagttgaacgattcttcgcccttctatagtaccttttacagaaagccttataagtgtgttatcaaaaccacctgtcaccccttgttaaaaatgctctgccttttaaaagttgtaaattaaaacttaacgctgttaataaaatcattgcctcatttttctttctaactaggattgaaatttcagggcccaaaattctctaggttgtcttcagaggctccctctgggcagggaaagaaggacctgtcctcatcccgcatagggagtaggggaggcaattcctttggacccccagaccagttattcttggaaaatttccaccaggtttcagggttggcctcaaaaggaccctcggggggtcccattcccctt

SEQ ID NO: 453274 - DNA, 800 bp, Homo Sapiens
  misc_feature (491)..(740): n is a, c, g, or t
ggacctatgggcaagttcataagtcattgctggatctgaaccagtgttcttttgtgttaagtacaaccatatttcagtcagtccagaggcagttaaccctgtagcacttactagactggtgacaactggctggatgtggagaataagtgtcaaaacctggcttcaatgtctatttcttatgtctaatggagttcttatattacagtgtttgtttagctatggttactaatatgtttgttatatttattttcggggagaggatcttgttattgtttcctgagattatttaaaatgttttttctttgatgtatttctgtctttcttatatgtaaggagttataagggttattatattttcatttctggtttttactatacaatggttatctaacatactaagttggtaccctacctacccgtaaaatatgaaatactcagaagtaaagtgtgtgggcaatcagaagcatagccttgaaggacctgacagcagnnnnnnnnnnnnnnnnnnnnnnnnnnnnnnnnnnnnnnnnnnnnnnnnnnnnnnnnnnnnnnnnnnnnnnnnnnnnnnnnnnnnnnnnnnnnnnnnnnnnnnnnnnnnnnnnnnnnnnnnnnnnnnnnnnnnnnnnnnnnnnnnnnnnnnnnnnnnnnnnnnnnnnnnnnnnnnnnnnnnnnnnnnnnnnnnnnnnnnnnnnnnnnnnnnnnnnnnnnnnnnnnnnnnnnnnnnnnnnnnnnnnnnnnnnattgagcccgaggtttgagcccatccgcactcccagcgggtggaaaccaaggagtggaaa

SEQ ID NO: 453275 - DNA, 513 bp, Homo Sapiens
gccacgagaccagtaaaactccttagtttaaaaggacagttgaattcaaatgcagctttgtaaatggaaaggttacagtttgtctgtccttcatggctgaagatcttaccaagttttaagaaaaacaggatagcaaatttacatctcaaaacagagaaaattaagcattttcaagaagaagttagggtatgttagagaaagattaaaaatggacaacaagtgatatagtttgagtatttgtcctcttcaaatctcatgttgaaatgttatccccagtgttggaggttgggtcaagtaggaggtttttgggtcatggtggcaggtccctcatgaatggctgggttctgtccttgtggtaatgagtgagttcttattccattagctcatgtgagagctggttttaaaaagagtctagtgtctttctcacctttctcttgctccctttttggccatgtgatatgcctgctcctcctcttcgccttccaccatgattgtaagcttctttttcttttc

SEQ ID NO: 453276 - DNA, 1814 bp, Homo Sapiens
  misc_feature (52)..(81): n is a, c, g, or t
gtgggaggaaaagaaatttttgtttctaaaagttttaccccacccaactttnnnnnnnnnnnnnnnnnnnnnnnnnnnnnnttcttttgccagtggaatttaaaggatggacccaccataaatttttttgcataaaaaccagaataaggccacccggaagggtatccccccccagacattaaatacttagactttttagggtttttccttctactcaatatgcaaaaagttggaaaaggaaaaaacaccatccgggggttggtcatagcacagtctcaatattatttccaaactaaaatgtccagtgatggggatatgagctcttgcatcttaccagagactagaaaaggggcttactgccttataggatacatcagccagacatgaaggctaggccataagcatacattttcttcacaggtccatccactttatgggatttttctcaaggaaagtataggatacagccagtgggcaaggaggtttacctaaaccagaatgaaataaagtccttgttggctctttctttcaagatggaaaatgaaggaggacgtgaccaattgtagaagatcacagaacgcttacaaatgaaaaacaatggggtaatgtttctcttgagccagtcagtaacgtgaaattatcaaaggtctaaaatttcccaaatagactgacaacaaacgtataaggtcctggagattgtcagtgccatagattaaaaaaccgatttttcatctttgcttttaattaaagctgcaggattccatgagtgaccagcagtaaaatattaatacattaaagaataaaccaaaggaaaacatttggtacaatgtaagtggtccaacaatagaagactgtgaaatgaattaaatattcataaagtgaatactatgcagtcattcacaatgtatttttgagagggaaaaggttgataatacattgtaaaatgaaaaaagacattacaaaatagtacattccatatgatctccatattgggaaaaaatatgtgcataagtcaaaagattgggaggatatacaaaaaataattaaccaaagttacttctgttagtgagaatttaatgtcttcacaattgtttcttttccaaatgaaaaggggataaggggaaattactattttcaaaaacagtcaatgtattctgatctctgtctcattcgcttttataatacacaaaatacaaaactggaatatatttagtgccattaagcagttgcattaacaattatttttctttaagttataaaattaatagttgattcaaatttagtttccttatacttatttccaattcatacaagagaaacacatttttaaaaatatataatgacataaattattatccaagtttgcagtcctccatgcattcttcattcatcatcaagtctaaaaaatgaacttcatatgcttaattccataagttttgaagaaaaccatgataataagtgcccataatcccagaataaagcccccaggaggatgccagtcctttcagcttcggtttttggtgtattatctgagctcacagagtgtcagcatatttcgaagttcattaatttctcatccatcggtcttctataactggtttccagattctgatccgtgcaattatagtcccgtggattccactccgtaccttcagaaacgtgtactattttgagcccgaaaacaggagtcgataacacaactgggatctaaggacataatgggcggttttcaacacaaattttaccaacaagagtagaaaatcccgaacaatgaaacacataaaaggcgtgccgtgtacccacgatcctaacgt

SEQ ID NO: 453277 - DNA, 742 bp, Homo Sapiens
tggcttttggccaatagtttttcatagggaataaaccgggcatttttaagaagctgggggttactggctattctgcattgtcttccttccatccgggacaattcatcttggacaattttcacttctggtagactatcaaggaaatgttttgaggtcgatgccattcagaactatccgattgtcataaatgtgcccattggacttaaaatcgatgactgcttttttcttcaggtgagggaacatattagcatgatcaccaataaaaaaagtgtggggcatataagccaatttctcggaatactgctcagcaacttcagctggcgaagtttcctgatcagtgataatataatccatgaaaagcgcaccactcgtcccagggtatcccagccacattgcctgaataggagctggcctgagagcaaaaagctcatttcgagcgcccttagtatagccattcatatttacaaggatatgaattccatcctgatggatgcgatcagctgcttttccattgcatggaatctgagaaagatcaatgaaatgattggcttctgccatcaccttcactcggaagtttgtgccatcgtctgggctcagggcataacagaacacctcaaatttatcaggattgtgcatgcctggaatagactgcataaggtgagaagtaggatgattcccaaagtcggaactcacatatcctacacgcagccgaccatcactgagcttcaagtcttttggatcc

SEQ ID NO: 453278 - DNA, 734 bp, Homo Sapiens
tttccacagaattctttagaaacctatttgcttgaggccaaggagaatttgctttatcactaaatctgaccccatgttgagccatactaaaactgcacttgggtactagtctcaaatcaaattgagcttatgtattgcgctacatttattgcatccatgctgtgtgcaatttctgatgctgaataagagaaatacggcaattaaaggcttcaccacaagcgtcacattcatgggtttcttgggttttcacctctgcatggatcttctgatggttgacaagactgcgctgttgactgaaacttttgtcgcacttctcacacttataaggtttctctcctgtgtgtattctctgatgctgaataagacccgagttccggctaaaggcctttccacattcatcacatttatggggtttattacctgtgtgaacaccctgatgtcgaataagattacaaagctgactaaagctttttccacactgtctgcacagatagggtctctcaccagtgtggattctctgatgttcaataagaaatgagctccggctgaagcttttcccacagacagtacatagataggcttttcaccagtgtggattctttgatgttgtacaagatgagcactaacactaaaagttttcccacattcatcacatttataagatttctccttagggtagacttcctgctgtataacaagactgcaatttggatcaaaactttccttagtttccc

SEQ ID NO: 453279 - DNA, 764 bp, Homo Sapiens
tcaccttaaggttccagaaggaatgtcttgaccaccttttaggacctggacccttcaaaaggggggatgccctaggggggatccaccctccagaaccttcagcttcttccaaaagggggatgccctagggcaaaggttcctcaggttctagtactaaggcctccttagaattgtctctctcttgcagaccactacaggaaacactccatttattccacctgacttcccacttgactgcatcctcaaccattgaaatgaatttgaccctgataatctaaggaggaaacatttgatattcttttgcaattatacttggccccagtattgtttggaatctggagtttgctgttgaatgggaaagcgggatgacgttgcatgtatccaggctttggtgctgctgtcctaagaagggtcaggcctggtcagcatatggtgctctcctttggtgctatttggctccagtgtctttggagtctgaggaggtttggcctttaaaaatcaaactgccaccggaactgctttaaaaatgtttggttcacagccttcactggattacctattggagcaaacaaagtgtaaccatgtaaaacctgtgagcttgtattgatatctcatggctagagttccaaggtaaaagctattggatcttcgtttgtgtgtgtgtatacatgtctagatgtgtttatttgtatgtacacttattgttatatgttgtgtcaaccaaatcagcttataaataaaaaagcactcataaattaaatacc

SEQ ID NO: 453280 - DNA, 1076 bp, Homo Sapiens
agggggggcggtacgtggggaggatataacggggaagtgctagcggcgagtgaggtttgttagtggtgcgcgtggtggatacggcaatttgtctttgggcggttgaggccgattggtggcggtttgtagaggggaagagtgttggcttgtgttaaaggattaagttttgggggtaaagggttccggagatgcggatgcgtggtttcagttggcctgtgggggatgggagagggtttccgggttctggtctttttgtcaagggggatgggttaggttctggttttcctgtcggggcgggcagggaacaggtgcggtaggagaccggtaatttttctttgggtttggaatcagggaactttccgtttgttctgtattcctttcagggcaatttgcttcagatttttccggagagatttttccatggaaccaaggcattttttcatgggctgtggtagcgatcagcttctccaggtgaggcttctgactgatgatggcctgctccagagcctggccctgcaggttccatgtctgcttcacatattccctgatgaggttttccttcaaatcctcaaagggcccagtcttgggctgcaccccttggggccggttgaagggcttcttgaggaggcagaccaggccatcagactcctgggagtggtagtggcagaggtcggcggggctggcatgggtcctgccaccggcgatggcgtaggtgccattcagctcccgctcgatggtgtagtggtgtgccttcctcccgtgggccacggacagggcgaagccacccaggtagttgcggctctggcgcagcaaataaagcccatcactcatgcccccctggaccaggtaatcttctgcctcctcccgggtgatgttgccgaaaaagaagggcaggtggcttggcgctgtcagccatgccgctgctggccatgcttcaggggccggagggcacacacctgcgcaggtgtccacctcggccgatgaaggtagaacaagaaagggcatgaaagcagcgcgtcgttccccgtaacctcctctccttaccagaaagcctcgtgccgaattcgccacccagc

SEQ ID NO: 453281 - DNA, 978 bp, Homo Sapiens
  misc_feature (909)..(909): n is a, c, g, or t
  misc_feature (960)..(960): n is a, c, g, or t
gttcggtaatattttccttgtatgaattctaataattgaactgttttccccttagcttgaccaagaatgttccaatatttgtttgcactatggcctaccccactgtgccttgccctctccatgtatttgagccaagatacagattgatgattcgaagaagtatacagactggaaccaaacagtttggcatgtgtgtcagtgatacacaaaatagttttgcagattatggttgtatgttacaaattagaaacgtgcatttcttaccggacggaaggtctgtggttgatacagttggaggaaagcggtttagggttttaaaaagagggaatgaaagatggatattgcactgccgacattgaatatctggaagatgttaaggttgagaatgaagatgagattaagaatctcagagagcttcatgatttggtttactctcaagcctgcagctggtttcagaatttaagagacagatttcgaagccaaattcttcagcatttcggatcaatgcccgagaggggggaaaaccttcaggcagcccctaatggacctgcatggtgttggtggcttcttgcagttctccctgtagacccacgataccagctgtcggttttgtcaatgaagtctttgaaagaacggttgaccaagatacagcatatactgacctatttttctagagaccaatctaagtaactaactctttggatctccctttaaagtgaccctaatctggctgcattgatggccagattgtctgctgcctttgcacatctagtgctggtttcagaaatttaatgaaacttttctttttccttcgacctcctgaatcatgtgggttctgcaaatgaataccttcaactagggatttaggaccactaaggaacttggcacaggaaaaacacggcattgaantgtgtgtcggaacctctacattgtggaaggtggcactatgtaccctaactnttaaaatgaaaataagga

SEQ ID NO: 453282 - DNA, 1214 bp, Homo Sapiens
  misc_feature (1181)..(1181): n is a, c, g, or t
cccattaaagccgggacggggcagatacaaagttcgaaaatggcgcagctatgcttagctgggattcggttccccaccaaaaggttgctgattaaaaagtttccagcaattagtattttcctcctgtgtgttctttaagggagtttctaccaaaaaccctgttccaatgttggcttgagaaaaaagctatatttcttcaaggggcaaaagccagtttagatttcttccagtttaaaaaaaagattgtgaaaggggactgaacatcttcctagggaattttataaggccaaaatagaagaaaaactttcctggcggcttgcatttgggaaaatatactgaatttcttttgaaaggcggtctacttctaggttttctatccagtccttcaatttaatttccaaaaagtagccttttccaaatttactctttagatgttgtactgttcatatacatcttaactgcccagacaccatgatagctactcgatcacagacagcctctgcctcctccatatagtgagtggtcagaatagcagcccgctttctgtttttaaatgcagttcgaattgctcgccacatgtgctgtttggctttgggatccatacctgtagatggttcatctagcaaagtaatctgaggattccctagcatacttagagctttacacaactttcgtttgattcctgcaggtagtttctttacagtcttctgaagatgttcttttaaatcaagtgcatgtgttattcgacttatgacttctttcatgtcacttgcactcattcctttgacagctccataaatttcaaaatgttcctgcaatgtagtatctggccacaaagggtttatctgaggacagtaacccatacacttcagtgaatcatcatcttcacttgtctctgaagaataatctcctaaaaatacctggcctgaagttggttcaatatcaccaaccagaatattaataattgtgcttttgccagcaccatttggacccaatagtcctaagatctctccttttttcacacagaaagagatgtatttagttgccactttctttacttttcttgaaagaagaaaatctttcttgtcatcatattctttatgcaaattgctgaccataatggatggtttctcctcacaacactggcaacccatcagctctttgacctttagtctttcagnctttgacatcttcatcttcatcctcattgtctg

SEQ ID NO: 453283 - DNA, 731 bp, Homo Sapiens
  misc_feature (406)..(570): n is a, c, g, or t
gaacccttctaattttaaagaaccttgttattagaaaatctcagcctaatacaatctgaagttaagagttttagcagcattgtttttctaagtagatttagctatagattttcttctggccaaacaaggaagagtatatgcccttgtaaatgagtcttgttttgtttatttaaatagtcagtcaaaacgtagaaatcagtatacgtaaaataaaatgcatgagactatttaatcttttcatatactctacaaataaaatgaaatctgtgtgtggtcctggttgactgggcatctaaagggaatcagaaaagagattgtgaaaagttatatatatatcctcttccttattttagttttgctttttcctattttccataattaagtgccgtttacaaagtggcatcannnnnnnnnnnnnnnnnnnnnnnnnnnnnnnnnnnnnnnnnnnnnnnnnnnnnnnnnnnnnnnnnnnnnnnnnnnnnnnnnnnnnnnnnnnnnnnnnnnnnnnnnnnnnnnnnnnnnnnnnnnnnnnnnnnnnnnnnnnnnnnnnnnnnnnnnnnnnnnnnnnnngcatgtgccctgtgggccgcaagctacttggggaggctagggacagggaaaaattgcttgaagccctgggggggtggaaagtttgccattgaacctggagaattgccgccccctggcacttccggggcctgggggcaaacagtggaagaaccccgttcttc

SEQ ID NO: 453284 - DNA, 790 bp, Homo Sapiens
agtagtccaaaatatgtgaacacttttacaaaaaatatggcaaatgggcccaataagcacatgaaaaaaggtactcaaaacaactggacatcccacatgcaaaaaatatgaatcctacacacactttacatacttcacaaaaaggtcactcaaaatggatcacagacctaaaagtaaaatgcaaaacataaaactcctagacgataacataggagaaaatctagatgaccccaagactggcgattactttttagatacaataccataggcatgatccataaaagaaataatttatatgttagagttctttaaaattaaaaacatctgctctgtgaaagacacttaatgaaaagacaagccacagacttggaaaaaatacttgcaaaagacatacctgatataatggactgttacccaaaatatacaaagaactcttagaactcaataagtaaactacctgaattaaaaatgggccaaacatcttaacagatgtttcaccaaagatatatagatggcaaataagcacatgaaaagatgctctacgtcggatttcataagggaaatgcaaattaaaacaatgagatatcattacacacctattagaatggccaaaatccagaacactgacaataccaaatactggcatggatgtggaactacaggaacactcattcattgctggtgggaatgcaaaatggtatagccactctggaagacagtttgacagtttcttaccaaataaaacatattcttactcaatagagcaattgtaatccttggtgtttacccc

SEQ ID NO: 453285 - DNA, 454 bp, Homo Sapiens
ggggttcaagcaattcttctgcttcagcctcctgaacagctgggattacaggcgtgcgccatcatgcccagctaattttgtatttttagtagagatgggtttatacatttttaaagaatggacaatgatgcagatgatttgtgagcattttgatgagaaagtggtgattagaaggatacagcataaatttaattgtaaacatgcttatctagctaacctaatctgtttctgtagaattactggcatgggagattggatagatgcctaacctatctcaattttaagtaatgtgagcaagtctttaaggtatacataatgataaaatggagaaacatgaccagatgatgatggtcatgtaggtaattagatggatttgtaggtggttgaaattgtatctaagcatagcaatctggcctctgtctactctccaacagaatcaataatcattccaccc

SEQ ID NO: 453286 - DNA, 343 bp, Homo Sapiens
  misc_feature (140)..(140): n is a, c, g, or t
ggggttcaagcaattcttctgcttcagcctcctgaacagctgggattacaggcgtgcgccatcatgcccagctaattttgtatttttagtagagatgggtttatacatttttaaagaatgggacaatgatggcaggatgnatttgtgaggcattttgatgaggaaagtgggtgattaggaagggatacaggcataaatttaattggtaaacatggcttattctaggctaaccctaatctgtttctgtaggaattactgggcatgggggaggattgggataggatggccctaaccctattctccaatttttaaggtaatgttggggccaggtcttttaaggggt

SEQ ID NO: 453287 - DNA, 840 bp, Homo Sapiens
atattttgtttccgggaacgcccccataacttttttccccaaaaaggtgtggtacaaggtttacatttcccccataaaaggggttaaaaacgttcctttggccttggcaatttttttaaagaattggttaccgtcttttggaaaatgtcattctaagggggggtaggacaatttctccatgggggtttggattctctttagaacggatattttttcctcattcttctattttaataaaggaattttttgaaaaacattctataatttttatccactattcaattcaaaccaacttttaaaaagttgccaaatctgtcccaaaaattttaaacaacaagaaaaatatctaagggtaaacttgagaggggtgtaaaacaaaagactcttgagagcgcacttaagctgtaaaaacactcattcctattcctaaattgagtgtttttggttacatgttctaagtgccttacaataaaccaggcaatgtgctttatctggagaaagggagccctaacttcaaagtttgagttcctccaacttttttaatagttaaatttcaagtacgttagactgaaaatcatttgggtttccacgtcaaagattagaacaaatcatcattaaagatcataacagcagttcaggtctttaaattctattttcctttgttcaccaatatttccgttttcatgttttaattgctaaaattcagtaggagttgagcacgtaaatgaaacacttgatttacaggttctgtgtttccatccacactcaactctagtacttacagtactttgttctgtcacagtactttttaaatactccatcctttacccttcaatcccc

SEQ ID NO: 453288 - DNA, 774 bp, Homo Sapiens
gggagccttttcattttcatgaaagtgaagtgatttttagaattcttagttgttttctttagaagaacatttctagggaataatacaagaagatttaggaatcattgaagttataaatctttggaatgagcaaactcagaatggtgctacttgaagactctggatctgctgacttcagaagacattttgtcaacctgagtcccttcaccattactgtggtcttacttctcagtgcctgttttgtcaccagttctcttggaggaacagacaaggagctgaggctagtggatggtgaaaacaagtgtagcgggagagtggaagtgaaagtccaggaggagtggggaacggtgtgtaataatggctggagcatggaagcggtctctgtgatttgtaaccagctgggatgtccaactgctatcaaagcccctggatgggctaattccagtgcaggttctggacgcatttggatggatcatgtttcttgtcgtgggaatgagtcagctctttgggattgcaaacatgatggatggggaaagcatagtaactgtactcaccaacaagatgctggagtgacctgctcagatggatccaatttggaaatgaggctgacgcgtggagggaatatgtgttctggaagaatagagatcaaattccaagggacggtggggaaacagtgtggtgatgataacttcaacatagatcatgcatctgtcatttgtagacaacttgaatgtggaagtgctgtcagttctctggttcatctattttggaaag

SEQ ID NO: 453289 - DNA, 778 bp, Homo Sapiens
  misc_feature (114)..(114): n is a, c, g, or t
  misc_feature (629)..(629): n is a, c, g, or t
cttcaggagtcgggcaagtggaatctgggggcgacccagggtggggcgtccctgaacagtgagagctacataggaaccagatttgattagcttcaccacctccagatgatttgnaatgagtcaccagagttccattcaccttgatgattcgatcacctgtctgtactccagcccgcatggctgctccatcttctttgacagactgtacgaagactggattgtctccactgaccgtcagcccaaatccattgtcatctttctggatgattacgcaacgctgaacaagacctgtggggtcaaaatcatgtgatgcaatgcgctcaactttctgcttcttatctgttggtgactctcggttcaaaatacttccatgccttataggttttttgaggggaaacctgtcggtgatagtagactgtgtgccactcattggggcccttggcgagaggtcctccttttatccaacttgcattttacagtaacacctcctccccacccccagtgctctgggatcaggcccaactccgtcaggtacacaaaatgtccaactcaaaactccattcagtcatctagaccatccgactgtaaggggtcaacggatgcggcttgtgagcaaaacaatgttatcntccgcaaaacgaacttgagaaagccagtggagcgagtcagtccatgagtgagtctgagctagatgagaaatcctccatgaaggcacaaggataaacttcctcagagagggaaatccgcgcgcagtgggaaggggacccgggactccccc

SEQ ID NO: 453290 - DNA, 1006 bp, Homo Sapiens
  misc_feature (288)..(298): n is a, c, g, or t
ttttttattgaaagcttcatcaaagaaaacagaagtttaaacctaacatccactgatctacagaaagcccaagggatgggggagatggttgctaatttgactgtggtacagatgaagaaattaaaaataaaaccagaaacaccttagaattacagaactttccatgacagtcagagacagcagtacaaaaatgctcttaaataaagttcaaaattgaatgatgtttcagaagttccatgaagttgaatatgggactgaaacaagggttttaaaagaagctgtgtcccnnnnnnnnnnnatagagactgaatatctcatagcagatactactacatatatttttttaaattaagattccatttttcttcttcttcttttgaaataaatggaagcatttgtgtccagaatagagaaaactttttcaaatatctttttgaaataatttttacagttcctgaaaagcatggaataacttatttttttatatatgaagagataacatatttgagggaggaggaaaaaaacatctttctcaataatcttagaccagagggtttgaaacaaaatataacattaaagttacactttggacattgtttaaatttgatgtgatcataaaaataatccacgggggtgtcaaagtcattcggccttaataagtaacgcagtcaaaatgtaatgaaaacaatgcaatagttttggtcaaagaaagatttaaaaatatgaatatgactgtaccaagagctaccgttatactctcattgcagaagtcgtgttgatccgtgctactggttcaaatttagtggagtgaaggaaacaaaaatagctttcttttgagggaagctgaattctttgctatgatttttttcccatatattctgcaagaatttagccaactctcaattatttgtggtagataagaaaagacattatagataatcaaaatttatgacatataatgtactgatattaattttaccaatgatttcaaacccccttaagaacc

SEQ ID NO: 453291 - DNA, 867 bp, Homo Sapiens
tagaagaaatattctgtcctatttcagcaggagggtttccaggtttatattcctggccagttttctccttatattcagctttcaaagacgaaagctgttttacatctgcatctacatcttcctttggtgctttcttggcttttaattcacgaaccacatctccttgaacagccactctattgtaaaggaccaaggaatcctcagatgtagtacaattattattcagagaaggtgttggtctttccttaaaaggagcagaggtctcattttttgtggcttctactttggtcttttcctttgaccctgatgttggcatttcctttgtgtgcccatcaggaatgtatatcaaaacacacggggcttccttgcaactatatgggctaacaggttcataaggttgatcacatatgaagaatcctcttctctggagttgtataatatctccttttttcaaatccttaaggcagggatcccctagcattagctcttcatgcttactgttcttgttgacatactgcttaaagtcctcgtcttttcctagcactggctttgtgatcaagtgctcataagtgacacagattactggaataggaagagcatgtgtagtctctgcaagccaagtgaccttagtggttttcttgtagtctttgttttccaaattcaactttgcatcaagagatatgatttttccatctgcatttttgtgtatttttgtaatgttgaggttgccccaatttataaatgtaaccatctcaccctccgaaaaagtctctgcatcagcaccttcaatgaaaactttgggactataccacacaggcttcaagccaacctcaggattctgattgataaagaaaagcagagtgtccc

SEQ ID NO: 453292 - DNA, 699 bp, Homo Sapiens
  misc_feature (92)..(131): n is a, c, g, or t
  misc_feature (382)..(640): n is a, c, g, or t
ccccaaaaaaggggggttttccacccatttggccccaaatggtttttaaaatcctcgacctcttggaattcgccgctctttggtgctccaannnnnnnnnnnnnnnnnnnnnnnnnnnnnnnnnnnnnnnncagggagtccttttctaactgagcctatttttctcttaggtacaaatggaataagtgacaaactctaatttgtagaaacattttaggccatgtataagttacactgattttagcactaagctatatttttatcacagatgggtcaccttaaaagaaaactaaggagatggaatgaatctgaaatctttctaaatacaaggtagttaacaccatactcaagcagaaattataatcctgtatttagagatacnnnnnnnnnnnnnnnnnnnnnnnnnnnnnnnnnnnnnnnnnnnnnnnnnnnnnnnnnnnnnnnnnnnnnnnnnnnnnnnnnnnnnnnnnnnnnnnnnnnnnnnnnnnnnnnnnnnnnnnnnnnnnnnnnnnnnnnnnnnnnnnnnnnnnnnnnnnnnnnnnnnnnnnnnnnnnnnnnnnnnnnnnnnnnnnnnnnnnnnnnnnnnnnnnnnnnnnnnnnnnnnnnnnnnnnnnnnnnnnnnnnnnnnnnnnnnnnnnnntcttttcatgttcacagctatcgagaagcatagacattgctggtgtggtagctcacacc

SEQ ID NO: 453293 - DNA, 809 bp, Homo Sapiens
  misc_feature (410)..(483): n is a, c, g, or t
gacttttcattttctcccacatagaatagtcagatatattaaacatcccttttccataaagatggtttcaatgggaatggaagaaacaaaatcttaaaagagtgagtatagctgaaccaattcttcattctagcaataaccacactaagttcattactttacaaatgactaaacccaatgtcttgtcctttaaaaaatataggtagtgcagaattgtgataaatacgcatttgtttttttagagagccccactccccaaagggtagccattaattcaggtagccttttaaatgtatttgagagggttccgtctttttgggctgctatcctagttaggtgagatgttgctatggggaagaacttgccactatacactaaacagacactttaggcaaaaggtgtattctggnnnnnnnnnnnnnnnnnnnnnnnnnnnnnnnnnnnnnnnnnnnnnnnnnnnnnnnnnnnnnnnnnnnnnnnnnnttctgggccactgagaccctctttaaagagaaggaaaaaaaggtattctggaagatcttgtgcagttgcaacaatgtttcagcatatatatgtgaattcatatatgacacctgaacggaatcatgaagtaacagctgagattatatggtggcaaaaatgacctgcttttcctgaagctttgggaggcctaggattcttgctttaggcatcacctttgttaagccttaaaagggggctacaacttgtgcaaaatggttgtctctggtaacacttcacaaaatatttggcaaaagtgtaatagggaatacccaaaatctttattttta

SEQ ID NO: 453294 - DNA, 794 bp, Homo Sapiens
  misc_feature (742)..(742): n is a, c, g, or t
attgtgtatgggatgataagaagtttagagaattttcttactagtaagtacctttactaagtaatagctaagtataaaatctttagttacagaaagcttgtgagcaattaaaatccttttacatttttcttgcagaatgggagaaaaatatggcaaatacaaaactgtaaaataagggcaatgacaatgactcaactgccatatagagatataattaacaaaatactttgtggtacctcttatctctcaggatctcctccctaccctagcaaggcaaacaacttggagtacttccttttcgaaagaagttctagaaattaaattgaggtaggagacggattgacagtgcctaactaaagatgagtaaaacagacctctttaatgatagactcactatttgacactgcttctactattgtaattaaaaatcagaagtctttgatgtatgcgttgctgtaagaaactctgctcattgcaaatctattttgtttgtttttggtattattctgggcacatactttggttgatgactttcaattggggttctttgtgctgccttttgggttactgttggtatttccatttctggcttaatttatggtaaccatcaaaactgcttatatttctggttagggcgaagccatttaggaagaagcatttcaccagaacaagtaaaagttaattgcagcaatgatgtcagttttggcccctagtttaataaaaagataggcaaatatcatangaaatcttcatggtttgtaggaaatcagtggtttgcaacgtaggaaatttca

SEQ ID NO: 453295 - DNA, 773 bp, Homo Sapiens
  misc_feature (89)..(97): n is a, c, g, or t
  misc_feature (675)..(675): n is a, c, g, or t
ggaataaaatacttacagaatttgttttagtgttgatttgtggttatagtattttgtttataatggtaagtttgcatattcagttgagnnnnnnnnnacttgaatttttatcagtgccattaaatgtctgtgtttagtatcaatgaaaatgaacctaaatataacaaagaaagcatatgtggctaggatgtccccctaacatgtcttcctttgttaatgcaggaattccttagtttccttgtaacgctgtcctctgagtttgtgtgtgcatgtgcgtgtttgaagtaccaccttgggttttcacctgaaattagaaaaatcgtagttaatttgagaaaatgttacaaattcatcatggctgtaggcacttatttctgttattgagtagtggtgagaattcctattggtacagctgtagggccagaagagggagtattgatgctttttaacttaaccagatgcagctatttttgtttgatgttaccaatgatagaaatcattttaaacaccttagtatctggtatttcaaatacgtagaagtctttaaaggtctttcgtggggagaaggatttttctttccatagcaagagaatttcagatccagtggattacaagtggggcagtaacttgctaagagtttgcttcctggagagtagatctgtatgtgtgacctcnacaggtaagccccaagaatttatttaatcagatttgttcagacgagttactgctgcctactttagagttagattttcaagcggagtcaacaaaaccaa

SEQ ID NO: 453296 - DNA, 845 bp, Homo Sapiens
ccagttgacggtttatgttccagatgaaaataatactattttggggagaaatacaaataaacaagtttttgaaggcttgacaactggacttctcaaagtcagtgctgtggttttgggctgcctgattgccaatcgaccagatggaaactgccagccagctaccccaaaaataccaacacaggaaatgaaaaacaaaccctcacaaggtgatccttttaacaatcgagttcaggaccttatcagctacgtggtgaacatgggtctgattgacaaactgtgtgcctgcttcctctcggtgcaaggcccagtgggatgaggaatcccaagatgggccatatttctggcaggcatgccgcaggactcttacatgcaatgtgtacactgtgctttgctgtcactggaaggtcatacagcatatttgacaataatcgccaggatcccacagggcctgacagctgctcttcaggcaaccgacctggctggagttcttcatatgctctactgtgtcctcttccatggcaccatcttggacccccagcactgccagtcccaaggagaattacactcaaaataccatccaagtggccattcagaatttacgtttcttcaacagctttgcagctcttcatctgcccgcttttcagtctattgtaaggggcagagggcttgtccctttccttccggcacatggcccagctccctggctgggccactgccacccaattctcctgtgaaaagcctcccttcatgaaggtcatccccctgggttggggctactttcccggtcaacccaccccaaataccccggtggatccttggcaatccgggggcccaacccccaaagg

SEQ ID NO: 453297 - DNA, 838 bp, Homo Sapiens
agcgggcggggcgggcagggagtgtggcgcggcaagcggcgggccagcgacggcgcgaatggcggactctcagctgttctgtgtggcggaggaacgcagcggccactgcgccgtggtggacggaaacttcctctacgtgtgggggggctacgtgtctattgaagacaatgaagtatatttgcctaatgatgaaatttggacctatgatattgatagtgggttgtggagaatgcacctcatggaaggagaactcccagcctccatgtcaggaagctgtggtgcttgcattaatggaaagctgtacatttttggaggatatgatgacaaaggatacagcaatcgactttattttgttaatttacgaacaagagatgaaacctacatttgggagaaaatcaccgactttgaagggcaaccacctacaccacgtgataaactttcctgctgggtatataaagacagactaatatatttttgtggttatgggtgtaggagacacagtgaactccaagactgttttgatgttcatgatgcatcttgggaagagcagatattctggggatgacataatgatgtccacatatttgacacaaagacacagacttggtttcaaccagaaattaaaggtggagttccaccacagccacgagccgcgcatacgtgtgcagttcttggaaataagggttatatctttggcggacgtgttctgcaaactaggatgaatgatttgcactatctaaagctagacacctggactgggtctggaagggattactattaatggagaaaggccaaaaaattcggtcatggctaactttaaacactataggtggtgata

SEQ ID NO: 453298 - DNA, 717 bp, Homo Sapiens
  misc_feature (645)..(653): n is a, c, g, or t
aaatgcttttttaaatttacctattcttaaaagtaaaccaccctctaaaataaaaaagcttaaaaattttgccttcaagatgaaacttttttctttaaaaattgtgattataacctttattcccaaatcctttcattaggtagtagcaagtaaacagcattcaagtcgttgaatcaatggttaaaaattgcaggtaaattagaggagtcttacggtatcttaatcatgtctaaataaatgaagataaatattacagtcctacttattttggttatgatgaagtgaatgatgtcttttttggttgggaaatatcagcgcaagttaaaagttactatataattttagtagtatgtgctaaaaaatcctaatatgcactgccatttaaggtaattatttagtaaagtatacctgtaagtggaaaataaaaattttaagatttattgtattacaagtgtcatgagttggtaacactaaaatttactcctctcccatttgaaagacatcaggccatctattaatccataaatattgatgtttcacatacttcatagagtagcttaaaacataccagcataagaaataattagtattacatagtaatttcctttgccataggaataaatgttggacaaagtctggaaacannnnnnnnnccaatttgaattacagtaattttgccacagaccacagcactagtgcatgtgttactttagaccc

SEQ ID NO: 453299 - DNA, 925 bp, Homo Sapiens
taaaagactttattgtattccatacattcacaggtcacttccagatttagtaacaacactgcaatgctatgatgctgtgcggtcatttagcttaaaccacagtgtaagttggtagctctctcctgctctcttggcctctagatgtatcacaatacaattcctaactgtggcctggcaaccaagtgcttatttcattggattattttctgactgggacagtgagttcatcgcatcttcccagaattttaaagtaccttcccttacattataagagatgaccaaacactctagtgtgaaggctgcttcacacactgttcttatctatcatgattgctcttccttacatacacgtcccgtacagatcagctacacacggcatggtcctgaaaccacagcttttgtttctttggccagaatgcacccctcaccttgagtgcccgccttagaaacacaggtacttggttctcacagggtgtgcatggttgacacaagttcatctgccccacggtaaaagctcttcaaaacctttgcatgacttgtggggagcagggtcacaatttgttgcatgtgacctgcctcagcctcaaaagataagagatcatgaggctccaccgcccccgggctcaggaaacttgatccacatcgctagggctctgcctgttaggttatggatgctcacctgactctctgaagcagagggaggctgacacagattagcttttattgaaattattaaagtgcaactttgtgttttcactctatcaggcactgaaaagcaagaagcttttaattttttcttttctataatgaaatatattttctttactcttatttgtatctgtaatacacctgcaattagaaacagcagttaaacataaaacaaagaacagagcagaaggcacagtctaaagagtgggtatcagcc

SEQ ID NO: 453300 - DNA, 829 bp, Homo Sapiens
aaaaatggtacgtgggcaaagaccttggacattgggggtttccctttgagaaacggtgcggtgtattacgccccccttaataggggaaattttttccccgtggaataaagtggtgggccccctttgcgaacccgcagggcccccggaatataaaatagccacgggggggccaagacaaagtttttttaccctgggagtggaagggaggcccaaggctaggctaggatttggcaagaactgaaggcacaaattgcgagtgtgtgagccccaggtggagaggggggttcttcaagccaatggcacagccactttcaacaaacatatgtttacagttggatatcattgaatttcttggttgttatgcagccatataacaaccagcagcataaaaaagccaaaaatgtatggcactggctttgagtctaggtagtaggtgaaaaggaaactgatatataagggattgtaggtccctgctcaggtggaagcttcaattgggcaaggaaggagtagaaacccatttcttttagtctttatgttccctagccagagttttgctcattgaagctccctccctctatggtgtgactgagggaatcaacccagatctggcagaaatcataaagagtttcaggattattttcccccctcttcctgaaagcttttacatgggcaacaacttggtcttgcctccaagaagatgtaggcatttcccactgtctctgggtgcctgttattcttcagcacgcagaggtgtaggtgggatatgtggtctctcagtaggcagctggcctcacccaagctcccatctacatttggaagccagaacacc

SEQ ID NO: 453301 - DNA, 958 bp, Homo Sapiens
gggcccaccggaattgtttcaagggtttgttggggccagggttttttaaagaagttttacctaaggtttattcccccgggaattcaatactcttattaaaatttccccactttattttttcagattttataggcttgctgcccaaacaaatggtacttccaaaaatacaccttgggaaggttttagcaactcccgaggaccggataaaaagcagttcaataacccacttttgctttagctgaaattggaggccaaattatcttgattgcttgttgtttctaacttcagattaatatccagatctggggtgtcaaaggtgacttcagttgtacttaaaaccaaataaaaagtgacatttgaatttcttttaaaaggatttccgagctcacagtcagcttgcgagccattctggttggcaacacaactcaactgtttctcagggaaagccctcagttctctatatgcagaataggttaaagtgtctggaaacgttgcaatcagtttagcctcatgggcatcatcgccatcttttgtgggattccttgggttggaagggctgtttgtcactgttatttctaaagcaatatccttctgatcttttagaactagttctggtacacctttttgaattggtaaataagaaaatttgtcttgatttccttctcggggtgcaaaaatttatattctagtttaaggttgctgttacatacattgtcgtctccacatccctcttttaagaagtgaacatcaatatgagctgtcttgggttcatctgaattcagaattggaagaacttctggaagtgaattcactcgcctacgagagcttggctcttggatctccactgagggcagttatgggaatgggacgcagtttatctctgatattatcctgtagccacagggtttcctccatgcacactttctgtttctgcctcttcagagttagttcttgagta

SEQ ID NO: 453302 - DNA, 803 bp, Homo Sapiens
tttttcataatgaagcgtggtccacgttgcttagaactgtccacagtgtgctctattcttcacctgcaatactgctgaaggaaatcattttggtggatgatgctagtgtagatgagtacttacatgataaactagatgaatatgtaaaacaattttctatagtaaaaatagtcagacaaagagaaagaaaaggtctgatcactgctcggttgctaggagcaacagtcgcaacagctgaaacgctcacatttttagatgctcactgtgagtgtttctatggttggctagaacctctgttggccagaatagctgagaactacacggctgtcgtaagtccagatattgcatccatagatctgaacacgtttgaattcaacaaaccttctccttatgggaagtaaccataaccgtgggaaattttgactgggagtctttcatttggctggggagtcgcttcctgatcatgagaagcaaagaaggaaagatgaaacctacccaattaaaacacccacttttgcaggaggacttttttccatatcaaaagaatattttgagtatatttggaagctatgatgaaaaaatggaaatctggggaagtgaaaaatatagaaaatgtcctttcagaatatggccattgtggtggggcagtttggaagattatgcccttgcttctgttggttggacatgtttttttcgcaaccaaaagcccttcatagcctttcccaaaaaggcactccaggtgaattgcttaaaaaacccaagttcgcccttgccaaaaaatccttggaaggcatggaatacca

SEQ ID NO: 453303 - DNA, 1156 bp, Homo Sapiens
  misc_feature (30)..(30): n is a, c, g, or t
  misc_feature (45)..(45): n is a, c, g, or t
  misc_feature (197)..(197): n is a, c, g, or t
gaaaaattttgtctgattatgtgaaggatntttctgtacatgaanagaagggaaaataaacttgcaattgaatagactgattatagtagcactgagacacaaaaagattgaccatgttgccctccagacactcatacaaggtcgtggacaccacggtgaggcggagtatttagggtggtaaaggaattatgattgtncttgagccaaagtaatttagtttgaatataatgaaacataccctgtaaagactgctagaaagtaaaaggattcgtcttcagaggttgtagaaggtgcccttcttagttaaaaccaaactgggaaaagtaatactggataaaatattcaggataaattttgcctcagcagaatttcaaagggcagttgttcctctgtttcattattgaatcttcagaatatagttaaagccaaaagcttaaaatatgttaaatgtttcacttataaccataatctttttacatagagcatactctgccttcataataactaaatcctctgcatgtggtagatgagtacgtttaggaaatattgtcagtgcaattaaatggcctacactttaaacagtatcataaaaacaaatccttaaatatattctacttgagtcacaaaagctgaacaacagaaaggtgttttgtttttgcctttctcacagtgttgtggtgagaatcagatgagatagtattttgactaaacacttctgaaattgtaaatatatgggtgggcattattgttcttatgtcggcttaggaggataccaaagggggaagttaatgggtcacagtgcacttatgtaggctttctaaggctacttcaatgtggattcttgttctctttgctgttctttttctcctcccccatggtgtccttcagagagaaaaggaatgtagataaatgaattcctgcagatggtgtcctgaccttttcagggaagggacaggggtataaggatgccatccctggaaagggaaccctggggtgagaaaaaagaattcccaataatgtgggattttttaaaatttacgaaagaacatttcattttgccagttttatgaaaaaggaaaaaaggaaattttggaaatacaaagcttggattttaaattgggcattcaggaaaatattttggaaatttaaaatggcc

SEQ ID NO: 453304 - DNA, 793 bp, Homo Sapiens
ttattattaaaaaatcctggggcgaaaaatctgttatttttaaaaaaggcccctttttcccaaccagcatcattcaacatttgtgtaatgggttttttcccaccccgtggtggacttttcctgatggggatttgaaggaccaggaggacttgacttgaaggcctttacccacaggacacccacatttgtatggcttctctcccagtatggactcttctgatgtaccggaaaatctatggcgtgactgaagctcttatcacactgctcacatttatagggtttttctcgtgagtgaactctttgatgtgcatgaagatttgatctccaactgaagcccttcccacattcctcacatttatatggtttttctccagtgtgaattacttggtgtagtttaagatttgaactataactgaagtccttaccacacacatcacatctatatggtttctctccagtgtggactcgctgatgggtttgaagctttgaggactgactgaagcccttcccacacgtttcacacttgaatcgtttctccccagtgtggacattctgatggacttgaagatttgaagcctgactgaagcccttaccacactccttacatttatagggtttctctcccgtgtgaactctgaaatgaatatgcagatctgtattacgggtaaagcctttcccacacgcctcacacttgtatggcttctctcctgtgtggactctccgatggcatattaatggtgaattgtggctgaagcccttaccacacacatcacacttgtagggtttctctccc

SEQ ID NO: 453305 - DNA, 757 bp, Homo Sapiens
  misc_feature (59)..(59): n is a, c, g, or t
  misc_feature (401)..(416): n is a, c, g, or t
ttccttatctcttgaaagtggtgtactattatttgttataaagaacttttcccatactntaagggctttaattttataatctagccctttcaaatgatctacctcagtacagattttgcctttgggaattgtaagcatgcagtgaaaaagtgcaaatcattttaaaaatccttcagacttctatatacaaccgtaacagcaaaaagaccctatgaacgttaaggattcatcagccactacctttcacatactctattaaaaaggttaccattagttactctcctttaggtacaatgcaataaggatcagaaatatccaatgaccaaagtagtacaaattgatctatgcacatttgttactttttcaagggacaaataaaatctttatatcaagttcagagnnnnnnnnnnnnnnnncccacaaagagtaaggccactgaaaaagcaatctgttttagagctggctgagaaatctacctggaaatgtcttcagtcaagggagcactgtggcttgccaacagaacacgcacatgctctggcacaatctgcatagaacctgccataaagaacacaacccttcacaattgacaggtggcttgttctagggaatgataggacaaaaggggaggggatggctaagggagtaaggaaaaaagaaagatgttaaataacatcttcaatatcgaaataaagcctgattctggtgccttgtcctttacatataacagatggacacacaatgctacacacacaccacc

SEQ ID NO: 453306 - DNA, 858 bp, Homo Sapiens
  misc_feature (48)..(48): n is a, c, g, or t
  misc_feature (801)..(809): n is a, c, g, or t
catgctcacacatgctgttttctttggttctccccctaccttcctttngtagatattgacagaataggaggaaatgagcatccttatttgagaaagagcaagaatgtcatgagcccttgatgcaatagtaagtgtgatgtcatcatacagtgttaatgatgctatcaaatccatcaataaacagtctcaaaccttccaacaacagtgctcactgctgctcctcaacttcagcccagcaagcagtaatatcatcacccattttgagatatgcaggtggaatagaacaaagaaacagccactgtaatcgagaagcatgtttactgtctaaatccacctgttgcagtaggaagccagagtggggttccaaatgcctcattaagtatgtggacagcctcactagtaagtgagtgaatttggcttcatcactgaacattagctaaggtcagcttaataacacaaatatgaggccgacttctttgcgagaagagaaaagaaaacatctgcttgatttaaaatccaccccacatgcctagagttgtctaatagtccctcactttccaatggcttcacatcctacttctacatttggggttttttggtgaaatcagagatagctcaagatttcattaaacgaaaaactcccaacctggtctattaggttccatggggaacacttgtaacccaaggattggtcttgaaggcagggaagacgacaccttggtcaacaaaggaaaaacagggtttcctttaatttccccatattccatccaaatttcatggggggttcctaaactttttttnnnnnnnnnccaattaaaattccttttttaaccaatccttgaaaccccaattcctatt

SEQ ID NO: 453307 - DNA, 562 bp, Homo Sapiens
  misc_feature (52)..(87): n is a, c, g, or t
  misc_feature (320)..(359): n is a, c, g, or t
cctaaacaggggggtggaggcaggcaagaaagaatagggagctgtggcaatnnnnnnnnnnnnnnnnnnnnnnnnnnnnnnnnnnnnggtaagtctaccactgatttataagagcaggagtataaattctatccaaaagtgtaagtgatttcacttacaacctgactcaaatctcatgggctcctttattaaccaagattatttttgtcttgttaaatatacctctgcagggcacaatcacttacaatcaatacgattggtaaattacacaagctctatcccaagcaaatatgcaccaatgttaaaaagttatctttttnnnnnnnnnnnnnnnnnnnnnnnnnnnnnnnnnnnnnnnnggtgataatgactgcagaatgtctcggggagactgatatgagcctaaagaccaaattaccatagtcagagaaaaagggcagaaggggtaacaaggggaagacaccacaaacacgaagaggaatctcaaaactggaaaatgtttaagtgggtgaaaggtttcgtgcattaccttaattcactttttccattgggcgtacgggga

SEQ ID NO: 453308 - DNA, 791 bp, Homo Sapiens
  misc_feature (126)..(134): n is a, c, g, or t
  misc_feature (286)..(298): n is a, c, g, or t
gttgttaaaaaaattacacagtgttggcccctttaaggagagaaaaaccatgggttttgggtccaaattctttgggccttggtaagggttttggggcccccccacacattttaaaaatataaaggnnnnnnnnnttgccccccgattcttttgataaagggttttttaagattttgcagaccacaggtaaaatactcatttaacaaaagtattccagggctatcccaactatattggccaggatttcataagccggtaacacacatttatattataaaagtagtcnnnnnnnnnnnnngaaacagccacaggtaatttagggctaaaatgagtcctaataagggttacatgagaaataacatataagaccccaaataaattttagatacaaaattaaatgatgtggctttgttcaaacatacctaaaattcaaaatcaagttaaatacctaggctggcttttttatatcaccagctttcattagggctttaatcgctcttgccctcatctcaagttctagcagctccagttgctgtgcagaaggttgaacatcttctggtggaggaacagccagggtggctgctttgggttcgtttgggctagactctgccagtcctagaatctcattcacacttttctcaatgtctttctccaggtcatctatctgaccagcttcactttggactgtattttctggtgcctcgggagcagctgcttcttcgttgcatgggccttctatgtcgctgtcataagcatctgcatttatactgagtacatcactatcttccccc

SEQ ID NO: 453309 - DNA, 874 bp, Homo Sapiens
  misc_feature (317)..(331): n is a, c, g, or t
  misc_feature (860)..(860): n is a, c, g, or t
gaaaatagaatcactttttgcctttggtactccacaccttccaaattggctgtaatgactaaggagctatatgaatgatcagtgactgtatatacaactccatccttttacttaacagagttgtttattgctacttgaaataccccacctcaagctagtcttttgttgtcattttatgcagtttttttccgcacttagaagtataatatataggagtttaagcactttttcctagtattgccagtactctgatagtttcagcttgcccattcagaaacagaaaacaacattgtaagttggaatggctcttattttgnnnnnnnnnnnnnnnggggctgttgctgaaaaaaaacaatggtgggtctcccccctggggcattccctttaagaacggccccgaacagaagggtccttttcaaccagccgcccggggaaaaccctggaagggacctttggctaaaacaaccccctggtccaatggtttccacaaccttctcaagccccggggttaaactgtcgcccatcaaactacgggcccggggggaaagccgaaaacctggtgttgagaaaggaacacctcttaatatcccaaaaacccaggagagagaaagaccggtggattgcacatttttcttttggggagcacagaaacagtgggccaaatattaaatgtgtaactcctgtataaaacaggtcgggcccccctatattctagatttgatttgtaggacgcccttcaaagggtgttttttccatccccccaatttctcacttcctgcccctcaccatgacgtggaggaagaaacaaacccctgtggttttttcgcacacttgctaatcaccgctcacacccctggcgnggggggccacagag

SEQ ID NO: 453310 - DNA, 963 bp, Homo Sapiens
tttccattttaaaggggaaatggattaaaattggaaaacacatgggtggctgtaaccaggattccagcaattctggttgaaaaagtacacaagtgttcgaacacccctgttaggttcaaaccggaattatagaactataggtctttcaattctcccagcagtaaaaaagttaaggtgtcataattgctgcattttgtgtcgaataaacgtttgaaacatcacagcactatcaaacctacttcttgcacactccagagccactcctgctgctccaatggcttttggattctgctcaacgaatgatcaccattaggtgtgtaaatgccgtcttattaagggaaaccttgaccgctccttgaaattgcttatcgcatcatcaagtgtgaagagaaggaatgcgtcacagctccacttctggctcgctatactatcatcctctgggatcctgggaaggtgtacttaccttccagggttgagctgttttcattatctgtaagggtgagggcagaggacgtgcgaggctggatttatgcgacattctgccagacagctgctagcactgcttggcaccaacaacccacagatgaagagatggtgatccctaccctgggaaagctcactgaactgggacagctgcgttaatggtgtatactcgagcatgcccagggccaggtggcagcacagaggaggcgagctaggaggggtggggcgaggcaggggaggaacgtcagggaaggtcttgaggagtcgaggcctggactaagactgggaaggggttagatgggaaaggcgtagggttaggagggggttccgggtgtaggggtaggagtgggttccaggcgaagcaataatctagtaaagataaataggtgtaaagaacaggtatgtgaagaaaactaaggtgagcatctgctttcctgttccaattagaaagctattgtcgcatcagagccatggagtaaa

SEQ ID NO: 453311 - DNA, 570 bp, Homo Sapiens
cctcaaggtagggggagaccgtctctactcgcttctgaactgctgctgcctgggtccgcgtcaatgttgataaaaacacaatgctttcctgtggatctccagcagactctccgaagagattggataaaccggcctctttaagccactcttcttccaattctccctcatcaggctctttgacaacaaccacctcttgatcttcttggctgttttcactagatttcttgatgttttctagttctatccaatagtcttccatagatagttcatccaaagaatcctgggaaattgatcgatcaaatggaggcttctccataactttgatggtggtgctttcctggttcatagtgtactggccatatctgcgactcgaggtggcttcctcccctgcctttgcatggctgttcccgacggcctggtccttgccgctggggtggtaggctgttagtaccactccctgggaactggagagccagctcatggtgagagaagggacatactttctgcgatcctgacacagagaaggggaaagaagttcctgtctcgcctggcaactcgctcattagcatt

SEQ ID NO: 453312 - DNA, 579 bp, Homo Sapiens
  misc_feature (261)..(278): n is a, c, g, or t
gtgcgcaggcagcttaagttcataggaagaaataaggttctgatatgtttagagtgcacattttaaaacaacaaaataaaaatttcaagcatgtgataaaaatattgatttttataatacagtattgctttataaatatagatggaaaagctataaactttactggtctttggtgcatccagagagggataaataatttgccatttgtaaattagaaatccaaattttttcttttgttataaaagtccattacatgaggcnnnnnnnnnnnnnnnnnntgcttaaaatataattaacacacacatcaggttcagaatcagacccaccaagtggtacagcacagtaacaacccatggaagcttgggtctgtgacctggaaaattctactatgggtccaacacagcctctgaccactgagagtaggagagatacttgttaagcagcactccagctgacccccccggcagtcataaaattaagtgcataacacaaaaagaacaggggaaaatagagaaaatattttatgtcactaatctataggccagatccaaagccaattccactgtgaaactcaattcc

SEQ ID NO: 453313 - DNA, 836 bp, Homo Sapiens
  misc_feature (157)..(167): n is a, c, g, or t
  misc_feature (214)..(214): n is a, c, g, or t
tttataaaagaatctttagatgtggggaaattccgctttgcgtgctggagaatttcccattagaaagggacctctcaggaaaattaccaatttaggagaatttagtttacaaaaaaacgctcagaatttagacccccccggggccttatttttgaannnnnnnnnnnaatgcccaaagccacctaattccttgggacccaaggattattccgtnaggggaaccagggttatggaccataggtttcaacttaaccttactgggggcccgggggcgcccaaaacggaaatggttttaggaaaggctttttcgaaggggccgaagggcgggccgaacaaggtttcttttgtggtgattgaaaagtaatttgttccaggttttaggctgaagacgtaaagcctgctgctcctgggtatcatttctcagcttctccttacagctatagtactgagtcaaggacgtctttaacgtcatggacggctcctttacccacgctttctagatcttcgactgcatcttttcctagttttccgagtccccccacagctttttttgctccgtctaggcctttttccagaaggctggatctctgcttccttggctttggtgcctgtctggctaaccctgggtcttcacctgcattttccttttgagctgctgatgcttcatggcaagggttccccgatcctggggcagaggcggcctctggatcataggcacagaccagggctcctgccagagctgtcaggaagaggagagtcatgaacctcatgcttctgtgtgctggagtgggtatgccaccgaatccttggagatcttgggatctagggtgtccccc

SEQ ID NO: 453314 - DNA, 1079 bp, Homo Sapiens
  misc_feature (196)..(385): n is a, c, g, or t
  misc_feature (408)..(423): n is a, c, g, or t
aagtgggatttttaaaaaagtgggatgtgggtaaaaatcaaaaaacccaattttccattttaaaaaagtgaaatttggttttaaatcttaaaaaatgctaagcaatcctggcccagggcgagggttggctcaatgccctgtaatttcccagccactttggggaagcccagggtgggcggattcacataaggccagnnnnnnnnnnnnnnnnnnnnnnnnnnnnnnnnnnnnnnnnnnnnnnnnnnnnnnnnnnnnnnnnnnnnnnnnnnnnnnnnnnnnnnnnnnnnnnnnnnnnnnnnnnnnnnnnnnnnnnnnnnnnnnnnnnnnnnnnnnnnnnnnnnnnnnnnnnnnnnnnnnnnnnnnnnnnnnnnnnnnnnnnnnnnnntgacagagtgagactctgtctcnnnnnnnnnnnnnnnntgctagcatctgggtgaaacagtctaggagatgacaccagcttgaaaagaaaccaatataaatttcaaaataaaccagcatacagaccaattgcaatttatagaaaaaataaaaatgtagaaacatcacctcctctccccgaccccagtactgaaattatacttcctcagacatactgccccatcactgggaagggtgcggacagattgggtacatttatagaatattaaataattaagtaacagaggcaccgtttttgcatgtatgggtcccaaagacttttcaaacttatttttcaacattagagttgttaagaatggaaattgaaggaattgtacatattttcactgacagtttcttacagaccccaaagtgaaaatgcaacacatcaccaccataagacaagcgattttgtctgtcacccagaagacataacttgataggacatcaggcttgcaagttctaagtgcttccttcacatacctctaaactttttatctttcctgaactaaatagattccttttccaggtcaagtgataccttctggcaaaataccttcaggataaatatgcttcctcagttatatatcccacaatgcaagcttccattacaagcttaaactcagctcctggtcttgccattcaagactctcccc

SEQ ID NO: 453315 - DNA, 900 bp, Homo Sapiens
ccttaatgccctttagtttcccccttatacaaaagacattttgtttctccctggatatgcggaaaagacaaaggttggtgtctttgttgaaacccaaaggaaagaaatacaagtctaagaagaaaataaatcaggttgtcttggaaggttttaacgggaaaggggattttaggttttcctgttaacccggtaaaaaggataatttattttagttccctttccaaatcccctttccccgttgggcccttttaaggcagggtttttttggggcagggattttaaaattaaatggtctgaaggcccaaaggggcttccaactttttggaaggactttttgttcaccaactttcttttaatctaatgttcctgggcctaaatttccccatttttgctaactgtttcttttaggggacccatgggataggtaaagggatttggcaggacagggtaataagtgcatttatgtgtccatagccacaatatctgtcaaaatgctatcaaattcctcattctacttgatacgtgacaggcgctatgctaggtgctggtgatatccagagtcaaaaaagacagcccataattacctgatgacataaagttcagtaaacaaaattcctattccttatttttaagatacctaattatctgtcccaaaacttacccacgttaatgataaataaaaaatactcacctctatcttccataaatttgtacaattgctgaagaaagttctccctttcttctggaaatggttctatttcttcctaattttaatcacagaagaatattattttcttcaattaagcattttaataaaacaagcagatttcttaccaatagcaaagactagtgttcattaaaatacttcaaaggctttttacgtaatcaaagttactcttt

SEQ ID NO: 453316 - DNA, 1437 bp, Homo Sapiens
  misc_feature (37)..(37): n is a, c, g, or t
  misc_feature (208)..(208): n is a, c, g, or t
  misc_feature (364)..(364): n is a, c, g, or t
  misc_feature (661)..(661): n is a, c, g, or t
  misc_feature (681)..(681): n is a, c, g, or t
  misc_feature (983)..(991): n is a, c, g, or t
taatgaagaaaaatttatttcgtaaattatacaccancgagatcaatattgaaacaggacgagattgccggagaaactcattttcgacgacgtagctcacgtacagtacacttcccactttaggcgggcacatccgggcagcacctttactgcggacaattcctacgcgcaggggggccttgagggggcacgagaagtgtggaaacgnaataactcaggattggaaggtgcgtaggtccgacacgagcagacatcttaaggcacgaaatcgggcagtgggcagtagagcacacaaaaataagtagcgtaattacatcttcacgaatagtgaagagcatggagagataatgtgcgttgcgcggcngcacaactgcccagacggtcgcgtagtcatgatagtacgtagggactatgacgttaccagtacaggttgtgctcattctgaattctgtaccggcgcaatttcggcttacaaatatttatttcgtgatctatattgtgctggagttgccacaaggatgatgttaactttccgggtccacgattggcatcattcacatatcccaatgctatcgtggtcttattagaacaagtagcaggtgctatcttagacattacaacgcgtgcgagctccaccgtctactctaggagcggtatagantatatggtcgaggggcgtgnggagactcagatattatagaacacgcctcgtagacatagtgtcacacattagaggagtgggtcaggtgcgattatattatcatttgtaggtcgcacacgcaggggtagatgggtcgcaatatagcgaacgcgggcgcccacacggccacacgggattcgtgactaggacaagaccttccaattcacggaattttaatgttctcgggatttttaggtgtggctattagttggtaaatgtgctagagacgactcatgcttcattcagttcaaggactagtgcatacagctctccatttggaatnnnnnnnnnacattagcgctaaaaggcgctgtgttagcaaaggctttggtggtgcactctacatttccaagctacgttttaaatgacatagtaagcaatttcccatccactcagaagcccgggtcttcacggagcttggggaggggagcttggggaggggctctggagttgtgttttaaagcagtacatcttaatatgaagacaggaatttctatgatgcttacgaacattagactcaacatttttgcagccccctttcctggtctacattcacacaaacatgagacacagtcccaagggagaaacagatgctggaggagcatttagggccagagtggaggcacagaggaagctgggatttttcaactaccccctccttggttactcctgggattcccttaggatttcacggcacaaccagcgaagagtttgctcagattcacttcggagtagcc

SEQ ID NO: 453317 - DNA, 831 bp, Homo Sapiens
tatggaaactggtgttttaaagggttccccttttgggaatttcataaaggctgtaaggaaggggttatcctttatttaacctgtgggggtattggtgggcatgcatgtggtggggggcacaaggtgtgggtggtcgattccaaatgtgtgcgatgtgcagcgcttggctcctagaccattgtccgggtgactagctcgtctccagctccagattcagctctcctgcagggagcctacatagtccttttatttgcacacatcctgctgagaaggatttcagaacaaacctgatttattggacctctgacatgatatggcgatcgaaaatttgttacagtgccttgttgtagtttgctttgattgctgaaatatcttcccatgatatgatttcttgatcttttcattttaataaagttatattctttggataactttgatttcactacctcatggaaatgacatccacacttcccctgtagaaactctttgtaacgccccattgttatagtgaatgtgtcaactacttcatagccatgtttttttgcagtatccagaataatcaaattttctttccataagttctgtacttcactctgtgttaagaaatgtactccatccactggcagatgaaatccaattcccaaagttttgatgatcactaggatattgagtaaattttccctcttcaaaactttgtgaataatttgcaggtgattggaattaagccactgaacaccaccaacaaccaatacagtctggccagtattctctaggggacgtgatctttgcaagaggtgttcaagtgcattttcaaatgttggtctcaatgcc

SEQ ID NO: 453318 - DNA, 674 bp, Homo Sapiens
ttttgttcttagcccctctgaggaaggcaaagtttgttgagagcccacgaattccagaatccgagcttggctcaccaaccctcacttcagctcagaaactggacgtggatgcatactgccctggtgatgctgaacaggagcttggcccccctccatctgtagatgaggcagcaaacacactcatgactcgtctgggtttcctccttggagagaaagtcacagaagttcagccaggtgaccaatacagcatggaagtacaggatgaaaatcagacctcagcaatcacccagcggataagtccttgttccactctgactagcagcactgcctctccaccagccagtagcccctgctctacactcccacccatcagtacaaatgcaactgccaaggactgcagctatggggctgttactagtccaaccttctaccccttgaaaacaaaaaataatggcattcattgctacattaacaagctattctgaaaatgttggaacgcccaaaaatatgctgggggaaagcaattaaaaaatttagaatttgggaggaaaacataaaacccttggccattcttaaaaatcccaaccatggaactccctgttttttattccaattaaatgtaaaaacatgtaatggctttcccccctataaagccttgaataaaaaattccacg

SEQ ID NO: 453319 - DNA, 610 bp, Homo Sapiens; identical to SEQ ID NO: 325345
  misc_feature (97)..(97): n is a, c, g, or t

SEQ ID NO: 453320 - DNA, 1140 bp, Homo Sapiens
acttctattttccacaggaagacaggctcgactttttgcctgggcagatcctactggtaccagaaaacttacatggacatatgcagcaaatgttggggaacatgatttgttaaaggatggatgtggacagtttccatatgatgcaaacatccagatacactgggtatcatttctggatgggcgccagagagttttgcttttcaccgatgatgttgccttggtttccaaagcactgcaggcagaagaaatggaacaggctgattatgaaataaccttgtctctccacagtcttgggctttcactggttaacaatgaaagcaagcaggaagtttcctatattgggataaccagttctggtgttgtttgggaggtgaaaccaaagcagaaatggaagccatttagtcaaaagcagataatcttattggaacaatcctatcagaaacatcaaatatcaagagaccatggctggattaagctagataataattttgaggtcaattttgataaagatccaatggaaatgcgcctccctattcgtagccctattaaacgagactttttatcaggaattcagattgaatttaagcagtcttctcaccagagaagtttaagggccaggttgtactggcttcaggttgataatcagttaccaggtgcaatgttccctgttgtatttcatcctgttgcccctccgaaatctattgctttagattcagagcccaagcctttcattgatgtgagtgtcatcacaagatttaatgagtacagtaaagtcttacagttcaagtattttatggtcctcattcaggaaatggccttaaaaattgatcaagggtttctgggagctattatttgcactggtttacccccaacacagacccttgaagctaaaagaagacgggagaaagttaatccgacaaaatattggatgctcttaaatgcaggattaaatgggagacttccagtggacgggaatggccgagttctttaatgttcctttggaaggtttttcgatattgtcctcctggggagagttgcatcttgaattttgtgcctttgggggtcccccgaaggtcaagaaattcggaactaagaacaacccggggaaatgggttgggcagtttcatttcgtgggcagac

SEQ ID NO: 453321 - DNA, 852 bp, Homo Sapiens
tattccacaggggcaacaggacactaatacaatgtgttacctgcagaaacatcagatgcactaatggtggatcagaaccgcccaggtggcttattgagtacaggtccccaagcaccactcccagatattaggattcattagatccaagtccagccttcgagcccgcattcttaacaccctttcttttccaattatctagcctgtaccgatgtagaaaggcttagtaatactcatgtcagaagatgaaatccagaaagatctgttgtttttcaaaagctgggtgaaggtttatggaatatgtttggcagaagtactaactaaatcataaataaattttttacaaaatcctagactattagagtggaacagaccttccaggatgatctagttcaatgcttgcattttacagctgcaggaactgatgcacaaggaagtccagtgtttctagggggtacactatagagttcaagtctggcccagaggagtccagacttataggaccctaagaattaggtcacaagggatttgagctaaacaacagggaaagcctggttcttacggtgtgatcttttgctttgtgaacacagcactgatttgcaagtgtatatttttttcttaacattcccgacaattccataaagaaacccaaaactctcaacactaataggtgagctttggacacaatctttgaaacataaagcctcctatcccaggaagatgccccccttagtgacccaggaacccctttatgtgctttgaactatactcccaacttgaaattgtgttcaagacctccaaatgtttaccccggaaagtcccttttttcgttttatagacccctcccgcatgggg

SEQ ID NO: 453322 - DNA, 1060 bp, Homo Sapiens
  misc_feature (163)..(163): n is a, c, g, or t
  misc_feature (292)..(292): n is a, c, g, or t
agaaggcagaggagaactaagacaggtgattagaagtacgcgactagtcagagctgtaacacttcgtgtcttagatctgtctcgtctgcgcgagagataggattagatgatgatcgaagaggagcagatataaccgggcgcgagagcgtcgtgtctcatcagnagcgtagggatgtacttgagatagcttgccaacagacgtatatgtctgagtggtagataggcggagcaggacaaaacatggcagctgacgtgggagggaatccggcaggatgaagattatcggaggcgnaaacatcatgagaagtagtggcgtagagggatggtgtgaatggtgtccgtaataatatagaaaggaaagagagaaatgtaacggtggaaacagagacgagaggtaagggcgcgtatatataataggtctgagtgctgcggcgcctcttgctatataaaagaagagataaatgaggggggttgcaatcgacgccatcgatgaatgtatttaagtagcgacagagcaccagcgagcagggacggaagaaagggttatggaaggaagtattaaagtaaaagggacaagtgtgtgggagaacagaaagaaggagtgtctgaagggtacgaggaagctgcgggtttctattaagtatgtataggactctaaaaatcggcggcgctgtcggagattagtgtggggggccttctgcgcatacagtcgtgcaagtcgttacggagctgtggggacaggtaacggaagagcgtggcggctaggggaaatgcaaacggaggatagaattaaggggttcggcagtcatagacgtattcagcgatagagggaagtgaggttaatcaggcagggagagataaggataggagggctaaatcagctgagaacttggggagggtagtaaaaagtaaaagagatggttaaccgttgtataaatgtgtggttgaatttttatttatgttatctgtgaaaccaacagggcatctggcacacattttagatttttcccatagatatgaacatatattgcatatttagttctttttgaattttgctccc

SEQ ID NO: 453323 - DNA, 464 bp, Homo Sapiens
aaatttcatttagatttggcacacctctttattcaaaagtatttatttccacaaatttttatccacagctaaatattacagtgactattacaagcatttttctataaacaaaggtgtagtttacagatttgtgcaaagtgggaaaatattttcatcagtagtctttcttccatggtgttggattcacccctgaatatgatctgaactctttcagagaggcagtccttcatctaaatgtcagttggtggcaaaatgttatattcaaatctggattattctgatacagtgtcactttagaaagtagcttagtttcatttctgattgatcccctttgttagaattagaaattttttgaaaaacaatcttttgtatctaatgacctttataataaaaaaaaccctgtcctgtgtttctcattggcattaacctctgtctacaccctctaattctctaattatggcccc

SEQ ID NO: 453324 - DNA, 1071 bp, Homo Sapiens
  misc_feature (48)..(106): n is a, c, g, or t
  misc_feature (297)..(306): n is a, c, g, or t
ccttcttaacaggctaagcttccctcataagaactgtggtgtttctcnnnnnnnnnnnnnnnnnnnnnnnnnnnnnnnnnnnnnnnnnnnnnnnnnnnnnnnnnnnaaatcagtatccaatgttttataggggccaaaggttaactttgcactattccctgtcagttaaaggccactgatatttttctaagttagcaaggctcacttgcttgctttcttgcctcccttgcctccatccctctcccttcctaccttctctatttacctatttctctccctccctctcttctcctctcnnnnnnnnnnccccgcatatgcagctttttgattgtacttgattttatagagactgcacagttccagcaagattgggagtcaggcatggagcaaggcatctcaggctaccagaaagaattgggtcacctagactttcagtcaggcatcctcgtttggcattgtcccgtaagtcaattaacttgataaatagtttccccctttcatccccttaagtttttgttatattggtttttggttttttaatacaagggtaaacttggggaacttcttaccctaaaaaatttttcgccaatccgataacacttaattgggggataaatcagaccctttttttctcacaacctcattcttcctttctaatgccaaaaaagtgtacatggcaagaagctatttggaaaaaattaaatatttttttgggcgcttctggagattaaccccaacttatttttaacaaatattttctccttcccccaatattgtaattcagtgtaacactcgtccccatttgtgggtaatttaacaccgcttggatataaacgaaaaaaattgggaaattttgcacctattgccgtgtaagagcgggggagccccactttaacaacatcatgcggcaaaccacatttctcaattgccccatgattctggaaagtttgtttacgaagaacacttcacttttttgccgcaggctatctatattttaatcggcgaaaggaaaaaagacatgctgcgggggtctcttgagccctttgccagctcatccttttttaacaaaaa

SEQ ID NO: 453325 - DNA, 905 bp, Homo Sapiens
tttgaaaattaaggtgatttttatttcccaccagttgtaaattaaaattgtacaacatgttttctaatctatgtctcatgtgtcttgctgtatgactgaagacaatgaatgtattttaaaaaattatggcagacacaatatacttggtatttacaatggcctgtgacaaatataatacctggaaataatttctaattttccacttattattgctatttagtcacagaaaagattaacactctccaagaaattttagcatatgtcatatatagatataataattttatataatgaaaaaccataacagaacagggtgcctttacaaggaaacaaaggaaaggcaataaaggatttcttccatataaagattctgatatgcattatttgatttttgtttacaaaatacaaaactgtaatattagaagcaaagggaaaacagcaaagaaaaaaacaataaaacagaaggccaaggataaggaactgttctatgcagatgcactgcatacatagtatatatgtatgggctgagttataataaaaatacttattgtcaattctcatatagatttagaaacaacaatttccaatcaagcacgactggacccaacattttctcagtcttcaattacatgacaaattacagctacacagcagtcacttctggtcagcagtatcatgataaatgcttgacaagatataatttttctcctttgttcacgttgtaaaaatttggtgccgtttttgtaatgttctacaagtcattccatggtgcatgatttacgctgccaaatgcagtagacagtcatcttttagttggactttaagatgcttgtttttcgtttgtgctttttagtgtactgagaaatcatttgcgagattcactatcacggatgaggaatcccctt

SEQ ID NO: 453326 - DNA, 537 bp, Homo Sapiens
  misc_feature (1)..(1): n is a, c, g, or t
nagtagcctatgacataattccagaccaggtgaatctcaagatactaatcctcacatcatttgccttctcatatttccctcgtcttgaccatctggtgcctgttatgcagtttaacattctgcagcaataaaagtgttttattataaagtattaattttaatgttctatacttagtgggaaccactggtctcaaaatttgaagctattctttaagaggaggagattcgcaaaactcaagcatacttggtttttctctgtagtacttttgaatgctttatcttccttacagagtaacttgtcttccttatgcttcaagctccaaaagggtaaggaagaagtcttaatcatttttgtattccttgcacaggacctagcaaataattggtactcaatgtttgctggatgaatgaactaaattcccatacggccactttatggaaactaactgcctaatcgccactttcattataaacaaaggaaaatgaagataagacggcaacagaggccaggtgcagtggctcacgcctgtaatcccc

SEQ ID NO: 453327 - DNA, 809 bp, Homo Sapiens
ctgtacgaaactgagatttttactgacatgcagatgtgctttagagttaatgtttctacaaaaagtttctataaacaatagaaaatttctagcatgaagtcacaggatgttaaaaatattacaatgcaataaatacaactacatcctccacagccccaaccagacaggaataggcagctatcaggtttggagggaaacactcttgagatcgccttcacgatccacagaaacccagagcaccacacaggaagagggagcaacacaagactcccaacttctgcttccccagctttgcttcttctcaatctgaccctgcctgtggcccgcaccagctaaaaactgtagcttcagtccacttcggctctcggggaaaccctcttgtcagtggactggatggacaacaggtctgtttttgtgcagagcacatggacacactggtttctgtatggattaactctgccttacggccagtaataacctcagggccaggtcccgtatccatgtcctctctttacagggcctttcagtgacctctagaatggactcacagtacaggttgtgatgtgaaggcatgtattcttttggaaatggcctttgagaaaagtaaccagggacctgaaagaccatgagattgtggaaggcacctggacttagtcctaggagaagaccagcggctttgctagctgctcatcacagatgtagcctagttggtctgtattatccttggatgaccaacggtgtcatgtgacactatctagggtcactgtggctcttgtgcctgagatggaccttgaggctggggcaggcca

SEQ ID NO: 453328 - DNA, 536 bp, Homo Sapiens
cccctctctccacactgggtcacacaaatttgtctttgcttctcagcaatcttcattttcaggaattggatcttttcttccagtagatgtatttcaatttctccatttagtttcatcttctcttggatatttattttttcataaaaaatgcatatttcttcttcccgctctatcagctgaacgccactttcatttcgatgctgaacagctttttcgtatcttttgcgaagctgcaccatctcctcttcgatcattgtgatcgtgttggcaagtctgtcaatgttatttaactgggcttccttcttttctttcatttcctgaagttttgatacaattttgcgcacatcgttttgcatgctctctctgatggtaacattgttggcgtgtttcagcatggaattttgtagctttcttgactaacggcactatttctcagaatttcaagttcatttaatgacattttatgcctttcttttatttcatttactttctgatgagctttgtggagtaagttaacaaatttgtttctttcatcc

SEQ ID NO: 453329 - DNA, 936 bp, Homo Sapiens
  misc_feature (63)..(73): n is a, c, g, or t
  misc_feature (844)..(852): n is a, c, g, or t
ggtgttgggattataggtgtgaggaaccgtacctggccagtacacaattcattataactaagnnnnnnnnnnnataaactgactagtaaaaattatgtatatttatgttgtacaacatgttttgatatatgtatatgttatagaatggctaaatcaagctatttaacacatgcatcacctgacatacttttttgtagtgagaacacttaaaatctactctactaacaattatcagatattgatatattgctgttaattgtcatgaccatgatgtatgatagagctcttgaacttattcctcatgtctaacaaaaatgttggatctcttggccatatctgccaagttttcccaacccccagtctctggtaacctccatttactctctgtttctatgaatttgagtttttttacactccacatataagtgagctcatgtgcttatttgtccttcaatgccctggtttatttcatgtaacataatgcactccaggttcatccatgttgttggaaatgacaggatttctttcatttataaggctgaatagcattttattgtggatatataccacattttctttattcatgcactggtggacccttagatagatgccactaatcttgtggaataatgctgcattgaatgtgggggagtgcagatattctctttaacatactgatttaatatcttttggatatatttccagtagcagaattgctagattgtgtggcagttctatttttaattttgtgaggaacctccataatggctgtattattggtttaccataatggctcattgtggttttactttgcatttccctgatgattagtggtattgagcannnnnnnnncatatacctgttggccatttgtacttcttcttttgagaaaatgtctatttagggcctttggtcatttctaagtcaggttatttg

SEQ ID NO: 453330 - DNA, 774 bp, Homo Sapiens
  misc_feature (88)..(88): n is a, c, g, or t
  misc_feature (483)..(483): n is a, c, g, or t
  misc_feature (485)..(534): n is a, c, g, or t
  misc_feature (711)..(720): n is a, c, g, or t
ggagacgaagtacgctgtgtaactccttagagcaactctttttggaaagcaaagtccctatttctgtacagttttaggttaggtgttntcatttataacagatgcagaaatcaattaagataaagtgatatgtgaagaaatcttttacagtaaaatatatcctgaattcatataggcttgttcataattgagtctcttcttgagctaccttttcaatattagacaatgtgaagacagtgacagcgtccttttctagagatatttagcctgttattacaaactgtgaagacaaagaattttatacttttactaatgtttgtggttttaaacagttattttcattctaatcagttctctaccctctaatttctactaaagctgtaaatacatttagaaattatatttgtaaatacagtatatggagacaagttaattttttggtcagtggaaaaagcctcccaaccaattggccctgccttggcntnnnnnnnnnnnnnnnnnnnnnnnnnnnnnnnnnnnnnnnnnnnnnnnnnnaacagcagaaaggatactgtcggttcactgttgagcagaatatactgtagaacgaaaatgataattttttaaatcttccagaacatgagtaaatgtcttttctaatgatagcaaatataaccaactccttggtttttccccttaacccagaacataatagaacctgccgtaattttnnnnnnnnnnttttggttttatttttgggtccctacagccttaaaacccctagaaaaaaatttt

SEQ ID NO: 453331 - DNA, 758 bp, Homo Sapiens
  misc_feature (614)..(672): n is a, c, g, or t
ggggccgccattttgtggggtgtttgtcgcagcggccgaggagggaagacggcagtttggcgacatttctcggccgaagggccatttgcttttgcggagatgcggcattccaaaagaactcactgtcctgattgggatagcagagaaagctggggacatgaaagctatcgtggaagtcacaagcggaagaggagatctcatagtagcacacaagagaacaggcattgttaaccacatcaccagtttaaagaatctgattgtgctccatgtgcatccctcttgaagcttcgcactctgttgtagaggacactcatcccagtcattatttagaagcaaggtccttgaatgagcgagattatcgggaccggagatacgttgacgaatacaggtatgactactgtgaaggatatgttcctagacattatcacagagacattgaaagcgggtatcgaatccactgcagtaaatcttcagtccgcagcaggagaagcagtcctaaaaggaagcgcaatagacactgttcaagtcatcagtcacgttcggtatgattggttttgttttcaatttgagtggagttttatttgtgtgtactcttaacgagctgataagtttcnnnnnnnnnnnnnnnnnnnnnnnnnnnnnnnnnnnnnnnnnnnnnnnnnnnnnnnnnnnttacttaaatcccttaagggaacctccaaattcttgtagctgatctgtatatttattagctagccctcatttgcccacatttccta

SEQ ID NO: 453332 - DNA, 450 bp, Homo Sapiens
gctatcgtccaaaatatattattcatttgagtaaaatgagtattttttatatttctcttttaagagatgccactcatcaatttgtttcttaaaccgatgttagaaaacttactaatatatgaaatctcttaaacattttatcacatcaccaagttgtgcaagtcgctcgactgctgcattcagcattcaaagccctctcagaaacgctcatggccccatgagatcttgcatggcaggtgactatgcatgacaagtctgtgctcacatagatgatatagtctgctcatgatgctggccaaacagtcactggaaaggtatgtgctttctacaggaccacaagactgcattttttttgcctccttctgagacagtgctacgctagggagaaaaatcatcccaaagaatacaggaaatataagacatccaaaaagaaagtgagtgctcagctcc

SEQ ID NO: 453333 - DNA, 520 bp, Homo Sapiens
aaattgaaaaatcaggttacaaaacaccatttttcccgaaataagacaataagaggcttttctctgaattcctttatattgagcctttcagaattctccctgggtgggcaatttcttttaatagtatttgaccctcagatcaatcctggggaatttttttcatttgggtagcaaaagctaggagtattgctgtgggcgattataatactttttaaaagttttaccattttaaagttgccaacatttaattaaggttttcctttggaagcctcctttaatttaggggagtaaaatgttagcctaaccaatttatatactatatactataccctgtatctccctgtggcccatgaagaggtgtgggctatacccaaacagaaaacctggcctacctgttcaggaaaaaaatgtccgtttctggggaacccccctctccttgtatttggggaatccggtttaatttttggtaaaaatcctaaatttccttcctggcctccttgggccccagggtgccaactta

SEQ ID NO: 453334 - DNA, 979 bp, Homo Sapiens
  misc_feature (660)..(769): n is a, c, g, or t
  misc_feature (915)..(934): n is a, c, g, or t
gggagggggcagggattggtatctttggtgaaacaaagacttacttttcacagaatacctccttttttgtactatttgaaatatttttgtactatttgaaatatttaccatgggcatgtatttcttatttaaataaataaactttaaaggtgttaaagaaattccctatgtgcagctctacaaatatttactgaggagtaaatatacacaaagtatggtaggtattaaaataatcattactggctctaagagtggtctgatcagagttgtggacatgtagatgacgctcatttggagataactgtacttcttgagatagaaacgtatttaaagaaataaatggcttaaaaatttccaaactgtagtgacaactataaatgtacaagtccacaaagctcaataaaccccaagcaggataaacacaaataaatccttatgaggcacatcgtaatcaaattgctgatagaaagaaaaccttaaaaatatccagaggaaccaagataagaattacagcaatcttcttgctccaactgttgaagccagaaggcataaacatcttaagattgctgaaagaacaaactgcccactcagagaattttatgttcagtaaaaatgtcctttaaaaataaagatgaatgtctgggtgtggtggctcacacnnnnnnnnnnnnnnnnnnnnnnnnnnnnnnnnnnnnnnnnnnnnnnnnnnnnnnnnnnnnnnnnnnnnnnnnnnnnnnnnnnnnnnnnnnnnnnnnnnnnnnnnnnnnnntaaaggagaaagtttattttaaattagtagttcatggtgcatccctatagttccagctacttgggaagctgacgtgggaggattgcttgagtccagaagttcaagtcccacctggcctgggcaccatgttgagattcccatctctnnnnnnnnnnnnnnnnnnnntttgaggggaactaaagaatttttcagctgggtgcggtggctcat

SEQ ID NO: 453335 - DNA, 387 bp, Homo Sapiens
atttagatataatgccacgtttatagaaaagttgcaggaatcgtacaaaaaactcccatacaacttttcaccaagattatatacattcccctcatttgttttgtgtatatgctaatacatcacaaacacacaaaatactttttgaattctgattgaattataaactttttgagtacagattgtaagcaaattgaggtctgctgaaatgtttgatcaagactacattccatttcatgcttttacattttctttatttctattatttccccataataagagttcggttccaggaaagaaaaatgtatttacattttttttccttggtaagtagtgacttaacttcatatatttgtgagggatgtaactatactttctcaaggcctatgg

SEQ ID NO: 453336 - DNA, 804 bp, Homo Sapiens
gtgtgctaaatccctaatgcttaaagttagcaaaccaatatgttgagaatggcacccactatgtgacagtggctggccatgacatggattcatgcgtaagatcaaattttctaatcagatacctttgtcattcttcttttcataaattctattgcatctaataacacagatattagaacaaatggctgaaagttctagtcttacccaaaataaactgtttaaagcttagtcattaaaaagataagaacagaacacactttactttcttttttttaggtaggagaaaactgcatttcttttacgagcatagttccttttggattctggcaacatctttttgggtagtctagtattgtttcctaggaaattaaaaatcaatcccaatccctgtgggtggaagaaaatgggaatattcacttccaaatgttattaggggtgggaacgaacatttcttatatttcattctcttttaggctttattcttgtttctaaaagttataattggtattcatattagcagcaacaatcctaatttctgtaagttaaaatgactcaggactgatgaaaataacatttgtggtaaggaatatggagtccacaggtggtaataagtgtctatcaattttggcaattcacaatcttatttaagaggttaattggtatgaaatagccaatagtatgaaaagatctcagtcggctgaaggaagctgagtcagcccatcagtatgcagtggaaagagggctttcatggctggaaaatttcccatgacttcagagtgaaagggggcatcagatcaggctccc

SEQ ID NO: 453337 - DNA, 865 bp, Homo Sapiens
gcagcagtgagaaacaagacaacctctgccgaacagcctttaagtcttgaggaatgtgagtatgcagggatatgggtaaaaagcctcccttagagaaggcagcagaggaagttgtgtctttagaaaacaagttttaattacaacacggtgaaaagttcagaaaagagggacatcatagaaagggatattcagtatatcagttgtgcctttttatttcccacagcatctgcgaaatgcagagtattaaatacctgtcaatatgaatgatcaattaatatttacttgggcatcaacaggctataatgccacatggtattccaccaagcttttgttactgtgtctcctcactttaatcactattggcagttgagttacaggaacactgaaaatggtgttttaaattccaaaagaaaagggcaaaattttataagaaaatgttaaaggaaacttttaagttccatttggaagtttaatttagccttttaagaaattttagcccacattttagagctttaaattctttagtcatggttccttcctttcacaggtatctcatacttctctgaactcctacagcagtgaaaaggctttaccatgtgacttcatgtgtcgtaacaaatgccatcttatttgccagggctttactttttcgtatgttagcttccactctctgactatacagtcattttcttggggtcaaagtaggcacttaagagtttcttaatgatttggtctgggaatgcctacatgagtcatataattctaaggcagagacaaactgtctacagtaccaggtattatttgctactatacaagatctttagaagaataatgaactggggttttaaaaaatactttgaaatcc

SEQ ID NO: 453338 - DNA, 902 bp, Homo Sapiens
ccacaatcctgcagcattttggactatcgtgctgtcattgagaaaattccagaggacgacaaacctagtttctttggtctgcctgccaatatcgctcgctcatctcagcgcatgatcagttctcaggttatttcacagttgaggattttgggcagatccataacagctggttccaaatttgatagagaaatctggtctaatgaactttctcctgtcctcaatctctggaagaaactaaaccagaattcaaacctaatacatcagaaagtgcctcctcctaacgatcgacaaggatctccaatactgtcattcatcattcttgaacaatttaatgctattcgtttagtacaaagtgtccaccagtctcttgctgctctcagcaaagtcatcagaggaactactttactgagttcagaagtacaaaaattggcaagtgctttattaaaccaaaagtgtcctctcgcatggcagagcaagtgggaaggcccaagaagatcccttacaatacctgagagggtcttgttgccccgtgccccttgcaaaaccagaaacttggggtagaataaaagcctgaaaaaaacaagggctccttcttcctctggaaaaacacctttgacccttaatcaagaaaacttttttcccaatcccaggacaacctttttcctttaaaggcctccctttgcccccaggggaaacactggtccaaggggccaaaatgggggctccgttttcccgtggggaaataggccccttaaaaaattttgtaaaccccttccatggggaaaaaggtcccaacctggccaaaaaaacccaaaaagccttccaaaattttaagcaattccaggtggggcttttggtgtaccacaagaaagggaaggttaatttcttttggaatggggaat

SEQ ID NO: 453339 - DNA, 1250 bp, Homo Sapiens
  misc_feature (1200)..(1200): n is a, c, g, or t
tatttcagagtcagtttcttgagtaactccagtgctacaaaaagaattagtaatgtggtgtgggcagcgtgacattttatgtcccacccaaaaattggattccttttggagactgatctgttggtctcaggcatttcattaggaccagattggttctaagagttagtctggactggccctaggaaacttgaattaaataagcctcttccccttaccgatcctttttaacactctcaggtttgtttgtttcccacttttttcctatgctgggtctgcctcaaagtctcaagaccaaggtgacttcaaggataacaccagaccacgcatgatcaccaaaaccttcccatcctgattctcttcttctacctctaccctctccaacttctcctggtcttcacatatactctcaaagctagtctgaaagtgaccttactttcggaagtagggaagtggaactttggtaaatgactgtttgcctcatttaatagtatacaggctcagcccatagactacagttcttcagaggccatatgtctcagcaagtactggttatattctttttttgtaaggaagatcataaatgctaaaaattccactaagccattcagttcttccttttgcctacctagtcctgatttttgtattaattggttccctttagcaagggattcagatctttgtaccttatcttatatccagagcagattccatttggcagatagatggtctctagcctattgtattcttagaccaaaaatcataacctgctgtttctcagcaaagccttgctctctggagcttactatgtgctggtacttaaagagtacattctgccttgctatagtgaagagacccactccaaataaaaaaggggccacacggggcttctaagttaggttgccagtgttgctgcccatgatgagttatttgcctctgagtttcagatgacctctctgtagggacactgtgttatcaaccattaagaagaaagaaccacaagcctcccaagtatttgggttctatcttagggttgaaatctggtcattattccctctacccttggaatcagagcaatgtgtcttctttcctccaacctcttaccttagatgcatcctggttatctggaagcatgggaaagaaggctacttatctctttgtatgtggctccagtctgtgaggatacataacattttctctacnatgaatctgtgctaatattttgccttctttctttcttttcttttcaccct

SEQ ID NO: 453340 - DNA, 1124 bp, Homo Sapiens
aatttctttagagcactttatttgattcaatatgcattaaaaaatattgacctcttagacaattacgtgaaataattttctgagtagtctactctctgaactgcttaaatgaatttttaaaaaggcaaataaatgatttgccacaaatctgctgacttctgaaaaatatctaacagcaaattcttctattttggtctctgaatattctaatgtgtccatacaaaagtaggactaaaatctttaatcaaacaaaagagaagcctgtaacagtgtagaacacacattttgaatctgagcatcacaaatgaagaaaagaaaaatgaaccagagccaagtgggtttatcggcctcgggtgctgtaattggggtggtaaaggtgggtttactccagtaaccattccaagtggggattggctcattttcaggatttacttacagggtctcttctaagtcctttaagccccccagtccatgcaaatgtccccacttggtggaccagatgagtaatctaaccccaccgggtttatttcaatatttcgatatttcaataataagctgcttctgaagattttttgagaagtctgttctctattaaaataagatagaacctcaaaatatgaatgtgaacattagaaatagacagcatatattacaaatccattcttgataggaacattagtaagaatacacattagcttaaaaaacaggctcagcaaatgttgctgatctgccaaaagttttagttcactatttacaaataagacaaagtgaaatacagaaaattttacacatttggtagttgacagatactgtttgccaatagtggtctatcagaaaactgacatgaaggaagactggaaaagagccagttgtcaccttctcaaatttaaatgtacagaaaactagattaattttgaaacaaacattctgcctttcatgggaataactgtatgatcacatgatttgattgggaagtacaattgtgaggaagtgttttctggaaacaactactataactctaaataatccactaatgaaaagttaccatttttgtttcagtagaccattgaagttgattaaatgataactagtggtagtgtttcctaaaccctaagtatgagtcc

SEQ ID NO: 453341 - DNA, 557 bp, Homo Sapiens
  misc_feature (19)..(19): n is a, c, g, or t
  misc_feature (92)..(92): n is a, c, g, or t
  misc_feature (127)..(127): n is a, c, g, or t
aaacctttgtaaaccgggnccaaattgtggggatcaaaatgcctgtcccccagatagtccacacagtccctgtccaaatccagtaagaatancctccgactccaggtgcttgggacagcccttggtntctccgagtgaggcaagttgggatatattgaggtcaggaaagaggtagaagacagtaaagatgtgtttaatttgatttattttgtatacaggccttgggttgaggtttggacacactctgcataaatacattttgttctaaatatgggaaaaagaaacccggattacttagggataggaggaaaaaaggatctgagtgagccataccaaaaacaaaaataatactggggcaagaggaagtgagaatcacctaagaatctcttaggaagaaagggctccccttaaggccaattccctagaatcaactaataaaaatgtcttttgtcttatggtgacattgaccttcagcccacttgattcttcttaaaaattgtaagaggcataatctgtaatcaaaaatccatgaagtagccgggcacggtggctcacac

SEQ ID NO: 453342 - DNA, 713 bp, Homo Sapiens
tatttttgttcaagttgtttttcccttagagggaaatgaggccaaacttggtttcattttccatgaaaaatatatgccaaaccacccaaaaattaatgaccacagttttgcttatccagtgttttttcaagtaaacgtggtgttccaaaagaagctgctagttcagctggcaactcaatcacacaagtcctttccatgagaaagcctgcacactctagtatgcagccaggcgatgcttacttcccatttcaaatcacagaatattaaaaagatgggcatttaaagattgaggcttcataaaattagtaacttctgctgctctttcaaggaccttatttattttaaaacgattaattatttaaaatgtatggcagtgaagaatccagtgaccactggtccagcctgttgctacagatggggctgtgccaagtgctagtggctttacctcccattgcttttgcaccatcagtgcagatggtcacacgcaaaaaaaagtcaatgacatcttaatattacaaattattttaaccaccactgctctcctgaaagggcctcagggacccccagaggtctacagaccacactcggaagtgctcttctatgcacatgcaaccaaacacttacataggctccttacttccccaacgctggacaccaccagaggcccaccgcccacactctcctacccctacttcttatcactaccacctttt

SEQ ID NO: 453343 - DNA, 508 bp, Homo Sapiens
ccccttttcccctccggggaaagggttccactaatggttctttcagggggtatttaccctttagcgggagggtcccgcccagtttcattcaggttttcaacgtgccccggactttatcagggatcccattatccttatcttctcttacttatacggggactatcacccttcttcggtttacctttcccggtaatttctaattaaatccgcaagaaatcgtcgtggtcctacaaccccaaaaattgccgtaacaactttggtttgggctattccgcgttcgctcgccactacttacggaatcacttttgttttcttctcctccgcctacttagatgtttcagttcagcgggttcgcctccatattaggatagtatgtcttcaacatactgggttgccccattcggatatctacggatcaattcgtgtgtgccaatccccgtagcttttcgcagcttatcacgtccttcttcgcctctgagagcctaggcattccccatacgcccttacc

SEQ ID NO: 453344 - DNA, 502 bp, Homo Sapiens
  misc_feature (372)..(372): n is a, c, g, or t
  misc_feature (428)..(428): n is a, c, g, or t
  misc_feature (458)..(458): n is a, c, g, or t
  misc_feature (466)..(466): n is a, c, g, or t
  misc_feature (472)..(472): n is a, c, g, or t
  misc_feature (479)..(479): n is a, c, g, or t
gtcaaaataactgtacattgtagaaaaaagtttttgcacttttcccaggggaagctagcaatagttttaaaagcacaaagtgatgtaaaatattttgacttttataataatgcgaagtagttttatttgcattaatcaataatgttcaggatctttttgtagtaagtatattttaaatggtgtaatttgtgtgtttatgatatgtattcaattatttaagttaagtatcagtgtatttttaaaaagtgttcccaggtgaacaaaagtttgcttttcttcaccattctgtacaggacaagcattattcagttcacgtagtcagctctcactacacttccaccagaacgggggcaagttcgtatttggaattcngttatatttatcccaaggggaaggccaaattaacccttttaattattgggttatcnttaatggggtatttaaaggatgttattggnccccaaanggcctnttttggnggtttattaaaggtgtatttggg

SEQ ID NO: 453345 - DNA, 500 bp, Homo Sapiens
agaatagaacagttcatcatgtttatctcaaacttctagctccagttaggaagaccaagaaattacttaaggaagcttaagctgatgttagccagattggaaggaaaaccacgacccataagtaaatgcattctaaaccccatcctaactatctttgtccacagaggtggggttaatgctttatggcaggggccttttacctactttatttaatgaaaaacaggaagaaaaacttctgaaataggagtgtgttggtgaatttacgctgcaacccacataattcgaaaaatgattccatacctaacagagcacttttcctgatttactcctttagaagcttgaattacagccaggttgtatggaaatacaggttgagtgtcttaccttaggtatccaaaagcctgtaatctactcaaaagaaacattagtgagttggaattcaaataatccttttctattgttattttttgttacacacaaggcacatctgaaagcacccc

SEQ ID NO: 453346 - DNA, 1271 bp, Homo Sapiens
  misc_feature (1056)..(1163): n is a, c, g, or t
tattcatgtcagaagacctgtatgacaatgttacaggcgatgacttgcagggagtcaggtcactggaatcaatagttaacaagatggttgtcctttgggccagcaggtgtgttgctaacctccacttttcttcctgatttgctttgctttccggggtttgaggatggtgtagtttacgtacactgtatactgatctgacaggaaggggacatagaatgcccgcagcagctttgacgatctagaagcatcaaggaatggtctataggccaagctgatccattcttctttattggatgaatattttggctcccggggtgtttctctcatggtgtccaaatccactaaataatggcatttactgatatcaatatatctggatggctcttctagattctggtcattcatgtcagtaggaacaatccgggtggccagaggtccttctgcaaaaggttttggtaactgacctctgaactctgatggaatgaactgaagctgccaattgtcaggaagaaggaagctgctgggaaatcgataccactcttttcccacacagacattcacaggtctgccttctgggacagtgtggatggttgggtctgtagcaattcggtaaaattctggatacaaatcaaggggcccgtgatatcctctgaacagtgccacagagcgagaaaatgacaagagcccaaacaggaagacagttcctaatgccagccaattcgatgtcacagtatagtgctccaggcgatatcgttgaaacacaaagtggtaacatttctgaagtgcagagagagccacagcgccacagagacatataagtggatacacagggaaaagaaatctctcctctttgtgaggctggatgaagaaaattataaaccaaatatacattggagccaaggtaagccaatacgggtggcctaaattctgaacatgaaatctctgcagcaggtattccataagagaagtcagtggtaggactaggagagccaaagcaaaggctacattgaaattcagaaatccattaattaaatagaaataccagggttctgtacnnnnnnnnnnnnnnnnnnnnnnnnnnnnnnnnnnnnnnnnnnnnnnnnnnnnnnnnnnnnnnnnnnnnnnnnnnnnnnnnnnnnnnnnnnnnnnnnnnnnnnnnnnnncagtgagaccctgtctcaaataaaaataaaaataaggaacttagtttgagctattcaggcatctcccattttgttttcatctgcttgtcccatttacattctagcccc

SEQ ID NO: 453347 - DNA, 728 bp, Homo Sapiens
ggaaggaagggccagagagggtgttgctcaggcctttaagcctgaccccccagtgccctgccattttagtacatacgtcagggttttccttagcatcggggcgggtgaatctgaaattgtcccagctccacctagaagcacagaaagctcagcccttacagtctgacacacagaaacaaacaaaacatccaaatgacccaagataaccacaccatcttgttgctgggaggacaacagctctgtgggtgtccggtctcaattgctccaggatgccgacaggggtgtgtgtggtgatgttagggaagaaggcattaggacaggccccaaactgagatcctttttgtatctttccatagaaatacaggcctaaatgatgccataattgcatgcttatctacaccagttcctatgtacacgatatcttttctatagaagtttaaagtgcctgggttcagaggtgcccattcctttcccacagctactggttcctcttgctgcttccagagaggtctgtcctcctctttcaaggaggatgcccttgggaaagaggaatgaactttttcacagttgtcttaactaggatccagcatttggactaaaccttcttcatacacacgaagaatcgcttcacacacaaacttgtactggcttgatgtctgcaccatcatggcgcgctggtctcgcatttttcggacaatatccagtgggtaaatgggcaggttcctccc

SEQ ID NO: 453348 - DNA, 899 bp, Homo Sapiens
  misc_feature (780)..(808): n is a, c, g, or t
ggggtcttccaataccgaagaaagggtggttgtgacaatacctcttgcttctaaagaatgtattataaaacaccgcagattttttctttccttaaaaaacactacctgatgctttccttgttcgtggggattgtggtcacatgaagctctttctgcatcagtattaaggtgtatatttgaatgtcctcccctcccctttcccctccaggctgtgtagctttgaggggctgggcgtttgctcacgaccttgctgtctcgctcagaacatgctccgcaaagttctccgcacacacttcttccccatcaagcccatttccttccccaaccacaaaggtgtttgtgattcctcaccccgggaaaccaaggagctgccaagtggagtctggttcagccccgtgcagactcacccagagcttaacgttgtctttcaaacaccctgagccttcctaaacagccagtgcagacattctctctgggccacgaagcccctcgggtcctccccgtcccctgctccgatgcatacctcagtgcagaaccacagaatctctgcagcggaaacgccgtgcatctcttgtctgttggcagcgagcacatcgtgctggagacacgagtttctaagcagctggcacgagggctgctgacggcatgggtcgtgcttcagggtggcaatacctcttaggaacttagggcaggaagcaatacttcagcattgaatgtgtgtaaatagttgctttgagttgcaattgctattttcttctcagtcccagctcagatcgaatnnnnnnnnnnnnnnnnnnnnnnnnnnnnnggtaaacaagcacacacaattttatccaatgcaaacaaatgtagagcatcagttacaactcaatgacagtgacgttaaaggggagaggctt

SEQ ID NO: 453349 - DNA, 894 bp, Homo Sapiens
  misc_feature (664)..(676): n is a, c, g, or t
gggttttacaaagaaacaaaatataaatcacagatttccaaaagtactagcaataagttgaatgataatagctcacagcacatttgttaatgattcttgtgtcatcaagtagtagtacttaatagtacccaaactggtaattatcctcaagttgtgtgctattcgtaagttctgtgcagtttggtatgaaacaaatatactcatttggatataaatcttacccttcaatgttaaatctacaaacttttataaatgttttaaagaagtccatgtgataattgtaaaggtgatgaatttaccatcaaacaaatcattttgatgtattattatatatgtatatctgtgtaagacacgtgcaacatactgccttatattattttctgtaattcttctcctttgtccaatggtattttttgtgaatggttgcaaagtggttgccttaatccctaaattcctgtatggtcatccacctacagggtttttctgaacaacttccctatttaattttcattacaatttctatttcaccatggcctccccaatccaaccccctatctccactataaccactacccccatttacctccacatatcccatcccgctttactggaccacaaaaatatttcccggatacaccctcttcccgttaaataaaaaaccgcnnnnnnnnnnnnnaacacgaacatttacccccctttgttacctcttgtacacatctccgtcctttgggcctttcccccacgttatgcgctcctaagtgtcgggaaacccacggcgggcgtcctttcacctccctgggtcttcccccctaaaacgacgcataatccctcttggcgtgttcactggtaacctacaagctcgcttttttgagaaatatctccccatgcgcacag

SEQ ID NO: 453350 - DNA, 995 bp, Homo Sapiens
tgtcagcacagggaaatgtaaaaattttttgcccatttaaggggtgggaaggggcgcgcccaatgccaaaaattgccaaaagaacattgaattatgtggggtttaaggcctcgctttccggcgtttcctgcccaaccaatgccatagcgctttgcggaaataaaaggaatattgggaaggaagggatgggccaagtaaattctgggaagagactctttgcccatcaaaatcacatgaagctcatgaggggagaaaccaggttccattcagccagcagtgaattaaataaagttgcctccttgctgcatgaaaactcactgtccagggttgacagagccctctgcccttgggtagaagactcaagagtgcaaaggatcccaccatcctcctctttcccacctggctcattaatataaccagatccatctactcttcttgctctcttctttctctcatctagaccatgccactgacatgttttgttcagccgtcaccaacagcgcctgcctcgtctcctttttccccccggcaatcctacaatccatgtctgtctacatggcagccagagagatctttggaaaagtacatcagatcatgtggctgccccctttcctgctcctgcttaaagccctccaaagacttcctgtctcacttagaaaatccacactctttactgtggctcagaagacctcacctgatctgacccctgcctgcttttctggctttatctccttccgcccttcccaagatctctaagctccagccacactcacctttcttttgttcctctagcaatcaaaatccaatcctgcctcaggattttcgcgcttactgttcccgccacttggaaagctctttctccagattgaaacaaaagtggctgtctttgtgacaggtcttagatcaaaggtcttctgctcagtgaggacttctaaatcaaaaactgctccttgctcaagtcactaacacgttcctttattttcttcatagcatct

SEQ ID NO: 453351 - DNA, 1100 bp, Homo Sapiens
ttttttttatttacaaaggatcatttattaaacacattttaaaaacaaaatacaaagatagttgttctgcatgaatacatcacatatgaaaaaataatgtgtttttaccgaatttaatttgaggatattcagaattttgttttctatcaacttgagcaaccagtttcgctttgcaccttgtctaacactgttgtcaatcaggaagaaatgttttcttgttaattaaatcatattcatacagctaatattttacagaaataaaataagacaatgtctgtcatacaaggctctttctgcaaggtaactgatttgcctatgatcctaatttttttaaggctataagataggaagatttcaggggctcggtaagttttatattaacgtattagcagcagttgatagtaaatgcaccataagatttgttttgtctgtggtacaagaatatgtcctatcagactctactgtatttttctctacttgaacacaggtaagcacatactgattgtctctgggatgacaaaatgtataaaaaagacaagaaactggctctggttgtcattgtgagtgcctattttcatcagctaatatgaatgcattgctaaattagtgaagacaggaaaatgacttaagggtaatatatacagagttaaaatacactttttatccacttgagtgaattcaggcactgtggctgttcaggataaaatgtttcatggtttattcttgatagcaatttaattttcagtgcaagcaaaagcaaatacctgccgactgtaatacacatgatctcacacatctggaatgattcaactgcaagttcatcctcggcatcttcactctggagacatcttgaataaaaaaccgttcatagtttgctcttgatagcaatttaattttcagtgcaagcaaaagcaaacacatacctgctcactgccatacgcacgaccaaacacatctggaatattcaaagcaagttcaccttctccatcttcactgtggaagctctttaataagtggcactttgtgtaaaccctctataaatcatgaaaaacagattcgaaatgcctggatttaataatattaaacatcactgccatacc

SEQ ID NO: 453352 - DNA, 698 bp, Homo Sapiens
  misc_feature (65)..(75): n is a, c, g, or t
  misc_feature (145)..(145): n is a, c, g, or t
  misc_feature (165)..(165): n is a, c, g, or t
  misc_feature (216)..(228): n is a, c, g, or t
  misc_feature (279)..(292): n is a, c, g, or t
aaaattttcccaggcatttcaaaaggacccctaggaagaactttactttttcttaatccaatttnnnnnnnnnnnggttcttttcaggtaacttctccatcatatttttctaagcatttccctttatcggaggcactggttgaancaagaaaaggaaggaaaatnctgaggtgaagctatgtttgttatgggattatggattaaatcagttatttnnnnnnnnnnnnntccgccaggtaactgctcatttactttacatcaagttgagatcttgatacnnnnnnnnnnnnnnctcaactttataattcaagattgcagttaaatatttctaattcacttgaattaccatattaataagacaattagaaaccttatattttcttaatacagacatgcttaacattttctgacattacttctaaactcagatgaagcataaactctccccaaaactgctctaaaagttaagtggttgagttggtagcaaaagctaccatggtttaacatttccaccacagagtagatacaagtaaaggtcactgcagtttaaacatctaacaggtaagaaattaacatgaaccaactaactgaaattagaatactgccattccatgtttgaatattttcaatactcaagtttcatattttcaaaatggacagtaatacagtttccctatgttttgatacaatttcactcc

SEQ ID NO: 453353 - DNA, 857 bp, Homo Sapiens
ggaggggggccccgaaggggcgggggccgaaacaaagggaaattgcgtttgggtaaggtagggagggcgggggccccctttgaacttccaaaaaggttttggttcctttaattttttaaaatccacgggggaatgggcctaccaaatttcgggttaaggccccacaaaattgcataattatctttataaaacagccagtaacattaattataaaccaatgttaattcaagttattttaggggcccttaccatatcattaacctatttacagaacaaaaatgtttctatgaaagctaatatatcttttcatgtttgtttgttgttaagtgtgctacaacagaaatagaggtagaatcccatttttcttaagtaccactctacaagccagttccacacaattaaggtatttttgcaatctaaaatagtgatgctaatactgcttcagtaagctagatttactaatttaagaatcctaagaaattatatatgtggctttcagacatccatgttaaactatcaacttgtggaatttgtggaacacttaccctacttgagtgaccataaagcaaacaactctaaaattttttcatatcagttttctttataagtgattatatgatatttcaccatttctaacaggaaaaaatgagacttacttggcagtgtgcatgggctgctggaaactacaatcagagtgtaaagacaaatctcaaaaatgtttgtagataactcagaataataactcagaatataacctatcaggaactatggaattccattttagtcttcaaataataaactccacttagcagggattgtgaggttgctcttaaaattatatatttacagaacatacc

SEQ ID NO: 453354 - DNA, 458 bp, Homo Sapiens
gccggacctacttttcacaggaacatactaagctgggtggattgtttgggctcattgtagcttccaacctcgtccatcatccgtggttgtgaaagcttcgctccacacacacatatattttgctctgggatttttattaatcttgtcaatcaaattttgtaaacacctatgcttttttgttctgaactatatttttgtccctctaatctaccagtctctaatagggactttgtgaaaatcttgggcaataaattttgttgtctctatgttctcttgtaatgctgtcagttgttattctacatattgtgatgagctattttaaagggcttatttattcataactactatcttcttgatctagcacactgttttggcagtatataacattgctttttggcatcataatgtttttcgtcttaaaacccatttagcccaaagtgaaaagtacctgctggaaa

SEQ ID NO: 453355 - DNA, 910 bp, Homo Sapiens
  misc_feature (238)..(553): n is a, c, g, or t
  misc_feature (820)..(820): n is a, c, g, or t
  misc_feature (873)..(873): n is a, c, g, or t
ggccccccctcagcttcccaaaagtggttattgacttttaaaagcttttttgttctttctcaatttaaaacatttttacctccccctccttaacttcccattctatttcaccatctcttcaaaattgtctcccagaaaaactgaaaattcacctgctgggtatgcagaaaattatgcagatgtgaaatcagtgtagagacaactttggagtttatgtctgagtatgctgccaatatannnnnnnnnnnnnnnnnnnnnnnnnnnnnnnnnnnnnnnnnnnnnnnnnnnnnnnnnnnnnnnnnnnnnnnnnnnnnnnnnnnnnnnnnnnnnnnnnnnnnnnnnnnnnnnnnnnnnnnnnnnnnnnnnnnnnnnnnnnnnnnnnnnnnnnnnnnnnnnnnnnnnnnnnnnnnnnnnnnnnnnnnnnnnnnnnnnnnnnnnnnnnnnnnnnnnnnnnnnnnnnnnnnnnnnnnnnnnnnnnnnnnnnnnnnnnnnnnnnnnnnnnnnnnnnnnnnnnnnnnnnnnnnnnnnnnnnnnnnnnnnnnnnnnnnnnnnntatgtttggtcaaaaatagaaaattctattataaaaaataaagttactatggcaacattttcccaacatagttcccagtatataaacttatttttcttaaaatgataacaaggtagctcaataacaatacaataccagtgataaccaaatataattgaatttttctaaaactacattcttacattccctatccactcaactcttgtggatgggttttccacttttaaaaactattcaaaatgggggttttttaaaattttttcaggnccacataatggcggttggaacacttcaaggtgttcctggccacgtggggtggnacttttcgggtttccggacttttacccggggaccttc

SEQ ID NO: 453356 - DNA, 601 bp, Homo Sapiens
  misc_feature (244)..(244): n is a, c, g, or t
aatcccaaccgatgtttcatatctaatctccaatatcaaagacactagccttcttaactctgccaaaaagtaaaaaagagaatgcactcccaaactcattttataaagtcagcatcaccctgattccaaagctaaagataacataagaaaattaccaggcaatatccctgatgaacataaatgcaaaaatcgttaataaaacactagcaaaccaaattcaacagcacattaaaatgattatacnacatgatagagtgggatttatccataggatacaaggtcagttaacatatgaaaatcaaccaatgtagtaaatcacaataagaggaaggaaacacaaaaaacagatgatcacatcagtagacctagaaaaagcatttgacaaaagtcaacatcctttcatgataaagactcaactaaacaagtatggaagaaatttacctcaatgcaataaaggtcacttatgaaatgcccacaactaacatcacactcaatggtgaaagactgaaagcttttctttcctctaagatacagaacaaggaaaggatgctcactcttatcacttttaatcaacatagtactggaagtcatagccagtgct

SEQ ID NO: 453357 - DNA, 777 bp, Homo Sapiens
  misc_feature (303)..(322): n is a, c, g, or t
  misc_feature (487)..(500): n is a, c, g, or t
ggcatgtgttctctattttgcctttaaatttttgtgaaccaattttaaatacattctcctttttgccctggattgttgacatgagtggaatacttggtttcttttcttacttatcaaaagacagcactacagatatcatattgaggattaatttatcccccctacccccagcctgacaaatattgttaccatgaagatagttttcctcaatggacttcaaattgcatctagaattagtggagcttttgtatcttctgcagacactgtgggtagcccatcaaaatgtaagctgtgctcctctcnnnnnnnnnnnnnnnnnnnngggagagaatatttcaaatgaacacgtgcaccccatcatcactggaggcaaatttcagcatagatctgtaggatttttagaagactgtgggccattgccttcatgccgtggtaagtaccacatctacaattttggtaaccgaactggtgctttagtgatgtggannnnnnnnnnnnnnaaaagagatgtagcagaataattcttccagtgcaacaaaatcaattttttgctaaacgactccgagaacaacagttgggctgtcaacattcaaagcagcagagagggaactttgcactattggggtatgatgtttgggtcagttgataaaaggaaaaccttttcatgccctttagatgtgagcttccagtaggtaaatgattactgtgtcctttcttgatggctgtaatgaagaacttcaatcactgtagtctaagacctgatctatagatgaccta

SEQ ID NO: 453358 - DNA, 1329 bp, Homo Sapiens
  misc_feature (48)..(48): n is a, c, g, or t
  misc_feature (113)..(113): n is a, c, g, or t
  misc_feature (536)..(556): n is a, c, g, or t
  misc_feature (726)..(1026): n is a, c, g, or t
atgtatcctccaaattccaataaaatttgccaacttgccaccatccgnagccaaccatttgagaaagctgctccaatacccctgctgttatatgggttttatgggtatatccnccaaagtcatgggttgggatatagctgctttaaggaaaataaatatgtatattaaagggaaaatcacactttaaaaatgtgaggaaagctttgaaaaacagtcttaatgcatgagtccatctacatattttcaagttttggaaacagaaagaagtttagaattttcaaagtaatctgaaaactttctaagccattttaaaataagattttttttccccatctttccaatgtttcctatttgatagtgtaatacagaaatgggcagtttctagtgtcaacttaactgtgctaattcataagtcattatacatttatgacttaagagttcaaataagtggaaattgggttataatgaaaatgacaagggggccccttcagcagccactcatctgaactagtaataaacaccaacacaaaatgaannnnnnnnnnnnnnnnnnnnnaggatctctaaaggtaggaaaatccaatctttcttaaaaatactttcctgggttgtggccaacatgtgctttacctctttaactctacctaaaacctaaagttatttctatagtataaatttcaaactccctggcaaggaatgtaaatgctaaccagctaggtatttatnnnnnnnnnnnnnnnnnnnnnnnnnnnnnnnnnnnnnnnnnnnnnnnnnnnnnnnnnnnnnnnnnnnnnnnnnnnnnnnnnnnnnnnnnnnnnnnnnnnnnnnnnnnnnnnnnnnnnnnnnnnnnnnnnnnnnnnnnnnnnnnnnnnnnnnnnnnnnnnnnnnnnnnnnnnnnnnnnnnnnnnnnnnnnnnnnnnnnnnnnnnnnnnnnnnnnnnnnnnnnnnnnnnnnnnnnnnnnnnnnnnnnnnnnnnnnnnnnnnnnnnnnnnnnnnnnnnnnnnnnnnnnnnnnnnnnnnnnnnnntatttaacttcatacaaagcgataactcatggacggctgtcataataacatttccacttttctctaaggcctgaggttgacatctttgcctatgctctatggatcaaatgagagaagatgatgcatctacacaatagggtctctttgaggcagtatcatagacttggcctcccatattatgaaaacctttgttgtactaaaatgaatacaactgcaagcagtttgagggcaactgcagtgccaaaggaaatgggttattttctatgggaaatataagattcatcttaaggaaacatctttgtt

SEQ ID NO: 453359 - DNA, 868 bp, Homo Sapiens
  misc_feature (31)..(31): n is a, c, g, or t
  misc_feature (283)..(283): n is a, c, g, or t
gtggcgtaggagtgtgttggttgcagtggcnggtgagtgtgtagaacatatatcttccccttggcggtttgttcccgcattagatttttccctttcccgtggccttggtttcttttccagtttttcccaagagaggcagaggcgtataaatttctcaaaaccagagcgccttaggagaccctttcgattaacttttggttcctaataggcaggaaggctaaggaaacttcccacctttaaatgggtataaaaggggaacatttaatggaaaaattcccgggcntgccattgtgggggggcaatttttgttaataattcaggaaacttaggtgagaaatctaagttaaaaaatcaggaaggttgataaggaaaggacacaaatcgcttttcactggtcatccgataactgtaataactcagcccagaatcaaaacagattctttaagggaactgcatataatctgcactcctaagatacctttaacagagctctcaatggaaactgaaatgattctctcatatcacagataattaggttgaatgaatgatttatatgttccatgtttatgtaagcacttaacttctttaaaaagaaactagttctttcaaaaagagctctgaattctgtctctggttagaaagtgtgaacaattctcagaacttgggacatgatttttcttctctctcacttcttataagcagatgccccttttcagggcattttcaggttgcacaggcagaactaagtgagaaatacggctccagaggccattcagtttgtctgggtccatatgattgtaggagttgggtgtgttagaattggtgaaccccggccgtaatgggcactctggttgataccactgcttcc

SEQ ID NO: 453360 - DNA, 915 bp, Homo Sapiens
  misc_feature (439)..(495): n is a, c, g, or t
  misc_feature (793)..(793): n is a, c, g, or t
ttcttcttttgtgatattttccctcactccggcaatattacgacgcaataagcggttcttttggccaaacaaggaaaggggttttctttttcacacaggtccttcgtgtgtttagggcttttacaccagtgtcccaaaattaacttttccatacgcgttaagggccacagcatttgtttaagcccctctacgccggggcaaaaatgtggacaaaggttttttgggcccacattttatttcccctggcaaattcttcttcaaaatttttaaaatcccactttacgcgaaaaaccgcctcacccttaacttactttattttgggaatctttccaggggcccctttttaaaaaccccacttgggggggcccggttttcctttgggaaggctcaaaaaaattgccaaaaccaaaaccaccatttttttgggctcaaagccggnnnnnnnnnnnnnnnnnnnnnnnnnnnnnnnnnnnnnnnnnnnnnnnnnnnnnnnnntgcattcaaatggtttgtctattccatttatataacaattgtatcactcatatccctcttccaaagcatacatcatactttatggaatttttgaatggatctgaatggctttccaaaactaactggtattatttctacacaaacatagaagttaccatcaagcgttactatcttgcctaattacaagttgaaggcagatcttctggcatattcacaaaacatttaatataaaaacgcccagaatgctaatgattcccctcttcacccactaataattccagggtgagaagttaagctncaagtccatttactttccttctgttatgatatattatatctatatcatcagtgatctttaatcaatatattactttaaaattctcatatttctatatttaaaattctattacttttctcacc

SEQ ID NO: 453361 - DNA, 815 bp, Homo Sapiens
  misc_feature (778)..(779): n is a, c, g, or t
cataaaagaaggttgttaatgcccaattaattgagtgaaagttcagttccattatctcttataaacactctaaatagtcatacatttgatatgggttcaaagaaaccacagacatggagttagagtcaattcttgtgtccattaaatgcacagtttgtccttgaattttttatacctataaattttctaaggctattccctaatcatttttatctttaaggtcattttactactttgctgaatatttattgggaagtaaatttggagtacaaaaattttctcatgtggtttttctctgcgataattcatttacctaaactttgtttagatgtgatcactgctaaaccacatcatgttgactctggacagtgccctaaagttgagccagtgatggtctttctcaagaccctttccccttcagatctgggcaactgtcagtaagcccatggaagaaccctaaattcttaatgagacattgtttcagatagcccctgggcatggcatgagtgagtcagaacttctcatcctgtggcttgtgattgcaaagcgatgggaatgactggtagtgtggtaggctaagcttttagcaggaaggaggtggctgaagggagacctgcagtcttgatggttgagcaatccccaaattagactgtccctagtgctcactgcagggacttgcttttcccttaggatttgcaagacaaagatgcttgtgagagattaataagcattaatgatgtattaaataataattcccaccttcctccctccacctccnnccagcagttttcctttggacaaattgttgacatgga

SEQ ID NO: 453362 - DNA, 810 bp, Homo Sapiens
actttgatgcaaaggattagaggtccttttatgtggaatgcaagagattgatttgaatgactggcaaagacatgccatctaccgtcattatgcaaggaccagcaaacaaatcatgtggttttggcagtttgttaaagaaattgataatgagaagagaatgagacttctgcagtttgttactggaacctgccgattgccagtaggaggatttgctgatctcatggggagcaatggaccacagaaattctgcattgaaaaagttgggaaagaaaattggctacccagaagtcatacctgttttaatcgcctggacctgccaccatacaagagctatgagcaactgaaggaaaagctgttgtttgccatagaagaaacagaaggatttggacaagagtaacttctgagaacttgcaccatgaatgggcaagaacttatttgcaatgtttgtccttctctgcctgttgcacatcttgtaaaattggacaatggctctttagagagttatctgagtgtaagtaaattaatgttctcatttagatttatctcccagtgatttctactcagcgtttccagaaatcaggtctgcaaatgactagtcagaaccttgcttaacatgagattttaacacaacaatgaaatttgccttgtcttattccactagtttattcctttaacaacaatattttatatgtgtcaaaagtctcacttgggagtagtgtttttttcttttagacattctgcagacatgcagggaaagtcctttggtaactgcaatatacaaagattttcctattaaagcctcttggtaag

SEQ ID NO: 453363 - DNA, 854 bp, Homo Sapiens
ccggtaggcttcccgcctcccttggtagggactggaagcagccaagtttgaagagcggggccaagcaggttctcccggggggaccccgggcttgggggggctggtggttggggtgcgggcactgagctcctcctgggtgagatactgcccgatgtactgctcatatagcaggggggcccggaaccgcatctgctcatcactgaagtactcgcccccttggatcagctctcgcagggcagcatagcgccggttacgcaggcgggtacgcagggtgcggggccgggcagtgccctgccgggccacctcagcacagtagaagtctgcacggtggtcgccacgcacgtggccaaagcaggccagatgctcctcacggaggcctgtgcggaagcgctccaggaacaccagtggcttctcgtggtacagctgggccaggatggccactttctcatgctctgtcaagtcgggttcaccctgctgctggctgcaaacaggcaggcggctggcggctacagcgtgcagcatagcactcactgctgcattttcagccccggaggtgtcactgtccagggccactggtgttgcctcagctgcttccactttgtcctggggtttagatgggactggtgtccggctcagctcaccccagtgcccaggtccaggctctatgcagcccttatcgggttccttcgccgccgtcgccgtcgccacggcctccatcctgattctctcggacttttcaaccgcccggcgggccccgcacactaacctccggcccacgcacgcaagagacactttcgcctgagaatgttccgggtccgggtgcaccgctgcgcccaggcaccgaagttccgggc

SEQ ID NO: 453364 - DNA, 763 bp, Homo Sapiens
aaaagagtttcaagaaggcggttagaacacggtttaaagcttccccccgcgtgtgtgtgcgcgggctaggaagtctagccggcctgaaaaggtaccaggctgcgccaaggcgtattttggagttgccccgttgcccctccggtataccgcgtttcgattgcctttttccccagtcccactgtgggggcccgtgtaagttttccccgcacattttgccccttaagggggccaagcaatttattggctttgcgggaaattcctcatcaatcttggtgtactttcttcggggggatcagggtaatgtttttcaatgttgtcatttaagtagccaaagagtcattctcctcaaaaaagctagaaacagaagggcggaattccagtttcctttctgggattgaatactttcaagtaaggttttcgacaaacaatcagggggccaattaatccactgtagaggtccttaacttgatccccagttgaataataagcccatggaatacaagcagaatcctctgttccagctccagatctttctgggattttccatacgtaagtgagagtttcacctggtaatgttggagtaactgtagaactctctgtttgtaccccatgggcatgtattgagtaggggcttgtggccatgtttttaaagatcattttgactttgtctccaacatctgcatgaagttgtggacctagaattcccagatgttcttcttcagcttttctctccactggaacacggaatgtgctatcagtatcc

SEQ ID NO: 453365 - DNA, 1150 bp, Homo Sapiens
  misc_feature (829)..(829): n is a, c, g, or t
cccaggttttccccaatttagaaaaacttctttcccttaaaggtcaatattctcagtcaaaaatgggatatttaaaaattggtggtctttaaaacaaggaaattaaatccaaccttcctttagcgaaaaggatgcggttctaacattaggtttggtagaaacctaagaatagcatggtacgaggagtggaaacaagtcataagaagcataacatttcttttaaaacctcttaaattcctctgcccctccccatctctgtcaaacacagagaaagaatactgcattacaaacaaagatgtgtttccgtgaaatgatgtaaacaagtcagagagaaagatttcttcattttcctattttgtggagtggggcagtgggatatcagttaaataagaaatagagctccttaatcaaagaaccacttcattacacacaaaacagctcggggcaactgctgaaaacttctcctgtgtttcctttccttttccccaaagtttgagaatgtttgaaagttcaataaatagtagaaaaataatcctttacttagaaattctgagatgcatcgtttagagcataacatgagttccatacagcaactgtggtatccaggtaccgctaagaaacaaaggcgaaatcttcaatgcacacatttgtatctgcatgtgcccacattccagtctctgggtgagcagaatttttctctcttccagttaaggagagctgaatgcttctggctctttggaacattcctctggctcagcttcacttgcaggttccgtctctgtgtttggaggttcgccttctgttaccttccattagtgttatggcaggnctgttcatcaggcttatttcccctccatttcagaaccagcctcacatcttcacaaatgtgactgtgttgttgtttctctcgtttttaaccatgtcgacaggcaggaaatgactcaaacaactctgcacaaagcacaaacacaagggaggtctcttgctgtgggttttaagccgggttctttttctttccagaacattctgtagctcccagatctcatcttggcgtggaggtgaggagattgttagcattctgcatcgacagtgtgtaccgtgacggccgcctgtaagtggtggctatgatgaagtgtacgggtggtgtgac

SEQ ID NO: 453366 - DNA, 638 bp, Homo Sapiens
gtgggggggatccacaacccgtgttgtatataccggggattattttttgggaaaaatgtttttggccctttttccctttccataagggggcccggggcgcccaaaaagaaagtgtttaaaaaggtttttttaaggggctggggggggcctcacaaggtattagtggcgggttgtgagcataacggaggtgtcttcttagttgatgttctgttttgggttgtaatggcgcgttctttattactaaagggtttatttacatagtgtttaaagcataataaaaaataaattacaatacaaaagtgctctttaggaaggagacactaaacaacaggcccatattaccccttgactatttagccaagacataagctacaaattttgccggaaaaactgtccatacatttttaactacttcttcattattcttatggaccatcatccaggacatctgtttgaagaaatatccagttataatattttcaaaggttagaattgtgaagaaaaaatataaaatgtgattaaaggatatatagccttcagatgtaatttacagttttaaaattgcactttaaaactttgcttttttagacagtataaaaggcagaatgagacagatatgtaatgaatttcagaactcc

SEQ ID NO: 453367 - DNA, 926 bp, Homo Sapiens
  misc_feature (105)..(105): n is a, c, g, or t
  misc_feature (199)..(200): n is a, c, g, or t
tcttagcattcatatttggactttagaaagagcatcaggcaaggtttgacaagacccaagaacaagacccaagaactgttttgttctgtgtgaagtatctttttncccatttggggcactgttttctgctttgctttcccatgcagctggaatggtaagtcatgagcaaaactgctattctcatgttctaaagtaaaanntaatgtctccttgttataggttagagaaaaaatgctataagcaaaggacaccaatgggaattaaccccttcacttttcaaaagctgcgatggcctctgcagccaaggtccggagatcaagtgaagcatccattccttgtggactacaatattgcctcgtgttctgaatggatgcttcaatcacagcatgaagatgttgtcctccctggtggggaaggaagttctgatttgtgtgaaatgactaagaccattatgataggtgctagtagaaaatgaagctgtaatattagctacttcattaatacttcttaccagactggtcacgtactttttgtttttaacctcagggagaatgtctaatatattttcaacgaacatccagataattagaaattgcattatttctcacaggggagaatgttttccatttgttacacaaggaaaataggcaggggatacattcctcgtatctgcctgcgattgtcccatgcagtgggctgctaatgcatctgacggtgtttgagggtggcccagagtctctctataatcaaacatatctccccaaacaagcaggtattaacaactaccctggctatagataactgtcaatatatccttttgatcatgactatgcctcttccttttcaatgtcttctgtacagtgacatttaccaagctctgaatgggatcagattctatctgagtcacctcatttggccaggcagcc

SEQ ID NO: 453368 - DNA, 747 bp, Homo Sapiens
  misc_feature (293)..(314): n is a, c, g, or t
  misc_feature (489)..(489): n is a, c, g, or t
  misc_feature (668)..(668): n is a, c, g, or t
ggactaatacagacgtacagatactttctctgaagagtattttcgaagaggagcaactgaacactggaggaaaagaaaatgacactttctgctttacagaaaaggaaactcattcagactggtgatatcgtgatgtacctaaaagtcagaaaccacattttctcctcagaagtagggaccgctttcttacctgtttaaataaaccaaagtataccgtgtgaaccaaacaatctcttttcaaaacagggtgctcctcctggcttctggcttccataagaagaaatggagaaaannnnnnnnnnnnnnnnnnnnnntgtgaaagatcaatccatctgccagaatctagtgggatggaagtttttgctacatgttatccaccccaggccaggtggaagtaactgaattattttttaaattaagcagttctactcgatcaccaagatggcttctgaaaattggcattttattaccatttcaaactattttttnaaaaataaaatacagttaacatagagtggtttcttcattcatgtgaaaattattaggccagcaccagatgcatgagctaattatctctttgagtccttgcttctgtttgctcacagtaaactcattgtttaaaagcttcaagaacattcaagctgttggtgtgttaaaaaaatgcattngtatttgatttgtacttggtagttttatgaaaatttaattaaaaacacagggccatgaaatggaaaggtgggtaattgc

SEQ ID NO: 453369 - DNA, 1088 bp, Homo Sapiens
  misc_feature (141)..(224): n is a, c, g, or t
  misc_feature (840)..(848): n is a, c, g, or t
tttttttaagagcttagatattcagtatttttatttctgcctctgggaaacacactgacattttaaaacacatgtaagtcactcatagtacctcataataacatttgagcaagacttagtcgttcattcatttattaagtnnnnnnnnnnnnnnnnnnnnnnnnnnnnnnnnnnnnnnnnnnnnnnnnnnnnnnnnnnnnnnnnnnnnnnnnnnnnnnnnnnnnccacatgcccatcccaccatgtccagcttcttcatttatttttgtgtctctacatggctactttttaaatacaacattaattttatttaaaaaatgaaggaaagaagtgtttttcctattatccagtggagcataattgtgagaagagagataacaaaaataaaatgtcaatgctggctgtttcatagaacttaaaaattcaattctcattattctattgcaatataaccaaccctgtttattttaataataataaacactgtcagtcttttaaaaaccatgataacaattaaaaactttgaacagcatgacaaagctaatggcaacctcttgaaccccgttttaaagctagttctacttccaaataaaactttaaagcggtttagccagcatcagcttaggaatattttcttcaatgttctaaggtataatgtttggcatcaaaaagtatggtaagcagttctgatttgtgactaaagaaaaaataatcaagtactaaaataccagtggctcttgtgacagggtaaatatccccattcaagtaatgttccccccacaattatagtaatgtttcatttctccctctgagaatgtattaagaaaaaccaaccataannnnnnnnnagttgaggtgaaaaaactgcttcataagttcgtatgttgtaaaagccactgcttgagagggaatacagcgaatgtaattaagagataaaccacgatagagtccttttcgaattccatggtgtccatagacatacttcatagtatcccgcatggtaaggcacttttcaaattccggcagaacagttcctaattgcattcgccgacgagtcacatcaaatgggtaggatattgtctgcgccc

SEQ ID NO: 453370 - DNA, 441 bp, Homo Sapiens
aggtctgatgcctactattttaggaatggctccatatgcaggtgtttcattttttacttttggtaccttgaagagtgttgggctttcccatgctcctacccttcttggcagaccttcatcagacaatcctaatgtcttagttttgaaaactcatgtaaacttactttgtggtggtgttgctggagcaatagcgcagacaatatcctacccatttgatgtgactcgtcggcgaatgcaattaggaactgttctgccggaatttgaaaagtgccttaccatgcgggatactatgaagtatgtctatgggacaccatgggaattcggaaaagggactctatcgtgggtttatctcttaaattacatttcgctgtatttccctcttcaaggcagtgggcttttttacaacattacggaacttatggaaggcagttttttttcacc

SEQ ID NO: 453371 - DNA, 597 bp, Homo Sapiens
caagaagagaatggcaactcagctactgagttgtccctggttttatgacattaacttgaggttatcataagtctaatgaaaaactgacaaatcaataatgaaaaattaaaccctgataataatttagagcaaaataaataaatcattcacatatattttaaatcatagaaaagaactcatcatttcaaagtaaaaaatagcattattgattaatatttccataagccattatatttagcgaaaacttttcattgaatgtttacagcagtttgtgagtttggaagaagacatttaaatgttaaagaggattcacatataaagcagaaatattctgagcaacccatttttaaatcttttccaacttctaaacctttcctccaaaatccctatttccaaatggctcactattggttatgaatacaactctaacaaaaaagagtatgatgaaaaaatttagaaaattacttcatattcatgtttttaaaataatttaaaccaaaagataattttaactcttccctccttccctctaacacacacttcaaggaacatctaaaatgatacacttagcaatatgcttaatattcatctctaccc

SEQ ID NO: 453372 - DNA, 905 bp, Homo Sapiens
  misc_feature (784)..(784): n is a, c, g, or t
  misc_feature (807)..(807): n is a, c, g, or t
  misc_feature (825)..(825): n is a, c, g, or t
  misc_feature (838)..(838): n is a, c, g, or t
  misc_feature (878)..(878): n is a, c, g, or t
ggctgatattccgtcctcaaaaagtactgagttacctgtggactggagtattaaaacgcgactccttttcacctcttctcaaccctttacctgggcagatcatttgaaagcacaggaagaagctcaaggtcttgtccagcattgtagggcaacagaagttactttgcctaaaagtatacaggatcccaaactctcctctgagctccgttgtaccttccagcagagccttatctattggctccaccctgctttgtcttggctaccactgttccctcgtattggagctgatagaaaaatggctggaaagacaagtccttggtcaaatgatgcaaccctgcagcatgttttaatgagtgactgggagcaagccatcagtgatgaggatgaagaggaaagtttttcctggctggaagagatgggtgtgcaagataaaattaaaaagccagacatactttctatcaagctgcgtaaagagaaacatgaagtacaaatggatcacagacctgaatctgttgtgttggtaaaaggaatcaacacctttacattgctcaattttttgattaactctaagagtttagttgctacctcaggtccacaggcaggacttcctccaaccctcttgtcccctgttgctttccgaggtgccacaatgcaaatgcttaaggcacgggagtttgaatgtgaagacacaagctctttctgggatacagagaccaatttagtttgggagattacaggtcctattcatggcctcattctctggcattcacttgaccatgctggntcaaatctttcacagagtgggancttttctctggcagtaantgttattccacanggggccaactgctgtatttttaaccatctggcccggcaantggggcaaagtacttgatatggggggt

SEQ ID NO: 453373 - DNA, 1037 bp, Homo Sapiens
tcaaataacacgaaagaggcctgggtggcgaattccgcacgaggggccggctaccctcagtcgccgcgcgtcatggccctttcggtgcccggctactcaccgggcttccgaaagccgcccgaggtagtgcggctccgacggaaaagggcccggagccgtggagctgccgcctccccgccccgtgagctgacggagccggcggcccgccgagccgccctggtggcggggctgcctcttcgccctttccctgctgccgggggcagaggcggtggcagcggcggcggcccggccgctgctcggaggaaccccttcgcccgcctggacaaccgaccgcgggtcgccgcggagccccccgacgggccggcccgcgagcagccggaggccccggtcccgtttttagattctaatcaagaaaatgatttgctatgggaagagaagtttcctgaaagaacaactgttactgaattacctcagacttcacatgtatcattctccgagcctgatattccgtcctcaaaaagtactgagttacctgtggactggagtattaaaacgcgactccttttcacctcttctcaaccctttacctgggcagatcatttgaaagcacaggaagaagctcaaggtcttgtccagcattgtagggcaacagaagttactttgcctaaaagtatacaggatcccaaactctcctctgagctccgttgtaccttccagcagagccttatctattggctccaccctgctttgtcttggctaccactgttccctcgtattggagctgatagaaaaatggctggaaagacaagtccttggtcaaatgatgcaaccctgcagcatgttttaatgagtgactggtctgtgagctttacttctctatataattttgctgaagacaaaactttggcccctatttctacgtttgtacctatcagtttactggtcctgttccgagcagcaggattagctgggaagtgacttaatcacaggtcttcatatctccaacaatcgaggttaaaggagagctatgagaaata

SEQ ID NO: 453374 - DNA, 977 bp, Homo Sapiens
tttttttgctttaaagttaatttattaaatttttggttgtacataaaagaaacatttaagtattagacttgcaaaagcacttgcatttcttatctgacatcttttagggacaatttgattcattgtaaatccacatatatgtcattttaaaatcaaagataatattaaacaatttcagaaaattgttttaataatatacagcactcctccttctaaaaatattttaaaacataagtattgacaaattataacctattttaaattgtgtagagtttttcatgtattaaatttattttactctagcaagtagtataaacaaaataaacatttaagccaaaaagttcaaacatcaatgatcactgatttagataaacaaatgaagtagagtaataattactttagataaatactaaagagttttatgtgatcattcattataatttaaaatagtgctacagagaatgtcatcttggcttgctaactttttctgaattcaatatgttaatatgagtatctaattatgcaatacaagtaaacaatagtttgcaagattggcaaatttaataggttaaaaaatgcacattctaagggcatgtaattcctgttcacataattattgccattcttttatactaggatcaaacactagataaatgttgtgctttggtctttgaacagttttaaacttctactgttaagttagaagtcacttgcagaaaattacccaaattatttttatgataaaataagcattaaaaatgtagattttcagtatggaagctcctttgccttagacttgtgacccaaaacttaattataaaatggagatgaagtaaggaagtatgccaggaaagccaaaacaaggcagataaaagttttcttctaggttgcttataagcatgcctgatttagtgataggtagctttttcttaaccacttcagggctttagtttctgctgagtgtttcattacgttcc

SEQ ID NO: 453375 - DNA, 940 bp, Homo Sapiens
ttcttttcaaagaaagaaatccccagcccagggacaaaggccaggctcccgggtaaaccacagtacggtcatcaggatgaagaaaaatccagtcaccatttctgggtagctaatgtctcccagtttttcatattcttcttggatcctcttctctgacaactgttcccttttggtcttcttcttcttgctcagagagcaggtctctttaaaattgcagcccaggaacagccagtgcatccagaaccagctgaccaccagcatgatgagggatatggggaagctgaagaggaaccaggtgccaaagttcaccacctctgcggctggatactggttgttgaagtgttccaggaagatgaggctggtggaggtgccgatgatggtggtcaggccgccaatggtagcggagtaggatatgctcagggagaggcacttgcagatcatctggtcatggtgggacctgtactttctgttcagcttctgcttcctggggctgggggtcaggacttgtggcttttcctgggatgggtgttgcttcttgccctggtgttggtttgcagttttgatggggttggtgatcgagggcacaccattcaggttctcgttgtgcatcagagtggtgaggtctgcgttggacctgtcttcattgacaaagatgagttccagagaaggttggctgttctttacatccagactgatgggttcggcctcttcggtgttggagttgcacgccacgatctgctcgtcgtcagcactgaccagctcctgcagcacggcgtcctcgatgggcatcaccatggcggtggtggaggtgttggacagccgcatggacagcaacgtggtacagcacatgaagcagagcagcagcatgcgcggcttggccccggccgtcaagcccatgggcagagctatgcgcttatgcaggttccacttctccacgcac

SEQ ID NO: 453376 - DNA, 1005 bp, Homo Sapiens
  misc_feature (818)..(818): n is a, c, g, or t
gcttctttgtgccttattttacctaccagggctcagatactgacatctttgcatttggaaaccccctgaacacagccgctctgttcatcattctcctccatctggtcattgaaagcaagagtttgacttggattcacttgctggtcatcattggtagcatcttgtcttattttttatttgccatagtttttggagccatgtgtgtaacttgcaacccacatccaacccttactggattatgcaggagcacatgctggatccagtattctacttagtttgtatcctcacgacgtccattgctcttctgcccaggtttgtatacagagttcttcagggatccctgtttccatctccaattctgagagctaagcactttgacagacttaactccagaggagaggactaaagctctcaagaagtggagaggggctggaaagatgaatcaagtgacatcaaagtatgctaaccaatcagctggcaagtcaggaagaagacccatgcctggcccttctgctgtatttgcaatgaagtcagcaagttcctgtgctattgagcaaggaaacttatctctgtgtgaaactgctttagatcaaggctactctgaaactaaggcctttgagatggctggaccctccaaaggtaaagaaagctagataccctccttggagttgcaagtattctttcaaggttggaagagggattttgaagaggtatctctccaagcaagaatgacttgtttttccataagggacatgagcattttactaggcttggaagagctgacatgatgagcattattgtatgtttgtatatacatnttgtgatggagggctagagtttgacctagagagagtttaaggaagtgaaatatttaattccagaaccaaatgcttttgtaaaacttttttggattttgtaaaagcattttcattctcttagaaattccaagtatttttcaagggggagtcattttgaggatatatttatttttactaaggagatctt

SEQ ID NO: 453377 - DNA, 787 bp, Homo Sapiens
  misc_feature (18)..(18): n is a, c, g, or t
ctcacattgcagcgtgtnctgtacgtgatgttcctgcggagtcgatgcgtcaggtatctcagcagatgcgcgctaccctgcggccgagtattgtcttcaagtgatctattattatccgagatcagcgagtcattgtactgcttgagacacttactttggttctcttgaccgtgtttgtaggtgatcgcagtacgacagtccgtccccactgtcaaatgcatgagggtctgaccgcaggaactgctctttagcaagctcccctgatgatcctgatacacgctcaggcttgaaaaccaccactttaggaccatttacccagccacagggtgagcactccaaggtttctttcttaaattttgcacctgagacaaatgccaccaggactagggtgaggcgagtgaggctatctgtctcaggtgcaaaactatttaatagtgtttcctccagcgcccccacagctgctgaaaattctctcagggctgaattcatctggtgcttctattttagaagtcagactagatgtgtagcatggactggccttgactaacatatccaggaggcaggagaagacccattgtgttctatcccagaaagatgacctgtaaggttgcacatctttctccctatcttttttgtcctaagcataataaacagtgttgatcccaacctcccactgaccttggaaggcagtaggtgcctttgcctctgggaagatcatgaggcattcatgcagtcctccagcccatacttaacatgggttggatctcttgggagtgaccatgaggcc

SEQ ID NO: 453378 - DNA, 733 bp, Homo Sapiens
  misc_feature (157)..(168): n is a, c, g, or t
gaaaaactatgacatgtcagtcagccttgctgcctgctgtgtgctgtatataagtccattacatattccttatagctggattgaaaacctgaaaatgaaatgaagtccctagagaaacttggccatgctggtgctttttaccaagtttgacaatttnnnnnnnnnnnntcagtgttcaaaggagacatacaaaagtccatttaatgtagcagagatgtttaggggattacaatttctatcccctggtaaaaccaatacttggtagaaggataaagaaaaagccacgtgaaataatactgaatagcaccagaatagccttacactaaagctcgcatgcgcacagggctgggaggatggcttcctcttgccaggccctttaggtcatttcagcaattgttctgttaaacatagcattaatgttatcaagacacagcaagcagcagaaagcttgtggagtcacatttcatagtgtctcatctccaaatcagataaaagtggtatacagggttccatccagaaagcattcagtcagagcaagttaaagtcagtactttctaacatacttttaagatacttatgctgaattagcccaagggagaaaaattaatgtgcttgatgtatttactaagacttgcatctcaagtcttcaataatgcctatttttgaaagaaacctaggcaacgaattgaagagacttggaaatgtgccaattccctaaatgtttttctccccc

SEQ ID NO: 453379 - DNA, 718 bp, Homo Sapiens
  misc_feature (695)..(695): n is a, c, g, or t
gggctttattggacattcgttgggcaatttaataattcgttcagtgcttacaaggccaaggtttaaatattacctcaacaaacttcatacctttctgtctctttctggacctcaccttggtacactctacaacagcagtgctcttgttaatacaggtctctggtttatgcagaaatggaaaaaatcaggttcgcttttgcagctgacatgtcgagatcactcagaccctcgccaaacttttttatataagcttagtaacaaagcagggcttcattatttcaaaaatgttgtgctagtgggatccctacaggatcgctatgttccttatcactctgcccgcattgagatgtgtaaaacagctttaaaggacaaacagtcaggacagatctattcagaaatgatccacaacttgcttcgacctgttctgcaaagcaagggactgtaatttggttcgctataatgtcatcaatgcattgcccaatacagctgattcactcattgggagagctgcacatatagctgttcttgattcggaaatattttttagagaaattcttttctggttcgctgccctccaaatatttccaaatagtataaaagcattgttagcgactgggacaattacctcattcaacaatgtttcaaataatgtattatattaaaatgtaggatgctggataaggttctaggaaatntttatacctttttatttgggagg

SEQ ID NO: 453380 - DNA, 785 bp, Homo Sapiens
gtttatagggtttctttgctgtgtgagttctgtatatccatagaagactgggctctggctgaaagaatgcccatataaaatagatttcaacaatttatcttctattctttgatatttggtggaggctgaaattgtagaggaaattccagtgctcactatgttaacagttctctcctgtgtgttcatttatgtattgtgaggtttgatttccagctcagagttttttcgtattctttatatgcatacatttaatcccctgggtgggctttctgatgttctctaaggcttgatttttgactgaaagttctcccacatttatcacatttatagggtttctcccctgtgtgagttctctgatgtactctgagattggatttctgactgaaagcttccccacactgattacaattatatggtttctccccggtgtgagttcgctgatgttttcttaggactgacttctcactgaaagcttttccacattcattacattcatagggcttctccccagtgtgagttctctgatgccctctgagatttgatttctgcctgaatgtttttccacactcctcacattgatagggtttctccccagtatgagttctgtgatgtactctgaggtttgatttctgactgaaagcttccccacaatgattacatttatagggtttttcccctgtgtgaattctatgatgtcctctgagttgtgatttctgaccgaaagcttttccacactgattacatttgtagggcttctcccctgtgtgtgttctatgatgtttccc

SEQ ID NO: 453381 - DNA, 976 bp, Homo Sapiens
  misc_feature (22)..(22): n is a, c, g, or t
  misc_feature (53)..(53): n is a, c, g, or t
  misc_feature (58)..(58): n is a, c, g, or t
  misc_feature (72)..(72): n is a, c, g, or t
  misc_feature (161)..(161): n is a, c, g, or t
ccaaaaaagggcaactctgaangaaagtgccctaaaagtctcttttttggtanggcanaaacttcccagaanttttggtgtaaagctcccatgaaagagttcctataaaacttggagtaagtttctcaaaactcacgacgtttcctcataaattggaacgnatcaacttggaaatctcagaaattatttcataacgttctgccttccataagccatccacacattgttctagcaactccagcaagacctcttcactataatggacatccatcatcccagcatcttctttcattgctctttcttcatctatattgggagtaattttcttgaacgctgaacatccgttgggaaataatttttttcgatgaagaaactctgcaactagagctgctacatggacataacacatcgcagcctctgaaaaatctccattttttacatgaatcttggccatgctatcaagccaggttttcctgagctctggggtgcttgcataggacttggctaagctatactggagatcaattagcatttcagggtctttctcatgctccttcatttgggcagtggccataagaacagtgcggattctcttggtcaagtctttgacttctgcgggaaaggcagttgccttcataggtctgtcactatttgcaaaattattgataatgaataaagactcctgaaatcttgatcctccgcttagtgctacatcagctatcagttggcttacagcaattattatctgtagatgtgtcctcaaaaaggttttccttttggtatactcaaagttgtttctcatcaaaagatacaaaagtgcagatgcttcattcctggttgagctaatcttcgatgtgcagcactttaaaacctcatagcaaaatgcagcacacatgtttactcttcctttgaaaaatgctgaaggaaacttactgatgaaagctctcagtgaggcaaatacatgtttcagcgaccc

SEQ ID NO: 453382 - DNA, 1042 bp, Homo Sapiens
  misc_feature (18)..(18): n is a, c, g, or t
  misc_feature (42)..(42): n is a, c, g, or t
  misc_feature (55)..(55): n is a, c, g, or t
  misc_feature (66)..(66): n is a, c, g, or t
  misc_feature (80)..(80): n is a, c, g, or t
  misc_feature (113)..(113): n is a, c, g, or t
  misc_feature (120)..(120): n is a, c, g, or t
  misc_feature (335)..(335): n is a, c, g, or t
  misc_feature (543)..(543): n is a, c, g, or t
ccccccataaattattancctgcacttatcattaggaccccnttaccatgtatgngatatataccnggacatgttcccangtaacatgattttccgctttacaaaatgggtcngatttcngtgtttttacagagctgaacaagtcagcaaagcatctacaaaatgcctctgatttgtataaatacactggtgtgtaaacacaatgaagattttgaagtgggcagtcatttcaacttcagtgagtactattccttgcctcatctccatgcttcaatgttgtttacaggacttaaactgaaaaaggtattttacattttaagttcttacagcaacanagaagaaaagcatttcagtttaaatcatgtggaatccttgaccgctctgctgaagtttctgatcaaaaggcaaagagaggcattgctcacattttctatgtatactttgcaacatatcttttaaactgacccaaactggaagaacaaacatatatacccgttactgaataccagaaatattgaattaaatgtcaaactcagtctgatntgctttaaacaagtgataccatatactatcttagacatttcaagaaaacatgaacttatcttgaccattttccagaaagtagtctataccaacaagatttgtacagatgtttctgtttggagacaggcagaaccaatttagggcttaccaaattgtgttcataacaaactgaaaaaaatctctagtacacagtacacaactaaaaaatataatagaaatataaagatatctaggggaagaaataaagcttttcactttctccatcagaaccaaggttcttcatgggagtaagactatagaaaaggcaaaatcacaggttactgacagccctcagttattaagagacacatgacaacatgaatcattatagaaatcagcagcaatgaattctatgattatacaaagcaaaaaagtcaaaaaattctggacacagatttgactgtaggcctgaaaaaagaacctcatccagatatttggtgcacagaaagcacatgccccc

SEQ ID NO: 453383 - DNA, 823 bp, Homo Sapiens
gtttatttgaaggctcgtattaaaatttcaaaattggcatgaacaaagagttccagagtggaatcaatggacagggattgttgtaattttgaacataaaacggtaaagactgtggaatgtagaacaagttacaggaacgataaacaaaatcaccaatacagcatggattagaaatcaaagtgatgagatctgcggaagtctgagaaacaagtttggaaattctctgattccccacaaagcacgggcagtcctgtctgcatgcagctgctgtggtcacccagccactgtggaatgttcacctacttgcatgggtacatggttgtctacaaatacagaaacacattccagttcgccagttattaaaatgcctccaatttcaagtaaaagaaaaaatcttccaataattttcctagtaaggtaaacgaatatattcatctaggaaaagtggtctggaagaaaccattggaagcaaagtctaggggggtgccaaggtttgggagaaactattggatggtgaagcgggggagcttgagggtgaactacaaaagatatgaggactggaatttttcctgaacgtggaagcatagaggctgctgctcaactggggaatgtgccaaagtagaagaaactttaggaactaaagacaacaagttttcactggtgaggccaaagaagaagttcaacgtttaggtttaaaatatgcttccctaaagcggagggatggcccatgtcttcctggcttagttctttgccaatagacacaaattctctcttgctccaagccttagcatgtggtttgcttgtcaaccagagaggcggcccc

SEQ ID NO: 453384 - DNA, 690 bp, Homo Sapiens
cagcaagagaatcagggttccaagattgagaaattaagttggcttagacaaattataccgtgcctatatcatttcaggaacagggttaattttgaaatagggaggagttttttttccccccttggggtttcaagtgtattgggtgggtccactcatcaagtcactatcaagaatctgatcctgttggctctaaatcaggggtcccaaactattgccttttgggactgaatgctgctggcagacatgtttgtttggctaggaacagtgtttggaaagctgaatttgaaggtgtttgtggtgggatgtgtattctggtcatgccttaacttacaaaccctacttctgttgactttcacccagtcccagttcacacatttgtgttttctggattcggcccctccatgtgtttgaatttgcagcctctcagtctatgtgcagatggctggttttaatgatgtgtgggaagctgcggtgaagatgtgtaggactcttgagatttagagaggcaaaaattggacgaggtcaatgtgaacaccagccggggtagaggcaggaggaggctaagttggtgggaagatcaggcctgggacaaagtctaaatgtttgcctttttccaagcggctgctttttcaccagaccaacagacccttgcccacattacctttataccttgttgaccctcgcacagta

SEQ ID NO: 453385 - DNA, 823 bp, Homo Sapiens
  misc_feature (408)..(409): n is a, c, g, or t
  misc_feature (743)..(774): n is a, c, g, or t
tgaatggaccggaaagtaaatttcaggaacttcttaaaaataggagtgactgttcttaattctgttagaaggcaacccacatctttttagatttttctgggcacaaacaatatacccagtaccaaaaatcacgatggtataatcgtgacataaaatatttttgtttcaagagataagcataacaaaaaattcctttgcctgaatataattttccctaaataatctgtataattgaaagctacacaaaccaatgagttctcttggtcccacctaatgctatcacattaataccacctagaaatctagaaataaaactaatttctgcaaattataatttttaaagatttttattcataagtgtgttttctattataacacagacctggttttgtaacagaattcaacagnnaaaaaaaagggaattattttaagcagctctactgagcatatctactatgtcctgtagtttttgtagtcagaaactagcatttcagacaagatctggcacatttagggtggtatggccatagccaaaaactagcatttcaaaatgtgctgaatacagcttctctggtctgatatataaaaaagaataccttatttttcttgggcatgcaaagctcagggttacaaacttttcgtcattagcctgtcaaaatttctaccaagtactaaggttatcttctagaccagaattaagagaagtttctgtgatgatggaaatgttctttctatatctgcannnnnnnnnnnnnnnnnnnnnnnnnnnnnnnncccggccgtaatggccgaattcccgggcatatgtccggtaccgtcgact

SEQ ID NO: 453386 - DNA, 1386 bp, Homo Sapiens
  misc_feature (217)..(217): n is a, c, g, or t
  misc_feature (258)..(258): n is a, c, g, or t
  misc_feature (354)..(354): n is a, c, g, or t
  misc_feature (670)..(680): n is a, c, g, or t
gtggacatttgttctgggttaacagtaaatatacacttctactttcttgctctgctcatctacacatataaacacagtaagataggttctgctttctgatacatctgtcagtgagtcagaggcagaacctagtcttgttgttcatataggggcaaaaatttgacattgtcagaatgttgtgttggtatttactgcaatgtctgtccctaaacatagnggtattttaacatagcagctggttaaccgggactacagaantggaaggataatgagatgtaatacaccaaatagcttttcacttcttaaggacagtgttcaaattctgattattacaacaagcaaactgaaattagngttttcattctggtccttagtaaattcctaattctatgattaaactgggaaatgagatcccagagttatttcccaacccaggattcaacatcaattgggttttgatctcagcatcctggaaatttgtgtgcttcacacaaagtgaaattagtattttgagccttattaaaatattttcttaattatggtacctctgtctataggacttaatttagcagtccatttttgagtaaaacttgtattggaagtatagatggtagaaactttggaagttttacttgattaaggactacagaattgggcccttagaatgtgnnnnnnnnnnngtaattaaaaagacacttttaccgaactcgggattacagaaacacggagtttccatttggattttaaacaaaatttatgtcattttcagatccttccaaactctctagtgcaggaaaaggctgcagctaatttgtgaaagtggcaagctcttcattgcactgcagttatttaccagaagtttaaatctttgttaaaatatagtgttgtgttacaataagtgttggccatcatttcattcgtgggcctgctgctctctaagaattcagtagcattttaatagtttctaaaccatgaaaagttttcaagcattgctaaaatcacgccattcagtctatgctgtgtgcagagtatacaaatgtttctagtaacagtattttcataactgcccatttcacacaacctgtggaacaaattttggaagaattcatgatgctaggttctctacgcttggacgcttactttacacaacctggaaaaatgttgccctcttccctaatcctttaaaaattgggttaattgaaaaaaatccggaattttcctacaaacccccttggggctcggcgtttccctcaacgccccggggtatttggatttgcattccaattatttccttgtgccccacaaagtggcacactcggcgaaagagtacctgccccgggtaatttttgcgtaggataaaaacttgcatctgccacgggcgctctc

SEQ ID NO: 453387 - DNA, 1170 bp, Homo Sapiens
  misc_feature (24)..(24): n is a, c, g, or t
  misc_feature (885)..(885): n is a, c, g, or t
ggtgcccgtcgtgtcttggaccgnccaacacattcaattcattatctctgggaattgcgctccctacacaaaccccgggcagaccggttcaatttctggcagaagagggtcaactcccaaaactcttccattcgtgttcataaacctcccaccataaattaattttttcctttaaattcaataaacgggtggtttcccttttaaagtccggccgcccacatatcccatgaaatggcaaacggggttaaggttctaaacattttaggaaatgccccatttcatgtatctcaacgtggacattttagtatccaaacattattttctcttacacgtaaacaaagcatggtagttccacttatatcttcacatcctcaacctttaaatcatgccaaagatcttccacactatccttaaatatcatggagtttagtgtcattcaccattttaaatagaactgaaaattaaaacccattgaaaagattctgaaagggtcttcccagctttgaaaagtatgcctagaactttaatgctaacatatgcttgtattagaaagaaggtaataaagtgaaagaaaatacagttaataactcaatctattatattcaaccaggtggttttgtgatactaatgcataagagagtagggcatttgttagaccacagactgattaggattctggagtttttcatattcttcagcatagcattgatactgatcagtgaggagaggctggttagcttcatccatactgcgtctggcacgaatcagataagaagcagtcccaaaaatgagtgcaaccagtaacaaagcgccaactactgctatggcaattatctcaggtacactaaactcccgacttggccattgaatttcataagtgtatcncaggttgtctggagcagtaacaaacatttctgtgttggtgactgggggccagaatggcaccatgttgtattgtctattatgtccaataggggcattttccaatggaaatgtggatatatcagcattgtatctcctcagccattcatcaaagactgcatctgtgaaggtgtgcaggaggacaaaaataggatcatttggagacaaatgggtttgtccccctgttccattcaggaatagatgagccaaattgtgaagacttcgaacagcagggtcatactttccccc

SEQ ID NO: 453388 - DNA, 482 bp, Homo Sapiens
  misc_feature (38)..(39): n is a, c, g, or t
  misc_feature (442)..(442): n is a, c, g, or t
tcatagctatcttattttaggaatagaatgggagtcanntttgcccagtgcagttcccattggcttgaccttttcctttggcttagtgatttgggggtcctgagatcaatttccattcacagtactcatgaccaaatccagctttgcaagcaaccatgtcttgcaaatataggtcctgattagaacatcaaaatttatccataaaagcaaaccttcatcagtattatatgccaaaacagggtgaacacaatgattacaaaattgaagatgtgattagctggattctttggaatgcatctgaagagtcttctgaaaacattttgaactttttgaaaatacctgataaaggtcttcttaaaccagatggcagcagtaaataatggggttacatatacatacacacacacagtctcttttctcctaccattttgtaaatatggtngcaattaggttaatatgtgttttaagcagcatcaaacacc

SEQ ID NO: 453389 - DNA, 825 bp, Homo Sapiens
  misc_feature (57)..(74): n is a, c, g, or t
  misc_feature (142)..(158): n is a, c, g, or t
  misc_feature (497)..(761): n is a, c, g, or t
aatatagctgtgagttttaaaatttttattgatctttaaaaaaacaaactcagtggnnnnnnnnnnnnnnnnnnctggtctcattctgcttatctctgttctaatctgttattttcttccttttgcttggtttgtcattagnnnnnnnnnnnnnnnnnccctttaggtgtaatgttaggttattgatttgagatctttcttctttttaatttaatcacctgcagctataagcttccctttagcatggctttgagatctttcttctttttaatttaagcatctgcggctgtaagcttccctttagcactgcctttgttgcctcctcctgagtttgggtatgtcatggtttcattttcatttgcttaaacattttttgtcctattgtaatataattttgttgtttttaataaaggtaattaatgaaacacataatgaattgtgcttctatttttataatattttaagcattcttaactcagaaatgtaaattttagaannnnnnnnnnnnnnnnnnnnnnnnnnnnnnnnnnnnnnnnnnnnnnnnnnnnnnnnnnnnnnnnnnnnnnnnnnnnnnnnnnnnnnnnnnnnnnnnnnnnnnnnnnnnnnnnnnnnnnnnnnnnnnnnnnnnnnnnnnnnnnnnnnnnnnnnnnnnnnnnnnnnnnnnnnnnnnnnnnnnnnnnnnnnnnnnnnnnnnnnnnnnnnnnnnnnnnnnnnnnnnnnnnnnnnnnnnnnnnnnnnnnnnnnnnnnnnnnnnnnnnnnnatttgcacccactggcacctccaaccctgggggtggacaggaaatggagaaggtccccttctcc

SEQ ID NO: 453390 - DNA, 820 bp, Homo Sapiens
  misc_feature (208)..(244): n is a, c, g, or t
aggaaggttttctggggagacttgttttagggggaaaaggccttcaaaaccaaaccagggtggtattttttccttgggaggattcaggttttgttggggaaggccaagtaaaacccaattcacccggaagcaacccttggcccattatattggcagtttggcaggctatcccacaaaatgctgggattagcaattgggaattagaatnnnnnnnnnnnnnnnnnnnnnnnnnnnnnnnnnnnnntatttaagtcatgaaacacagaaagtgacagcaaagttaaaaactcagatctttataaaaaggaaatttatactgtacaccaaaaatgatatttgctaaattacaaaggcacctgtatatgaataagattaaaataaaaactaagaacagtacttttagtttctcctaccactttatattctctaaatgacagcccttacctgatagacacacgccaactatcaaaaaaagcaatcttaataccatcctggaagcaagtgaacttacatttttttcaagccaattcccaaatgagggcccactacagaaaacacctccgaaccactgtaattcctttctgaggatgactccaaacactctgccaatcgatgctaaacatgagccaaaagaaacaaaaaaactctgacaaattcccatgagcttaccaatggaccaagattgtccaaaaagtaatattcccagaggataggaaaaaaatgtcttagagggttgatgtctgccttcaatgtcacagcagaaaccttgcagtttaccagatgacccagtaaaggaaccaacacccacaacccattcccc

SEQ ID NO: 453391 - DNA, 328 bp, Homo Sapiens
  misc_feature (40)..(40): n is a, c, g, or t
  misc_feature (59)..(59): n is a, c, g, or t
  misc_feature (61)..(61): n is a, c, g, or t
  misc_feature (260)..(260): n is a, c, g, or t
gtcatagtaaatgttactacataattaaaataatgcttgntcttaatgtataatccagnanaaaggcatcaagctgcttttgttaaacaaatatgaaataatatacattaagagtagatttttttgtttaatttcacaaaactattttgcagagttcacttgtatcatctctatccttatagtaaaaattttaagatttaactcggctttctcaggttatttccctctacccctatgaactgctgagttttagttccttntctggccttcagttttcactatctgtaaagctgaaggactgtattatattacctccagtatcttttct

SEQ ID NO: 453392 - DNA, 513 bp, Homo Sapiens
cgttggcaggaaagtgaagatcttctccctcctcctcaaagtcttgtaactcagaaactgatattagagtgggattgatccaatacatggtcacgttatcacaaatctccagaattttggaatttttaagaaaatctcggttttcaataggcttttctgctgggacccaaatcactgactgttcaaagaaagttgtggtaatttcttcattctcatctatttcctcttctggttcagaaaattcaggaatcactttaatctgagttttgataaaacatttttgaagacccacgaagtagatgccagtgtatccgtttttaaagtcgtgtacttccaatgtttcatcagtgccatttccgcttctgaatatttcagttctggtcacaggatcaatttccatgtaaatcttcttcttctctccattgctgtagaaagtgtgctccatgtcataggcctgggagaacagaggaaaacaatctctaagatactcagtgtgtccctaaagtgagtccc

SEQ ID NO: 453393 - DNA, 481 bp, Homo Sapiens
aacatcaatgcttcattctctgagtgctatttattgtctcaatcttcattgcttaaagtcaggaaacaacaaacacattcatatttgtggcaaaacatctacctactcatgacatggcaaatagtcattttacaataacaatacagtacaatatgatcgtgctactttcatggctaggaatgaagttgttgggtttctctttcagagctacccctaaaggcattcactttatattctctgaagagaaccagctaaccaggcggaacatccactaagaatcttccacataaccagaccccaggagcttgcctattgcccataccagagaggcccatttggaaatacaccatctggtctcttgagcacagacctggagtgtgggattcagcttggctggctccaaagctggcccctactgatcagcctgagatccccagcctgcacaggctgattccactgccaacacgtggccccatgtggg

SEQ ID NO: 453394 - DNA, 427 bp, Homo Sapiens
tatgcaaaaatcaaatcaaaaatggatcatagacttaaatctatgacttcaaacatgaaactactaaagaaaacactgagaaagctctccaggacattgcactgggtaaagatttctcgagtaataccctacaagcacagggaaccaaagcataaatggacaaatgggatcacatcaagttaatacgcttctacacagcaaaggaaacaatctacaaagtgaagagacaacctacagagtggaagaataatatatatctgcaagttttccatctgacaaagtataattcacaaaaaaatataaggagtctcatacaactcaataggaaataaatctaataatccgatttaaaattaataaaagatttgaatagacatttctcaaaagaagacatacaaatggcaaacaggtatatgaaaaggtgcta

SEQ ID NO: 453395 - DNA, 862 bp, Homo Sapiens
ttttggtaggaggattgaggaaaaggtatgatgttggagagcgatagcgtttagtatccggcgttgagatatctcttcttatgccggggaagaaattcgacagggtgtggagatagaagggggtatttgtggggtatgggctcacttattgtgtcaggaacgagggatgattccgcccttgtttttttaacgtttaaggcggcgtaatataagaggggtgtggtttttgggatatgggacattctttagttgggttctcgtttgtataaaagcattagtttggttttccgcccaaaggtataaaattattcttttatttacaacggaaaagggggtttcgctaaacggtaagggaaaagcagcccgtggtgtccttctaaggggttatttcattaatcgcaccccgctaagaaattttggggcaccccggatttccccagtgaataaggggtttcggctgaactttaagtttttccaaccataaatcctttgtccctgccaatttcaatttacttaagttagaaaagggaaggcatgggaatttagtaataggagaactttgtcatttccagtgccaaggctaggggtcctgacaggttcctcactgtacaggtcagagctaagaaacacaatgttggttcatgtacaacactggttcatagaaaacacaattttatcacttaaaacttttcatttatttctgggatgtttgtttatgccatgctgttctttgtctctccataaatgagcaaccaaaaatctctcttattattaacccttggtgtaaaaattgatgatagcttaaatatctaaaaataaaccaagccccttctaagtacagtaatgttgcactttcaacccc

SEQ ID NO: 453396 - DNA, 761 bp, Homo Sapiens
gagaattgctaaatggaaagctagcctagaagcaccaagtaaatatattcaaggaatataagttgtttaaacattagaaaactttttgcactcattttttagctgtattaggaatgtcaataatcctgtagcaaattttcacagagaactttaagaaattcttgcattggtcgatttcaatttgaaagctttttggtttgtttgctttttaaattttcatgttctaggaaactatgattctggttgttcaggattgttattattatagttgtgtaaaattattttattttgtgtgtattgtgcacagcttatggggggggcgggaaatgcactaattgtgctcttccttataaatggtacatattactgacacagacaaataaagtttctaattgtttctgatttaatcactagtgatacagcatattctgtatgaaatgttttccctcctttctcattgtcatctacttcattttttgttttcctgttttgaagaaataaaaacccaaatggtatttattgtgcaactgggattcttatcccagttgtatagtcaataagaaataacaaaacctttgtggggccgccacgggccccttaaaaaaacctttttaaaaaccatttcgtttttggcggggcgggggcccccatttgggggtaaaggtgaacaacgtggatcccattagcggggtttttccccatatgggagcaaccacctgtggacccatgacacacagagggggccttttggggaaatttcc

SEQ ID NO: 453397 - DNA, 697 bp, Homo Sapiens
caaagtcagctttcaaaatccaagccataattggtgaggggggggtttcagaattacatagaaaaattaatatttgataatataattctgaaatttcgaatttaaaaacagatgtgctgcttctgggtgtaggtagtaaaagtataggaaaagaactgtttccttagaagcggactgtggaagggctatgtagaatgtcaaagggcaacaagagcctgtgtttttaatgtcatcctgtactcggcacaaatcaaaggccaatacaagtctgaaaagcagaaataaatatttttccaggtttttgcttgggcacatactaactgctttgggcattctaatctggtctcccaacaccaaaaacccattttcgagccggctattagccccggctgctgactctatccatttggaaccatcaatgtgcgggttatggtgggtggaaaacctgtaatattttttgtccaaaaattaaaacctttgcaagttaagggggaatagaatttatgatggggataaaataccccaaatttgattatccggttatttaaaaacaccctggcgaaaaatggggtcctttgtgtctaaaataccgaagtccacttatttgaccaattctacaaaaaaatgttctttactccctggcgcccataacatcccccttttccccctcttatttggggatcacccacgccccccc

SEQ ID NO: 453398 - DNA, 921 bp, Homo Sapiens
cactgcgctcggccaaagacagggtaacataaactttaccctaaatccactgtgcatgcagaaaggggttgactgacgaatccttgtttttctgagactcgacatgcagacagtttgatgctagaggagctccctttcctagggctttgtcatatttctttcccattcactgactgaccttccttgttttcagccctctatttgcactgggtaccctttaactcagtagttctccgctatggtattagttgtcaaggagtgtccatacttaagtaccttaagtttcatgagtcattttttaagcaaacaaaaaagagtagttatagcacttactttcttttgagcatgaatagagaagaaaaggacagaagtatagcaaagaaattaaaaatctcttagtattagaggtactaaaaaaatctagatattagcaagggagaatggagtatatgtcagtatcatccatgagtgtcccagtagaaaaacaacttactaatctaaccaatttcacttttgctgattccattcatctctaccttcagatttctttttattttcttcactaccaaaaccactcctgtgctactctttgaccaacaattttattatgattattattgcaacgtcaattaaagcaggagcaagtcttagaactccttccacaataccttaccaacaattagacctataaaatttaaaaggttgggagaatactcaatagcagtgcacctgtaaggtctcagctgtgctaatcataggaaaatgaataatttctggagaacaactcttattttttcaagcatttttaaatataacagcttacatactaaagctatataaatctttagttacttaaatgtctaaaattactactctatgtatcactcagacattcaatagaaatgataaagtcaaataccc

SEQ ID NO: 453399 - DNA, 1448 bp, Homo Sapiens
  misc_feature (114)..(122): n is a, c, g, or t
  misc_feature (816)..(831): n is a, c, g, or t
tttacctgtgataacaaaaagtttaattgaaaaatcaaaacctcacacaagtccatcattatcacgtcatgccgtccttaagatgcaatggtgggttagtgctaaatcaattcnnnnnnnnncaaagttgctcaacttttagagttctgactttaatctaccccaaagcaaaatgacctggacctggttcaagggagggaagtgaaccttgaaactgttttgccaataacctaacaaacaaaatgatatttacaaagaagtgttgcaaatagtcccatgagttaagagcttgatttaatggatcttctttttaaatagaattaaacctttatactaaaagtatttgcaaagtgtcaattaagtccaacaattccaggtatgaaactccctctgagctcttccttatacttcccttcccaattaaaacaaaacaagaaaatcatggtgtcttaaagcctttggcttgcctggccttgtctgctcactcattttaaggtggtggccccatcccaactctaccataaaagtgtctattaacacaagctcacatggagagagacggcgctcatagttactgacctattaccccagggaacaaaaaggtagtttaacgtcttcgtaaccactcatcaaagaggcaatgaaatatgcgtgaaaaggaggccaagcgcacacagaatatcttaccttcacgaaatatgtgaagaaagtctgggccacgatgaacctaagagtcaaaaacataaaaaggcaggtctgaatccatggtccacctgggttttaattattagatcttggtcgcccaaacaaaaattnnnnnnnnnnnnnnnnaatttgaccccaaggaagaacaagtcaaaacaaaatgccacgctctgtttgctctagaaaaagaaccatcaagtccacagagtgcaggtatgacttactctccagagtcagtcattaatgtctgtcacctagccacgtataatcatctttgaaaaaggactatattctatcttgggacaataattatggctgttttaatagttcaagagcataatatagcattgatttaccaaaatttttggcctttaacagccagtctatgaaaaccatttagagccccattcctgtctgtagcctaggaaatggaaccatctttaattctttcccacagggaaggaatgctgcacctatcacactatgtggtcagggtcactgattgataataaataaataaataatagagcgctcaggggaaacaacactcaccagaccacaacacacagtagaagctaagtgctgagcgtgtactctctggacaacgctggctgcaatgcagactgcaatggctacatgcttttccctctaacaattctctttggctttttcaattgggagggcagattttgcttaacaggcaactagaacaggatcctcgtgccgaattcgccacccaggcc

SEQ ID NO: 453400 - DNA, 589 bp, Homo Sapiens
  misc_feature (330)..(330): n is a, c, g, or t
gggacaataattatggctgttttaatagttcaagagcataatatagcattgatttaccaaaatttttggcctttaacagccagtctatgaaaaccatttagagccccattcctgtctgtagcctaggaaatggaaccatctttaattctttcccacagggaagaatgctgcacctatcacactatgtggtcagggtcactgattgattgataataaataaataaatagagcgcctcaggggaaacaacactcacccagacccacaacacacagtagaagctaagtgctgagcgtgtactctctggacaacgctggctgcaatgcagactngcaatggctacatgcttttccctctaacaattctctttggctttttcaattgggagggcagattttgcttcacaggcaactagaacaggatctctggcccactaaaaaatttatccctatacatagagaaattactacagatgctaagtagtcagaatgctaacattttctacaaacttgattacttattggccaaaatgaaagcaaacagccaatttttaacaacacattcaccacttgaaacaaacagcagcattta

SEQ ID NO: 453401 - DNA, 969 bp, Homo Sapiens
  misc_feature (28)..(28): n is a, c, g, or t
  misc_feature (87)..(87): n is a, c, g, or t
  misc_feature (102)..(102): n is a, c, g, or t
  misc_feature (113)..(113): n is a, c, g, or t
  misc_feature (156)..(156): n is a, c, g, or t
  misc_feature (165)..(165): n is a, c, g, or t
  misc_feature (247)..(247): n is a, c, g, or t
gccatggatgctatctggccaaacagcntttccctaattggaaaatgcagtcctgtttaaaacctttgatttacgactacttgtacntgcttgctcattacnattttgacatnttttacatagtgaagaccccaaacatatcagtgaaacatgacnagatcatanagaacagtatcatattattatttagtcgcttttacagtggcaagccaattttgaaatatctcatttaaaactcagacccaantcactgagttatacttttaataggttcctacagcacactattttcccatgcattaaatatgataaaataatctatcactgcccatcggtcttgtaaaaaggaagtctgaatacagagcccacaacactaaaattgtttttctagctacaaagtatagcatcatcaacacagacacgatttggactccctgacaggtggattggaaaacggtgtttaaagagaagagaacattttaacataaatgtcattaagaatcccaaaggccttatttgtactacacaaacttgagatgatagaagcagcaaaaaggctgcagaacgtacatgggactctcaattaaatacaaggttcacataaacactctgaaatatacagtaatatgcatttttctttgtacccatttctgaaaaatgttctacattaaaagtctcacttttggctagtttctaaatgaccaatcaacccaagaatcatattttgtcaattcttactttatacattataataatctattttgacattttgaataagggaggtgcgttgaacccatatttcgaaacctaagttacttgatggaagtaggtagtggctttccaaaatttaacagtgtagctgatcccttcaaattgagaaaatcagaattaacagacatttctgctggttatcagtagccaaagatagctgcccaccaggttctttcacttttcagtgttatggccccc

SEQ ID NO: 453402 - DNA, 501 bp, Homo Sapiens
gcggcagcgtgctccgggcgtctagaggaccccagacctaaccccatactacctcacagatgtgttgtgaggattaataaaattatgtctatggtattttcagtttctggagaaaaatacttatagacagtttaactattacatagatatataagtgatctcagtttcttgtttgctgtgatactaatgtgttgttttaacttattccataaaatgacagttgtgtcctagccacatcagacagctatctaagctctggactacccctttgtgcagctgaatcactgcagggttgaccatgcctggtgccacagccatggtttccatttctagatgaaaggatggcctaggacataggtctcaaagactcttggatcagaatcaggagattagggaaaacaggatggatacctgagcactaacagcagtagacgtagacctctgtcctttaccatctgaggtcttctggattctttgtgggttagtctggggatcctcaaa

SEQ ID NO: 453403 - DNA, 423 bp, Homo Sapiens
aaagattatatagtcttacttgtttctttcattgcactctataatgatttttaaattaagaattttttatcttaggcaaagtgtgtctctttcaattcattaacttattgattttataatgcagttttatttttggaaacatataaatatcagactgtccttaattgaaattttgtctttggtttccaacaccatgatgaagctcttgctttttaaaaagtagttagtaaattctgcatgaattttagtaaactttaaaaaatagattttttccctaagaaagaatgtttgtagaatttaaagtggacagatgcctgttggggtaaaatcaactgcaactttttgatgttaattttttttccctgtgcaattataaactataagcaagttaagtgacaagcaaatgtaataaagactagttct

SEQ ID NO: 453404 - DNA, 457 bp, Homo Sapiens
  misc_feature (297)..(308): n is a, c, g, or t
ttgcaagtttatgaatagtttattacatttcagtaagtgtattgtgaatcaataaagcaaaagttaaggacaatgagctcattaccaagccagttattgattctctggttccaaaatagaacagtacaggaagggtatagagaaaataggatttttcatgataaaaattttaagcatcttaggaacacagacctaaagaaactataagacacaacggaaatttcagcagctacttaggatgtttatttatttacctttttttgccaattagaattagttatttggtttttactcttnnnnnnnnnnnngtattttcaactcaagtcagaggagtttgccaaaactgaatattacctcttactgacttaattattctttcaatttcttgtatatcttcctctcttgcctttgaaaagtttaccttactagctgtctatcttatatcactgtcgtagcc

SEQ ID NO: 453405 - DNA, 981 bp, Homo Sapiens
atggaagggggtgaaattggtgttaagtttccgggggaatcctggggaacccccggttttctggtgggcaaaaataaagagggttccttaaattttctcgggggtcttcccctggacctttccaaatctggtgggaaggatgaacctattccgggacaggccctgttccgtgggtatttacatgctggccccccagctccactggctcggttaggtgtcaattctcaaatctttcggattaatcaccagattaatctcagtaggctggggtaatattgctacagtcatggtgctagtatggacgcggccttgcttttctgtctttggcactctttgtactctgtgaacacctccttcaaatttcatgtgcctataggcttctgaacccccaatgctggcagatgcatgtctaaggccacctagttcacttggaaaatattccagggtttcaaaatgccatcttttaaatgcagcatattgctgatacatatcaaatatctctgatgtaaacaacattgcctccagacctccaactcctgcagttacttccaggatcaaatcattttcatctgtttcttctgagggaaccaaaagtaagataatctgatgcttcagctgagttatttctttttgacacaaagtgatttcattctctgcaagtttccttaaatcttcattctcatcgtgcagcaagtgctcagtctcccgcagctcccgctccttctcgttcagcagtttgatcaccgccagcaactcgggcctcctgaccttcaaatgggcttcagaccccgcctggcgctcgaggaaggtccgcaagggcccgccccgggtgaacagctcctccagcggcgggctaccggagctcaggggccggcgggctgggccaacggcccggcggggccagagccaccgggcagcgccccacagaacccgggaccgcatccttagtccgagatcgcctcgtgccgaattcgccaccca

SEQ ID NO: 453406 - DNA, 1109 bp, Homo Sapiens
  misc_feature (989)..(989): n is a, c, g, or t
  misc_feature (1075)..(1075): n is a, c, g, or t
ggggttatttggaactctggctaaaacttctttcgggtgacatgtgatcgtttaaatggcattaagtgaataaagcacacagacagtgctactcttgaccactattttaccatttctttgcaaacagtgttcacattttcatattttttccctaactaaaccaccaaagaaagaaattttgtatgtatatacagtgtgtgtgtatacaaaatcatgatatagtagaatgcaactactttctttttctaccaaacgaaaggttttatttgctgtgaaataaaccagaagtttaaaaaaccctgtagtgattaagcatacttaaccactccttatttgtagattcactttcaaccttaaaaattaataccagtttgcataaaccaatatctgaaaagaacaggaaatgttaatggcaagcaacagctattaatactgatgtgatggaggcatttgttttgcagtggtgactggcctaggcaggtttggatctgtgaagaattgattcattttcaaaattattccataaagttaaaaagttacacttcaaaggcaacaggtcatacagttctttaaatctgatcaactgtagctttatttaaagcaaatataaatcatagatgaagttattttaaacactatgttagaatatagagattttttaaaaatgctgataagcacagttaattctaaaatgagaggattgttacacggagggagaatgttacaggttaatccacaatccaacattttgatggtagggaaaaaactgcgtaaaaactattgcattatgtatgataagaaagtaagtattccaaagggataatcttgcatattaagaaaactccaaataatctttaaactgccttgaaaaatattcctctttgactgctgagcggcagagtgcttacccttgattgtcttgattttatatatttatttctaaggggagaaaaaggggtcagacagagtaatatgatacattttcttanaaacttctctaagttgcacaaaactgaacaatcatcaagcacttatttactggctaatgttgaataaattagggtgccttcatccnggggttttctttagtacctaaagtctacaaccct

SEQ ID NO: 453407 - DNA, 664 bp, Homo Sapiens
aataaggttcttctacaattggatggtgacaaagtttgggtttgttaggattatttttcagcagccaatcagctagccaaatcaaaggatctgctggtttttgcttacaaagctctgtgagtccttcaagcagagttggcattatatgtaaatttaaatagtccttagcagcttgtccaattggaatgggctcaacaatcacttcaggaaacataaaacgtatttctctttccgcagcagcaaagtcattactcccatgaagtgcattccttaggtcatctgtgccataaattgccctcagactgtctggatgtgtctccttcgctactaagctattatttggtcccaaaagttctaaccaataagagatggctttatgtctagctaatatcatggcgacaagtggtccagaactcatgtaagctgttaagttggggaaaaacatttttccatacttttccacataaaagttactacattgctcagggctgaggcgtagttttcttctctgaacaatggtgaatccggatctaagaataatatcttgtatctcctcctctttgtcaacaatatctggtttgataatggccagagttttttctacatatatctgaggtggaggcattgatatctccattatggctcagcggccgtcctcatatcc

SEQ ID NO: 453408 - DNA, 427 bp, Homo Sapiens
  misc_feature (357)..(357): n is a, c, g, or t
  misc_feature (413)..(413): n is a, c, g, or t
ggcagcacagagaggcttctttattccaaggatctgatgttgcaagatctaacatttctacccccaggcattctccacctgcccatccaatctgctaaatagaaatcatgattccttcttatagactcctccgccttcccttcttccttctttaattctgcagtggggccatggggagaaagagggaagagggagaagagtagctttctcactagtccccagggcgacacacttaggaactgacttattgttgaagttctaccccacaaattcaaaagtgcttcttactttctaccctcgtcccataatcagataagccccggggaaacaagggggcaggaactattcaatcaaggntttcagcgttttctttcttaacattttcaggagacttccacccaggccaagggggnaaaccctgtttccc

SEQ ID NO: 453409 - DNA, 176 bp, Homo Sapiens
gtgtgagccactgcactggcctaagattttcattttaacagggaactgttagaatagaaaagaagcttcccaagaggcactcattttaaaaataaattatagcttaaattattactatgtggattatatcagcaaaggcagaaagaattaatgttttcctcctttcatgaaccttg

SEQ ID NO: 453410 - DNA, 817 bp, Homo Sapiens
  misc_feature (35)..(35): n is a, c, g, or t
  misc_feature (41)..(41): n is a, c, g, or t
  misc_feature (128)..(402): n is a, c, g, or t
accttctatatccagctcatgcccttaccaataangcttcngagattcaacctggttgcatgcggcatcggttcatcattctcagtattgtgttaccagctttcccattctacgactttacaagaaannnnnnnnnnnnnnnnnnnnnnnnnnnnnnnnnnnnnnnnnnnnnnnnnnnnnnnnnnnnnnnnnnnnnnnnnnnnnnnnnnnnnnnnnnnnnnnnnnnnnnnnnnnnnnnnnnnnnnnnnnnnnnnnnnnnnnnnnnnnnnnnnnnnnnnnnnnnnnnnnnnnnnnnnnnnnnnnnnnnnnnnnnnnnnnnnnnnnnnnnnnnnnnnnnnnnnnnnnnnnnnnnnnnnnnnnnnnnnnnnnnnnnnnnnnnnnnnnnnnnnnnnnnnnnnnnnnaacaaagcttcataacttttgcttgaggttttgtacgtctattattacatttagttcaaggtaattgtgtatactactataaattaaatattggtttaaatttcattttctaagggcttgttgatggtatatagaaatataactggtcttttgatgttgatattgtacactgactttgctaatctcttaataattttaatctgtagcttccttagaattttctgcatacacaagcatgtcatctgtgaatgatggtagttttatttcttctttcccaatccatatacatttctttttcttaccttactgcatcgactgggacctagagtacaactagtgagaagagacattcttgtcctattcctgaactcaagggaccactttgagcaattcaacattaagtggatgcttgccc

SEQ ID NO: 453411 - DNA, 783 bp, Homo Sapiens
  misc_feature (155)..(167): n is a, c, g, or t
attgtgtttagatagttaacatttattaaggtcttacaaagtgccaggcatattctacaagctctacatggctttatacttcatttcattcttacaacaagccctgagatagatcttatcttaaaatttccacattctaaaacactctttaagcnnnnnnnnnnnnnagcagaggaaagtgcataaaatataaatttacagcttaacaaattattataaagcaaatcaccataaagatcaagaaacagaacagatcagaactccagaaattcccataagtccttgcccaatcacaacctctttcctctctccaaaacaaaacaaaacactctcatgacagttttagctgttgctttcttactttcctttatagctttaccactcaaatatagatgcccaaacactactgtttctggagctttatataaatagaactataatgcatatatccttctatatccagctcattgcccttacaattatgcttctgagattcaacctggttgcatgcggcatcggttcatcattctcagtattgtgttacagctttccattctacgactttacaagagattatccttttactgtcggtggacatttggactgtttccagttggggacaattatgaaaaatgttgctaagaacatgtttttaatgtctcctggtacatatgtgcacacacaaggtatatatgtaggagaggaattgctggctcatagattgtgtatattttcaactacactagataccaccaaactgtatatcaaaggtgtaccaattcc

SEQ ID NO: 453412 - DNA, 1211 bp, Homo Sapiens
  misc_feature (1025)..(1034): n is a, c, g, or t
cggactataagccattcaatcctttgacaggaccaggaccagttacaggtgctaccacattaacagactgtgaaagtacaaagtctttagtgattgtgccttgcgacataaatgggttcaaggaacataaatgagaaccacaaaggatgtatggaaaactagaggttaaaggatactatatgaccacagaaattttataacccgatctacaaatgaatacttgacagtgtccctttgacatatataaaagagggcacaaataatgtttttgttttaaaaaatattttaacaacagttttaatagaaaaaaatcaactgacttgaattaagccagtgttcttgacacccactgggccaagagcattaaaacaaccaagaccggagaagttaataaacacagctaaagacaaaattggacaaaataaaacaaaagaaaacacaaagtgaataagcatccaatcaggcaaacatggacacaaccaccctgaaaaggtctagccgttgcaactcagtggcatccccatcacctaaaaaatggtagtggcttctccccaccccagtgagctaatattcaacattctgctgatcttataagtattatttggtccaatctgaagaaggtctttttaaactaaaactagtctaatgaaattacacttcaggaatatggaggtgaaattttctatttttagtattgtaataggatctgggcaaattttgcaaatatgttgccatctggataaaagttattaaatatagatgcctttttacttaccaaggcattcctttcccactcctctttagttttaataacttgattatagttttgtcatggcgcgtggacctgtccagtcaattgtgtgtttcagtgccctttggtaaagagactgtacttagcacacacacagatacacataattcgcaacagctgagaaagcttgagggatctgggaaacacaaaacaccaagaacaatgcaaaacaaatagattactgctgcatatcacttcaagttttttaaggggnnnnnnnnnncacctaaaaataaatgcatcaaagtattttttaaaatacagaaacgtgtacttctggatgactgatattaatttccttcctagcagtcttttcaagatgtttttgcttccccttaattgtgactcaaagctaatcaaattgagagaaatgtaagttatggcccaaggccctgcatcc

SEQ ID NO: 453413 - DNA, 737 bp, Homo Sapiens
ggattggagctgaagttatttcagagttcttaattaatggcgaagaatcaaaagtggcaagactaaagctctttccccatcacataggggagctgcatattctgggagttgtttataatcttggcactattcagggctctatgacagtagatggcattggtgctcttcccggatgtcacacaggaaaatattccttgagtatgtcagtccgagggaagcaggatttagaaattcaagggtcctcgacttaacaacacaaaagaagagaaaacatctgttaaatatggccctgatcgacgtttagatcccataatcacagaagaaatgccactgttggaggtgttctttatacattttcctacagggcttctctgtggagaaatccgaaaagcatatgtagaatttgtcaatgtcagcaaatgtccacttactggattgaaggttgtttctaaacgtccagagttctttactttcggtggtaatagtgctgttctaacaccactaagtccctcagcttctgagaattgtagtgcttacaagactgttgtgacagatgctacctctgtgtgtacagcactcatatcatcagcttcttctgtagactttggcattggcacaggaagtcaaccagaggtgattcctggttcccctttcctggacactgtgtcttcctacccgggaaccttcagtggcagcctgcccaattgtgggtttacgttggggccctggaatggaac

SEQ ID NO: 453414 - DNA, 1007 bp, Homo Sapiens
  misc_feature (11)..(11): n is a, c, g, or t
  misc_feature (676)..(676): n is a, c, g, or t
aatacaccccnttaaagccattagcccaaaagccggtccccgcagctgcctgaagaattgcctactcccaatacagaatgggaaagaggaattccccaagtagtaaggtatccccagaggtggaaaattttgtgtagtggaaatacatgagtaaacatggtaagaaaccaagggatggcatagagatctggaatgaaaccaatctcattgagatgattactcagctctggatcatgaaatgcaatcatctgagagaagacagtcagatactcttgtattacatgtgagttgtcttttaagaagaagttatacaggtatttgggaataaaagcagacatacatgcataagccaaggcttcattattgaagtttagatataggaatggagcacaaagtgagtcaagaccttgccaatacacaagatcaggatgagacactacccaggcttttaatacacgcctaaattttgcatgaccttctggtgatgataacagttcatcgtactgatgacagcgaggaatatccacttcaatttgtctatctgtaggaattggagtgtctttatcaattgcatcgtacttggcatgaatagctccctcaactcccagaagagcagcccaggttaaacctctcataagaggaggaatgtcaactcttgcttctttccagatttggnttttttttatatggataagcctttagcagcctgtcgaagagaataattctatttagttggtactctgtatccttctctctgatgattaaagggagcgtggcagctgcagacaactcattattgctgtttgaatgaggtaaattagactggtcatcttcaagtaatgggtaaaatgcttctccaccaacatctttcaatctatttcttagctggcataacgacaatgtcacagtggtatcatctaaaagcgagcttctatctcgaccttgtccaaagctttcaccatcctcaaagagaaaattggggagtgtgcagataggtggtttggacc

SEQ ID NO: 453415 - DNA, 493 bp, Homo Sapiens
cataaagaaactgatgtaaagttccctttgaagagccttacaaatttgtgtcctcgctcagctaaacctactggtcattcattgaaaacaaatgaataaaataaaaggttgtttagatttaatttaaaaaatacagtctgtaggaaaaaaaattacctagattctcccaggtcccttttttggtgaatacttgttctttggttttggaatgaagtaagccaattccttagttgattgcagtcatttttcattttctaccatcaccaaagacttgtcatagctctcagaactttccattagaattttatttgagagcaatataaggttgctttaagcaggaataggcaagatgcttgccacactctccagcttttgcaattttggaataggaaacattagagcatacgaaaatgtgagcttgagtaacagatttaacagctctgcgttctacagggttttaggttaccctagggctttctaattacatactgcc

SEQ ID NO: 453416 - DNA, 740 bp, Homo Sapiens
gtgaaaggtaggcattttaaaaccaaaaagttaaaaggcaaagctaaatttccctggttttaaggacccctgggttttaaaaaactccaaaaattaccagtacatcccatacaaatggaatattaggcaagcatccaaactaatgagaatgccctttatatatactgacatggaaacatctccaagatacagttaatggaaataaagtaaatgcaatgttcaaatgttttcctccttcttttaaagacaggggatatatgtgtgtttacttggagatgcataaaacatttcctgaagaacacacaagaaagcaataacattagtttctttgggggtggagaaagtaaataactagggaacagaaaggagtcttcatagcatattcttaagagccgccagaattttaaaccatgtatatataattctttccaaacatgctcatttttcaaaatatatgatttatgaacctaaaagcttctgattttgaattttagaaatattcgtatcgcctatccttttactcacaagttttctaaacatcatgtcaaagtttgtcatctatatgttgaaaagagcacacaaagtaagaaacaaaatgttgacatcattctttttgttttcaaactgacctcaattcataaacccggcctcttttacaaaattattcaacagttgaatctgtgaccagttaattagttgtgaatccactcaatcaaatcatctcaattcactatttcccc

SEQ ID NO: 453417 - DNA, 729 bp, Homo Sapiens
  misc_feature (335)..(344): n is a, c, g, or t
tagaaaccaggcccattatgaaagatgggctggctcaaacaaactataaaaagtttgggatttcctggggcacgaaaacatttttaaaatgcatgcctttgattttatggcacattaggaggtatcctacatgtcatcacccacactgctagcttattgtatgttaagaaagagtaatattaaagaccagacatctcactgtttaagatgagaacagtatacttcttttgagttttaaaataaaataaaatgaaataacggctctcaggttaaattatcagatcatctgcaataaccaggaatggaggaaattgctgttttccattcagacaggnnnnnnnnnntaggagcaacaagacatgcccttggatcatttgacaatcactgcatccacacgtgtttgtgctgtgagtcccatataacaatcctcctaccctccagagcatgggtgcagcctttcccactctgctacccctgggcccctaagatccatcattccagtgactcacccagtcatccatttgctatagcttctctttcaaacagtgataggtgcaaaaaaatatgttgccccagagcatttccactttcaattttgtcgaaatgttctcaatgtgttactcagttatttccagaagatacctttatcacttagacttacaaaaaaatagtttcccaaagtatttaacttgctcctaagataacctttgtcttatacgttcctatccc

SEQ ID NO: 453418 - DNA, 784 bp, Homo Sapiens
  misc_feature (210)..(210): n is a, c, g, or t
aggggaagggttcccgaatggttgtataaaggcccaatttggtatttttctgaccccccagaaggcccgggggccgttttattaaaaattggttagggttgttcaagataaaagtattttggccgaaaaattaaacgttgcaaaccccatttaccttgccaaaaaaggtaatttcacttggccaagcttaaaaaagccaaggccttgaanaatgaattcccaatttttagttaatttttttaaaaaaatttcaaactggcattttgattaaatgtaaccctttggctagaatagttgggtccattcgtgaagggtctgaaaagtggaaggcaggcagaaatctcagggtctggataataatccacatggaataagtgagagcaatactgctgaaaacaccctctcctccctctccccttctttatggaactgtccaggcttctaattattatccctgtgttttacaggaatttggtacttgaggggccctttataaaaatcccaggagagatggggcagcctcgatcagttgtgttttggtctgaggtccttttgtcttgcctgctattcttctaactccaactgtgggaacttaaggaggtgagccacttatgggatctaagtctgagcttcctcctctgttaagaggactcagcgataggccttatgtttcataacagtggaaaggattagtgtcgatgtatgcatgtggcttagcgtaatgccacacaaatggaatcactagagtttatcagttatgatggtccattaagctgtcaactcc

SEQ ID NO: 453419 - DNA, 962 bp, Homo Sapiens
  misc_feature (668)..(668): n is a, c, g, or t
cgaggtcggtatgcaagaggtcgtaggctcccgtatttcgccctaatagtttgtgaggttatagcagatgtttttccccccttttaagggggacacatttacaccgtgttggggggaaaggcttttgggggaagaagggtggataacacaaagacgttttaagggcttcccccctttggggaaatccagaaggggcagctttaatggtttaaaaaaggttacaaggccccacgtttaggggttccccccgcccaccgcggacgattttcctgagtgggtttcaacagcgggcgtgaaacttggccagccaataacccagttcacccgggggccccccagtggggggggaatttccttcctttgaggcaagggtagaaaaaggaccacttggtttttcccctgggaaaaaaaccaaaagtgccaggtacggaaatataaaagggcggtcaccccacaattccttttttcgggaaaattaatccattagggaggacctccttacttttaccaggatttagtatcactccaaggtttcccacatggaaaaaaataggttaaaaaataatttatcataaaattctcagttatgaagtcacagatagaatctgataccctttttaggcactggtgagttggagagacacccagaggtcatgctgtccatcccnttcatttgataggggagggcacttgaggcccaggaaggtcaagcgtcggacctggggtctaaccccttgtggcagagcctgcgtaggacgcgggcctcctgaagcctagctcagggttccctccactccccttcctctttaaagactctcaaaagtaaaatatggcgatgatctcccaaagatgcaccacaccataaagcacatgcgactgacccaggtcagcaatttggtctcacaaggcggttcctttggccattgggcaggtatgtaacccacctcagggtgggaattccc

SEQ ID NO: 453420 - DNA, 755 bp, Homo Sapiens
  misc_feature (610)..(610): n is a, c, g, or t
gtaagaaaaatcatcagtgcttaaagatcaagggaactcattcaaaacaaattcaggcctttggactttactggcaggtaggtatattttcagtcagatcaatatctttctaatataggtatttgaaagtaatatatgctacttataataatgatatagtaagcttcttatctgcaagtacaggtactataacttacaccttaaaatgctttgtttgattgtttcattcagcaaaattcttggcactgttttgggatttcactgaattttgatgatgatattggattaagcattttagatttaattgtaaaatgacacaaaaatctaatcatctatttccaatgttcaatatacaatttttataaatacatgaaacaattcatataaaaatataaattttaaggtcactcacagcaaaatatggcacattagaattatttattaaatgctttatacatataaaggtaggcacttcataaaatttgcattttggtaaaaggcaacaatttgatgtcagtatcttaattgtgtcattaacttttttaagagaacagattatcaaaattttacgtagaagaaaaaaataatagttttaagggaaatctacagnaaggggaatctgaacttcatttcccactttatttttgccgagtctgttgtgtatcttcatggtcaagttctgagatttttgctccctgacctaaaatcctgtgggaataattgatttctcatcttttacttggaagtgaagtgcc

SEQ ID NO: 453421 - DNA, 750 bp, Homo Sapiens
cctcgcatttcatttctacaagggaaggaaaccatttttaaaaagtggcttagaacaaacaatttactgaggcacttattatgcacccaccagggatattctttttataaagtaattttcaaaatgaagctgtcaaactattggcccattttgtgaatgaggaaaatgaaaattaagttatataatcatgagtggcagagctgggaaatgaactcaagtctgtgactctgaagacatgaaaaagttacacatttcagatgaatgcataaactatctttatgggtatgacatgaaaagtaactgtagaatgttacccttaattacatttccctaatgcatgatgtggacagacattagaaaagtttggactcggttggaaaaacaaatccagcagttaaaaaagtcctttacttgcaatccctacccctagctaacccaagagcatttaaaaaataacttaaaaagtagccatcaaagataccaatcaatttcttactggtgaaatatataagaacttccaggagtcacaagagttccaaacaattaatttataaaaataacaaaacatttgtctatgaaaaaaagatcaggattcactctcatcgacgtcctcatctggatggtgctcagcatcctccttttcctgctgctgtttcttccacagttttgccatggccaggagtttgaggttaggttggttggcagcatcttctggaaagatgtaatcaaagtattcttcccagcctgccc

SEQ ID NO: 453422 - DNA, 873 bp, Homo Sapiens
  misc_feature (236)..(322): n is a, c, g, or t
  misc_feature (331)..(344): n is a, c, g, or t
  misc_feature (497)..(505): n is a, c, g, or t
ggctaaaatcagttgtttcaaaatttcaagaattccactgagtagtgatttttctgagtactaagctatgatctcatcagaatgtgctggtttcagtctggagatagatttctgaggagcctaatacaagggagagaatgtccaaagaacactactgtggaaagttcttacgatggaaattgacatcttttgtatctcattctccagccgtgaaataaaggcagaagttccctgcnnnnnnnnnnnnnnnnnnnnnnnnnnnnnnnnnnnnnnnnnnnnnnnnnnnnnnnnnnnnnnnnnnnnnnnnnnnnnnnnnnnnnnncttgtgggnnnnnnnnnnnnnntcgaaaaagctttctcaaaactttttgtttgggcggcggggcgcccaattagggaaagggaaacaggggccacaaacttgtttccttaagaaaacacccggggcacaaaaacacggggcgtgggagatccccgccaaaaataaaaaaaccccnnnnnnnnnaacacagagtggtttttcggaaaaaaactccccaaagggggggattttttaagggggacatttgcgggcggagtgtttatcacacagaggggcctccaaagccggagcctcttaaaaataataaatataaccgccccccgaccctgttgcaacttttaattgcgcagagacgggtgggggataacctcccttaaaaccgcattttccccgcccaataatgggtaacgacccctctcacagaagggggcggtgagaataaaacccttaacacaccccccggcgggggatctaataaaccccccttggggcccaccttcgcgtaataaaaaaactctatcccccgcttgtaaacaaaccccgcggggggt

SEQ ID NO: 453423 - DNA, 979 bp, Homo Sapiens
actttgaaatgaacataaataaatgaacatagaaactaataagatatggtacacatataacacacaaacttacatacatctacctttatagaatgctaaatcagatcattcttccagtttctttttctaacttttcggtcatcagtgagtctctcatcaccctcatagatgtatctaatctcagttttcactaattaccttttctctacctttgtcttcattcattcatttaacttttcctattaatactacaagtcgttaagggagaaaagaccacaaatagtgatttaattagttgatgacatggttaaaaagtatttgattctaggatttgaaggggtgaataaatatgtggaaaaatggtataccaactgcacctgcaaattaatctggaaaatttctagaaacatacgcaggaccatatttttttatttcttagatgttttcctagtcaactcatttacctatgtcctagccatcatgcaatgcatttataaagcacaccacgtaattaaaataaacatctgaattttaaaagatatagtgatatactttacaaaggaattacaaaacttaaggtgcatttaagatagtctgacaatgtatattgaaactattgaaactatttgtattaaaggaattcaagtccaaaacatgtgtgtcccgtctatctgcatttctacttttactcaacattctctactctcaccacagcagatcactgtgtgcagtgttatctgcactctttggctgccctgacattcctcattccttaccagaaatgtccttctgactacggttctgctcacaaatcttcctatccctcctccaaagatcaggcccaatcagcttcctccattaattatccaccccaccatccagagagagaaatgagccccagcttaacatatctccctttccacaaccgcatagtgccttattcttctatcatgcctctctgatcaaatttctagagacc

SEQ ID NO: 453424 - DNA, 722 bp, Homo Sapiens
ttccttaaactattggatcaaattcagtgtgtatcatgacaaatcaatgtatttgtttgataccaatattatttctccatgaccttttccttaatatgcatgtcccctatcctatttagcccaacaatgatattaaggcaattttcctaaattgtctttaaatattttatttaaaaatgtccatgtacttaaagcttgatttttaaaacttttacacaaatcaaaataccatacatacattatatagccaactcgtaacaatccatcagaaaatggattgcattaagatatatctctagccaatcttggtttcaggtacttattgaccttttgcttagtttatgcttattcttctgttgatataaaagatgattttgtagtggtgtgaatgctgaaagagaaggccatttgttctacagcctaattctctcacactatccactggtgccacgtgagagcagagcatgtgagctaattaagcttatgttttgcagccttacccaatctatattgggcaaaaagcagtctgcaggtttgcaaggcttcctctctcctgcatcttgccttttcaaataaattgatttttttcatgtgaactcttatgggtcctctgaatttcagctgtacttacttgtagatgtaattgaagaaaaacacatttccaagccaaatatatataatttcaggcctaagtatactccagaatccttcttaaagtcccc

SEQ ID NO: 453425 - DNA, 471 bp, Homo Sapiens
gatattttactgcgtttcaagtattgatactctgtatggcattaaaaacaaggagaaaaaagccacgtgcagaaaattaattaaaaagagttaagacacagaaacttggaaatgtcataaaattacaaatacaaaagcaacaaattaaaaacacataccacgatatgcagcatttcagataacaatcagatagccagacacataccccaatgaatcacttaatcatcaacatatctcgctagattttgcaaagggggctagtggttgatgatttaacctcaatcaatccaaaggacatgactctttccttacattacaagcaatctgtaaagatggctttaagtacctttgaaaaggtggagtgtcctttctcaaaggaaacagacaaggaaggggttatccgctctgcccccccactaccgaaatgtgtacattcattcaactctggtaactaaggcaaccaaaggacaa

SEQ ID NO: 453426 - DNA, 934 bp, Homo Sapiens
  misc_feature (45)..(81): n is a, c, g, or t
  misc_feature (149)..(179): n is a, c, g, or t
ggagatacatcactataggcgactggagcttacgcggggcggcgnnnnnnnnnnnnnnnnnnnnnnnnnnnnnnnnnnnnnatcaggccaaatcggccgagctcgaattcgtcgagagcgatgtgaatttttcatgaccttctttacannnnnnnnnnnnnnnnnnnnnnnnnnnnnnnctctaagaagaggcttggaatgagttccaatttgtgatgttaatacaggcttcttgttttaggaagcatcacctatactctgaagcctttaaactctgaagagaattgtttcagagttattccaagcacttgtcaaacttggaaaaacagacttgggttgtgggaacagttgacagcgttctgaaaagatgccatttgtttccttctgatctctcactgaataatgtttactgtacagtcttcccaaggtgattcctgcgactgcaggcactggtcattttctcatgtagctgtcttttcagttatggtaaactcttaaagttcagaacactcaacagattccttcagtgatatacttgttcgttcatttctaaaatgtgaagctttaggaccaaattgttagaaagcatcaggatgaccagttatctcgagtagattttcttggatttcagaacatctagcatgactctgaaggataccacatgtttttatatataaaattaattactgttttaatgatatagacatttgataattgacctatttttagagaaaccgtttgttaaattttaaaaaactagccaatcctataaagtgccaatcaaggttcaaactttgaaattaaaaaaccccttatggaaccgaacaggggttttggccactttttgccaaaaaaccttaacctccctttttccccaaccatccaaacattttttggtaaaaaaatttgaaggggggttaaaaaagcggggaaa

SEQ ID NO: 453427 - DNA, 788 bp, Homo Sapiens
cctttcaccaccatcgttgctttaatctgtgagctgcttggtatatatgacgaagggaactttagcttttcaaatgcttggacttatttggttataataaacaacatgtcacagttgtttgccatgtattgtctcctgctcttttataaagtactaaaagaagaactgagcccaatccaacctgttggcaaatttctttgtgtaaagctggtggtttttgtttctttttggcaagcagtagttattgctttgttggtaaaagttggcgttatttctgaaaagcatacgtgggaatggcaaactgtagaagctgtggccaccggactccagggattttattatctgtattgagatgttcctcgctgccattgctcatcattacacattcttcatataaaccatatgtccaagaagcagaagagggctcatgctttgattcctttcttgccatgtgggatgtctcagatattagagatgatatttctgaacaagtatgggcatgttggacggacagtcaggggacatcccaggaaaaaattgtttcccgaggatcaagatctaaatgaacatacaagttttattatcatcatcatcacaagatgcaattttcaattgcttctttctatgccaccctttcaccccatggggtcacctacccaaggggtttgggacaacacctggtggacttccccccaggaactaacaccctttacccaccaggccttaaagaataattcttggaatggaaaaatccccttttaagttggaataacctcaattagggggaa

SEQ ID NO: 453428 - DNA, 634 bp, Homo Sapiens
atatttcatactagaaagaagtctgtatatatactggtaaagtacatatacattgattttggtagaaacagtgaggaagagcctcagttttctttctttccaaacagctgctgattatctcaacatcatttattgggaaatgccagtattatccctattgatctgaaatccaacctttattgtatactaaattctcagatgtagttcggtctcttgagactgttctcttccattgaattggtgcttccttctctagtactctaagttatagacaattcactctatactgagttattgtttcacctagtcttcctcttcttactcattctcagactgtttatgtctcaccatgtttgtgttggtcaagttccccagactaagcctgttggcattttagttgggatttctaaatgaaatacttacttataatttggaaaaattacagaatttagtttttctcaagaacaaaatatatctttccagttattttagtggtttttaaaaaatatctctcaggagagttttaaagttttcttcccatatgtgtatcacatttcacttatttttagatatttgatcatttttgatgactgttgtaaacagaaatattttcttatattttaagtggttatcc

SEQ ID NO: 453429 - DNA, 1017 bp, Homo Sapiens
aacctggactcaggtggatataaagaaaaccttggaaagagactgccttagccatgatttcgttagtagacctatttatgattcaattgcaattttcagatatgatgtgaacatggaatttcattgaaaatagtttaattttttatataaaaggttttgtatataatgtgtgtcagtgactattttcaaaatcattttcatcaagacaccttttttctaaaataggcattgcatacacatatgcacacgtatgtgcatgtgccacacattttttgtataatgttgggtttgattataaaagtgttgtcaaatgttttatttatctgcatatagcagtggttggcttttttgaattgaaatttttgcgccttgatgcattgcaataacgaaaactatttatctctgaacattaaactcatttttgcatattcccgtaatattgcagtccccagatccctaacatcgcgaaggtaaagtaaaatgtgtagattttggggttttgaaattactgtcccgaatttacattcaccaattcactacaatatcttttgtttaaaaagtaccatttccttttttaccgccaaaacaatctgaattatttaacattttcccaggtgttttttttcatttaaaatatttttggccttaatcaaaaatgtttgcagttcacgtgagaaaatttctgtctcccacatttcaattatggtctcatacccgaggatttataaaaagctggtccggaaaatttggaacttcgcatctggaccacttttgctcccatgaggcccataataaactatgttgggaaaaccacgatagaaattgtttctctcgatgcaccagcctctgctcgtttttcattctctccggatttaggaccctcacagcaatcaaagtgctgctatgacgccatcgtcacccctgtcgtctccgggcaacagccactcgtagccaccctagaaaagagaaaagaccttttactatctagaaatccaaagtggacctcacttcgggcgc

SEQ ID NO: 453430 - DNA, 377 bp, Homo Sapiens
  misc_feature (13)..(13): n is a, c, g, or t
  misc_feature (39)..(39): n is a, c, g, or t
agtagggaaaaanaagacatttaattaagggaaagccanaggccccaagaagccccaagttaaggtagaagatgaattgtgaactaaaagtttgaggggcagagaagcagattcatttggccagaaataagtattggtatagagtgatgatgagaaagcagtggctttcttagaatttgagttggcagttcccaaggctggctagtaagccacacacggagactaacagggccacaccatcttccattgcccagccaggagcctggctggcagaccttaggtgtctgatgacattggagtaatagtgtgacttctaacaaatacctaggtggtgtttaggggaggttatggcttgttcactcaggaaactagctttt

SEQ ID NO: 453431 - DNA, 980 bp, Homo Sapiens
  misc_feature (485)..(493): n is a, c, g, or t
  misc_feature (921)..(921): n is a, c, g, or t
  misc_feature (942)..(942): n is a, c, g, or t
tcttgaactccgtgcgctcaaacagttctcccatctcagctacccaagtagctaggactacaggcgtaagctaccatgctcaactaaggacacagatatcttaaactcacatatctaaaactgagcatctctctcttccacgtatcctttttaccacctgttccatataactacaaaaaactgaaatgcatatattcttcctcttttatagaatggcaccagcatctacataatcagtcaagtgtggaattggaaaccattctattatctcctcctcgtacaccccctacatccgtttggtcaattttgccttctaatttgatctccagtctgtgccttctgcttttcttctgcacttcattaatccagctcaggacaatattattggttacctggactctagtgataaagatatgtcctaccttactacctccatctgccataacttctgaaatgaaatcctgcttaatatcctgctgctgaannnnnnnnncatcaggataaggccagactacctaagagcatatagtacctttgtgacctgggtccctgcacactttttctgtcttctatccagcccaaaataccttttgatccattgttctagctctgccaacctgcttgcgtttcccttgaagtgctatgtctttttactctccatatttttgtctgtgctatttcttatacctggaatgcccttcccccattacttgcatcattaattcctattcattcttaaaatctcagctcaagtgtcaccttttcaaagtgtgtcttatgtaataaggctgaacttgagtgtgcctctgaaatttttccatggcactttgtgttgcctactcctaccacaacacattttgaaattataaccactgatttttcttgtctgactctaacactagactgagcatcttgaggcanacagttatgtcgatcgagggncacttcagattggtaccaatctgaagtgggagcggtcc

SEQ ID NO: 453432 - DNA, 147 bp, Homo Sapiens
gttgtattttttaaaaaaattttatttacagcaccattgaacatctttgaaaggtatgctcatgtacatacattactgggggattcacatgcaattattaatgagttatttaaactttatgtcttagagttttgacagttctctccc

SEQ ID NO: 453433 - DNA, 751 bp, Homo Sapiens
  misc_feature (63)..(63): n is a, c, g, or t
gccccccgccccaaggaaagtgtttctctcccaggaaaaccttctgagacgctggccccgctncggcaaggaaaaagggggtttggccaaggaattttgtgggaaatagaagaaaaaagttcaaaagacaatcatccccgacaggaccccgcacaagaagggccagaaaaaacgggaccaaggttgagatggaaaattaagaaagtcattgcttgaaatgtcattcttttgcgataaagatgtgtttggttaagaaacgcatggcccagatgtgggtggtcacatgccatgaaaggagaatgtaatcatgaaactgtggaaggatgtaacagggaaataggattctctagcacatacctttggctgctgatgttgtaatgtgtcaataatcccaggtcactcagttgtaattccagagaagtcacatttccctaccatggcactatcaagcagaaacttaacagtctgcccccttattatctcctgcatttgtcttaggactctttgaaggcaggctttgtgctttcaatccccagtactcagcatctcacctgtccttggtaccagcgataaattgcaaagatgcccacataccctccacaccctttaccatgtgactctccagctcttcccatcgtgaggtggagtctattttcccagccttgattctccactgagactagctttgacaattggatgagagggaggagatgttgtgtctgttacacagtccccaaggggctgtgcaccc

SEQ ID NO: 453434 - DNA, 848 bp, Homo Sapiens
  misc_feature (419)..(429): n is a, c, g, or t
  misc_feature (485)..(485): n is a, c, g, or t
  misc_feature (722)..(722): n is a, c, g, or t
  misc_feature (751)..(751): n is a, c, g, or t
  misc_feature (767)..(767): n is a, c, g, or t
  misc_feature (797)..(797): n is a, c, g, or t
  misc_feature (811)..(811): n is a, c, g, or t
gattccccttttcgtaaataaaaacttcctttttttacctattttcccaataactttgataggagggaattatttaatggtaattataaagtccctcaaaatttcaaggtcataaatttgttttaaataaaaatatgtatcaaattttaaagttagggcaaatgtaaaatgttaattttaagctgttaatagtattaaaaacacattttacattttaaaacccaccttagaaatgatggcctgtcccttaataataatatgctattatgtatcattgatttgccactaaattatgttaaaaatagaaatgtttagccatattgttttgaataatattggctgtatcctcatatgtttttcccctccaaacttttttgtatattttgggtatataacaggatatcaataggccaagcagnnnnnnnnnnncagataaacaaacattaaaagtttaaaaataaaatattttaaagttaatttctggnaaagagcatattagtcaggataacttgaataccgaggcactgtaaacaagctccaggagcttcttcaggttggagatatatggtctatgtgatgtgtatttaggcctggaatctacactaacaaaatatctccttttcgctctaaatggtgacagcagaataatatagtaaaaaaattattttaaatattagttctttttcaagtttccctctacaatgtacaaagggccacaggantaggttaggatatgggctttctcatggancatgatcagtttaagnatggcaaaacccacatcctttatatttttnggggctctgttatnggattttgggtttcctgtattaggcgttactttactt

SEQ ID NO: 453435 - DNA, 401 bp, Homo Sapiens
acgatgtacacatccattgtaaattacacggtgctagagtaaaaggagtgtttcattcaactttggatctactcttttaggtatggtgtacaatgaagtaaataatttgagactatgcaccggtaattctttcattccctcccacattatctgacttaccctttgttcaatgactctttttagttataatagctaattaaaccagctcatggtttctagtcagcaaactctttaacagtcaaggaaatagaatccctgtgttttaaatcatcatcaacagatggctctaagctatttctctatactcattcaggatggttttctaatactatattagagtaatgtaataactcactccacagtggggcatacacttaaagtgttgcaagtattagaagaat

SEQ ID NO: 453436 - DNA, 1164 bp, Homo Sapiens
  misc_feature (748)..(748): n is a, c, g, or t
tcattcctctccagcaaaagtgagcttaaataatttctccaaactaaagctctcatgtttttggaagggctgcctttgcaagtgaggtttctgagaaatgactgttgttcccaaaacaagagggagctgggctggaagcaccactattcttctttaggcatcttgttacagagagaggcagggtcttcactgacatattaaatcctgttccctgaaccagcccctccctcttctgctccacttcctcacctgtgcagagtcattttcaggtgttagccttactgatttgcactgatctgtttgttccctgagctttttaaataccctgtgaaaattttctttcctcccttggtcatcatgcatctaattgtggggaaatgtttgtcaaaccaacctgcaaagcagcatggtgtagttgagaagaattaacagagaagactgggtgagctattgtttgtttgcttctttgggcctgggtttcctcatctaatctgcaaaccaagaatgcagactagtcctaccactcccggaagactgacgttgtgccaggtattatgcaaaggcttcatgtaaccctcgacttcacgtaaccctcacacagcaccctgtggagtcagaactgtccttcacttttataggtgaggaaaccagactcagagaggtgaagtggcattcctgaggtcatgcataagaggcagtcaggactgaaacacagtctctaacacttatccgtccccttgatcttgtngctgaagtgatttaattacttgcgtagctctgcgcacaggaagggctgctctgaataagagctcttttccatggacactcagcgctgccggaactgatttggaagaagtcactgccggctctgagggcctagggtatgtgtcttaggatctcctgtgtgcacaaagtgtcactgacagaacacagcaggatggagagcagcctcctcagaagcctcacaagtctttcctcagatgaagacagagcaacgagtcagaagacagatttcaacagcgacttcaccatgcgaccttggacaagttatctcacctcatcagtagaataggaatgatccctacccctcaaaggtgctgatgacactagtgaccaagatactcatgtgggttggactgcccaggacacagcagatgcttagta

SEQ ID NO: 453437 - DNA, 1156 bp, Homo Sapiens
  misc_feature (283)..(283): n is a, c, g, or t
  misc_feature (330)..(330): n is a, c, g, or t
atttgataggtataaagtatactttttcttgcactcttctctaggatttaatgcattgatcattcttaatgaacaatatcagctctaaaggaccaatgcttttataatgttttcaactgtatctgagtcagccagagagataaatatccatgtataaaatagatagaaaactttgcttggtaatttaaaattaataatgccagttttccaagagtgagaaaatcattgcactctatacagttttaagatatacttaaaatattcccatttgtatctatttttntttctactgttttttatttggacacttacataacagtgcagagcaantgctgtgtaacatagggaattcactgtgttttcatttgatgtcgtactggttttaaaccttgtgctctactccttcctgttaatgaattaagaacacattctaacaagggtctgtggcagacattgccgagtgactttcttagtcactcccttactctgctggcggagtttggttatccatttatcctcaaaaggaagtgagataaatcctgattagttttaaccagtgacactccccttctcgttgccagcagttgatttacagtggtcacagggcccaattctagacataaaacaaaggatatacctgacagactacttctggaaaaggttttctcaaaggcccaaggattcaagcaaagggaagtggaatcttgtggtgaacagtaccttgtctggatgtggtgcctggtaaccatctttcagcaatggattatagtttaatcatggcctgagcagaaatactgaaagaccctgagacctggatgatgtctttgagccaccaaaccaagcagccttgtagccactcctcctttggactgtttcttttgtgagagactaaacttatttttaagccagttgatttaaggatgctctattactaataactgaaagacattctaattggtacagactgaaaccctttataggagttttgccatttcagaagtggactttaggtaagtcatttattttaagctgttgatatagagattattttctgtaattttgacgtaatagtttgacattagaatcaactgaaacataaaagtatgcttcctgactgtctatcgtgactgcaaatcacttggacggaccatgtagc

SEQ ID NO: 453438 - DNA, 283 bp, Homo Sapiens
taacggtatcttttttctagcccaagcctctgtatatctcattcccccagtttgcctttgtgaaaaatatgacacatacctttagtctcaactctttctcaggtttccctaagaaaatcctatcacggaactcatctcatagtgaagttttacatttttgatgacattccctccacttatctatgtttccaaagggaagaactgtgttgtgctcatcatcgtgttctcagctcctagtacagtgctttcaataaattttttgaatacctctaataaaatgaat

SEQ ID NO: 453439 - DNA, 796 bp, Homo Sapiens
  misc_feature (223)..(223): n is a, c, g, or t
  misc_feature (227)..(227): n is a, c, g, or t
tcttttggaagtactgtatatcctcacatggaagccaaattgttaaattatttgaaggacacaccactgtacagaaagtagtgtttcaaatataaatcgaagaacaaagagtgctccaaaaaataggtcattcttttattttcataaagtatctaaactgtactaacattcagtgttgtgtttcattctaaatttgcagctgaaataaatttatttgcgatangganaatatcttattattcatcctcagaaataaaggatttgaagggatagagattatatgataaatttatagaagactttcagaatttgaatgcattttgtttagtgttatgaaatgacaataggaaaaaagtctcgacttcaattaaaagttacacaaacaaacaaatctacaggcctgtctttatataccatcaggtctaagttttcaaagaaaattgtagatataacttgcagataactcattacagtcataatctctgcccatgtgtattgagagggggcagtttgcacgaaaaagaattattggcccatttaataattcagctttaaatagactttgtcatatgcatgaatcatcagagatgaaactgtttgagagactcatgtgaccttacgaaaattacaacagcagtcttaaagtatgaaaaagatgcatcacagcagagacattatggcccagttgatatcaaatgtaaaatgtaaatgcatgtaaatgcacacttcattttatgtattatttagtaatttgcagtggtatgtgtttaatatttttgctacctacacattaggc

SEQ ID NO: 453440 - DNA, 771 bp, Homo Sapiens
  misc_feature (515)..(523): n is a, c, g, or t
agttgcattccaaaatgcaaagccctagggattaagagactggtatctgctaaaatataaagtgcaaacagagcgtgattatccaagaattgaaatcttaaggcgaacttatagcatgtgtatttagaacatctttgcaagttatattttagcatatacatatatctgcaacagcatataagaaaaaatcaagatacacaagtgcttttgaagctatttctaaaatgcttttctgtattgtgactattttctttaaaagctactatacagtgcaaaccatatgtgctacacaataactatacaataacattacaaatgactttaatataaagtttttaaataaaaaataacataaccacagctatgaatactgctggtaaaataaattaatttttttgaaaatggcaccaataatacactttactaatggactgtaatgaaattacaccttaagtcttcaactcagccataatgaattatctcctgattgcccagatgtaattcaaacagcttannnnnnnnnctggactggttagaacaacatactaaacactgataccaaaggtgactgatgtttagttagttcatttgacatgttctgctgcatgtgatgagcaataaaacttcttgtgagttataaagtttgaaaggttgttgaactggatatcacatagccggcaatatttcccactggttggagcctggctggaaccattcacaccttttgctatactagacaactgttcctctgctgagggaattcctggtgag

SEQ ID NO: 453441 - DNA, 1265 bp, Homo Sapiens
  misc_feature (1037)..(1037): n is a, c, g, or t
ggacgaggcaaagatttcaagttttgagtaatgactttctgatgagaaactgtcctgtgggggaacaagaagaaatagcagcccaattcaaatcctgcccccgacctcctgcccctaaaacataggcattcctagtcttctgaataatggaagacatagagaaagaatgagatggtcaaaaatatatcttcctaaatttggggcacaactgcactcatcagggatgatttgaactggaggtaagggggatctgtgaaagacaagagaaggcccggagttttagggtgggccatgtggaggctctttcaagggagaactcgggggggttcctgaaaaggaagagaacctcatcccacccagatatcttgcttgatgagtatccagatgtactggagttgagagatagagtagtttttcctctctgcactgggatgtagtggaaaagtgttccttaccaaccagaagtagaaagcatggtgggcggctatggcttcatctgtgatattgaatatcagagggcaaagtgaaaatatctagtcagtcatcaggtttccagacattagggtttttagtctttgtggatccaacttctttctttgaataatgtaaagagatgtttgaattctgcccattaattcagtaaatgatagtcatgattaacttatctaataacaagagtgaggactcaacagtagcaaaccaatgatagtgcaaggactcggaggccctggatccttctttggtggatagtggaagcatacctgacagcctcagcatatggagaagttggtcagttgtatagaagctttggacaagcaacttcatgtctaacatcactttcatacaccctgcatgaggttttttgatattggttcttagtgtctggactagttttacccattccaggtcagagtttaagctagccaaaaggccccagtctagcttatcagaggttatttccagaaagcctcctccctccagggacttctgacatgagaaaactggagaaggtgcagagctggaatggattacccaangtggcttaagcaagataaaggaagaatgccaccttcgactggggactcaaatggactgatctgagttgttgactattgattggctttgggtctcttttgtgggtggttgagattatagtatctctgcaatctgatatactgtacgaatttcctgcatttcttcccaaatgtagccaattatgtgggtggttggccttccaataaaatcctttcacctttaaccattgg

SEQ ID NO: 453442 - DNA, 1230 bp, Homo Sapiens
  misc_feature (189)..(189): n is a, c, g, or t
  misc_feature (1110)..(1187): n is a, c, g, or t
agtagtaatcacgcgggtaatatttggcggtttagtacgcggtatagtggttttgtgtacggaaatagagcgaaaggggtgaggatgggggggaaagcgcgatgcagttgtgttggtggttacgactttcgggcgtggtttagtgaggaataaactggtagataaggagcgcgggtggagatatggatnagtgcgagatataggggggataaagagatagtggaggaagaagagcgctggctgaaaaagggatagggagacacagagggttatcgtccgcatgagatttctattaatgggtagatggataaggtagtgaggataaagagaggttaagtatgaggtaaggtgggctggtaatgtagaatcggatagataatcggtaaagtatacaacggggcatgataggaatgggagaggggggttgtggtgaattatcgtcacctgtttagtgttttgaaaggggggcgagcactgatgagggtggggcgtggtatggtatgcggtaatatggaatgttgtctattacgggtggagtaagggggagaggtgcgcaaaaattgtgaaataccaggagtgtcaagggtgtcgtggagtttgttaatgcaacacccctcgaaggggggagggtaatggttgggtatcagctgcaacggcccggagcacgtagttaagtcttctggaatccagaatggcagttgaggagtccagtctgttgaaagcttcccccagggtgcaatatccatggcgctctttagtacttcctttgtgaacatagatccatttttcttggtggaaatactgagttttggttttgctattcagcatgtccttctttctcttcttggctgcaacatcatagttcaggctgttgaaaagattctccttattgtatacctccttgttgcagtaactgctgaggtcgctcacgaaactgccgctcttctcatccaggaagcgcttccagccgtcggccgtcttcacccagttctgcccgggggaccgccagtcctgcccgaggaatggcatggcaccgcgagcggactagacggatggggagacggggccggcctggtgggctcggggacgtgccacccggggcggatgctnnnnnnnnnnnnnnnnnnnnnnnnnnnnnnnnnnnnnnnnnnnnnnnnnnnnnnnnnnnnnnnnnnnnnnnnnnnnnngaggatctcaagcgttcctcgtgccgaattcgccacccaggcc

SEQ ID NO: 453443 - DNA, 1177 bp, Homo Sapiens
aaaaattttttctcacccttttcatgggatattgagaatattttccccctctctgaggagaccctttcggggtccacaccagggaggattgacaaaaccaaggggagtgttaaacatggattttcagacaccgtttaggttaggaatttccctcctcttgggggaatatattttcccagggggcccttccctgccattggcggaaaagggaataccaattaatttcaaaggtgagaagggattttcatgttggagcaggagagcccagaggacttggatgggttaaagggagtgatagtacgttagtggaaagatgaagaatgggccattcgtcagaactgatgccatcaaggtggaaaaatccacactgggtctggtagagtttgcccattttctctttcctgatagagtacagctgagaccgggacactgggttagaggggctaggtcgggtgttggccactttggaagataagattaggtttgccatcccatgtgagctactactgctgtgtcagtaaagcgaattgaaaaagctcgattttttggccgggcaatcttcgccacaaaagcacctgtgataaaagcctctagcatgaggcctaggagcatttgtatggcaagtaaggcgattgcacttggacagtcaccactggggaacatggtaccataaccaattgtgagttgtgtctccagggagaaggagaatgcagctgtgaaactggtgatatacttgacacagatagtgtggttttcaggtggggcatcatgatctagttccagatcaccattcatctcagccagaacataccagagcactgcaaagacaagccagtggacaacaaaagaagcagaaaagaccaacatcatccaacgccagcgcatgtccattaggattccccaagcatctcgaagatatgcaagacctctttgagcgccatccatttgaagtgtgctgtggccatccttggtgaccatcctccggtatctttgacttaggagaggagcaataactttgcaattactgctgtccatctcaggctgtatttctcagttcttttgctgggtcagcctttatgccaaggtaggtcttaaggaaatttacagagtctgcctttttgatcagataattttaatctacaagtctagtttgtaggttctcttcttggactccgct

SEQ ID NO: 453444 - DNA, 802 bp, Homo Sapiens
  misc_feature (177)..(177): n is a, c, g, or t
  misc_feature (715)..(751): n is a, c, g, or t
agcagagtagccagaggacttgatgggttaatggagtgatagtacgttagtggaaagatgaagaatggacattcgtcagaactgatgccatcaaggtggaaatccaccactggtctggtagagtttgccattttctctttcctgatagagtacagctgagacccggacactggttangagggctaggtcgggtgttggccacttggaagataagattaggtttgccatccatgtgagctactactgctatgtcagtaaagcgaattgaaaaagctcgattttttggccgggcaatcttcgccacaaaagcaccagagcactgcaaagacaagccagtggacaacaaaagaagcagaaaagaccaacatcatccaacgccagcgcatgtccattaggattccccaagcatctcgaagatatgcaagacctctttgagcgccatccatttgaagtgtgctgtggccatccttggtgaccatcctccggtatctttgacttaggagaggagcaataactttgcaattactgctgtccatctcaggctgtatttctcagttcttttgctgggtcagcctttatgccaaggtaggtcttaaggaaatttacagagtctgcctttttgatcagataattttaatctacaagtctagtttgtaggttctcttcttggactcccgctctcgacgaattcgagctcggccgatttggcctgatnnnnnnnnnnnnnnnnnnnnnnnnnnnnnnnnnnnnncgctcgccaccgcgttactccgagtcgccctataggagtcgtatactcggt

SEQ ID NO: 453445 - DNA, 978 bp, Homo Sapiens
ccaaacatagctatcattttattttatttttcatatccacactgaaaaaaatcccattcatctttttcaaaataattgatttgactttggaccaaaagcatataagtttgaaaacatttgcctaagttaggtaaattcaataaatcttatgtaagctcagtactgttaacactgacttcggagttactgagtatactgaaaagcaaccctaaatttaatcaataaagcattttaaaattttttcttattttttacagtaaatttacatgacatcaaatacaatgaaaacttcaagcatactgactcgtgttagaaaaatgagtaaaattaatcttacttattttcagatacctccattctctccctctctaccctagcctctcctctaacaaactgccctatctcagagacccatcataaaaaatgacttggcctgtattagagattttgggggttggggaggtaggaatgatagcttctgcagaaagaacaataagatctgctaaagaattcccccaaaaaagtggtgactgtatagtcagaagggcatgttggatggacattctctgcctttagtcagtagccaccccagagagtgagctggttgggcctgaatatcatctgcagagttaacctccttccccttaatgggcgaggtgtgggggaagagggattaaagtcaacatatgcaccgagaacataaataaaagatatctaaaatgatacttggttcctctatcgttaaagtaaggctccgaaatcccacacataacagcttcttgttagcacctggttcccaaagggactcagaaaaaataaaaacattgcaaacaggaaaagattatttgacagcagatagaacaatttcatcatcacccttacctaggctactccccctcacattttcctgtcatccccaacagcccagaatattctccaatcatctgggaagtgttaagtactcagatctgtggagcc

SEQ ID NO: 453446 - DNA, 819 bp, Homo Sapiens
ccccagattgagtttcccatgaacatgacctcgttctcctgaggagaacccctctttggaaagcatgttcacccaggcatgttgacacaaggaagactcgaagtctggctccctggaggaatgtgcaccatggaggagccgggtgtacttcaggctgggactctgatgcttgtccacactgaccacttgggctcttgatccaccttcgtacccgcttcttaaaaaattggaaggctgagcatttcttgactgggaatccattcatgtctttgtttaccattttccaccgtggggaattcacagttatagatccaggttggcacccgcctggttagctgcatatctgtttccccggtttacctcctgcagacagttaatgaagactgagcgggatggagaatctagcggggctcagttcttcactcgcgcattctgcagcaccagctactgcagcaacctctccccactttcagttgccaccgacagcggcttttctccttccatcattgctccgaaacatatgcatcaccgctgcaggaccctgggggccggacggtgggatacggccaatctccggggagatgctgtggctcttaccgagcgggagaagggtacgcctccccgcccccagctacctggctgctcttccgcggccggcgcggggagcgagtcgctcttctccaggtgatgcgctcctggaggcggcttgagagaggagagttgtttttgattgtgcaagttccagtgggagctgtagttaagcagctgagagaaggagtaagaaagagcagaagccagagggagggagggagaacagcg

SEQ ID NO: 453447 - DNA, 553 bp, Homo Sapiens
  misc_feature (131)..(132): n is a, c, g, or t
  misc_feature (504)..(504): n is a, c, g, or t
  misc_feature (512)..(512): n is a, c, g, or t
  misc_feature (515)..(515): n is a, c, g, or t
  misc_feature (532)..(532): n is a, c, g, or t
ggtggggagagatgttatattcaataatttttagttattttgtaatgcagagtgtttattcatttcacagttctgcaatggatgtagtattttgggattgccctgtccagaaaattttcagctacacaccnntaaaggaaaatgtttctatctcagatgaaacatgtaatttgggatggttcttcctttgtcacttaaaggaagagataggaaaagtctcttacccactttaaacatgagggtaaaggtttaggtcaaacttactggctttgtcattcaagcatatctgaatcctcacttttttctctttgcttttgggggtcagaactgagatattaccaagaaaaggcacaatgccataatattatggtgttatggtattttgacttaaaggggaaaaggtacttaattttggtgggatgttgattgtaccttgttaaaaagactctcattttctcatatgttttctcctaataagatggaatatggagtatactgtaatantataggtnttnattataagctatttggnttaagacctattgcagagttg

SEQ ID NO: 453448 - DNA, 564 bp, Homo Sapiens
  misc_feature (272)..(272): n is a, c, g, or t
ctggtgtgtgtctgcggggctcacaaagggaagccaagacacctttagtcgccgccccaatggccccttgttgcttcgcgcaatacccattggctcgatttgcttgactgcgccttttcgccgcccgactctctgttgaggctctcgttcctcggactctttgcggccccaaggtacccccgcgtatttcggaccactgttccccagagggggttaccgaaagtggttttgttgacttagtattttaagagatgcgttccttcctatatacncagcctgcttaactcctggccctcaggatccccccttccttgccctcccaaagtctggattacagcatcaccactgcttatagtagtagttttaggatctacccattaagtacattatgtgatttccattttacttcttcgcttctgtttttgtctttaaaactaaaaatcttgtgtttttgctgtcatacaaatgctgcaaattcactatgtctaccactgaactcctacttccttcttccctgccaattacttgctcacacacctagtgccctccccttctcaacttgtt

SEQ ID NO: 453449 - DNA, 437 bp, Homo Sapiens
  misc_feature (390)..(390): n is a, c, g, or t
ttttttttctgcttaacccataaaactttatttaaaaaatttaactagatggtacaaaacattcattggtatgcacataattctgtatagttttgttattaaatgctaaatgacagtgataacaatggcttaagctttacagtattcttgtagttccctagtaccacttagtatttaaatattgtcatattagacttcaggattatcatgtaaatgacggtagagggaataagaggaaaagggctttcattgggttatcagttttaaattctggaacaaaagaggaccatacactggcttcacttacaggaatggcatttttctaggggaaatggtgggttttaaaatggttattcctggaatatctggccccagggattatattggttnattactgggctggggacccggtggttggaggggaaggcggtttccac

SEQ ID NO: 453450 - DNA, 487 bp, Homo Sapiens
  misc_feature (447)..(447): n is a, c, g, or t
  misc_feature (462)..(462): n is a, c, g, or t
  misc_feature (476)..(476): n is a, c, g, or t
ttttttttctgcttaacccataaaactttatttaaaaaatttaactagatggtacaaaacattcattggtatgcacataattctgtatagttttgttattaaatgctaaatgacagtgataacaatggcttaagctttacagtattcttgtagttccctagtaccacttagtatttaaatattgtcatattagcttcagattatcatgtaaatgacggtagaggaataagagaaaaggctttcattggttatcagttttaaattctgaacaaaagagaccatacactgctcactacaaggaatgcaattttctaaggaaaatgtagtttaaaatgttattctggaatatctgcccaaggaattatattgttatttactagctaggaaccaggatgttggaggaaaggcagtttcctaccttctggggtgtaggttaacaggccggcngtgtaattcccattntctcttcactatgnggtgggttggg

SEQ ID NO: 453451 - DNA, 1168 bp, Homo Sapiens
tgggcggtgccaggacgcagacattttcttaaactgccgacacctgcgtttggtttatgactgctgcaccctgttagaaggctgcccatcccatgggatacagtgatctctctgagaggccagggatgggtgggaggacagggcgcagcctggccaggccttgggtgaaatgccctctgcctgccctgggctccggaacagacggctgcaggccacctctcactgcgggggtctctgggtggacagagccctcagactttgcttatttaaatccttttgtccatagagccaagtccctcctgcccgcagaggcaactgccctccccttgctgtgcgtcttctagtgtgtgtgcgtgggataggtgcagcactttctgtgtacgccttccgcgtatggaagtggagttctgtttcaagcctcactgacctgccaccggcagaactctcctttagaaccccttcctgttgccaagtgctcatctgggctgttgctttgttttccgggggccacccgcatcccccccgtctccctgctgccacgcacagctagtggctcctggaaacctcggggggaattccttgtgctaaacccagagaagaattgctgggtaacgcctcaacctctgcaccgttttccccctcccggtcttacctggctccccagcagaacaaccctacccctatgccctgtggccctctttttttcccacccttggccttccggtttttctccctaacctttgccccgtttttccccgccccgacaccggcgattttccgcgaatccttggaaccccgcccctttccttcccaactgttcgaatctcaaaaccttttcagaaactttccctcctcccccctgaaaatctaacctgttccccactttctttttgcccccttttttccccatttgaggggcttccctgggcatttatttacaatctatcacattcataacccctcttccgcaacattggtatacactccccccgaccatataaatcccgccctaaccccaagaccttataccctctcgatttcttggattcgattaattggacagtcgcattcacataccctccaccctacccttcataaaccgcaacaacatcccacaattcttgtccccattcttgacgtttacactttccgccctctttcttagtgc

SEQ ID NO: 453452 - DNA, 265 bp, Homo Sapiens
  misc_feature (83)..(144): n is a, c, g, or t
ataactaaagtattctacatatgatgcattcctttttaaaaatttgttttagaggacagaggtttaatcattctttatgaggnnnnnnnnnnnnnnnnnnnnnnnnnnnnnnnnnnnnnnnnnnnnnnnnnnnnnnnnnnnnnnaattgaggtcatgttgaaaccctgtctctactaaaaatatagaaatttagccaggtgtggtggtgcgtgcctatagtcccagctactggggaggctaaggcatgaaaatcacttgaaccca

SEQ ID NO: 453453 - DNA, 462 bp, Homo Sapiens
  misc_feature (279)..(279): n is a, c, g, or t
  misc_feature (437)..(437): n is a, c, g, or t
ggaaaaccagtaacaaatcagccacggcagagaggggtactgggagttgatagaaaatttgtcctcagttgtaggttactcttaaagcagcttagattgcatgttttcttcagggtcattggaaaaggtggttaccgtcagtccaggaagtggggagccagctaattgtatccagatggaggtacagtggacgctttgagggaaggaggccctgaaacgtctctagcaagcaggctttggtaaacagaactgcagatactgatgagtgacagtccactngctatttgtgtcatgtaggcaggccagcctggggcagggttctcagcagtgatgggagggcaggaggacgagactgtaaaggctttgagactgggttcccatcgctggaaaagaaggctctgtgcagctgaatgccttaaggttctctcaacccccanacccagagagagttccattggggat

SEQ ID NO: 453454 - DNA, 764 bp, Homo Sapiens
  misc_feature (609)..(672): n is a, c, g, or t
caattttttgagaaatagtaaaatctggggcagagtgtcttgcagttaattgcatattgtcagagcagcatgagaaatatgatatttggatagggatttcagcaactaaacattctctgttctgagatctctttattcctgaataatgaaagaatagtactttggtgctgacaccaatgaggcacttctcttggtcctagtagaggatgcagtgtactgttaaaccaatatcatcacatctcgagtcttatcaagttttcattctctgtcaatatgacaagctcaaagtgacagaatatgttataggttgaagcacacatatttgcagtttactgaaaagtagatttcttatgtgacttttttcccttctcagcaaagagccctacactagatttctaccatcactaatatttggaagtatttcattactaacaatctcagtacaacatgaaaattgttgcttctcatctaaaatacaattttgtctatcagaataaacacaagtgaaattttcacctacattaacattatgtctttgcagctttaggtttgttagatgtgttcttaagcataatttttagccacaaacccattgttagatagatatcnnnnnnnnnnnnnnnnnnnnnnnnnnnnnnnnnnnnnnnnnnnnnnnnnnnnnnnnnnnnnnnngcataaaatactcagcagggctagttattccgatttcttgcacaattatttagctttttgtaagttcaacatgtaaattttaaagacataaa

SEQ ID NO: 453455 - DNA, 651 bp, Homo Sapiens
ggcaggagcctcccccgacgccacaacggcacaagcagcagctaaagcaccgcactttgctctgctaaccttttacttaaatgaggttttgcccaaatccacatctggaaccgcgtcacaccccatttggcaaggatgtttgttcctttgatgaaactgcatctctactgcacatgagggctttcattgtaggacaagaggagagttcgtttatttttgtaactgttttacatgttccgattagttaatcggtagcttatgtcatttgctatgcctgttgtcttctaatctctccttactaaaacattacttcaaatttgaattgacccttgtttataatttatttaatgggatttgtgtgtcattgtagagcaactctaattcaagaatagtgacaactttaagcaccaaaagtagttcagcaatatttttcatgcttaatttatcataatggcttatgcacagtattcccttcaactccatatacacataaatacaataagtaattacattttatatgtaaacgtcattctttttaaacaaacaagaaaaagcaatgtaatggcatgcccaattttcactccacataaagtctcatatatcaccaaactggtttcctctagtgggttagatgttcatctctgagttccc

SEQ ID NO: 453456 - DNA, 893 bp, Homo Sapiens
gaaagattttatgaaactgagacctggagaaaaaaggagaaaaaatcttcagttattgaaggacatgcaaagcatacagaattcattacaaagcagtagtttgtgttgggattactgactcataaccaggtcagaaattttattcagataatctgtacctcatcaatcagatgatgacaatttacttcccaggtctcatactcacttatgttggaattaattaatagcaggtgttaaaggacccaggcttcattacacaggcttttcatgtatgcaggatgactcaatgttaaagcatttaaatggaaaccaggggagttttaaagcccgagaaaccacacataatcttttgttgagatgagtttgctgtactgacgctgcactttgtaaacagattaccagttttttacttgtgggtgtgattttttaaaatagttctttatatataattaaaattaggtttaaattttcaaaatatgagactatgctataggcagtgcttgcttgaaaagtctcatttttaaatctccctggcatgaggtgcccacttcccctttccaaagcaaccattaaacatactttgtttctactattggtggagtttttctatatttaaaaatacatatatatttcagaggatttttattttgctttttggcatttcagactttgatcagtgttaagtgcacttgtattgctttttaatctgttaattttttaaagaccccagcagtcattttgagttatatctataaaaatttataaaaggatttttgaaagtataaaacaattgtcaagtgaaaataaatgagatttttggaaataaagtgaagattggggagaaaggggattattgttgtggaagcatattaccctttccacagggttcttta

SEQ ID NO: 453457 - DNA, 632 bp, Homo Sapiens
cccctttactactacttcctgttttcccctttactactacaatttaagcctttaaaaaatggcaattttttagatgcttgaggtagtttgggggatccctagctcttaatcgtggcactctgttgagtttgtgaaatggatcttcaaagaggttgtcaataataaacaaatttttgaaaccgagtcagattactaattattgatgaataaaaaatgagtacttttaatctgccaagttaaagctctagaattccttttctccagtaataactcgcagcatcactaccaatggaagggacctaaggaataccgtgtacactgatatacacgaagctgctcctcatttttttgtcagattacaaaagctgggctcatgtagttatggcctatggacctctttttaagttattttagcagaagtagatgatggtctacaccttgctcctcttttatattaactgtccctaagccactctgatgactattctaatcaaaatcagtatagctgtgctcactaagcatatcactgcttattattcaaataccttctgttttctatgtagcaaaacaaaaagttttataaatttcagataagctttctgtttttcttcagtgcaaacatcctgaaaccc

SEQ ID NO: 453458 - DNA, 1050 bp, Homo Sapiens
tgggtagaggggtccggaaggcaggatgggcagggacgagggcctgggcgcagggctgaccttgtgctccgaggcgggccgcttcgaggggctgggggcccggcggagcagagggggccgcatctcgaactccacgccctggaggtggcgggtggacgtggaggaggaggaggctgagggtgaggtggcccctggggccgcagcggctgtaggggagacccctgttccggtggggagtggcggcagaggtggtttgggccagttctgaaacaggctgctgacaggcttggagaggagtgaggactgggagtcgtcggagagtctctgccgctgcagggaggaggtcctctcggggacatagctggctcccccgtggtggctgtctccgcctcccccactgcctcctcgggcccagggcagagcgccgccagctgccgaggagcccccaaactgctgaagcttggagctgagttcactgatgatgctggcttttactgtggccaaggctgaggcctgaggctgggccaagggcccgggcagaggtggtggcggtgggcccgggccctcctcccagggcagcagcttccggggcagagaggaggccgtcggcaagggcaccggtgggacttctggctctacagccaccggaccccccgccacgcctgccgtggggggtcctgaacaagcacgcagggccagcagcccatcggttccagcccctgtcaccgagacggtggggctggtgggggtaacagggtctcggagtcccccgctggggccaggccgcaggcctccgctggctcctagcgcccggccccggagcttagagggagtcatgagctgaggagggtatggcgggccgggagtactgctgcccccaaaggcctggccgtccaggtaggccacataggtgtccagaagctccggcccactggccacaccggccccagccccgcccccacccctgcgctgccaccaccttcggcagatacggctgctcagcgtggaggcgctgctgatcctcgtgccgaattcgccacccaggcctcg

SEQ ID NO: 453459 - DNA, 696 bp, Homo Sapiens
tccacagcccttaatggcctaggacacctccaacaacaattgtttttcggggatccaaaggctgagaaccatccattacaaaatcactatcacttaaattccaaggacgtatttgaactggtttgtccttgatagtagggctagaaacacacagatagagttttccatcttcttcaatacaagcatcaatgagtgcctgaactgagctctcttcttgaaagagaagaaatgcatagccttttggtggaaaataggacttgctttctgctttatgaggccaatctactaccaaaggcccaaatcttctgaagctagcagttatttcatcttcatcaatatctggaggaagaccaccaacaaaaacttttcgagagaagcgttctattcgctctccattttggtgagctgaataacaggtgggtgaatttaaaactccaacttgatcactgtgaccatcatcaagcaagccatcatctattggaaagagggaagaacgaccatttaacatcaacagattgtcagttcctggatgtggatagctcaatcgacccttaagaggatcatgctctgctctcataatatcgataagggaattttccaaagagtgcatattcaaactgtcatacattctacttcgatcctgtaagggtaagcctcgtgccgaattcgacacccagcctcgtacctagccgtaag

SEQ ID NO: 453460 - DNA, 1068 bp, Homo Sapiens
gttatgtttgttcccgggtactgtgccagtcgtgcacttttgttgaggggtccagttccggtgtcctcaaagtcgagtgtccaagttttgccattgggggcattgtgttgttctgtcagtgacttcctggatcatcgtgactcactgtctttttgtgcttcaagccaaggttcacggtgtccggacatgcctccctttccgtggcatcctgtcccaggctcctcaccaccaggacttgtgcgcttactgttccaccgcatccagttcggtactgtccacgcagctgtagttgcccttgtcgctgtagtccaggctgttggatgaccaggcgcccatcctcttatgaagtacttgtcactgtccgccaagctcctggagttctcgaccgtccccacgccaggtgatgctgggctgcaaggaggggtcaaaggaggcctggcacgtgaaggtcaccctggaacctttcttctcgattgtgctgcggggcccctgagtgatctgagttgcatctttaaccttcaggttagccatgatggtaacattgttttggtcattggcagccaggcagaagtagcgtccggtgtcattggcctggaggtctcgaatgcccagggtcccattggcataggggaagaagcgttcgtcctgaagcactgttgtcccatcctcgtccagccactgaacactgggcacaggcgctccgaaggccttgcacagaaggtaggcagtgctgccctggacagccatgtacgtctgattgtccgcagtcaggatcttggctggcagctggacaacgtagatgtaggcattggccagcaagagcccgtgccggttgcgggcctcacattgggtcaccattgtgtcactgggctgcacgttgctcaggatcagggcgccacgctgaatccggtacttctggtctttggccagctcctccacagggatcccgttgattctccaggtgacctctggttggggcctggcctggacttggcagtcaggtagcagtctgtcctgcctcgtgccgattaacacaggctcgatcatgtcgattctgcgcgtctggta

SEQ ID NO: 453461 - DNA, 708 bp, Homo Sapiens
  misc_feature (130)..(130): n is a, c, g, or t
caggggcacggcgtcggccccctcctcgccttcctcttctccacagctctgcatccccgaggaggaggatgtggagagagtaccgctgctcaggccctcgttcggccctctctcctcgaccgtctcgtcntgcggggtggccgcactgtcgtcggagtccttctgcgagccggcgtcggcgctcttgcggacctcgcggctcttcttgtgcttgtgcgccagcttcttcacgtgcccgtcggccttgccgctgctgagccgccgcacggggctggtgagccacttgcgcagggtgttgcccggccgcttggggcccggcgagctctgggccccgatcatgtggggctggagggaagccacggatgcgggtggactggcgtcattgctggagacggagagcgagtctaggtcgaggatgcagtacttgcaggtgcccggctgcccgccgctgcagtaggctgaactgacagaggacagcgagtccagcgtgtccactggcttcaatccgttgggcatggtgactggagccgactggaggtaaaggtgcagaacccctatcctacctctccctccacagcagctagagccacccgcttggcagcaaaagcagcgaccagctaaacagacactcagacacagactggacgcggcagcctcgtgccgattcagcaccaggcctgtacctagccgtttgcttcgcttctcctg

SEQ ID NO: 453462 - DNA, 678 bp, Homo Sapiens
tccgcaaaaacagtctttattgattacacccaatccagtagcaacaatgtcatcagcattatgtcttcgaccactaaccatcagtaagccatccattttcccaaccacgaacaccaaactacccggccctacaaaccgcagcgatcttgatcggatgaatggcacatccccagacaggagagcgctgcagaattcactggaattacgtcgaaatgtatttttgtgtcacaccagcaagcccggagtacatcatgcctgccagttctggagctgaacacagatttctccaatttcatctgttttgcagagctggggaggtccatctggtttcacaatgcacatcgatcccaccaggcattacatgccctacatcctggaccgtcagtgctgaatttttatcttcagtattgacccgtattaccccatagctcaatccattcattgagagaatggctcttcctggcaaaggggctcctggaactccaggcctgcggattgctacagtcatggcttcagcagacgtggcgcacggacagatggcctcaggcttcagtccatgactttggaacagactcaggaaggcatcaccccgatgacacggaccaggggttagctcccctcgtgccgaattcgccacccaggcctcgctaccttatacagcgagattactgccagttc

SEQ ID NO: 453463 - DNA, 958 bp, Homo Sapiens
gtgtaatgttctaaatccaccagtccccaactttgttttcttggggcaacaatttgggggctgaactggaaccttgggtgttgaagagtaatcaacaagccccggcccttcttgaatcaccggaagagggattcccttcgtgccccttctgtaactccgcggctctgcccgcggaaccccttcccgtggccctcgaaactgggtccccgacgacttgcggggtacgcggggcccaaagccagactctactcccgcgcagatgcgggaagactccaggctgtgcttgagctgttttactgggcctgcacgaggaataagcgagcctcagcatgcttgggccagagcgagaagcatcttcatgagccctggggtgccccttcctttactaataacctgtcaagactttaaagaacacatactgagactaaagcccaccaagcctgcctggccacagcgcaggctgcctcggcctctccgacatccacccgcttccagggacctgtacgctttccttgggtgcgaactcgagtccaggaccggcagggttctcgccttaatctgtaccaccgtcccgtaaatctgtcgctcagcccatagccggcctttgatctccaagcggagcagctggacaggtgtcgaactgcacttcccttcccgctctgagccaccgaacaaacttggccatgcccggaaaggattcccgtgctcagggaacctggggcacaggagagggtggataggcgcgaataagcgggctccaaaaagtggtgtggcttggcaatcctattcgttcttggcgggcagaaaattcagtgcgaataatctccaaataccgttgaaggtgcgcgcaattccagacggctctgacctgcctccgccggtctcgattattttatacatttctaccggcctcgtgccggattcagcgcacccaggcctcgtacctagcctaagttgt

SEQ ID NO: 453464 - DNA, 1023 bp, Homo Sapiens
  misc_feature (616)..(702): n is a, c, g, or t
  misc_feature (753)..(848): n is a, c, g, or t
  misc_feature (853)..(972): n is a, c, g, or t
aggcatgggcgaatgccaactggaagccccggtttcttgcaggcgcccaggctgctctgacaggtacagagagacggagacaagcccatctcaccgagagcggcctagctttctgagtttggaccagattgtaagagataagggagaggaaggcttcagatagctatgaagagagctatctgacctccaagtacccttttctttaacaaaaaattagatctggctcttgtcaacattgacctcccacctctccataccccagcgcaaaggcaggtaggtggatcccaaccagcaaacagttttggattagctcatagttgttgtttttttaaaacaaattagttgccaatatttaaaaatcaggagattttgcatgcacctcagattcctgatttctcctgaaaaatcagaagaccagatcacattggacctgccattctgtgtagcaatggaggccagggctgagcaggggccgtcccctgcccacccccatacagcagggccctgccctccctaccccagctcctcctggcagcatgcaccttacctatctacttgatcaataaacagatcacttcaaagcttctcaaagtatccctctttctttttttcgtgnnnnnnnnnnnnnnnnnnnnnnnnnnnnnnnnnnnnnnnnnnnnnnnnnnnnnnnnnnnnnnnnnnnnnnnnnnnnnnnnnnnnnnncccttccttcctgctttttgttgttgctggtgttgttgttgtttccttccnnnnnnnnnnnnnnnnnnnnnnnnnnnnnnnnnnnnnnnnnnnnnnnnnnnnnnnnnnnnnnnnnnnnnnnnnnnnnnnnnnnnnnnnnnnnnnnntattnnnnnnnnnnnnnnnnnnnnnnnnnnnnnnnnnnnnnnnnnnnnnnnnnnnnnnnnnnnnnnnnnnnnnnnnnnnnnnnnnnnnnnnnnnnnnnnnnnnnnnnnnnnnnnnnnnnnnnnnatagcctcgtgccgattcaacacccggcctcgtacctagcctatcatgttt

SEQ ID NO: 453465 - DNA, 1172 bp, Homo Sapiens
ggagcgaggcctgggtggcgaattcggcacgagggggccgcgcgtggcggcggcgatgggcgagggcgggctgcccccggccttccagctgctgctgcgcgcgtgtgaccagggcgacacggagacggcgcggcggctgctggagccgggggcggcggagccagccgagcgcggcgcggagccggaggcgggcgcggagccggcgggggccgatgtggctgggcccggggccgcagcggcgggggcagtcggggctccggtgcccgtggattgctcggacgaggcgggcaacaccgcactgcagttcgccgcggacgggggccacgaaccgctggtgcgcttcctgctgcgccgcggtgcctcggtcaacagccgcaaccactacggctggagcgcgctcatgcacgcggccagatttgggcatgtgagtgtggcacacctcctgttggatcacggggctgatgtcaatgcccaaaaccggctgggggccagtgtggtcactgtggcttctcggggcggtcacctgggtgtggtgaagctgctcctggaagccggtgcctttgtggaccatcaccacccttcaggcgagcaactggggttgggcggcagcagggatgagcccttggacatcacagccctgatggctgccatccagcacgggcacgaggccgtggtgcgtctactgatggagtggggcgcggaccccaaccacgcagcccggaccgtgggctggagcccgctgatgctggccgcactcactgggcggcttggagtggcccagcagctggtggagaagggcgccaaccctgaccacctcagcgtgctggagaagaccgccttcgaggttgcactggactgcaagcacagggaccttgtagactacctggacccgctgaccaccgtcaggcccaaaacagatgaggagaaaaggcgacctgatattttccatgcattgaaaatgggaaacttccagctggtcaaagagattgccgatgaagaccccagccacgtgaacttggtcaatggggacggggcgacgccactgatgctagcagctgttacggggcagctggctctggtgcagctgctggtggagaggcacgcggatgttgaccaagcaggacagcgtgcatggctggacggccctcatgcaggcaacctaccatgggtcc

SEQ ID NO: 453466 - DNA, 920 bp, Homo Sapiens
  misc_feature (45)..(150): n is a, c, g, or t
cgtccccgactacaaggggcaccaacccaacaatggaaccaagannnnnnnnnnnnnnnnnnnnnnnnnnnnnnnnnnnnnnnnnnnnnnnnnnnnnnnnnnnnnnnnnnnnnnnnnnnnnnnnnnnnnnnnnnnnnnnnnnnnnnnnnngaccctctgtaaattcgtaaataggacatcggatccggtcactcacagaaggggtcctgggtgcaggcgatggccagtccccgatggctcctcgcagagtgggcagagggtaaggcaccagcaccagcagggaccccaccagccccgtcatccccgcaatgggctccgccctggcgcaggtggcaggtggcactggtcaggcacacagccacagccctggatctgcccaagcagcccaggcaggaagaataggaggtgcaggacgacgagcggtagggctccaggaagaagaaggagatctcgctgcctcccgtggcacaccagtccgatcccacagcacgagcttagctaccgctgtgcccagggcctgccgatgccgtatagagcgtggcccatggatctctacgtcgcatacttgtgggtcccgcccaggacagagggaagaggcgagcagacccagggcagcatgcagccgccagcgtctccttgctcctgatgagccaacccagcgccccacctcctccatgttctccgtgtcagggccacgggccatccggggccaggacgtgtaggcgctgggcccgcgtccacacggccacatcctcagcccctggtccacctggccctccaggcagcattgggtagatgaagccacggtagagccagggatacatctgtctctgcgctgggtgttagggtgatggtcgtgctgcggacaattgagcctcgtgccgattcaacacccaggcctcgtacctaggcggcttaag

SEQ ID NO: 453467 - DNA, 764 bp, Homo Sapiens
ttccgctgaatgttccaccacatgggttccccaggccagagtccctggagaaggcaattcttcggagcagcgcaataaccgttctttctgggaggtgtccaggcaggtgttgaagaatgtcacgcgggtgtatttcactggcaggactgggagcagatctgccaaagagcacttctatgagtgaggaggctgggccagaatgatacttctttagagcaatcagggcttttttcagtcgcctgtaagtgacatcattggcaagttttaacagtctgtaggaattctctcggtccaagctcaactggaaatcgtgggactcatcaaaggccaccgtgaccgacttctgggtgacccgggtcaagatcccagtggccagctgactgccctcattagcagcatcgtacaggcccacgatatcaccagaagtaaagctgttactgggaagagctgccgcggacccgtatcgcctgggctcaaaggtgaccagcagccgtccgtacagcccagtgcgctggctggatacctgcagcttcagcaaacacacgcctcggctctggagctctttcagagagatgttctcctgccaggacctgcgctcctccacctccgcgtctctctcaagctccagcaggtccagttgcttggtcacgaagctctccacagctgccgaggccatcgccgccgccggcctgggcccctagaagccgacgtcccgcttctgcgcctcgtgccgattaaccacccagcctcgtacctagccgtaa

SEQ ID NO: 453468 - DNA, 725 bp, Homo Sapiens
  misc_feature (630)..(647): n is a, c, g, or t
gtgcagttcaggttcttagtgggacgcacttggccatgaggctgctgcctggttcctggacattccatggccagccttcctgccagcagggtcacgttcctcagtcctttgagtatcttgtgctgctccccacacccttctgatgctctatgaagcttctgtttgccttgtttgccatttcagattctggaaggccctggtggtgtcccgtggtccatcatgttctgtcatgcttctatgctctgatgattgcttgctgcccttgggtccaggtgttcagttctggctgaattaatatggcctagaatgcggggtggcaaatcacatggtacgcaacagggccacaacccatgggctgcaggtagggcaggcgctgtgccagttctaggaccaatatcaagcacatggaatgcactaccactcaaatacatgcccgctgccattgggtagggactaattcttggaaatgcaagaattggggtgacacagctaatggacacagctcatcgtaataagcagccaaatatggttaatccattactttcttttgaaaattttcacaagtattccaaaactctaatagaagccatggaggatttttttcaaatggtaggataagaacatatttcnnnnnnnnnnnnnnnnnnccatgccaggcagttaatacgctgacagtagtaccctcgtgccgattcagcactaggcctcgtactagccgtagtttt

SEQ ID NO: 453469 - DNA, 728 bp, Homo Sapiens
  misc_feature (652)..(652): n is a, c, g, or t
  misc_feature (709)..(709): n is a, c, g, or t
tagagggggctcctgcactggagccagagaggttgggcgggcagcacgggcacagggcccgtgctgtggaagacagcaggccgcagcgctggagcgggactgctcagcacagtcatcgcccccataaccctgacagcacctccactccatggtcggtcacatgtcttgtaggccacacggtagcgagggcggaggaagtcggcaggtacatgatgctttggggacactggggctggccccaggcacaaggctggtacttgacatatgtctccactccatcctcaaggacacagctcactgtccgggtcaccacgtaggcacaccagttcctgtggcggctggctggccggggggcaatctgggcctggggccccccggggctgagggccccactggaacctgtgtagaggctgaaacctcgaggagggtagctggcggcccctgcagctgccgtcagcaggcagcagaggtagcagctccagagggtgcgggggccatggcggggcgctccacagtggccctcagagactcatcccgcccagccactggcgcctctgccggcccacggggatgctgctgctccacaggacagcccgagcccggcccgtccgtcccagtttccttctgatagcccccggccacacgtcttctnccttggctgcctggcctgaccctcgtgccgaattcgccacccaggcctcgctacctntaaccctgggagtactgcc

SEQ ID NO: 453470 - DNA, 774 bp, Homo Sapiens
gaacggggcccctagaaacagtttgggctcccggaaagcccccagggcccgaacaggggcacctttaggcaccgaccaggaggcccttagtaaggatggtgaccctccagcatccccaggtcacacacctcccacaggacaggccatgggcctgttgccctccccgaaagggcataatgtgccctagactagcacaggactggcacaagaaggctttggcctccaacgtgcgcgcgctggcttggcaggcccatcatctgaaatatttgctttctgccgggccccggctcggcctgccacaccccctatgcaggccctgctggtgacaaacatggtgaagaatcgaagccgtagctcctggcagtgtctctgcggagacagacatgctccccagtagggctgagcagcagagaacacgacacggctctgaggctaaagctggcgcccttcaggagctcagagagaagctgccccaggccacgggcatggataggcatcccgggggtagggcagtcactccagccgctcttcatgatgacctcccgggcactcagaagcgccccttccccgccggttctagccacaggatggacagaccttccctccctctctcctgcgggccacatgcagggagaggccagccagctggggttcgtttctggacgtttgggagaagggtcgtcccttcggtcactagcagagaaatcgtacaggcgtgagaaccctcgtgccgaattcaaacccagcctcgtacctagccatattcggctctct

SEQ ID NO: 453471 - DNA, 790 bp, Homo Sapiens
tcgggatgccaagaggggttcccttgagagttgccactcgggagacaggtccagagctggggcctgtgcgtcaaagctcccggctacgccggggcggagcagcgtgctcaaccactctcgaggtgcccctaagtcgagcgcatcccgtgacccgaagccggccagccatggcgccagggtagtcccgaggtggctgcctccgtggcagggtgctgccccgatctttgggctccagtcggcctggtgcagcatccatgcattcctgggaccctggccggctcaggggacgtagaacaggggcaggggcttcctctagtcgctcacggctcagttgccgccggaggagcaggtccagctgttctctagaagagtagcggctggctggctgtgaaaggctgcccgtgcccccgccagcatagatgcgaccgtaagaggcagctggcactgcacggtggcccaaggtggctgcacggcaccaggacagctcaggggcacctcgggtctgtggcaccagtgggtattgcaaccggttcttcaggatgcctttcctctggcgctgggcccggcccagagaagtctcatccccactggtcagggccgggtctggctggttgttgttagctgcatccttgctggtgtccagccccaggcgcctttcagagccccaagtctgcagagcacagggggctgcctcgcactcccccagggctggccagtaggacaggaggtcattgccatccaccctcgtgccgaattcacacccagcctcgtacctagcctagttgcccac

SEQ ID NO: 453472 - DNA, 883 bp, Homo Sapiens
gcagtgtcaacgcgcttataaagaggcagtaatcataacggttataaggtagcgaggctgggtggcgaattcggcacgaggcctcggcctgtggatgccccctccctgtctggaccccggccccacctccggaagtcaattgaagccttgtgcaaatgccctaggggtgtgctgttgggaggcagccccctgtgatgcggaacaccaggctcagattcatcagttcgagctgcctgaggccctgccaccccggggaccatgtttaacggggagccaggtcctgcctcatctggggcctccaggaatgtggtgcggagctccagcattagcggtgaaatctgcggatcccagcaagccgggggcggggctgggaccaccaccgccaagaagcggcggagcagcctgggtgccaagatggtggccatcgtgggcctgactcagtggagcaagagcacactccagcttccgcagcctgaaggggccaccaagaagctgcgcagcaacatccgccggagcacggagacaggcatcgcggtggagatgcggagccgggtcacacgccaggcagccgggagtccaccgatgggagcaccaacagcaacagctccgacggcacgttcatcttccccactacccggctaggggctgaaaagccagttcagcgatttcctggaatgggctgggacccagctcagatttgtggggcgacagacactggcaacaccaacccatgggagattgtgcacattgccatcatggaccggagttggccgctggcggtggagttgattgagctcgggcctgaccccaacaggtccatccctccgccctttcaggtacccgggatggctgtggccagcgcttgccaacttgtccgccggcg

SEQ ID NO: 453473 - DNA, 1189 bp, Homo Sapiens
  misc_feature (1105)..(1146): n is a, c, g, or t
ggacacagatgttcttgtccctggagctcctgagcgccactcgcccattcagaacctggaccctccactgcggccagattcaggcagcgcccctcctccagccccccgttctttttcgggggctcgaatcaaagtgcccaactactcgccatcccggaggcccttggggggtgtctcctttggccccctgccctcccctggaagtccatcttcactgacccaccacatccccacagtgggagacccggacttcccagctccccccagacgttcccgtcgtcccagccctttggctcccaggccgcctccatcacggtgggcctcccctcctctaaaaacctcccctcagctcagggtgccccctcctacctcagtcgtcacagccctcacacctacctcaggggagctggctccccctggcccggccccatctccaccaccccctgaagacctgggcccagacttcgaggacatggaggtggtgtcaggactgagtgctgctgacctggacttcgcggccagcctgctggggactgagcccttccaggaagagattgtagccgctggggccatggggagcagccacgggggcccggggaacagctccgaggaggagtccagccccacctcccgctacatccacttccctgcgactgtggtgtccgcccctggtctggcccccagcgctacccctgaagccccccgcattgaacagctggacggggtggacgacggcactgacagtgaggctgaggcggtggcacacgactcggggccagggcacgtcctccttcggggccaagagtagccccggcgggggtctcttggggttggagggcaaacggtcccccctcttgaagcacctgccctgcaagagtggcggatcggggaatgaccaaactcccccgtttgccgaatggccgcccccccgtccattaaacaaccacggggcccccggcttacctccggcgtcgcagggacgcgggagcgttccggtgggggctttcgtagagcgaaaagcgaacgatgcggggggtacaccccgtgtacaccgatttcctccccatccccgttcatatgccccgcggtgcacgcgatcggtatnnnnnnnnnnnnnnnnnnnnnnnnnnnnnnnnnnnnnnnnnnaagcagggcgcaagccgccgcgccccgatcctaacgcctagaa

SEQ ID NO: 453474 - DNA, 678 bp, Homo Sapiens
  misc_feature (190)..(198): n is a, c, g, or t
agcagtataataaggacataatagtccaactgaaaaatggttgaaagagtgaaagaaatattttgccacgtaatatatacaatggaccgatagatatataagaaagtgctcaatatcacctaccaaaggcaactgcaaatgaaaacaatgatgagctatcactcgaaatctgttaggattgctaatattnnnnnnnnntagagaagtaacatctgtcattcatgttcctgtgatttctgaaacaaatcttaatatcaccactcctcgttacacatttcagacatgatgggaaaagaaacgttaaatgatctaacatgcagttcctctaaaatacctcagaaatattcttatactcccccaaaacaatggaagagcaggcatatcatgcagcaccttataagccataaagaggactttagctctcacggtaccctctaaggaaaatcactaaataggaagtaggatccttaaagaatttaagggtatgggacaaaagatgctcctatttgggagctagagaaataaatggctttttaggaaacctttccatggaagcagagcattctataccacattttaaggtctgaaattctttctgaccttcgtatccctcgtctctgttatctgcttcattcatgcttacctacctgagacctcgtgccgattaacccccggcca

SEQ ID NO: 453475 - DNA, 200 bp, Homo Sapiens
gagtttggtgtataattttaaagctcccccataggattccaatgtgcggccaggactgagaactacagccctcgcatctcctgctgctcctcctcccccaccagagatgagctccaaggacacaaaaccaggtgcccccccatgccaagcatgggtcctcctcgtgccgaattcaacacccaggcctcgtacctagccta

SEQ ID NO: 453476 - DNA, 889 bp, Homo Sapiens
gttgtaaacacttccatctcctccaggaaaaggctgtcatttagaaaaccacttattctattctggccaaaaacttcaagatgattcccttctctgatcccagaaaaaccacagtggattctgatatggcccagcagctgtgtccactgcaattttggtaaggcggtatctgaccattgttctcaggaaccatggcctgttgaagatggagggcactgcctcatccatgagcgggtgcgtcttgatgaagttcagggtatcatcagggaactcattggaggttgcatatctttctaaggaggatgagccagcacagcaacctggcctgggctttaggaactcgttcatccaggaatcttggtgtcacaggtggaatcaggagacttctgttccttgaatctcccagtataaacactggcaatgtcaagcatgtcaaataggcacagactgcagacccagggatgctgttataaggtgtagaaaacgttgccaggacatacatcacgcccgttgatacgaatcacatctgtaactgcctggagaatgttgaaataaaaattgagagtcatccaggaactgagcagttcaagcgcgcctgtcaggaacgacgtccactgtttctccaggactctttgagatcctcccatatcattcttacaaacctgagccactcttgggaaaactacctttcccatggtgttatactccactgctatttccctgaagaagaagtagatataatctccgtaatccacggcttgaacaaagtatggttctttcaaccattttgaatcgtgcttgacggtccgcagggtagggctttctccaagactacgggtaaaggactgcctcgtgccgatttcaactccagcctcgctacctagccgtt

SEQ ID NO: 453477 - DNA, 849 bp, Homo Sapiens
cacgggttcacgagttccctgtggctttcgaagagtgcttctctaatcccttgatccgccgggaatttaaacttttcacaccttcggggatccagagtcccttatacaccggtccgaacgcaccggagcccagcactttgatcttttggaaattcaagtttcccttcaagatcctcaagagagcttgttgggagcttctccacctgggtgtaagaggctccacaagctccctctcctgcagcagcctccgcagcgtgcgcttccgaacgatgtggcggccttcgcatgaagaggccgatccccagggccaccaccagcagcaagaggagggcccccaccatcccagtggcgatggacgggatcttaggcccattcgttggacagccttcaagacctggccctgtgcatccgtaggtgcagtttggatggcacaggtggcaacacatggccggcgtctgcgtacttccagaccagggtgttgttttctcccatgactcctgccgggcaggtcttgacgcagtgggggccgtcaatgtagtgggcacactggatacagttgtctggtccccgtcctgtgcaggtgatgttcatggcctgaggcaggcactctgggtggcactgtatgcactcagagttctccacaaactcccttggctcaccctccagaaggttgcacttgtccacgcattccctgcctcggctgacattccggcaagagacgcagtccttgggctccgggccccagcagccctcgggggagcacaaggcatggcagacctggcctgtgccttgcagctgttttaccctcgtgccgattcacacccagcctcgtacctagcctactttttg

SEQ ID NO: 453478 - DNA, 964 bp, Homo Sapiens
  misc_feature (911)..(911): n is a, c, g, or t
ccgggcccaccaggagcccgtttggaagggacatcccaggccacactggtgagaggcctcaatgcgttaacaccggggggctcttcgacgaaacccaaggcggccctgggaccacctttgcccgggggaatggtcccggaggaggtaaggcagaagcagacaaactcccggcgccaggtctgctctgtcaacttgactcccaacgaagcaccctttttagagtcatcccccagaggtcccaccgggcacctttaataagttaaaatcacttaaggagataattatgtatggagtaaattcaggaatctacaagttttgcattcaaaactttctgggaatagttttggcttctggctgtgccaagggggagatttccagcagtctgcaccatgcctccttctttggctcagagcccatgagccttgatccctaccagtgtccctcacccaaaggcctggacaagaactgaacaaggacccactgggctgtgggcataggcactcttcacagggattacatgaaactgcatttcctcccatctcctcttctaggggaggaatatccactctagctcatgccctggagcctcctcacacctcctcccttggaggatcacctgggcatggaccttcctgttttctgatcctgcccttagggaaataccaaggccttattctcacatggaaaagtcaaaaactgtaattgccacagggaattaaaggccattctaagaaaaaaatacaactttatctttggggtagatgagtgataaaatcttctgtcttttgggctgatgttctgggacatctgggacatctggggtttcttctgcccctgtgtcaagaagcccaggagaagaataagcaagactgaagacctctgcatgccaactggctatgactctttcaatngatctccacaagcctcggccgattcaccacccaggcctcgtacctagcctgat

SEQ ID NO: 453479 - DNA, 1264 bp, Homo Sapiens
agcggggtgaatctcggcgcagtaaggagactgtagtaggaggaggcgcccagggagcgtgcatacaggggacccaccagctcctcgtcgcagccgtctagggtttcctggggccattactctggggatgaagaggacgcatactcggctgagccactgccggagctttgctacaaggccgatgtccaggccttcagccgggccttccaacccagtgtctccctgaccgtggctgcgctgggtctggccggcaatggcctggtcctggccacccacctggcagcccgacgcgcagcgcgctcgcccacctctgcccacctgctccagctggccctggccgacctcttgctggccctgactctgcccttcgcggcagcaggggctcttcagggctggagtctgggaagtgccacctgccgcaccatctctggcctctactcggcctccttccacgccggcttcctcttcctggcctgtatcagcgccgaccgctacgtggccatcgcgcgagcgctcccagccgggccgcggccctccactcccggccgcgcacacttggtctccgtcatcgtgtggctgctgtcactgctcctggcgctgcctgcgctgctcttcagccaggatgggcagcgggaaggccaacgacgctgtcgcctcatcttccccgagggcctcacgcagacggtgaagggggcgagcgccgtggcgcaggtggcctgggcttcgcgctgccgctgggcgtcatggtagcctgctacgcgcttctggggcctcacgctgctggccgccagggggcccgagcgccggcgtgcgctgcgcgtcgtggtggctctggtggcggccttcgtggtgctgcagctgccctacagcctcgccctgctgctggatactgccgatctactggctgcgcgcgagcggagctgccctgccagcaaacgcaaggatgtcgcactgctggtgaccagcggcttggccctcgcccgctgtggcctcaatcccgttctctacgccttcctgggcctgcgcttccgccaggacctgcggaggctgctacggggtgggagctgcccctcagggcctcaaccccgccgcggctgcccccgccggccccgcctttcttcctgctcagctcccacggagacccacagtctctcctgggacaactagggctgcgaatctagaggagggggcaggctgagggtcgtgggaaaggggagtaggtgggggaacactgagatacagccagggacctaaagggaggccc

SEQ ID NO: 453480 - DNA, 737 bp, Homo Sapiens
agtttttgggattaccagggcgtgagtccacccgcgcccaggctcagggcttttattttggtcacgttgtttaaccaatgatttggtaggagaagcctccggatccaagtacaaagactatatcaccaaatagctcctaaattacaatgaggatcagaagcctggaaggatggtggtggaggtgagtggggatcagaatggatacatctttcctctctctagcggccagtttggtgagggcaagggactcgtgccatcctccctcttcccatttcacagatgggaaacagccagagctgagctgtcactggctccgtctaaagcctccaatgaaggaaggaaatgtctctcttcaagaaggtcatcagaggacattgaggtccccttcacgctggagaagcaggtggagggaacatgtgaatgccacaaggccagcgtggctcaccccacatggaggagagtgactccttccatgtgcaggggctgccaggcctttggggtttcatgagatgccttcctacatgcagaggcagatgctcacctccgaccaggagtgaacccctgatttctcccagcgcggtctctggctggaggaccatgcatgcgctccacgggggcaggggccgcacacatgtgctcatcatccagtgcactggccatggcacacaccgagagtttatccctcgtgccgaattcgccacccaggcctcgctacctgaaacccctagagttactgg

SEQ ID NO: 453481 - DNA, 1228 bp, Homo Sapiens
tccagtaactatccccggttttaggtagcgaggcctgggtggcggcccggctgacgctgccccggacttccctgcgggcgggccgccgcccgcggccgctgcagccgccaccgcctatggtcctgacgccaggcctgggcagagccccgggcggctggaggcgcttggcggccgtcttggccggcggaaaggctcaggacccaagaaggagcggagacgcactgagagcattaacagcgcattcgcggagttgcgcgagtgcatccccaacgtgccggccgacaccaagctctccaagatcaagactctgcgcctagccaccagctacatcgcctacctgatggacgtgctggccaaggatgcacagtctggcgatcccgaggccttcaaggctgaactcaagaaggcggatggcggccgtgagagcaagcggaaaagggagctgcagcagcacgaaggttttcctcctgccctgggcccagtcgagaagaggattaaaggacgcaccggctggccgcagcaagtctgggcgctggagttaaaccagtgagccgaggcccgcgccgaggacctggccaggccagccactcctgaagccccgggaggagaggaaggcagcggcgaacgccaggctctgggctccggcgactggtgctacgcatcccgcggagcttctgctgagcgccggcaggtcgtcggctgcaaccacacacttggatcgcacgtgcaatgtcctttgattttttttactacattagagaacgagaatattttttccacccccagcccaaccgagggcgggccttggcggcaacttgcaagaaggaggggactgtcgaacccagggctcaaagacgcactcttccaccctttgggggcgaattagaacctcagccctatctccatatcctatctggctctttctctctgtccctccatatgatccggccgacgccgtcttctctcattaatgcataggatcattcttttctgctgagaaagagaccagacgccggaagatgaagggtgcccttggttctcgatcccgggggtatttattttcttttgcgctgccctctgtttgtcccggacctttctctttccggtccctttccccttcccttggtctttaaaacctccggttgaggttgtttcccccgcgcggcgggtggtccgccccctttcgtgtggtcccccctcccgtgtttattgtcaaccctggcggggc

SEQ ID NO: 453482 - DNA, 995 bp, Homo Sapiens
ggatcgtccctcccgagcccggcctgcttcgcctgcctctgtctcgcgggcttcagatggttgtcctggccagtcctcgcccggcctcggctcactggtttaacttccagcgcccagacttgctgcggccagccggtgcgtcccttgaatcctcttctcgactgggcccagggcaggaggaaaaccttcgtgctgctgcagctccctgttttccgcttgctctcacggccgccatccgccttcttgagttcagccttgaaggcctcgggatcgccagactgtgcatccttggccagcacgtccatcaggtaggcgatgtagctggtggctaggcgcagagtcttgatcttggagagcttggtgtcggccggcacgttggggatgcactcgcgcaactccgcgaatgcgctgttaatgctctcagtgcgtctccgctccttcttgggtcctgagcctttccgccggccaagacggccgccaagcgcctccagccgcccggggctctgcccaggcctggcgtcaggaccataggcggtggcggctgcagcggccgcgggcggcggcccgcccgcagggaagtccggggcagcgtcagccgggctcagcagccagctctggaagtagggcctttcctgatgacagcgcgaggccggaccgaagaggaagggttcgtggagcatggggtgcgcagggtgcgggtggtgatggtggtgatggtgtgcgtagctgcccacgaggttcatgttggagcggctactggcctgcgccgccagccctattaacgccgctccatgcgccccagagactgccgggggccacctgtgggctctggagccactactgggcgccggctttgggagagtccgggcaaggctgaaaatgagacgcgcagcccactgtcttcttaccggtttctgccgcgggcgaggtcgccgaagcccaaagacctgcgccacccaggcctcgctaccttagaaccgttagagttactggcc

SEQ ID NO: 453483 - DNA, 1063 bp, Homo Sapiens
  misc_feature (585)..(631): n is a, c, g, or t
taggctaggtgcgaggccgccgggtgactcggcacgagggattgaacgaatcaatctgactggagagatggacacgttcagcaccgtcatctccagcagtattcagctgctggttcaggatctggatgctgcctgtgatcctgccctgactgccatgagcaagatgcagtggcagaacgtggagcacgttggtgaccagagcccctacgtcacctctgtcattctgcacatcaagcagaacgtccccatcatccgtgacaacctggcttccacacgcaagtacttcactcagttctgcgttaaatttgcaaactccttcattcccaaattcatcacccacctcttcaagtgcaagccaattagcatggtgggagcagaacagctgctgctggacacccactcgctgaagatggtcctgctcgatctcccctccatcagctcgcaggtggtgaggaaggcacccgccagctacaccaagatcgttgtcaaaggcatgacccgggctgagatgatcctcaaggtagtgatggcccctcatgaaccgttggtggtgtttgttgacaactacatcaaacttctcacagnnnnnnnnnnnnnnnnnnnnnnnnnnnnnnnnnnnnnnnnnnnnnnncaaaaaaacagatgcccggagattttgagtcagtaagtttggatggggcctggcatacaggttttaaaagtcccataggtagttataacgtttacacctggttaagaaccactgcaacagagagattgctttatggaagggctcctggcccgcatttcatacatgtctatttctctgactctagctaatgtgcgccaccttcccttgagctgtgccacgtggtgaggatctctctgttacgcttcatttaacttgtgtgggtcagccggggtccgccggatcccgcactgggagccggggcggtccttagccattggacccggcctgcatccctcctaattaaaaaaccggcttcggggaaggttagcggtttccccttacggtcgccctggtttgccttttttgacgttgccgttcatgttcttttcagcg

SEQ ID NO: 453484 - DNA, 569 bp, Homo Sapiens
  misc_feature (80)..(160): n is a, c, g, or t
  misc_feature (559)..(559): n is a, c, g, or t
acctatgggacttttaaacctgtatgccaggccccatccaaacttactgactcaaaatctccgggcatctgtttttttgnnnnnnnnnnnnnnnnnnnnnnnnnnnnnnnnnnnnnnnnnnnnnnnnnnnnnnnnnnnnnnnnnnnnnnnnnnnnnnnnntgacagagcgagaccccttctcaaaaagttttcaggatagaggaaatttccttaaaatccataaaacttgtaacagccgtacagtaggaataaggtttggaaatctgcctggaaacctgatttcctcatccccaccttgtttcccaacataaccactgctctgtgcccctgccctctctgccaggctttctccccgatgccgtccagctctgatcctgagtgtcatttcttcatcggcttccaggctgtccttgctagctggtttgactctcacgcatcaagcgtctcaaactttgagaatgcggaggagaaaagaagtgttgcgagaaggagatgcggccttcagttgaggtctattaggaaaagattccaaataagacaagggcggggggcggcagntcgggagagc

SEQ ID NO: 453485 - DNA, 886 bp, Homo Sapiens
cctccttccttcccccttcgcttgtggggtcattggtgcatcccaaccagagggaccgccccaaggggatgcagagggaaatgacccaaagggagaaaagggtcggggcactccccagccaatcaagcagcatgtgtggttgtgagcagggaagccacacccccttgagttttccaagtgggatggtgagtgggaacgatgcattcctgtgtagtcttcagccaattccaagtcaagtagaggcagggaaagcagggtgacaggccgggtgtgcggaaaggagaagcgggtcttctgggtcccctgtggtcagggagaaccccgcttcctcagctcctggacgaaggcttcaatgatttcctctttcactttctgcaattccttcttcacctcttccagaagctcctgtttcaccctctgtaggtccgagtaatcactggagctgggcgtgcagggttgggtctcggaagtggtcaccgaagaagacgacttcatccttggcaaggttgtgctgttcttctcccagggtctccgcacagattcactctgggccgggactctggcctctggctcctcctgattggcagattcatccttgggggttttctccccaacttgcgtggctttccttctccgggccagcatggcgttcatctcttccatgagtcccccacctccgcttcgaccactctcagctttgggggctgtgggcccaccctgaggcctcctcctgcttgctgactttcctgagtttggctccagcaatagctgcggccaggcctggggccccagctcccccaccaccagggcctgtgctgccgggagaggcctcgtgccgaattcacaacccagcactcgctacctagcacgatgtttgctcgccaca

SEQ ID NO: 453486 - DNA, 1068 bp, Homo Sapiens
agccgccgtagtcgcacctgtgccggggggcataatctttctcgcggagatgacacacaccgtggagcccaaagggggtctcccccgggatggaaacacaaaccccgggtgcaaaacccgggttccccgcccacaacatgtgagtgagacaaacttgccagaaccccctcgccctttgggttaaagaaaacttcgtagaaatctggccggccccaaagacccgccctctggaacccacatcctggaatcgaagcattcttccaacgcccatgtccagactctgtgaccaggactcataggaaaccttggaaagcatcctgagggatcccaccagcaccttgaagaagcccacgccacatatgctgcacgtgcccaggggctccccaccatctcccaggaatctcccaagacaaagatgatccatcgcagcctctggccttcttccatgccagaccacctgtgggatccaccagcacccaacagagatcacattccacatgtcaaggggctccctgccctctctagggatctcccaagatgaagactgtccctcgtagccactggccttacttccatggccacaacacattcaggagggatccaacagcctccgaaagagcccacactccatgtgtcccgggacttctgccatctcccaggatcgcatgagacgacaatcatcccttgctgatgtaagcctgctttttatcaccaacaccaccggggaggtgcagagaaaacatggacgtgcatcagaaaggcaggcatgtgcacaggttccaagggccatgtcatccagctccctgccatacatactgctgtctgcctgtctctggcctcacattcaggagggtttcaacagcctgtgaaggagtccacaccatgtgtttgccaggggcttcctgccatctccaagaatcagacaagatgacaatcattcctcatgatacaagcctgcctttcatgccgacaccaccatcctaaggaatccacctagcacctgaaggagcccatgccacacatatccagcctcgtgccgaattcaccacccggcctcgtactagccta

SEQ ID NO: 453487 - DNA, 557 bp, Homo Sapiens
gcccagggtcccaaggcttttgtgagtatcattgtaggtattgaagcaacgatgttgagaaggatgctgaacatgctctttagtgggatgacgtactctgaaggctcctgacccccagatgagcatccttgtgtctgttaacttctgtgtttatgaacaggtgaggccagagacaggcagacagcagatgtattgcagggagctggatgacatggcccttggaacctgtgcacatgcctgcctttctgatgcacgtccatgttttctctgcacctccccggtggtgttggtataaaaagcaggcttacatcagcaagggatgattgtcgtctcatgcgatcctgggagatggcagaagtcccgggacacatgtagtgtgggctctttcggaggctgttggatccctcctgaatgtgttgtggccatggaagtaaggccagtggctacgagggacgtcttcatcttgggagatccctagatagggcgggagccccttgacatgtggaatgtatctctgttggtgccgatgatagcgagggatcctctagacagcccac

SEQ ID NO: 453488 - DNA, 678 bp, Homo Sapiens
tgtccgagcggaacgggccccggagccaagcgtgctcagtgggccaggccaccagcatggagtggcagggctgccacctgtaggggccaagcacatgggctccgggacagccagcagaggggccagagaggccatcagctagagtctgtgtcgaggtccagcactcccgtaagcttcgcacagaggcaaggtcattagcttcgcaataggcttgagcttttccaccaccaagaaaccccagggagagacaggagcaggcagagaggaaagccaggggctgtgtgaggcccccacagggggcagctggtgtggacaggaggccatgcgggaggggacacaggctggccatggaagccccgctgggtgaagctgagggactgttgggggagggcatgggaagcctggcacagatgtcctgggtttgcagccctgctctgcatgcagggccgtgagcaggttccctctctccctgccccaaggcaaggcaggcaggctgaattacaggccacacagctgctctgtgcaggggccctcagggacaggtggctgcctcaaagagaccgacaaactgaacagctgtggaaggagatgcccagaagggtctgaaacaccccaggacccctctcagccaccctagtgtgcctcggccgattcaccacccagcctctacctagccga

SEQ ID NO: 453489 - DNA, 799 bp, Homo Sapiens
  misc_feature (594)..(619): n is a, c, g, or t
taaaggggcactgtttagaggcacctgggtgggaagatgttgtgcccacagattctggatctcctctcgaggtcagaaacccccagtctcaaggtctcacaatcttctctagaagagcagtggcaaaagctttcatgaaggaaggtgaaaggaagagatgagtacagggcctgggagggatttcccaggagtgccattggatcctcagcctcaagagctgcatggctttctgacctgaggcagcctctccatccacccttagggctgctcacgtgctcccctggctcctatgggctctgctgctcaccatggagacagctccgccaatggccatgctgctggaccacagtgctcctgcccccttcccctgcaacaggtgcataagctgaaaaacttgctgtagactggaggggcagcgtactgcaaaggctgcacatggagaaggtgaccaaataccctttagacgctgcttccccagtggaattgctctacttctttagctctagaaaggagggatatgctgagagtactgggaagttggtaggagaggagaggcaaggaagaaggggcagggaagagaaagagtggatcttnnnnnnnnnnnnnnnnnnnnnnnnnncctacctacctgtctatctacagagacttagagacacccacagacagacagaggcacgcatagggaaacagactgagataattagatcatggctgaatcagagatgcagagaagcacatgagagcctcgtgccgaattcgccacccaggcctcgctaccttagttaacgttatggtactg

SEQ ID NO: 453490 - DNA, 797 bp, Homo Sapiens
tctcgttgctgggtatgggagacccagtggctgctctcttggggagagtcctctggccacatctggacgcaagttcacttgcatctgttgtgaggtaatgtaatcatttaagattgtctgtcttgtgttctccattgcgtaaagctgatactgacttgggtaacctggagttggtgaaagctgtctctgaaacaggtaagcagccgctgcaggatcccaagccctgtgaaaaggcatggctggatccaagtgcgtgggcaggtggctccgataaacctcgcctgcagtgctgcctctgtgatggggatcaaacggactgtggctcacgacagggtccaccccaggcactggagacttcgctgggatactttccctctgggtaggggtcagtgtcgatttcctttcatgattggtagacttgttagaagaaattgtaacatcagaagttctgttcatcatgggtgagcctctggacatggtgttttgataactcacaggggtcctccgtgcactggtgtcatcataaatcccagggctcagttgtgctttgggagcttcatgcagtgtggacctaagaacggaggggccagagcttaccactgacgtgtgccgggaacgcacggtctcgcctgctttcacatcctcatattttccccgttctaccacttttatgttctctggcacaatttccagcggaggcattccacgggatagtttgctaggccccgtgattaaggatttgacattgtgtttgatggcagattgactctgagttgttgtcaaactttattggtgtg

SEQ ID NO: 453491 - DNA, 928 bp, Homo Sapiens
  misc_feature (104)..(281): n is a, c, g, or t
aaaaggggatcacattgtcacccgggtaagagcaagggcagtatccagctgcgcaacttttgcttccgggaaccatttcccggccttggcttcgtgaataccgnnnnnnnnnnnnnnnnnnnnnnnnnnnnnnnnnnnnnnnnnnnnnnnnnnnnnnnnnnnnnnnnnnnnnnnnnnnnnnnnnnnnnnnnnnnnnnnnnnnnnnnnnnnnnnnnnnnnnnnnnnnnnnnnnnnnnnnnnnnnnnnnnnnnnnnnnnnnnnnnnnnnnnnnnnnnnnnnnnaatcttatatcttatgtgtgttagcagcttcaaatcctttctgcgatgtagcaagatataaatacaaattactgggaatagccatcttggatatctaccccacaggtccttaaaattcaaaactggtatgtataaaatgcatctcatgtaactttctgtgggccctctattctttccatctgaaatgttgcacagaaccattcagtcctccaggcctagaaagcttggtgcccactctgaactgcttcttcccttcatggtacatatccaactggacacctacaactgtcacctgtagctctgaaacatttcccaactctatctcaccccctatccccactagcatttcttagctctgacttcatgaccttctgcctgggttcaatgtctatgcagttttggtttcctaaaagatacagctgacgttcctcaagacacttcactacacaggctcagtccgcccccacctcaccgccagcaccttgtattggccaccctgactgcccgccgcgcccgggacaccccacacacgttcacactgccaagcttccctctctggcaaagttgtgtacaaatactctctcttctgaggaggtctttagcctcgtgccgaattcgccacccaggcctcgctacctttaccgccg

SEQ ID NO: 453492 - DNA, 905 bp, Homo Sapiens
aaccctcaggctaggtacgaggctcgggtggtgaattcggcacgagggattacttagagaggcacagaggagagagatcggggtgagtcgccatggggactcccaggtcccagcacccgccgcctccccagctgctgttcctaattctgctgagctgtccctggatccagggtctgcccctgaaggaggaggagatattgccagagcctggaagtgagacccccacggtggcctctgaggccctggctgaactgcttcatggggccctgctgaggaggggcccagagatgggctacctgccaggatctgatccggaccccacgctagccacccctccggccggccagactctcgcagtgccctccctgccacgggccactgagccggggacagggcctctgacaacagccgtcacccctaacggggtcaggggggcaggcccccactgcgccagaactgctgaccccgtcccgcagggaacgagcagtcgaagcggaccctgaccgggccctctgtgcctccattggcctgagcaggatcacaggagaaagagcacaggaggacccaaccaatcgacgacccatcggagcaagataggcccgaataagcagtaaaccaagcgacgggcccgaaccggcacgaccgggtgaacattactatggcctgcgctagatcaactggagtaccgcgaaattctcgaaacacgcaatggagcgccttctgtggccccctgcccaccgtgttcactgtggcggatcaggtaacccaaggttcataacacgcgaggtcccccacaatcatacaaagctggtggcaactttagacccacgagcaacggattataaatctggggagaaaaccaaaggcacctcgcgagcttggccagacttaacgcagcgggactc

SEQ ID NO: 453493 - DNA, 789 bp, Homo Sapiens
tctcgggccagtagaagccgaagaactgcatgaccggctcgcacgagtcgcgcacggcctcgcagagccagcgacacgggtagatgggccggtccaggcagacgggcgcgaagagcgagcagaggaagacctgggtgccggcgtggcagttcttgttgagcaggggcacccagctgctggcctgctgcttcacctccgccatggtctcgtgctccagcaggttgggcagcaccatcttcttgtagcccaccgttgtgcacagccgcaggtccgcggggatgtccacgcactgaggtggcttggtgtagaagcgcccgctctggtacgggccgatgtccgactggaagctcacgtagtcgtactcgctgccgacccacggccagaagcgccgcccagcgccagcagctacgcccagggctgccccgcggcggcccccctctcgtgcgcccgatgcccatgccggctctgcgccctgttctccgcgacgtcggggctgcctccgccgcctccccgcgcgcgtcctgccgcaaacttccagggacctccggggacaaaaggcgcagtccccagcgttgcccggctccgcggccgcaagctgctgcccggtccccccggccagtggcggccctcggcctgcggtcggaggcggcgcgggcggggaggcggcgctgcgggctgggtgcgccccggctccacggaggtgcggcgagcaggaaggcgcggggcggcgggcgcgcggcactactcccctcgtgccaattacaccagcctcgacctagcctattttca

SEQ ID NO: 453494 - DNA, 814 bp, Homo Sapiens
  misc_feature (191)..(442): n is a, c, g, or t
  misc_feature (454)..(462): n is a, c, g, or t
ccccttcccggggacccagcacagagtgagtgctcagtgttaaatgaatggaataaatgaacggtgctccagtggtcaggcctgagcaagagaagagggggaaggggtaaagagaacatagcacggggagccctggagggatgagagaatttaagaattgttggaatttgccaggcacggtggctcacacnnnnnnnnnnnnnnnnnnnnnnnnnnnnnnnnnnnnnnnnnnnnnnnnnnnnnnnnnnnnnnnnnnnnnnnnnnnnnnnnnnnnnnnnnnnnnnnnnnnnnnnnnnnnnnnnnnnnnnnnnnnnnnnnnnnnnnnnnnnnnnnnnnnnnnnnnnnnnnnnnnnnnnnnnnnnnnnnnnnnnnnnnnnnnnnnnnnnnnnnnnnnnnnnnnnnnnnnnnnnnnnnnnnnnnnnnnnnnnnnnnnnnnnnnnnntctgtctcaagnnnnnnnnntgttgggagaattctagaatgtggggaggattccagaatgttcagaaagtactagaatattgagaaagtcctagaacctggttgctccagtgtggttcatagactgaccccatcagcatcacccaggaacatatgagaaacacagaatcctggacccactcagacctgctgagtcagaatctgcatttaacacgaaccccgggtgattcgcatgcatttccaagtttgagaagtgctgggctacgaggctgggaaagttctagaatatttaggttagcaagcttcttaaaataggtccaagagagaagagacgcctcgtgccgaattcgccacccagcctcgtacctagccg

SEQ ID NO: 453495 - DNA, 743 bp, Homo Sapiens
catatttgtccaagaagagaaatacaaaagtatctgcaatgttgatgagaacgccaccccacagaggaattcttcctacagacagaagattgatagcaatggctgagccaatgacttcttgcatgtctgagccgatgatagccaactccaccatcagccacaggatgactcgtgggaccttgggatactgacggtgacatacttcagcaagatgcagcccagtaaccactcccagtctagctgcaagccgctggagcagcagccccacaagggtggccaacagaaggatccagagcaacttaaatccagccactgctccagactgcaaatcggattcaatatttcctggatccaggtaggcaatgctcataagaaaacctggtccggtgaaagcccagagtttacgaaagctaaaacaagagtactcctcctcaggaatggagatcttctcattaaagtaagtggcgaagtactcctctgagtccccaggggactgtgaaagagagggattactataggcagggttgatgttaccaagactggcagactccccatgatctccagaaacactgtcatctgacatcttctgttcaggacccagcaccatggtggatacctgagtggctgagttcttagaatatgattttagttcacagtgtggagctgcctccgtcttcagctgcttcttcctcatggtgccctcgtgccgaattcgccacccgagcctcgctacctgagcctat

SEQ ID NO: 453496 - DNA, 805 bp, Homo Sapiens
  misc_feature (783)..(783): n is a, c, g, or t
gctcatttttcctcttgggcgcgttcctgaccaaactgtcggcccttatacctgcccttcaacccctttcccacccaataaagcctcggtttttttctatttgaccccgtatagtcgtatgatattaatccaaccttttctgattctcatgttttcttcagttggatttctacttgacataatttcttctttgaagtccatgtctcatcccaattaatatgacactgtgatgtaccttccagtggagactcttgacattgaaaattttttaagatgatcgaccagttcttcttgaaattctctcacaatcacttctctttctgctttttctttttcatactgaagcacgtttttcttttaaataattatattcattcattaattccttatttctttcttctagaagatcttcctttccattctcaagacagtctctgtggatattaatgactatctctttattatcaccttccttacgagcatcctctagttgtcgttcaagcaagagattttcaagttctcgttgacgtattctctcctctgaagagttctgctttccatggattgactttctttagcttccccatttggatgcatctgcttcatttcctttattcgatgctgcgcttgctttaggtccagctgtacactttctaaagccactgtcttttccctgagagcatctcttgtctcacggagcttaccttttaaggtattgaacttcacccgagctttatggacctgttcagtaagcagtcattctcctcggccgattacatcacngggcctcgtacctagcctgtat

SEQ ID NO: 453497 - DNA, 789 bp, Homo Sapiens
  misc_feature (615)..(693): n is a, c, g, or t
  misc_feature (710)..(724): n is a, c, g, or t
gaaacactggggacttcccccctaggcaaggtcatgtgccggcctggcctgtgaatagtgggcacagggccgcccaggccaaatgaggccctccttgttatgacaccaagtgactacaagggaggcaagacccctccaggcctctcagccgacactgggtcccacaccacacacagtgactgtgccgtgccagtgcaggttctggcccttttccttgaaggcatctggtagacccgatagccccgctttcgggcccgaacatgcacgccgcagcaccagctgccctgaggctgcttggaaccacccaacaccctttcaccctcttctccacggctgtaaccctcggagaggtcacgccactgccttgtctctttgtttctcactaaatatgtcacctggggccgcggcgcccgtgatctcacgccccgtaatcccacgcccctttgggaggcctaggtgggcggatcaccttgaggtcacggagttcgagaccacgcctggcccaacctggtgaaaccccgttctctactataaaaaataccacgaaaattacgctgggcgtggtggcgggcgcctgtagccccacgctacttgggaggcgaggccgggagaatnnnnnnnnnnnnnnnnnnnnnnnnnnnnnnnnnnnnnnnnnnnnnnnnnnnnnnnnnnnnnnnnnnnnnnnnnnnnnnnccgactccatttccacnnnnnnnnnnnnnnnctgagactagttctccctcgtgccgattcaacacccaggcctcgtaccttagccgtaggttttcc

SEQ ID NO: 453498 - DNA, 922 bp, Homo Sapiens
  misc_feature (783)..(783): n is a, c, g, or t
  misc_feature (788)..(788): n is a, c, g, or t
  misc_feature (795)..(795): n is a, c, g, or t
  misc_feature (838)..(838): n is a, c, g, or t
  misc_feature (859)..(859): n is a, c, g, or t
  misc_feature (871)..(871): n is a, c, g, or t
  misc_feature (877)..(877): n is a, c, g, or t
  misc_feature (896)..(896): n is a, c, g, or t
  misc_feature (907)..(907): n is a, c, g, or t
cggctaggtacgaggcctgggtggctgaattcggcacgaggggcttcctgcctgtttggcaaagtcccaggcagaggccaaggatgaggcctgactcggctcctccctccacatcagccagggcatcagaagttgggccagggcggggtcttccctgctcgattttggacgaggcctaagtagaccccctatgccctgccccagccctggctctttcctaaccccctcaacggtgggaggaactggcagagggtgcgcctggccacagcctccccgcatctaaaggccccttcagttcttgaccaaaggtgctacgagaacctgccgtggaaacttccagttgtgcgtctgccccactcgctgtgtttgtccgtgggttcatacatgcattgggtgctaggccccagggttgccgggtggcaccctttacagttcctttgaacaggggcattgaaggcctggactgcctctcgcctcagtaggcctggggaccagtcttgggtctggaggtttgctgtggaagtcaccaggcctcccctcctggcccaggtgtgctgggggcaccgtgcccgcagcccccctgccctcctcagggtggtcagcccaacctgtcggaccttcacttcacatcatggtggggaccgagatagagagggagaccccattccaagctccctcttcctcccggtgtttggggaggatgctgaagaatccattcccgagggcctcccggctttgtcccagcccctcttttgcttctgaccacggaggctttgtcacagnccagnctgcctnaagcaaaggaggctcccgtgtcctgggggagcttctgttttcnctgtgcttgcctggggagctnaggcacccgttncaagtngcaggaggtcaaaagtccncagctttaggncagggacctcgggaa

SEQ ID NO: 453499 - DNA, 702 bp, Homo Sapiens
tcgtacctcaggggcgtccgcagctgctccaggccactggagatcgtcggacgaggccagctgcagcgagacatagaggatgacctgggggtcactgggcgccagctgctgagccctctccagcgtctgcagtgccttccggtgcaattcatcttgcttggacttcagggtggcgtcggtggcctgcaggctataggtgagacccagagccaggtagcccttggggaggaactccccggcttcctctccgaggctgatcaccatcatggcaaagtgctctgcttcctctagccagcgaagggacccgatgcagaccttcgcggccatcaggggcacggtggggtccgagggccgcaacttcacacactcccgcagcagggacacagcgtaggctgacttcccacaagccaccatggagagggccacctggtaccaaaggtgaaattctccaaacgcaaacttcatggctcgctccaggcactccgagagcatgacgtactgtccccttctgcccaacgtgatgctcaggaggtcatagatggctgcggcattctgcaagctcactgtccggtcctcctcctgctccggcacccggctcagcaccacatctcgagttgccatggattcgctgatgaggaggagcaggagggcttcctccctcgtgccgaattaaccacccggcctcgtacctagcctatcgtt

SEQ ID NO: 453500 - DNA, 1086 bp, Homo Sapiens
ccctcttgatgcaagtgtcgaagaaggtcaggtgggggaggagagggatgcctgcaacacagaaaacagggtcacccccaacggacccaaatgtcgctgcctgctagtcctccccacccggctcccatccacagacccgatgtgctcctgcgtcccagcaccaagaggaacaacaggctagctctcagcacctgctgaggccagggaggaaggccaggcctgggggaaagccagggcgttctcccgtcctccacaggagataaggagcgttaacacctgtaacaggtgaagccggcaagatggaaacagcctcacacacctccctgtccttgtctaggatattcttgcacgcagatcaactggggtcgaggtgggacagtaaggaagtaactctttaggggtctgagagcagaagcgagggcctgagttggaacttgagtctgctgtctgctgggtacctgagatggagccgaagaagtctcgaagcttcatgtacttggccgtgtaatcgccggcttctgtcagcacagcatcatagtcatagctggtgacatctgacttgtagtcatggaagtgcatggctccattcatgaagccaaagttggtgcctccgtggaacatgtagaggttgatggaggagccggcgtccacaatggcagacacggttttcaaaacctcagaagaatccaagatattgtgagggcctccccacgagtcaaaccaccccgtccagtactccatcaccatcttgggctgagtcccctggacgttgaagagaaaggtggtcagtagctgcagctcgtgtgttgactgcaagttgatggtggccaagactccctggacaatccccttgctcagcccatccttgttgtctgaagtcaggagcagttccacaatgccacggtcctccagtgccttcttgacgtagggcatgtatgcggggtctttattataggaaccatattcattctccacctgcacggcaatgataggtcccccacgcttgtactggagtggcaccacctgacatcaggtgtccctcgtgccgattacacccccagcctcgtacctagcctagtttcatcg

SEQ ID NO: 453501 - DNA, 633 bp, Homo Sapiens
cgccgggccctgcaggagggccaggtgagagagttgcagacggggaaaccccacggcacgcaggctctgagtctgttttatgaaacgcgaattcttggttggtgaggctgactcatttgaagttgcgaggcagtggacttgaacttctcagacgatttccccaactgaagtagtgacagaccttctagctctgtggcccggcctttaagaggttgtctgggctatgccagcgagccaggcaccttgagctccatccaaaccgttctctctttggatgaatgagtcggctctcaggtggacttggcaggattagagtcacagctgaggcttgactggttccttacagccaccagctctagacacattttgaaaagcgagatctggatttttatccgaagctggtgccattctaattcaacctctgccactgctggttaagagatgctgaggatccagggaaggatgaggctgcctcacttacagaaggagagagctgtccccgtcctctgttgggccgcctgcacggtcctcctcttcttcaggacctgggcttagccactgtcttgaaacttgcctgtcagtgccctcgtgccgaattcgacacccaggcctcgctacctgagccgtaagtta

SEQ ID NO: 453502 - DNA, 482 bp, Homo Sapiens
  misc_feature (448)..(448): n is a, c, g, or t
  misc_feature (472)..(472): n is a, c, g, or t
caagagtgcctggcatgtagctgcatttattacaagcatcacatacattatctcagtaggtgctttgactcacagggagatgttaataataattcctcaaaagcgccctgtttacacgagaagcctgaggttcagcgagggtaagcagcaggaccacctggcatctgtatgactcagaggcactgagcctgggaaacagacccagtccccgccccagggagcactgaccctccccagtccccgccgggccctgcaggagggccagggtgagagagttgcagacggggaaaccccacggcacgcaggctctgagtctgtttatgaacgcgattcttggttggtgaggctgactcatttgagttgcgaggcagtggatttgaacttctcagacgattttccccaactttagtagttgacagacctttttaggtttttgggcccggctttnaagaggttttttggggtattcagngagccaggga

SEQ ID NO: 453503 - DNA, 849 bp, Homo Sapiens
gttctttcaatgttcctgccaaattatctgggaccaggcctgggcggttttcccttctaactggtttccaagaaaccaggcaaaccagttcgatgtggtttgaatgggcaaagcccatagggatctcccccataaacacttccggggaaaagaaagggaggacccggcacccctgatgagaggtgggaggaaggggttgccttagaggcaccagcttctcctgtggagcaagaaggctcaagcaggccctctggggctctgtgaggtagttactagcactgctggttcccagtttggcagagggtatgtctgggttgggaggaggggaaggcacccttgagagctaactgaggcccctcctcactgcccgtctgccaggcctgaagggaactcggcagtgctatctctgcagtaggggcaggggacagagcagtcccacaacagggagctacctggagccccaaacttcctctccttccccaaagtgcaaccaggagccgacagaccaatttctcggctccctaccccttggcttggcaaacaccacaccctaatcccccaggagcctctgaagggaagggcctcgcccttagctcccagtttccaggaggccttcctcctcagacagccaggtatgtgtcgaaagctggctattgctttgattcaggaacagcctctctcagcctctgtctgtctgtctttggcacagaggaaaatggacacagaaccaactagagcatccccctccagtgttctctgggttttaaatggggtcttttctgccaatagtgaggcataaacaaggatagctcctcgtccgattaccacccaggcctctacctagcctta

SEQ ID NO: 453504 - DNA, 1966 bp, Homo Sapiens
  misc_feature (61)..(61): n is a, c, g, or t
  misc_feature (68)..(68): n is a, c, g, or t
  misc_feature (98)..(98): n is a, c, g, or t
  misc_feature (152)..(152): n is a, c, g, or t
  misc_feature (315)..(315): n is a, c, g, or t
cggccgagacatatgaaaggttgttagctagagagtagtgttcaaagatattgtttgcggntgtgtgntaagttgacggtcacggagaaacagaaganagcggcccaggggcatcggtgggcaggagtctcaggtgagatgcatacttatanagagtacatatcagttggacgacgccggggtgaggactcacaattttgggggtatctggatagtgcctccgggtaaggcgagcgatacgtagatatggtatattgtacgaccttctcgtgtatgcgtgtttatcggttgtggggctaagtcaatacgggcgcnccgctaaccgagagcaccccagtgttagtttgtgtacgatgaatagtgtcgcggatcagtgtgtgattgacctcattgtatgtttggcgtcgcgtccatgtggactgtgggaccgggcgggagcgagtcacgaggggacggaaaggacaggtcgtgtggcgtgtctggcgataagggcgcgggcgcggggagggagcggttctaggtgggagttaatgctagcgttggatgtttacttgctgcgagggcccgcgcgcagagtgtgatcttgccaattagaccctatgtcaatttataggaataggggtcggggtccccgagagcacacaagccgtggcgttgtatttgtgtgggtttgctcccgtttcattggataggtagacgtagtgaggaaaggctcgggttgtcctctgtgggtcacatcaggggctgggttactgggcaggacgctgggggcagtaggtgggtcaggctcatgaagttggctacggttgcaaggccatcaccaggggctccgccggtgtggggagccgtggcagggtggcgagggcctgcaggacacgcaccgtgatgcctggcacctcggggctgccctggacgacgcgggccagctcctggcccagggcctgctgcagggcgagggccacggggcggggactggagctctgccaccgagggtccgggctgagcgggaaaatctggaggaacatgccagccaggtcgtcctcagggcccagcacccggagctgggtccccacccgaatccggccctggcctatgggctgctctgggctgctctttggtttgggtgcctctgtgctgtctcggcggggcggcagggaggctgtgagcaaggagtggaaagtctggcctccggaggcgccgcgctcatgctggacctccaccaggtgggccatgtaattcttgtccatgatgttctgctccagagtctgggggtcgtgggccactgcctggtccaggaactggaggagtttgctcatgctggacacggggatgccaaacgactgcacgaacagcagcagctgctgcggctccaggtcctgcagggcggcgtccaccaggcggagcacctcagaacggatcatgcgcagcttcagccagtcaggaagcagcagcgcctcctccgatgtgtccaccaggaaggcggtgggcagtggcttctcctccggaaaccagatgtccagcagcgcctggaactcgctgtcgtcggctcgaggcgggcccagcgtcagcaggatcaccatggcatggaccacgaggatgtgcatggtggctgtctccccgctgctccagcgtaggaagacctggtcctgagactccgaccagctgtagacctcctcgccctccgtgctctgccgcatgcgccatcacgtaagcgtgagaagatggacaacagagcgctcagcacggcgtccgacgcggcactcggggagagcttcgagaagaggtgggacatgatggtggagcgctccacgaccagccgggccacagtccagggccaggtcgctgtgctgggcctgctcctccacaggcgtgtgctgggaacaagtagatcaggtaggcgctgatggtctggggatcagtctcccctcgtgccgaattcaaccacccaggcctcgtacctagcctt

SEQ ID NO: 453505 - DNA, 778 bp, Homo Sapiens
ggttcgctccacccacctctgggccatagttgtctgaccttgtctgtagtatatggagtgaaagagcaggtgtgtccccacctacaggctcatcctgcaccacgcagagtcctgccgttttcctgttggttgttaaaaggttggtgcctgaaaatgtccgggtaattggttttgcctgggttttttatttgtctttgtgaggggggatccatgtaatgtggttatctgacccgggtttgggcctcggctttgcgcctgcttctgagttccatgccctggctctccactggcattccctcctttccagggccctcggcttgcctcacctccactcgctcccattactgtctacttcacccctgtctcctttgtaatttctgttgatgcagggtcacacccagagtccgaagcactctttcctcgctccggccactctttcccctctatgctttctctcttcttctttcctttggaacgattttactgcttttacacgtacccccctcgctttgaggcgttgaattatccactcagcatcacactggacttagtcctgggatctagccgaccttcgatctcaccactctcagttacagacacctccataagacgagtgatggagtcctgatggctcacacaccatagagccacccttcttccccctctggctgatatattttgaccctgtgaccttgaacactgtagggacctcggctgaatatctctagtagcttgtggtcaccctcgtgccgattaaccccgcctcgtacctagcctt

SEQ ID NO: 453506 - DNA, 1446 bp, Homo Sapiens
cctgggtggcgaattcggcacgaggcaggaaggcagtaaagagacttgctattcaagatctgaaattacttgctaataaaacaccacatacttggagtagggagaatattcaggcactttgtgagtgtgccctccagactccttatgacagcttaaaactagggatgttgtctgtcctttccacactatcagggaccatcgccatcaaacattacttcagtatagttccaggaaatgtgagttcttctcccagatcttctgatttagtcaaattagcccaagagtgctgttaccataataacaggggcattgcagctcatggagttagagtcctaactaatatatctgtttcttgtcaagaaaaggatcttttggcactggaacaagatgctgtctttggcctggaatccctactggtactttgtagtcaagatgatagtccaggtgctcaggccactttaaagattgctctaaactgtatggtgaagttggccaagggcaggccccatcttagccagtcagtagttgagaccttgttgactcaattgcacagtgctcaagacgctgcccggattttgatgtgccattgcctggcagcccttgcccatgcaactgccggtgctgggtgatgggatgcttggtgacctcatggagctgtacaaggtgattggacgatcagccacagacaagcaacaagaacttctggtgagtttggctactgtgatttttgttgcaagtcagaaggcattgtctgtggaaagtaaggcagtaattaagcagcacgcttgaaagtgtctccaatggatggactgtataccgtattgccagacaggcttccagaatgggtaatcatgacatggccaaagagctttatcagagttatgctgactcaggttgcctcagaacatttctacttctggctaaatagtttgaaggagttttcacatgcagaacagtgtctcactgggttgcaagaggaaaattatagttcagcactttcttgcattgctgaatctttaaaattctatcacaaagggattgcttccttaacagcagctagtacaccactgaatcctttaagctttcagtgtgaatttgtaaaactcaggattgaccttttacaagccttctctcaacttatctgtacttgtaatagcctgaagacaagcccaccacctgcaattgccacaacaattgccatgaccttaggaaatgacctccagaggtgtggtcgcatctccaatcagatgaaacagtccatggaagaatttcgaagccttgcttctcgatatggagatctttaccaggcatcttttgatgctgactcagcaacttttgagaatgttgaactacagcagcagagctgtttactgatatctcatgccatagaagccctgattttgggattccagaatcagcaagttttcaggaaatatgggatctact

SEQ ID NO: 453507 - DNA, 810 bp, Homo Sapiens
ggggaggggcactcagaagatgatagaaacgtgtcagtagcaagataagcacctcctccccacacgaccccacgctcgacatcgttgatatagtgaacctcatcaaagaggacccactccaggtcccgaataacatatgagccactgtacagcatggagcgaaggatctctgtggtcatgatgaggcaggaggcctccggatgcagctgtacatccccggtgagcagccccacatcccacgaatgtgtttcggaagtcaccggaacttctggttgctacagggccttcgatgggcgaagtgtagatggtgcgtgtcatgtgtttctgggccagggcaatggcattcagccacaatctgcttttgtcctgcagaatgtgtgagctgcgacaatagacagagtcatgccgattccaaagtgcaggataggacctgtttcctgaaacacatcatggctcaaaatgcccatctaggaagcgctggactgagcggtaatgaggtccgatatgaaatcacacgacagggcgaggtaggcgtccaacagggatggcccatctgctcactgagatggaggctctggggcctctggggtggatacacgctgtaggacgcttccttcaacagtaggtcttccaagcctgcttgctcgggccaggggagcactgcagggagaggctgaaacagtgtcccctctgggacctcctggctgtcccactgcctcattctcatcctcgtcacccccaggcaaatccagagctccaactaacacccgagcctcgtacctagctagttttgttgagttcttgtcgtca

SEQ ID NO: 453508 - DNA, 820 bp, Homo Sapiens
gccaatccagtcagcgactcaagggcttggggacggtgcactcagaaggatgatagaaacgtggtcaggaagcatgataagcacctcgtcccacagcgaccccacgcgtcgacatcgttgatatagtgaacctcagtcagaagatgacccactccaggtcccgaatgacatatgagccactggtacaagcatggagcgaaggatctctgtggtcatgatgaggcaggaggcctccggatgcagctgtacatccccggtgagcagccccacatcgccgaatgtgtttcggaagtcccggaacttctggttgctcagggccttgatgggcgaagtgtagatggtgcgtgtcatgtgtttctgggccagggcaatggcattcagccacaactgtttgttcctgcagatgtgtgagctgcgacaaagacagagtcatgccgttccaagtgcaggatggcctgtttctgaaacacatctggctcaaatgcccactggaaggctggcttggggaatgaggcgatagaaatcacctacacggggatgtgtgcgtccacagggatggcccactgctcctgagatggaggctctggggcctctggggtggatacagctgtggacgcttccttcaacactaggtcttccaagctgcttgctcgggccaggggagcactgcagggagaggctgaaacagtgtcccctctgggacctcctggctgtcccagtgcctccttctcatcctcgtcacccccacccaaatccagaggctccaatccgccaccccaggcctcgctaccttaagaccgttatgagtacttgcacttgt

SEQ ID NO: 453509 - DNA, 858 bp, Homo Sapiens
  misc_feature (67)..(84): n is a, c, g, or t
aaagccaatttctgagcttttgtggggtgtttctaaaaagccaattagttttaagagggttgttgtnnnnnnnnnnnnnnnnnnttagtttaatgttttgattttttatgtgtggggataatgggggataattgggggggagggtatgtgaagggtgtttaaagccaatcgattttgtacatgtttgaagatgctgctgtgcttcctcagcccgatggagggggccgaggagagttagcctgtttcggggaggcggggcacggggactgggtcaggagaagccccagggggacggtggacccgagaagcatttccgggagtggacccgtgagtggaaacgctccgttggttcaggaggaggctgcagagaatggttggccccgcggcttgccagaacttttgcaggcagtgtttggcctccacttctccgaatgtgcgtgcgccatctctctgtggggaggggccgccccccgtgttggccggggcctgtggggtgggctagaagcaatctcaggggggcacggttgacacgtgtggagccctctccgtgaatcggcctctcagaggcctcctttgtggcgagacgcactgtagaccccccggggtggtgaacccgcatgagatgcggcgccggggcagtgccccctgtgtcgtcaaaggcccgctttgtgttatgagcactgtcgtatctccccagggtgtctccactattgtgggccaaggcaactgtgtgccccgccgcggggggagtactcttggggggcgacagtttgtgtcccccgggaaaccccaccgtgtcagcgtagggggggtctcagtacgaggggtcccctcttctggggacattgggcagggggc

SEQ ID NO: 453510 - DNA, 937 bp, Homo Sapiens
  misc_feature (258)..(258): n is a, c, g, or t
aggtatattaatcgtattggacatccctatagtcaagagtttaacgttaccttgcacaggttaatggttttctgctctgcccctcccgtaacatttccggtgataaccaggcagcacagctggtcaataatcagcacatcgaggggggcaggttggctggcagaaatttctgctgtaggatctgcagaaatgggctccatgaccttcggggtgtccctcaaggccaccgcaatgtgtcccaaggctcggattgtgtgntcgggaatcaagtgagcgtccttgtcgctctcctgagagatgtagagccggttggacaggctggccaagaacgcctccacaatcactgggtccaccgtcaatccagccttcaggcacctgcagatgttgtcaatagcgatgtctcggagctgctcgtacatggagggctggctcttcttacccgacatgacgttcagggttgactcggaatgctcattggtcacactgatttttatatcattgccagcaactgtgtggtactgactgtggtacttgtagagcttcaccagaactggggacgggatgaccaggaagtctcgcaaggacggtgtcacagagtgcaccaccaccgggaacctctcgcacaggcggcccaaaccctgcagacagcagatcagcaggggcaagtgagcaataatgactttgctggacgtcttggactgcagcttctcagatagcttgatgcaaaggttttctgcaccctgctcgtccttcacagcccacaccatgaggtccacacaggcagcattcgcctgacagcgcagtttgagggggctcagctcattgtggatccggtctgcgtcatgtagaatcttctggagctcccctggctcgtgttgaaccctcgtgccgaattcgccacccagcctcgctaccttataccgcgagagttactgcc

SEQ ID NO: 453511 - DNA, 820 bp, Homo Sapiens
tgggctcctgggcccgcaaattagcctcgaagggtgattcggccgagccccctgactccaggtgggatggggtgtgtgtggaagtggcggagcatgtcaagcacaggactggaaccacagatgctgttacgtggacactggccgtggccgttcagggacaggcgcaggtgcttggccttgccctggaagttgaaggtcagcacgtactccccagccgagtctcactttggcggatcacgaagaggccgtggttccggggcccccctgccagaaccagttgagcagccttgacccgggacagtgtcccgtggaaccatgggtagtcggatagctccagctcgggttcagcctcgggatccgtctctgcaccctgttcccctgtgttattgctgtcactgccggtgccgcccggggattccagggtctgcagaaaggtctctagcgggacgtggatcagggattctctgacggcatctcgacctcggctgtggggggctgtcaccactgcacccacggctgtcgtctctggggggcggggcaggtcgactgcatcagtcaggagctcacagctgcaggaggccacgcggctggccagacagcctcctcgggtacaggagagctcggtgtcttcctcactgtcaccggggtccacgcagccctggatgtcagctacccacgagtgcttctgcagagagtcgatggtctccaagatgtattcggctccattctctaccttgaggacgaatgtgttatccttctctggcactccaggggcatggtggtgcgaccctcgccgctaaccaccggcctgtctagccta

SEQ ID NO: 453512 - DNA, 1044 bp, Homo Sapiens
tcttctaacgataaaataaccagtgacgtgtgacgaacttgtcctgtccattgcccctgtgacacgttttcgaccttccagttagcaccccggtctgtgtgttcccacatttcgtttcacccgtccaccttccaacattccgcgtatccaaaggtcccgcttttcctcaactgtcaattaggctgtgaccctcgtagccttcttttgattccgcgcacctacctactccggtttcccttgggtatagtcgtgctaaggacgctgagatttggtgtaacctgtgagactctggaggtctctcttgatgctttgtaccttggtttgacttaattctgccttcaaacctcagccacattaattttgaaatgaatgccctccaggatctgtgtacatttgtctataatatgctgcatttgcagaaaactggcagctgttaggtagctgatgatatctgccagttgcaggcatatccgccctgtgtaacagaaagaaaggagctgttcaaaacagtagggttcttgatgactgaaatggagactgtactcatctcattcaaggacatgtgatcccggaaatagggggagctggcagccagcaccactttgtgagcccgaaaagcttgtccttgcacattgaccaccatatcacagagacggccctgcatagcgcacactggtttagatggctcaaggacacgagttgcttgaagtccggaatctccaattgtatgttcccccctttctccatggtcgtgcctgagggtgcattcaaaccctttttccaaaagcgttatttgtttgttttgaaacttttaatccataagagcctctgtcgatgccatcatgaattcagatgtgtttattttggagcctacaccagcgccttttttgtttgctctttccggcaattccccagtgaggaagcccctggaggaaagtctttcgctaccgtcggcactggaggggtgagagctccgggggtgcctcgtgccgaatttcgccacccagcctcgctaccttagtaccgttaggaggtactgccgtc

SEQ ID NO: 453513 - DNA, 1012 bp, Homo Sapiens
ggtccgctcccagtgtggtgcccgcccgcctatatgttcactgtagcggacgcggcggccgtcgtctcgcgaccgttttgtgttttccgaggtccctgcctgtcgctggtttagtcccctggggtcaccggaagtcctgccgtgccgtgagcctcacctctgccgtgctcatcacaccccttcccggagaattcctctcatggcgatcaggaatgtagacacctgggtcttgtagaagtttgctggggcccgtgcatggtgcacttcccagtctacatgaggatcgtgctgcctgctccgctgttcactgccgcagcgatggccactgagtgaagaagcagaagcccatggctgttgaatgatcttgcatggtgtcctgggggccgcaccacagcgaaaccattctttagctcacgagaagccactttgaaggcgaggtcagttgacactgccagcggcgccagcgggctgcattggaggaatgaagctcattccagatggtgtcacgtgtccaccccaaccccaccacagggcagcatcacaacatccgctgtgccaggagccctgccagcttcccgttgtccagtttgaggcggctgagcgggttggtccgtagaggagcacgtgccgctcagagtggaccgactgcagctcttccagggaggccttccggcctcggagacactcacactggctccggagcccccgctcctgcagccgggaccagatgctctggatgcggccggcgtgctccgggtgcctgctgttgtcaccgcaggagcactggtgcttcagcatgaccgagtcatagatcagccctgtggtgaagggcagggtcctggcaggggtctctgagctggagaggactcgggcctggctggcaggctctggggctgacagtgaggcaggtgcggctggggaagactgagcccgggacagaggccaggtgcccacctgcctcgtgccgaattcccacccagcctcgctaccttagaacgttatagttactgcc

SEQ ID NO: 453514 - DNA, 870 bp, Homo Sapiens
aaggagtcccacagccggcccaagccttttggcacgtggtccccttgccggcagaacccaatatgtacctgggggcccgggaaagaatttctcaagacatgatccacactctccggggtaggcatattttagaatccctttttggcaaacacataactgtgtttgttgcccattttctcttggggcaatcagaacctttttctgatccattaataatgaaataggccaccaggatccaaagggcattcatttaactcacaaagatcacgatctgtcaagccattcaaaaggcagtaagttgaccgcaacataattggaatttttcctataaaagttttctgatgctgagtctgaagttgttcttcaccttcgtttaatgactgtttttgttatatcaacataaagcggagcagaatacgtgagattccttaatctagcttcattgggcatcattggtgaaggagcaccatctctttcccaatgggtaggcttggaaagataaatttgttcaaacttcagcaaatatcgtggcggttcttcaacttctccactagcatgctgagcttcagcctgtaggtctataggaggagcgtcttccacaattctttgaacagacatctgaataaactcatcaaaagaatccagctgttgtctaaccaagcctttctcgtcaaaataggaactgattacaatccagcatgcttcttgccacaaatccggggtgatttcatcatcatcctcatcatattgcatatcctcatccgcgtcgtacatattgccaaacggttctcgagctcctaactcttgaaatcaaaagacaaaaaccgcccagaagccagcagcgccaggagctaaagacgaagtaccgct

SEQ ID NO: 453515 - DNA, 804 bp, Homo Sapiens
taccaacatcttctgcctgaatctcctgagccttcagcctctcatgcgctctctgattatgaaacatctgaaaagtccttcttctcacgagaccagaagcaagataatgagacagagaagacttcagttatggtgaacagtttttctcaagacttactaatggaacacatacaggaaattcgaactttgagaaagcgtttagaagaatctattaaaacaaatgagaagcctacggaaacagttggaacggcaaggatctgaatttgttcaaggttctacaagcatttttgcttctggttcagagcttcatagttctctaacatcagaaattcatttcttgaggaagcagaaccaggccctcaatgcaatgctcattaaaggatccagagataagcagaaggagaatgacaaattacgagagtccctctccaggaagaccgtgagcctggagcaccttcagcgggagtatgccagcgtgaaggaagaaaatgaaaggctgcagaaagaaggcagcgaggaggagagacacaaccagcagctgatccaggaggtccgctgcagcggccaggagctgagcagggtgcaggaggaggtgaagttgaggcagcagctgctctcacagaaatgaaactaagagaaataattcctcatcatcaaattagtgataataattatcaggcaaagagaagatagaaaaaggagattctgagtgccaccaatcctttacagacttttcctcttcttgtaagtttatgtaaagttctatgataggacaacaggacatctttcagccctcctcgctcg

SEQ ID NO: 453516 - DNA, 780 bp, Homo Sapiens
ggacctgagccttttcctgccctcaggatttctgggccctagcatgcccatctcaacgcaggtctcccactcttcatcttaaaaattgattttaacaaccccctcgcttccttgccagatctgctggctgggctatgtgcgggcatcagcatttctgacccatcccaagcagaaagcaggtgtaaggactttgcccattctctatagacaggtggaccagagtcatgagctctcatggaaagtttcgtttatacggagacatgaaggttgagcattattacacaggtactcgcagagctatgctctgcacacagagccagggctggctgggcgagagggctctgattggagacaggtgccttggggagagttgaggaacgacttccttccaggcggggcctggggacttggtctgcctgtgtctttggtctagaatttggtctgagaatcttataagaagaggccttcctcaggccatgtccagaatgttgcatttgcctaccaacccaaaatactgtggcctttcacccagggagcccccgctggggagatggaaactgaaatgaccacaaatgcccaggtagccactgcgtgccaagtcccctcttccccacgtgccacctgccctcaatcattgacagtggttagtttactaaagttatataagacaaaggcaaacaggtcacaatgctactccataaatcagggaaaaaacagtaaaatcaaatcagacacaacgcaaccataatcctcggccgattcaccacccggctctaccta

SEQ ID NO: 453517 - DNA, 1003 bp, Homo Sapiens
aacgggtcagtgtcaaccagcagttttaaagacggcagtactatacggtctaaggtagcgaggcctgggtggcggtgagggcagggcaaaggccaaggccaagttccccaaagaaaagagccgccgggtgctggggaacctggacctgcagagcgaggagatccaggtcgtgagaagtcccggcccgatcttggcggggcctccaaggccaagccacccacagctccagcccctccatcagctcctgcaccttctgcccagcccacacccccgtcagcctctgtccctggaaagaaggctcgggaggaagccccagggccaccgggtgtcagccgggccgacatgctgaagctgcgctcacttagtgaggggccccccaaggagctgaagatccggctcatcaaggtagagagtggtgacaaggagacctttatcgcctctgaggtggaagagcggcggctgcgcatggcagacctcaccatcagccactgtgctgctgacgtcgtgcgcgccagcaggaatgccaaggtgaaagggaagtttcgagagtcctacctttcccctgcccagtctgtgaaaccgaagatcaacactgaggagaagctgccccgggaaaaactcaacccccctacaccaagcatctatctggagagcaaacgggatgccttctcacctgttcctgctgcagttcttgtacagacccctcgaaatcccatcacagtgatccggggccttggcgggctccctgcggctcaaactttgggcctcttctccaccagacctggtggaacagaatgggaaacaaccgtggaagttgcaccaagtgcaggagcctccaaatagacggggatctgaaggaatccgacatctggcttgtgaaatcccgaccaaaacaatgcagtacccagacaggcaacatcggagacgagcggaagaatagagagaaaaggacacaacacgtacacagaaggagacaagaacaacaaaacgaacaagggagagc

SEQ ID NO: 453518 - DNA, 840 bp, Homo Sapiens
gaagggaatttggtccggggcgggcttcccgggttcccgggccccgcgtacccgcacctcgccccttccgtgcgcacgagcctctccgcacacagcgctgatcccctgcggcgcgcaggcagcagcgacagcacccctgggccgcaccgcgtctgcgctgctggggctgaccgggcagtggggagcgggcagccgcccggcccgcggggtgcgagttgccctcgaggggggaggtgccctgcggagaggccccgaagccccaggacacgtctccaagcgcccgtcgctgcctcccgtcgcccaacgtgcttttgcccctcgggctcctcgggttcctggccttgcccgtcactttggcccgctcctcgttgggttacctgcccccggcgtcccggggctgggcggtggggtgaggggaagcgctctctgggcagccccccgggaagtgcgaggccgggagtcttcctcagcttgtctcttccggggagcgccactgggtccccagttcagagggctctgggatggtctcccagtttctcccgggccgggggatggaggggtactagggccgcatccgagtgtgcgttggtgggtgtgtggtcggagccgacgtgcattccgacacacgtgctcgcagcgcggggtgtagtcgccgcctcacggggacacctagacgcccgtccctggcgagaggtgtcgtacgctgtggtttcagcgccagggtctgcggcggcgcggggagggtgttgtgttttgcgagcgcggagcctggccttggttttgttgtggtcggcgtcgtcctcgtgccgaattcgccacccaggcctcgctaccgcatat

SEQ ID NO: 453519 - DNA, 869 bp, Homo Sapiens
gtctcgcctggcgtctgtgtactccgttattgaccaaggaccgcgggagagagggaggccccagctcaatggtgccgaccttggctttccaggtagtgacagagcctgtggtccgtaccattcttagcagggtgtctgaggccctgccatgaaagaggcacaccaggatgaagcaagaggaggtgtttaatgagttctggttcaacacagaggccgccaacggggtctagctatgagtctgtcctgggacccgttcccaccaggccccttgtgggcagtggccaccatccctccctcaggctgtcctggccctcaaggaccccatggcagggccttttccaccatggcctccactgtgctgccatctcttgggaacagggggtcatcccatcctcccaagaaacacttcctcaggcctggccccgatgggctcaggcacacctggcgacatcagaaatggggccctggagtccagaccacaggccagtagttttggggggacagctcctccacctcctccaccggcctatctggggggctctgggtgcccaggggagccgggcacctgaaagggacaaaaagcacagctgaggctcagcctcttgcgctcactggtcaagtggcaaattttggaaaagccagacctcagaggatccttaccagtacgtgggtgagtacgtgggcccagcacagggacaggggcggggacagaaaggtcccttcgctgtcatggggctgtcacggggctgagcctggctcgaggaagcccccttttccagaagagatgtgaaacaagacatacattcgccccccaggcctcgctaccttaggaaccgtataggttactgcctctttacaaacctgctgtt

SEQ ID NO: 453520 - DNA, 1072 bp, Homo Sapiens
  misc_feature (90)..(99): n is a, c, g, or t
  misc_feature (150)..(158): n is a, c, g, or t
cctttttttaccccttgtttcattccccctttgccaagtgtttcgggggaagccaccgttcccggggccccgcgaattgagggaaacttnnnnnnnnnntccctggctggtttctaagccctggcttagggtcccttgggggtggggttnnnnnnnnnaggtggcaggaaattttatacgggaatgtgagggggacccgggtttcccagaagtaaaaactccctgaaacagtggagggacatctccacagacccagacagggagcggggggcttttgcatctcaccagcgggggcctgtcagacaggaaagaagtcccgcagaaggtggcgtgtggttcagggcctgcacgatgcagcttcatgaagcatgtgttccccaaggttgatcagcccacgcagacctatggtcgcagtttcgaggtgatctttctccttttcgggttgtgcttcagcagttcaagctcccgtttgggttggttccccaagttgaaaacttctctccaacgccttgcattttccaagcttttcgctgctcctccttggcgattatttccatgtctttgtcatagatgtagtcctggcacagaaaacagtagatgcctccatacatcagatcaatggccaggttgtgccgcttcgccttcgcatgctcgtgaatatgcttctttgtgacacagccgaagcagccacagtagaggcaggaatgcagcctgttgaggtggacgccacagacatggcagatacaggacttggccttgcgcttgcgggcctcagccgtgccgctccacacgaagcactggtagatggcccgcaggttctgcttccagttgtccaccttgaagctgcccaggtgcgagcagcccggcggcgctaccgccagctcggcgtccatggcctcgccctcgggctctggccgggacaccatggggggcaaggcccggccgcgcgcggggggcggcggcgagggaggcgaggacgacgccagcgcggcgtgggggctgctcggcggctggccaggctggccaaggcccgggcgccgagaaccctcgtgccgaattcgccacccaggcc

SEQ ID NO: 453521 - DNA, 723 bp, Homo Sapiens
cggtcaccaggttatactattttggattctggccatcaagaaccactcctagctgtgtccagtagtctcccccataatgtagtaggcagctccctttgctacccgtataatggattccagcgctgttcatcgagggcacctctcagggactgcgacaccggtcaatcgttgacagctccgatgttgtcaaccaccagtctggacaggagatctcccagcgccacagatgccaaaaaggctgcccaggcaactctggcgccccaggcatgccactggcaactccagcacaccttgttgccagaggctgcccccaaagcaacagtgctccagctgccccagacatgccccgagtacctccagtgccccagcctgccatgaggccggcccaggcaaactctagtgccccatagttgcccacaggctggcccgacatctccagtgccctagttggccgaaggcagccctggcaactctggcaccaccagtcaccgaaggcatgccccggcaactccagcgctgtcgttgccactggctgtcctggcaactccagcaccatcgttgcctcaggctgccccagcaaccctgttgccgttgtcacctcaggatgcccaggatgttccaccgttgtcatccccacaggctgctccaactctgtcgtcgtcacagtgttgtgcggtctgactacctttgctaactagtacacgcaagacctcgtgacgatta

SEQ ID NO: 453522 - DNA, 657 bp, Homo Sapiens
  misc_feature (231)..(231): n is a, c, g, or t
gactcagggcctgagttggcccctctatggcctgcatttgaggtcagcacctaccgtgtgcaagcttgatctgggcctgcttgcagcttatgaggcttaatctcatgtactctcacctgtcctcactgttcctcctgtcctctgtgaaagggacaggagaatagcggtcccttacctgccacgtggcagtctgtggcccttgggcaagtaagtccctttcctccctctgangcccactttcccaaggtactcagtcacagagagaagctagacctgaggtgggatgtttaaggcctcctcccaagtggagagtggtggacatccatcaacacctccatcggcacggaattagctcgttttccagaccgccatgatctatttcacagctcagtttagtgggggaagaatcaggactgtgctggggctcctggctagatccccagctctgccttttgctgcaagcaaggccttggtccaggacacagcccctgtgtccccaggttttctcctctgtcatatgggaatgatccgatagggttatagggatgattagactgaacaacagcaagggtataaaattgtgcccagcataagcatcagtggtgtaataggtcaggagaaggtgacctgcagggctcagctactgatcgggagagg

SEQ ID NO: 453523 - DNA, 761 bp, Homo Sapiens
aacccgggtgagagatgtcaggatgaagcgaatttcgaaggcgttgctgcctgatggagccgaccggcgtgcacgcgttgcggatcacctcccggctccgagggtctgtgccgtcgtctgcggcgatggtctctgccagctccttcaccttggccaggccgctggcgctgcttaccctcctcctcacttcccgcctcctgtcctggaggatcctcagacttggactccaaggaggaaggaccaccattttccagggaggagggggtctccagctggctgacgttctgctgcatcagctgcaaggcggccagcttcataaagaggaggtacctgtgctccacgaaggcgtccaccagctcctggcgcaggcagcagagcttgtgccggtgggcgcgggggaagccggcgcgggcgcattcctcaggcagctcctcgccaggcacgggcaggaagttgaggtccggggggaaggtgcgcagcaggtcgaggatgtagtggcgcccgtcgttgccaatgatgcccttgcactcgaccgaggagcagagctccacctcctcgtcacggtcgttgagcacctggtgccgcaggatcttgaggggccgactcgtgcgctccagcagctccaggtaccgcgggtgtgacaccacggtcttgccgaagtcgatggagccgtagatgacgctctgctcctggtcccgctcacaggatgccggggatcctcgtgccgagttaacacccaggcctcgtacctagccatagtt

SEQ ID NO: 453524 - DNA, 1186 bp, Homo Sapiens
  misc_feature (88)..(88): n is a, c, g, or t
  misc_feature (106)..(106): n is a, c, g, or t
  misc_feature (110)..(110): n is a, c, g, or t
ttttttggtgaatgctgctgcttttattacaccaaaggtcttaacgtttattaggagatgaacacaaagcttggcatactgctgtcanagtggcatgcattctccnctanagtgcagctctggagttcaaggttactgcagattgcacataagaaccactcttcagaggggagaaaaggggaaactgcagatccttgttctcccgaatatcagcagactcaaggtgcttcaccaccacagcagcctaagatcttgtaagttgggtgggtgtgctttaaacagtaacacaggtatgacaagggatccaggtcggggaaagttcctaaaacttagggccaagagtacttttggggaagtatatacttcccaaacaggtatcactgaatgggggcggggcatggcttagcactgcaactgagctaggttaagctgccaggagtccacgattaatcctggtttcacagggaagaataagacatgatggcactgtcacaataaggccactaaactcacagcgaacgatgacttcagaaggaagctctcatgactacagggaagcagctctttcctctctgatgccaggtaccccttgctgggtaggcacctgccctgagactgtcaaaatggtcctttctgggctgcacaacatcacttagtacaacagagcagaggaagggaccacacacgtcaaggtcatgggacatcaccaccaagctggctgactgttgttggtgaatgtcttagatgcctttcccggttgggctgggtgccccgtgtgtctgaagagctaatctgaaaagaggctggcaaaggacttcctcaagctccggatggtctccgctttggcttcatcctcattggctgaagaccggaagaaggaggactcagagaagctgaaggcatttgtcagggactgcgaacttgttgagctgtgggtgaggctggggcttctgtggtggagcagccaggggtggctgggcctctgccagggagctgctgactggagggtgcatctccgtgggcggtggggccgcccggccgctgaggagccgaggaggaggaagaggaggaaggtgagattgaggcgactgaggcggctgaggcggcggcttagccagcagagactcagaccccggcgccagaccccgccctcgtgccgattcacacccagcctctacctagccat

SEQ ID NO: 453525 - DNA, 1156 bp, Homo Sapiens
  misc_feature (742)..(886): n is a, c, g, or t
aatcctcaccacgacgctccgtcactctcctcaccagtatcgtcttctcgcgcgggtgattatcggcagtgtgaagcgcgtcgactgagacgggtgctagccgcgttgggtgtcttggccctggatattggagtgcatgatttttcgtttgtagggtcgtgcgtgggatggtctggggtttagctgcggtcgttcgtcggtccttgtggtgttggggttaatgttggtgcaagcactgatgctaggagcggtgtgtcacatattcaacctaaatcctggcaaccctacctatggggccccgttcgttgcgtcgctctcccttccgtcgtcatggggcgtacaccacaccggggtgccttcctgacggccggcacctgtcccggtccgagtctgcgccctgcgctctagccgtcggaggtcggccgctgcttctcacctggcgctccaaacccgttccgatgctcggtcccaccggctctcatcccgccagcgggcccgccgcgcttgccctgccgatggtacgggcctggcttcctgcgcggtatgtcatctctttcaatgggcggtttctgcgccggagacccctcgccctcagacggcgttctttttttcttccaccagcagcgcctgggctgtcttggcggctgcgggcgcgggagcgggcgcgtccaccaggccagccgaggcggccgtctgcttcacggcttgggacagcgagctgaagaagctgctgcccaccgannnnnnnnnnnnnnnnnnnnnnnnnnnnnnnnnnnnnnnnnnnnnnnnnnnnnnnnnnnnnnnnnnnnnnnnnnnnnnnnnnnnnnnnnnnnnnnnnnnnnnnnnnnnnnnnnnnnnnnnnnnnnnnnnnnnnnnnnnnnnnnnncgctgcaggtcggtcatgtagccgttgggcaggttggcgatgaagctgctgtccgacagccggcgccgcaggaagttcatcatctggcttaaagggctgggggcgcgcggggctacggggtctggtggcgcggagggagagcgagggcggaaggcgagattgaggcgactgaggcggctgaggcggcggcttagccagcagagactcagaccccggcgccagaccccgcagaccctcgtgccgaattcgccacccaggcctcgctaccta

SEQ ID NO: 453526 - DNA, 744 bp, Homo Sapiens
tattctatccgcctgaggcaagagacattcatacatctggagctcattagcagttccaagtgctggcacaatgcacctgagtcctgcagctcctcagctggcctcagattcccgagaagcgcctaaggcagagccatttcccagatccgcaggcttcctggctgctcgaggggcactgctccttcctgctcccaaccagcagtgtctctgatggcttcccatgggaatcaagatggcctcctctaacctgcagtgtgggtggggggtgaggggcaggatgtccaaccccctcctcagtagctcatatttctcctttgcccagctcaccttcaccccagcaccaggccacactacagaggcacactgttgactgcagtctgccacaggaccgaggtcaacagtcaagacatttgtcttttcccttcccctgggccagcagacatcgccccctcatcccaggcctggaaggaggttcctcagaggccctcgtggtagctgcagcctcctggctgtcaatcttgcaccaggaagttgatgagggcagttctcggggaaaggaaggacttcttgatgcttcgtccttgcaaaagcctgacacccagctcgcttgaagaacaaattcgtggactttgtcctggtcccgggcaacttgttggggcacaggaatttgccacaagctttattgttgatcagaactgccatctggcctcgtgccgattcaacacccagcctcgtacctagccg

SEQ ID NO: 453527 - DNA, 758 bp, Homo Sapiens
ctcagaggcgtggcgccgaaggggttgccctgggccagaggttcaaggttgccgtgcggcctcggggtagccatggagccctcggggcgggcacatcgttgtatacgcagggcgccatcaggacctgggacgggaaaggggcgttggctgtcgccggagtggctgggggccccctccacctccagtgctgtagcctgggggtacctggcccggcatgcccccctgcacacggaagcctccgaagggcacaggactgccaaggaatggagggtctgcaacccccactttgggggctccgaagtcatcttcaaaagggttggatgcaaccaggtgatccaccatgggagttggggctggtgcaaactccgtcagatgtgagtatgcagggccctgagtatttgacttccttcgcttcttttctggactcttcatttgcagaccggccttgccctgcttcctcccggtgctgggcggcgcagggtgcggtgcggggccgccacctccctccagcttgtccggtgggggtggcgccgaggcggccatggagtgggggacccgggttagcggcagcggcgggggatggaggcgcccttgggctgcaccatcgcccagaaggggtgtcaggggcagcccaggcccccgagctgcagcaaccacaaagtgcgacgacagggaagcgccgagccgccgcgcaaactgcgcgctctctccagaccctcgtgccgaatttaaccacccagcctcgtactagcatagtt

SEQ ID NO: 453528 - DNA, 737 bp, Homo Sapiens
  misc_feature (716)..(716): n is a, c, g, or t
gtccccttgaccagactctaaaagtcttaaggtcaaaaagtccacaaataacgttttgtttacccatcctacagtgctaggcctaagcctcggacttaggcaaaggagatcagaagggtcatatggctaaatgtaggtggacaagagggagtcggggagggccttcctgtgaatcctcctgcctctcaaggacgctctgttcccttagcttgagaagccttgaggaaagctttttccatgaacaagcttttaaaaaccttttagctctttaaaagcagcaagtaccattccagtcatgaccctgcagacaggtggaacacccatactccagcctcattctgaagagacttgcagagcaggaaggaaggggtaatgactttcagttccagtaatgtatctagaagcagcagctgattcagctagatgatgtcaccttcccaaacctcctgaccagcagctgagatggtaaaagcaggaaacaggggatactcagctggctaagtccgaacatgcctctggcaaaggcctacagtaaccccaggctctggaggcatcctcctgaagatgaggagaaagagtcctctcagctgggagtacagtaggtgtccttcaagaccctcaaaccagatgcttctccactctccttttgctaagcagctttctgcatatcctgaaccacaaatccttcatttattccagagtggagcagcatctgntttgagaatctccgtcgaact

SEQ ID NO: 453529 - DNA, 431 bp, Homo Sapiens
tttctttttcttcctttcccttctctaattctttaattcttccaccatcggattcttttgcttttattagctttgattcttccattttcatcccttctgatgccaggcacatctctgccagttgaaagggtgcagactttccacagcgttttacaggctcagcaccacccaactgcgaagtgtttgaagaaatctctgcaaactgaaacaaggcagatgtttgacactgctttgtagaagcatcagagtgggacgtacttgaagatatctcggcaaactgaaacaatggtgacttctgaggtaattcaggagattctgaaacatcaggcctgcatgtgccagaggatacctctggtgtgccaagagcatgttctccagctaacagcagcatactcaggcctcccatttgagtaggatcagccattccaaag

SEQ ID NO: 453530 - DNA, 492 bp, Homo Sapiens
  misc_feature (50)..(113): n is a, c, g, or t
  misc_feature (146)..(259): n is a, c, g, or t
tttttctgtctgtgtcgttcatgctgtcgctttcattgcttctctttcgnnnnnnnnnnnnnnnnnnnnnnnnnnnnnnnnnnnnnnnnnnnnnnnnnnnnnnnnnnnnnnnnttggtcgttatgttgttttgttgctttgccgtnnnnnnnnnnnnnnnnnnnnnnnnnnnnnnnnnnnnnnnnnnnnnnnnnnnnnnnnnnnnnnnnnnnnnnnnnnnnnnnnnnnnnnnnnnnnnnnnnnnnnnnnnnnnnnnnnncacttgtgcggcacgggctcgggaggggcgttcttcttccgcttccgcttctcctccacctcctcgatgatgctgaccacgtcgtccgctggcaggtggagtttggtggacagctcaatgaggctgtcgattgttctactggatccatctcacgcgtcctccgcctcccctcgtgccagaatgtcggccacctcacatggcctgcgccaccgataaccgcgcgggagtaactg

SEQ ID NO: 453531 - DNA, 1016 bp, Homo Sapiens
  misc_feature (651)..(666): n is a, c, g, or t
tttcggtggcctttcgaggggggcgggcggtggagagggcggcagtgggtttttcctgccgatgggcctggagtgggtgtggttgagagagttccgttgtcaccgcgtggagggagcgtcataatcccggtcacgccaatgtatgcggcgcggagtcaagcgagtgtacgacctgttttctcgaggaatctgggactataggtgtcccgttaccatcgccaaggctgaagatcgggactggactatcagctagaaggcgggggattttcatcgcacgctgggtgcaaagaggctatcagagggcgatgacctctggagcgagtctgcccgacgcttgaccgcggcttcaaggggagtggtggaatgacaagggcgttgggaggccaacttgtgccaggccccaagtattgctagatcaacttggtaatacattccaacctgacctagtagtagtgctgactactccgtgaggtgccccgtgaactaggtcttccagcggaacggaatctcatcgctgcactctgtgatcgtttgtggcacatccccatctgtcctcatgacatccttacgtgcctcggtctctaataccctgtggtgtctcttcttcaccatctcttgccggtcgcttgtgattcctaccatgatcctgcnnnnnnnnnnnnnnnnggcattctctcttctcagtcattcaggacatctaataaaaattaattcttgatcattcaacttgattatttagacatttctgtacagccatcttttctcgtttaccaccacatcatggctgtctgcccctctacatccgcacacggagctctaacgcatgcttgttaaacagccttcgtaatagtctttaaagatcaaccacactgttcccacgtaaccctacctcccaggtagggttcccccagtaacactttcacacataacccttcgtgccgaattcccacccagcctcgctaccttagaaccctaatagtactgtcctcttttacaactggctggtgacaactgtt

SEQ ID NO: 453532 - DNA, 972 bp, Homo Sapiens
aaaagtgagggtttcagccgggtccagtggtgcggaccccgagctcatacattctggtcccccttgggggtaaggggccggaccggggcccagaggagggctgggcttgttccgcccctggccgggctaccaagccggcccgcgcccccccgcgtgcccgcagccggcgctagggccgggcatctggcccaaacagctcgacaggtccgaagacggaccccagtcgtccacggctccgcgggccggggcccccgcttcgctgccgagcccagcgactgagggaccgcaagaggaccgcggccctcgtaccgtacacctggcaccgagatcgtacggggttacgccggggtccgtcgtccggcctcgcggagccgcagcgccaaggagctagcgccacgtcggcggggccggggggtctcgggctggcgcgacacccgggcccggggcaacacgtcctcggcgcgcgggaggaccgggcgccggggggccgcccgtccgggttctgcaaggccgtgatgtcgaaggcctcggtgtcctcctcgccgccgccctcgtcgtcgtaggtgatgatgttctctcggacgtcctcctcctccagtaccatcagtgcttcttgcttctgccgccgcagggccacgaagagcaccaccagggcaagcagggcacccacacaggtgatgatggcaagcagggcgccggtgctgagcccagcagctgagaggtgagcctcaggccagcaggatgccacagagccgtcaggctggcagcggcacacactaacagtcactgtggcagtgctgctcagcgccggctgcccccagtcccacagttctatgggaaccaagtagggggcatggcggggtggagcagggcgggagggcagcagcaggtctggcggagccatctcggttgtcctggcctcgtgccgaattcgccacccaggcctcgctacctataccccgagatactgca

SEQ ID NO: 453533 - DNA, 748 bp, Homo Sapiens; identical to SEQ ID NO: 324976

SEQ ID NO: 453534 - DNA, 1305 bp, Homo Sapiens
gtcgtgcaccggtatctggtcctggctaggggtcatcttctgctccagtgtgaccgcgttcgcgccgcgcgtatgtgtcacggggttcctcggtggcgggcttctctcgggcggccacgacgccattcttcttgtggtcgcggcgctcctactggggtgggtgcggggcccgtcgccccggcggtgtggttagaccatacccttgtggttgtatggtctgcgtggagcgctgtttcctgggcacagctgcgcgttgggcctacgtcggattggcgtgtcttgaacagattatggggccctggcagctacaccacaggaaacgtccctctgaccaaggtgccgaggtacccaagaccgagtcagaaccgtgtagataccctgcgttagatgccccttgaagttaacactggggagcttgaggcagccatttccaagagataaaatcggatggttgtggaatgtgtgggcttccgcgtgcaccattgtcccgaaggtaccgttgggaactccctgcagcgtcccactcggtggacctttaactgctggagaccccccaggccaagcgactgatgttaagcagccaccatcgatctcgttagttggtcccaaatgatgagatcctccagcagcaggttgttcacatcagcatccgtgatgttcataaacttgtacccccacgggcagcccggccaggcagtacctgatgaagtaacccttgagaagtccaatctggttggcttctcaggaagcggcttccactggaatcaatgaatggaactggtttggtttggacccgactgccggatgacggttctgtggagggccgtggggggctcctcggggagggagaccctctcggtgtctttgctgaactgtcctttccccacgtcgttgacggcacaaagtacggaactggtaggagcgtgcaggaaccaggcccttgactgtcactgatggtagctttggggtccacactgtccaggagtacagtccagggggcattgttctccgacatctccagaatgtagcggatcagggggctgttgccatcaaaggtcttggtccacgtcaggttgatggctcgcctttccacggtgctgagagtggccactgggtgctcgggcgcgtggggcagttgcctgactcgcaggtgggcatctgcgagagtcgttgcctccttgctgagatcacccggcaggtgtacgtgccgatgtctcccgaccacgtcatgtgagatgtgccggcctcgtgccgaattcgccagcccaggcctcgctaccgtaaacccgtagtgagttactgaga

SEQ ID NO: 453535 - DNA, 769 bp, Homo Sapiens
gaaccgcagccagagggcgacctggggacggacaactcaggcaccacagcacaaaatcctgagaggcatcatgactgggcacaaagagggagcatcgggtccccaaagtgagggatgatggggcatcgaatggggacctgaggagcatgaaactgctgagaccccagaacccacaggggacttcgctttggcctctggctcgtgcctccactgtcgactagctacagacaggcaccatgtgagacgactcgtttcctgtggtgcctgctctggactgtgcagaagctgccatgcagcacatgccacgtgcccaccctgcccctctgcagccctcccctgtccctcccctgcagaagccaccatgcagcacaggccctgccccgccccggcccctctgcagccctaccccgggcccgttgctcctcccccaccctggagtttactcattgcttcccctaggcctcacatacagcgacccgcacacaccccgtctctggagaaataccacgtctgtgctggaaattctaaattaaccaaagatctgcaagcatctgagacgagctgttcaccttctgagctgcagggttcctcgctccagcagtcagttggcttctccgcagccccagggccatgctcccagaagagaacgggaatcctcacgagaagcctgctactcagggccacagccaggggagaaagtaaacgcggagaagtcccccagttcattcacccctcgtgccgaattcgccaccccaggcctcgctaccta

SEQ ID NO: 453536 - DNA, 879 bp, Homo Sapiens
  misc_feature (326)..(475): n is a, c, g, or t
ggtttctttggggcctttgggcttagggagctgtcgtgaggcttacgggtcagtcaccccttcggtgtactggatcacgcgagttggcggtatacgtgtggtccatgagcgtgggcaatggtggtaaaattggccgtttcggttcccttcccagctggtgaacgcccggttgtaatggtcccatgctgggcgtctcctggacgctcggcactctgttgctgcttggcccatgttggctttgtggtcttggttcaagtatgttcggatatgtgtatcatttcttcttctgttttctctatgtttttctgttttcttggttatatttnnnnnnnnnnnnnnnnnnnnnnnnnnnnnnnnnnnnnnnnnnnnnnnnnnnnnnnnnnnnnnnnnnnnnnnnnnnnnnnnnnnnnnnnnnnnnnnnnnnnnnnnnnnnnnnnnnnnnnnnnnnnnnnnnnnnnnnnnnnnnnnnnnnnnnacctgtaggatttgtttagtgatgtataggttttgacccaccgtaactgtgccctgtgactgcattcctattctgctgactgcttccgtcattcaacagggtttcgtcagctctttgtctgtggccctggagacgtacagttgactcctgtgcctcctgcagaggatttcagagcgttggatgcaacacatttgatcattcccaccctgagtgatgcaaccaccagggcttcagctcctggtgtgccacaaaccatgccacgaaggccatggcacggaactgtggccttagcgagaagggagaattgctcttgcctgaggttatacaaggggtaggattgctgcctcgtgccgaattcggccacccaggcctcgctacctaataccgcggtgttactgccgtcg

SEQ ID NO: 453537 - DNA, 996 bp, Homo Sapiens
  misc_feature (51)..(336): n is a, c, g, or t
cggtcctgcgaccagatatttcctaggagccaacccttgccagcagccaannnnnnnnnnnnnnnnnnnnnnnnnnnnnnnnnnnnnnnnnnnnnnnnnnnnnnnnnnnnnnnnnnnnnnnnnnnnnnnnnnnnnnnnnnnnnnnnnnnnnnnnnnnnnnnnnnnnnnnnnnnnnnnnnnnnnnnnnnnnnnnnnnnnnnnnnnnnnnnnnnnnnnnnnnnnnnnnnnnnnnnnnnnnnnnnnnnnnnnnnnnnnnnnnnnnnnnnnnnnnnnnnnnnnnnnnnnnnnnnnnnnnnnnnnnnnnnnnnnnnnnnnnnnnnnnnnnnnnnnnnnnnncactgtccatcttcttttgctcgctctatcctgactgccggggccctggacactacacaaagagctagctggagagtgagactctctcaaaggccagcggtggctcagagcctctacaccgttctcaaggtcagatgctagaagtgaccagaattgtggccatggtcaagaacgcaaagccactcttcctttttttaactttgtatggcacgctttgccatagctcttttcttttaaaagaagacctgaaggggtagaatgttttcctagtctccgacagaggcaggggtaggaggaactggtgaaaatcagccactgtgcactgccagagccgtgcatggtcctgggggttgccatttctctaacacagcaaaccccgtctctcctcaagggctttggtggtcattgagcttctcctaggtgtgccctgcgcctctgcaccacttcattctgaggctccggacccgtgtgcccgctgggaagcagagccgtagagaggcagacagctgcccagactccagactccaaggccacctctgtgaaaagggccaagctgctggcctgttggtgcccgctcactgtttgtctcaatgaatagaaaccctcgtgccgattcgccacccaggcctcgctacctatacccgggagttactgccgtcc

SEQ ID NO: 453538 - DNA, 985 bp, Homo Sapiens
cttggtatactcaactccaccattttgaaagtgtcttaggtgtttaattctggttaggtctcttgctatcagggaacacaatggggatgaaaacgacatcttagaacgtcacatctgggcttgctcagcttgtaaaacaaggttcaggaagcccaggaagggcggagcacgcgcatcaagttaaggatattggacaggaccaccatgaggggctctagaaggcgggagaagactgccaagatggcgataaagcaagaagctcgacaggacctcatgtgtacagggctcctgaagaccacggccagcagttggggacaatctccagagtgcgacactgaaatctcaagatagcctgtgctagtaggaatactccctcagcggacttggggattaccagatccagcacaccgtgaagaactttccggcaagtaccagcatatatagagaaaatcccctgagtttcctataactcaagtcacgctttgagtattaacgagggtgcctctgggccaatgtcataagtgaatcacaggatcagagtcacacgcctgatattctcgtgtgttcgtgttgaagccgtgggcagcacagcaagacccttgtctctacatagaatttaaatgttaacaattaattaaaatttaaatgttaaataagaacgtgtggtgagtggccaagctgcggtttcaagcaatgtagaagacaatccgcatctgtgtgaaatgccaggtccttggcctttctcatgcatgtctcatcctcccagcaccacactctccatgtatgttttgcactcccagttcttttcatcgattggctgcttctccttctgctgctgggctttagcaagctgatcctgagtgcagttggtggatggcgacaggccggatgaagacagcgatggcagtgacgtgacgtccgccctcgtgccgaattcggcgacccaggcctcgctacctattaccgcgggagttactgaccatca

SEQ ID NO: 453539 - DNA, 1062 bp, Homo Sapiens
ctgagattggctccctggtggcttgggcggggcctaaggcacaaggcgggctgcgctgagtaggcaggcaggcaactcatcggcctgggtgcggtgcaaggagggttccgaggcactccgctcaatcttggggagtgaccgttgcagcagctcaattgtggccaggatctgggggaagaggggccgctcctcccgctggaacttgaggcagtcagacagcaggcgccgcatggccttggggcagttgctggagattttgctgaggtccggggacagatagccacggcccaccataaagataatctggtcacggcagccaatgtggctgtaaggcagtgagccagtcataagctcgtagagcacaaccccgtaggcatagacgtctgactggaagctgtaggggttcgggtcctgcatacggatcacctcagctgccatccacagcacagatcctgagggctgctccaagggctgggccccgctccatcgagtcttcactgtggccaagccaaagtcaccgatcttcaccgtgagcccctcatgtaggaagatgttgttagacttgagatctcggtggatgatgttcttggcatggaggtagtccatgccctgggcagtctgccgggccacgtcgatgagctggaccatgtcgaagcgtgtgtcggccacatgcaggtgatggtagaggctggagccctcacaccactgtgtgatgatggcaaatcccggccgggtcatgaagcccataaacagcaagatgttgacatgtcgcgtcttcctgagcacctgcatctcattcttgaaagcctgggcctgctcagctgtgggctgggacaccttgagcaccttcacggccacatcgccatgccaccgccctcgaaacacggtgccaaacgagcccgtcccgatcctcttcagcagctgcacctcactgggtggtacctcccagtaatagcctgagtcccggtaccccaggttcctcactttcttcttgtcatcggccaagcctcgtgccgaattcgccacccaggcctcgctaccttaaacgccggtagtactgcc

SEQ ID NO: 453540 - DNA, 787 bp, Homo Sapiens
tagtcctagggcttatcaccacgtcagctttttccatggtgcagtcgaagctgggtgttcacctctgctagactctcacacctctgttgctcctcctccaatcggaccagcagctcatccaggtttggctcctccacattttcccacctctgggggattggtcctccagtggcttctagccgcttctccagctcttggcaccagcttcggtactgcagcaccttggcctgcagcttcctcacaagggttgcttgtctctgctgggcctcctgggagttcttcagcttccgccaggaggctgcctgattctctgccatctgctgctgtagtgccagcacctgctcttccagtaccagctgcagtgactggggcttcatgttgttcaacccagggcttcttgtctccatgagggcaccaggtggtaggcccacaggtccctaggtagccagagggtgttcacgcccagcagggtctctaaccattgccatgccacttcaacctcctcttgaacatggtgctatgaaatgttggctctgttgagttcaatgaagctcatccctctctgctggttggaggcacagatcttccaggaaactattctcttatcccaggatttctgccacaactctaccttcctactttgctaaggatcagacagggaagacagcacccttactaaagaccacagccacctgtgaacggtgtcacgaggggccgggaaagtaaccctcgtgccgaattcgccacccaggcctcgctaccttaaaccttagggtactgctcagtt

SEQ ID NO: 453541 - DNA, 581 bp, Homo Sapiens
ctctgcttggtccccttttcccccaggcaggaggcaatcccaggggcctgcctgatagaggcatttcctgtccctgtctcctcctgcatctcctttatcctgcactgccaccctctattccccattctgtgttggactttgaaggccccaagcccagccaaagcactgagttcccccttaagacacctccacaccctccccacaagcaaagcacaaattttggggtccatgtagcatgggccacgtaggaggctcctgacttgccaggggcccagcctcagcatacccaccgagtcagctgccagcctgggctgagggtgggcatgaggtcaggagtcagcacttgggacctagggatgtgaggtttttctgtgccccaagtttgtgggaaggtgggcactactgctgggcccacagacacagccagctggcaaaagggaggtctagcccagcagagagatgaggacattttgcttctccttcatgcccacagcatgagctgagcttctgctttgctggaaatgaaataaacttggtatgaattgtgccaaggcctccccaagttgtcatctgctcttgtg

SEQ ID NO: 453542 - DNA, 970 bp, Homo Sapiens
gggggtggacgtgaccccagggttcagggtcccccaggccatcgttccgcccttccaagctgggccacgggggtaggctttgttcctttcaggccttcaggggcgtattttcccagctggtgagctcccagccagttgcagctggacgatgttcggtgtccaccatgaaccgggatctcaaagtcgacgttgccctcgtagggcgcgaagctgggcgtgcccaaggcctgccacacggatgccctgttccaggagacggccgggccggggccacgaggcgcggcagcgccacggtgatgcgcaggaacggggaggggccgtgcccgtggtacccaaacatgctctctcgggagcacagttccacagccagcacggccggcccagtcagctccctccccccgcgactgtcccggctgatggccaagttcagctcccgttgcaggtcacccatgtgctcgggcccgaaaccagggggcgctggggtgtagaagtagggagcgaagccgtggatgtggcagcagacagagaacccctcatcggtgaccccgaaggcgcggagcacaggcacggagccgcgggatggtgggggccccccaggcacaggctgcgctgggcccacataatggtcaatctccaactgttggaagatgaggggctctgtctgggggtccagcgctggtggtgtgggccgaagccagcgaggatctatggctgatggtgggacctgcccgtctgcaaccccctccaggactgactgcagctcctcctgcagcctgtgttctgcctccatctcctccatcagtgccaggtcctcctcgaattgggatggccgaggtgcatcatcatcatcccagaggcccccacgggcccgctttgggggcaccccgggccctgggcctggccgccgcttgccatccatcccgcttcaaacagcgcctcgtgctgaaacgccacccaggcctcgcttctt

SEQ ID NO: 453543 - DNA, 993 bp, Homo Sapiens
gggagtgacagtcacccatggcaggggatgcagggaggggtggggcagccccagtctcactctcccggcctgtgcgcagcaggtgcccaacagaatgtggggcaaatgccggacttcctcctccagacagcgcagagctcccggctctgtggtgccactgcctcaaatgtagggaccacctttcgctggaccagagctagcacctcccccgggctccggcacaggcgggtcttgctggccgagtttcccttgatgagcaggcggacctgttcctgggtctcctccaccagctggcgccagtgcaggatccgctgctgtttggcctgtagctccctcagcaggagctgccgatgcccagctgcatcctgcagctcctggctctgatcgtgcagggccttgagctccgtccacaggcaacagcgccgaagccccagtatcagcacctgcctctcactggatcccaggacgcgtctctccacctcctccaccaggccctggaggcgctgggtcaagacttgccgctccttcaggagggctgctccgctgggagaccagcacacccacagtccgccagccctcctggatgagatgaaccatggacggcagggtctggctggagtctgactggtccggggcctggggtctggatatctctgtgtcgccaagcccatccccactgcacagggaccgaatctctgcctcccgctctgcagccaggtgctccaaggcagccaggacgtggcctgggggtggtttgtcagcagcgtctccactgagctcagccactgctggtacgaagtgccaaagtggtcatcatgaggggttgggaggctgcccctcttggcctggggaagcaggaggttctgcaggaactgggcccggagggtgcaggctgttcggacatcacgcaggaccacgggctccaggcccagagcctgccgacgtgagggatccaaagtccctcgtgccgaattcgccacccaggcctcgcta

SEQ ID NO: 453544 - DNA, 886 bp, Homo Sapiens
  misc_feature (49)..(49): n is a, c, g, or t
  misc_feature (66)..(66): n is a, c, g, or t
  misc_feature (83)..(83): n is a, c, g, or t
  misc_feature (132)..(132): n is a, c, g, or t
aaccaaactcctgaggaacaccctgaaccttggaacgtgcaccctcccnagaactgtccaggaaanacactccctgttgttcnaaacccacccagtgtttggaacaacaccagcactcccaacctaatgtancctatccaagtgtgttgtcaggccaaggttctgttctggagcttggctcacccagacaggagaacccctcactgggggcagagctccacattcctagacaggacagattggaagaagggacttaagtgccttttaaacgatgacaactccgcttccaacccacaagcatttaccaaggatctttggggtataaagacattatggggtaggtgtgcaacacaaattaaaatgtaagctttgtttttggtgagctccagatccctagtgattggcccccaggaaaatcaacaggtatgacgactgtttccaaacctcaagaaggagctctgcagacccctgccacagcaggccacccaaaagggctgcctgatcatcttggatctgcggggtgctcctgcctacctgatggccacgaatctggggctcagacatgacatgtctggctcagtgtgcctggccctgctccccactgagcccatcagtcccaccctgccttcttctttcctctagtccaacatccgccagcagcttctcagtggaagtgcaggcatcctggagcttcaggagcagatcctagcgttcagacagggaaggaggggagggagtatactgaggtttggctggtgaccagggtgccgccctgacgggggatagcccagttttactccccgagcttggggagcatgggccaagggtctctaagacgcagacacctgcccctcgtgccgattcgccacccggcctcgcaccgttt

SEQ ID NO: 453545 - DNA, 848 bp, Homo Sapiens
  misc_feature (13)..(13): n is a, c, g, or t
  misc_feature (507)..(570): n is a, c, g, or t
  misc_feature (836)..(836): n is a, c, g, or t
gtgtaaggtgtcncccaggtgaataacaggttccaggaacgccattggccatgcagaccagagtcacgttgctgccctcaattcacagtgacatccgaggagaatattggagatctttggtgggacttgtacgatcaagtatacttgggaggtcttgggctcatgctgtgtctgaactgagcaagtgtaggaaccctcatcatagacatccaccttctggattcggaggctgtattccagagaatggcgtttctccagctcaacccgtgggtccagagaccacttgtcatgtccagcaaaaatgatgccagaacggttcaaccaggccacctttgagttcttgtcttctacaacgcacctgaggatggctgtgtccccctgcctcacggtgatgttgtccgtgcctcggttaaaatccacgctgcgaacaggcagtccttgcaatgagaagagggacaggaaaaagcccagcacccagacgctgtgcagccagtaggtcctcatgtnnnnnnnnnnnnnnnnnnnnnnnnnnnnnnnnnnnnnnnnnnnnnnnnnnnnnnnnnnnnnnnnagtaaaacgcgccgctcctttccctcggtttccctctgggttctcctggttccggcaacccggacagacaagcctcttgccgcacgacggccggatcccagaacagccttgctctcctcttcgggagcgcaagccaggggccgggatggacgctcgtagcccgtgcctggtgtaaacacaccgagcccccttgtccctcgagctctcccgctttcctgcttcctatcctccctcgtgccgaattcgccacccaggctcgctacctnatacccccggga

SEQ ID NO: 453546 - DNA, 647 bp, Homo Sapiens
ccagatgaacttctttctctccctccagcgcttcagaggatgcacagctgtgtgtacttgaccctgagcctgggctagtgctggggacatagccagtctggctgatacccatatcagtacagaaagctgtcctcacccacttcatgcactagttgcattggtatgaagcattagctttataactatcccatttactgcaggcataaacctataagcctgctccatggcagatgctgctgtgctccctgatgccctgtgagcaccggggttgcctgtggcgcctgccatgtgacatcgggcgcagcatcagctggcttggaggtgtggctttcatagacctccacaggctgcctaggacaaagatgacgcatggagggcccaatgccaagacaaacaggccggagtggggagcagaggccattatcagccagaccaacagtgcttgcacggacgcttgatgcaaactattgctaaaaatgaggggttcgccagcttgccaggagttaatccccagaaaacttgctacactaatttactcaaaaaaggcttcaaacagtagtgaacacgcacagtacatgaaacccagtgaactctggggtatcggaaaggaaccgattaaataaggcacttacccaaatcgcaaccac

SEQ ID NO: 453547 - DNA, 904 bp, Homo Sapiens
  misc_feature (873)..(874): n is a, c, g, or t
gagtaagcgaccacgcccggccaaccaaacctctatcttagatgttaaagaagacccttattgactacactggccaagaagcaacagagatataaagctgaatcttgtagctaacccctgaaagcaagccaacgcaaattcctccgccagggccagtcttctagggccaatatggagactgtgggccacagaagattcccttctatttcaggttctcaaaaagtggtgtaggactcagggcaaatgccaggaaatgtgtccatatgccagaggagacacagagccagaaatgaaggctatgggtcctgtcttcagtgaaacactgaacgctctcggaaagctcccatcattcttgcatcgctactgccaccaagacggtggcaagggaggaggctaactttcaaatgcatgcaacggcaggtaatatactgtggaagctggaggtttacttttcatgttttagttactttcttgcaaacagcagtccaggaaagcaagcaagcaggtaaaactccgggtgtgcatgaggagatgatccaaggccagtgggcctcccagtgagaaccaaacaggagtggccaggctccactcctggggccagagtgaaaccggggtttaatcactgggctatgtggtctctgtgtctctggcctgaatgagatcctcttcaatgtcgggggacagggatccactggaagagcgtgaaaaatacagtggtcactgtgcagttctctctgctggagcctgtcctgccatcatacaaggtgctgtgacagcaatgcaaggtgaaaggagatcaaatggcccaccccagcagttagtgtttgtccctttttgcctcgtgccgaattcgccacccaggcctcgctaccnntacatcggggggggtgtagaactcgggcca

SEQ ID NO: 453548 - DNA, 262 bp, Homo Sapiens
  misc_feature (72)..(72): n is a, c, g, or t
tttgccctgaagtcctaaaacccactttttgaaaaaccctgaaaatagaagggaatccttctgtggccccanagtctcccatattggcccctagaagactggcctggcggaggaatttgcgttggcttgcctttccaggggttagcctacaagattccagctttatatcctctgttgcttcttggcccagtgtagtcaataagggtccttcctttaacatcctaagatagaggtttggttggccgggcgtggtcgcttactc

SEQ ID NO: 453549 - DNA, 905 bp, Homo Sapiens
  misc_feature (100)..(100): n is a, c, g, or t
tcaccagtttcaaagaataaccataaaaacttaactaggttgtgttatagagcaatgcatagaactaagctgagaagttaaaacataaactcattgattnttaaagacaatctttcccaagtctggttcaccttagggctgatacacaccttcagaaccagattttggtctctaatatcatcttccactgaaagccagggcaaacaggtttatgttcatttcatcttggcctataatttctccttaaagtgaccattaatattcactatcacaattaaggcttggtctgggccattctgagaacaagctctggagaccacaattttaaaggattaaataatcataacggtattctttgtcctgacaaaattattaatctgacagtgactgaattatcttcggactctcccaagccctaaatgaatacagcaaagataaatgtcaagaattcaggaaacaattgcttctgctacggccagtaagctcctaacagaccatgcttctgcagaaaacgattctggacaaatttttaaaagcaacaaactgcatgaagtcacttaaaaaaagaagcccagccttggaagaaagaaaggccacaggctgagtttcttatttttatggcttttacccagagtgcaagacacaggtctgcattgtgcaggacagctaaagttcctttagaaaaccaccatctttctggctggaagagtcaggggtcagaatggggggcagccaccactgctgaaaagagttgggggaggaacccctgaaaggagagccagaaatgggggagctccaaactctttgtgtcagctctgtccaaatctctaactgacttgtgaactaaaaagaaaggtttctaccatcagcagactgtcacccatagacatttacacagtattttg

SEQ ID NO: 453550 - DNA, 896 bp, Homo Sapiens
  misc_feature (849)..(849): n is a, c, g, or t
tttggttttgaaagtacagtgggaaaggattgctatgaaacaatataccagcaacattaaaaaaggaaaggaaatcatcgaatactaccttcgccaattagaagaagaaggcataacctttgtgccccgttggagtccgccttccatcacgccctcttcagagacatcttcatcatcctccaagaaacaagcagcgtccatggccgtcgtcatcccagaagctgccctcaaggaggggctgagtggtgatgccctcagcagccccagtgcacctgagcccgtggtgggcacccctgacgacaaactagatgccgactacatcaagagatacctgggcgatttgactccgctgcaggagagctgcctcattagacttcgccagtggctccaggagacccacaagggcaaaattccaaaagatgagcatattcttcggttcctccgtgcacgggattttaatattgacaaagccagagagatcatgtgtcagtctttgacgtggagaaagcagcatcaggtagactacattcttgaaacctggacccctcctcaggtccttcaggattactacgcgggaggctggcatcatcacgacaaagatgggcggcccctctacgtgctcaggctggggcagatggacaccaaaggcttggtgagagcgctcggggaggaagccctgctgagatacgttctctccataaatgaagaagggctaaggcgatgcgaagagaatacaaaagtctttggtcggcctatcagctcatggacctgcctggtgggactttgaagggctgaacatgcgccacttgtggagaccctggtgttgaaagcgctgctgccgatcatccnaaggtggtggaagccaactaccctgagacactgggcccgctttctca

SEQ ID NO: 453551 - DNA, 1070 bp, Homo Sapiens
  misc_feature (235)..(291): n is a, c, g, or t
  misc_feature (316)..(345): n is a, c, g, or t
cggttatagaacccccacaaggactggaatttcttcttaggaaagaggccccgacccagattcaccctgaaggttcaggcggtttgggaacccatgcctggggcaaacttgggcgaaaacccctgtttcttcccaaaaactaccaaaaatccagccagggcatgggtggccacacaatttggtaattcccagctaccccaggagggttgaggccagccaaaatccccctgaaccnnnnnnnnnnnnnnnnnnnnnnnnnnnnnnnnnnnnnnnnnnnnnnnnnnnnnnnnngaaaaacaggcaggactccgtctcnnnnnnnnnnnnnnnnnnnnnnnnnnnnnnggcccgaagcgtctctgaaacacacattcagtcatcagaaagtcacctatgagttcttaagaaccacaacacatggcaaacatgatatcagaagtcatcttgtatacgccagttccttctcttcacagttttgtttctcatttgaacatccaaagacagttttgcgagctgtgtgcagtcaccacaggccagtgaggtcactgtcattgtgacaataggtagttttcagaggcacagaccttgtgctgggtgatggaatctaagacccatttctcagacagatacttgactgttgctttcttctttccgctgtagggcccgatgacgatgctggcctggcgggggacttggctgacccggcctccgcacaggtggactagttcacagagcttggccactggggggctgctggcaggcgagacaaacatcgctggctggtcggcaaagagggttccgcggtacggccctgcagacaagtggcactcgcttcggcacaggggagctgcagggaagtggtgagacagttcgaacggctcctcagaaatccagtgacccaattctaaagaccatagcacccaatcataagagagaacccagcagccacgcgcaattcccagcagcacattcagggtgcgaagtggcttcccggaaagcacgtgagtcgtggtctcacagacgtctggtgcaattgaaaagcctttcaatttatccacaacctggatgac

SEQ ID NO: 453552 - DNA, 660 bp, Homo Sapiens
  misc_feature (106)..(127): n is a, c, g, or t
tttactcatgccaaaatacctatggtcacttctcagtactctttggatactttatttaggagagcttgaattaacaccatggaagaaagcatgaagatgaatgagnnnnnnnnnnnnnnnnnnnnnncccattcacactcaaataggaatctctggtagactcaaagagtacagctgatttgccatttcagagtgaaaaggctgcactgtctcaccctgcccccaaagtctaacctatcctattttaactggtattggtaaaaactatttttgcaattccttgccgaaaggaatcaaacggatccctttaacatgtacatatagttccattataatgcaatgcaggtaacactaacttgatttcaagaacattgtcaaaactggggtacacatccttctattagaaatggctgggggacagctgagaataaatttatggaattacaaattatgggaatactggactaagtcatgtatggttaccatgtagccatttttaccagctacttctagagtcccttcacacataaacttgaccctgcattccgggaaaagtacctctgggttgtcactacagagtaaggctggggtcctgccaaccttccttcatcctttcttctagttcataatagggaaggtgagccatttcattcattcatg

SEQ ID NO: 453553 - DNA, 1707 bp, Homo Sapiens
  misc_feature (1241)..(1241): n is a, c, g, or t
  misc_feature (1380)..(1408): n is a, c, g, or t
  misc_feature (1598)..(1598): n is a, c, g, or t
  misc_feature (1623)..(1623): n is a, c, g, or t
  misc_feature (1639)..(1639): n is a, c, g, or t
  misc_feature (1647)..(1647): n is a, c, g, or t
  misc_feature (1673)..(1673): n is a, c, g, or t
ctgcaccattgtagatcacatcaatggtgccaccaactacttcttctcacctaccaaagtggctgactggttctatgactctatcagcattgtcctatcagaaatacagaagaaaccccagcgagggatgccaaaggtagaaaaggtggaaaaaaatgggaccatcatctccatcattctgggtgtagggagtagtcgcatgttgtatgatattgtccctgtggtatctttcaaaggttggcctgcagtggcccagagctggctcatggagaaccacttttgggatgggaagattactgaggaagaggtcatcagtgggttttacttggtgcctgcttgctcctacaagggtaagaaggacaatgaatggcggctgtcctttgccaggagcgaggtgcagttgaagaagtgcatctccagcagcctcatgcaggcctatcaggcctgcaaagccatcatcattaaactgctgtcccggcccaaggctattagcccctatcacctgcggagcatgatgctctgggcctgcgacagacttccctgcccaactactttggctcaagaagactatgcagcccactttttgctgggcctcatcgatgacctgcaacactgtctggtcaacaagatgtgccccaattatttcatccctcagtgcaacatgctggaacatctgtctgaggagacagtcatgcttcacgcccggaagctgtcctctgtgcgctcagacccggcagagcacttgcgcaccgccattgagcatgtcaaggcagccaaccggctgacactggagctccagaggcgaggtagcaccaccagcatcccctctccacagtctgacggaggggaccccaaccagcctgatgaccgtttggcaaaaaaactgcagcagctagtgactgagaacccgggaaagtccaatctctgtctttatccatcctgacgatgtcaccaggccccctttcagaattgatgaccaatttttctgagtgttagctgaccctgttttttcctgattcttaaactctgataatgtgtcgtgtggtttgtgatgctatctttctgtttttttacatatcccgcctagattggatttgttaagaacaaattttaagtttcctggttctgcaggatggtgcaggctctgaaacagtatattactatttcatattctgcctctgatttcgttgtttactttttgtagttattgtcatgctctttagtttgttggagtttttttnctttttaaggagatcttaagccatagatgaaaatgcccatgaatcctcttgcttttttctgtttcatacttggtgcaaatttgttcatgggtatggggaaacaaatctctttctgatgcttaacgattctatcctattnnnnnnnnnnnnnnnnnnnnnnnnnnnnncttatgagctttcaccactactgatatttgagaatcatatgaacctgggaactacttgggcatgttagctgggatttatttattttgggccagtgaccaggagtagttttccccccttttccacccaaacaatgttaaactttggaaagtgataatactacaaatgtgttttgggagcaacttcatgaangtaatgtccccaaatcagaggacangggtgggttgaggggngtcttganagtttccagcaggattaagggttccnaatgttaaatttaggcctatggaattatttgaag

SEQ ID NO: 453554 - DNA, 348 bp, Homo Sapiens
ttaccataaagcagacattttctactacagtatagtacctgaaatcgaacattttaaaagtagatagtattgtctgtggaagagtaaaagttggatgtatgatagttaccaagaacctccaagaagaaaagcaacattgcaatagaaagtgataaagaaaaggcaaaacctgtaagatgtccgtgaaacatttggattaagcagacgtaggctttcaaaagattccatcagaacttagcggcttttcccttttagttctaaacagcttagtgaaatgtcgctaggagaaaccaaccagttgtagtttagaatcatcctgcaaatgtaggggggatcctgctagagtct

SEQ ID NO: 453555 - DNA, 1213 bp, Homo Sapiens
  misc_feature (923)..(948): n is a, c, g, or t
ttggcccccgctgtgcttcgccctctttttttcagacctacagtcctcctccccctttggtaggctttcggccccaccacaggggtccccatttttctgtcaggaaggcgcttctgttcctgggtcaaccaccgaggcctgctcagggctttcaacctgccggcattttttcactttctcggggtgactcagtgcatattagttaagtccttctgtgtatctaggaaatgttaatgtcacttacgcttgattctcaaaatggacttctcaccgtgcccccatttttcactaggccctattaagagttgtgaggtacgccgaggagaaggcaatggtgcggagtcgagactatgtactaagggcgccttcaataccctcataagtcagagaggagagaaggcaaaaggtgcccataccctgggtcttcaaataaaatagttgcttcacaaaagcagaggtcccaccagagaaggcctagaaaaagaggcaatttgttcctgcttcatatgcggaaaccccagtggttatcaatacaatcctcaactataaaaacaaactttggtatactgtttaggaggacaaaacacatgatcattgaaaaactccaccttcaatggaaaaatacatgacatatatctaatttccatcgcagggcactacatgaaacccaacagctgcacaatatgtgatgtgacacacacatcgtatgtgtaacagttcaagcgagggaagtcctgcctcacagtcaaggctaacaaacaagatcaggtgaagccaatggtgtttaccatgggctgggttcaactgtagtaaacatcattagcagtcggggattggagggcagagaagaaatacagaaccccaggcaacttttgataacagcgtcatttatcctgttttctaaataagactccaacaccagnnnnnnnnnnnnnnnnnnnnnnnnnncggattgtaagttaaaacaaaaatctatctgtataagtctttacttgtacaagtctgtacaagtcagtaaggtttggtctctgcagagccagaacttcagagaaggtgatttaattgtcatcacagtccccccaacttgcttgggggtatgtacatcaagagacaacatgaagagaatcacttgagaccaaaagaattacttacaaagaaagatttcctaggatgtgtaagttctactgattgctcatagagacgctaacagttg

SEQ ID NO: 453556 - DNA, 919 bp, Homo Sapiens
acacattcctgatcttctccatgatcctaagagccaagatagtcttccctgatccaggtaagccatgaacaaacaactctctggtcttgcgaaggttctttgaaagcaactcatactgtttatttgtcagtaggttcaaaacctcagagcccagctcttcacttaagaaggatttgaacccaagcaagactatcacgagggactgtaacagggcttccatgtgctggggggtcatgaagttataggattcagggtaaatttgtaaatacgaactgtaaacgctctgtgcttttctatcagaattcagcacacagaccaagggggtgatgcataacctcccagtgtagccgcctttgttcaccagcttctgcttcaaagaataggcaactatcatagaatagcccttgcaccccgcatcccacttgctgaagatggtgtagagaataggggtgttgttctgggaaattagaagagcatcacagatgactccctgcttctcttgcagacctaaatccacagcccagctttgagaaaaaatcaatattccttgagagaaagggcgcatttctgtatttattaagtctctgagtcctttatgttgtgagaagagttccttgtagaggctttctggagtatataccactctgtctgaaaatactggaaagtagcgtttctgctgctctttcagacattccgaattcttatgaatgcacacaggcttgctgcggggcgtggcagatgacaaactcaactggagaaccatctcaggacacctggaaaggtctgggtcagcttccatcatccaagcagtccattctcttgtgggcaattgtctcacacggttgtccttcacctgccaggaactaggcactttggcaaacaccgcacagcagaatttctccaccttgattgcacagac

SEQ ID NO: 453557 - DNA, 877 bp, Homo Sapiens
  misc_feature (148)..(161): n is a, c, g, or t
  misc_feature (255)..(274): n is a, c, g, or t
  misc_feature (751)..(751): n is a, c, g, or t
ataaataaatcacattttaatcatctggctttgtttaatctacaaaatcaaattcacagctttttctagtctggtctgttttttctaaccagatggcctagtatattttctaaaaccttccatcttttaaggaaaacatgttccaccnnnnnnnnnnnnnngcaatcccagagccaacttccctaatgcaatcacctcaaagaaacactgatgggctggtggtgaaccacagactcaaagtctttccgaacagtnnnnnnnnnnnnnnnnnnnnggaacaaaaggtcactaagcaatgtccagtgttccctggaaagcctcttcctgaatgctccagtcactgaactgtcccctccctgtggtcactcctgctggcccctgtagcattccattccttctgccatctgtttcaggttctgcagtgcttataaagtagtgtctggaggggtgtgagccttatttctttctgctcctaacccaacctgtttctttcatgctgtgtaaatggttctagagcccacctaggccaaaaccagttctcagctggtgtgcgggcaccttccatccactgtactatgtgccagttcaaagcccccgcagtaatgatcacagtgagggctaatgatatgcattacaaaatccaccaaaacaaataaggatttttatttgcagaaaatttccactcttccttttaaaaacttgccattttgctttaacaattccccccgggggctgaacccccctccatatngtacacaaccaccaaatcaattctaccttccccccttttccttatttccaccccatcatcactccaccttaaattttactgatatacgccccgcatccacttgtacactacacaattccactgggg

SEQ ID NO: 453558 - DNA, 909 bp, Homo Sapiens
aaatacttttagtaattaacgagcttgggaggtgttcaagtttgttaattaatttggaaaattaaccggaaaaaaggtgaaaattccgctgccaaattaaaggctcaaaaaaatgcaggcccatctggacttggcaaaaatacacaaatccttcccaggccttctcaagttggtcattagtttcatgggaaatggacagagccggaggaaactccctttagcttttacccttccagcagcccccgatgctaaagttgtacaacccaggtatgtttgccccaagaccattgcatatcagctttcgtcacaaattctattatccaatcttcaatcaacaaggctttatttacactccttaataaattcaggaaacaatttgatgtcatgtgcagccgccaaaaatagacaatgtagcacatcccactgtctggagacagctacttgtctatgctttaatagtaacccacaggcagccaagtagggttccatatatccaggtgttcacatacagcttccttccagcatcggtcataagcatgcctgcagtcaaaccacttaagatcaacattgatggtaaagtcttcttgatacttaatttggaattaacacttttcccaggaaatctttttcttctttctggatctggtgactcataaaattctataagcatcttatctttgatttcgaaacgttcatgcagccatcttctcatatgttcttgttcttctgggacatcttttttgtcgatacgatcaatgtgaatatgaatttttggacattctttgcagagaaattccgtcatggtcggtgactctcttcgctgccctccatcgtctttcccttcataaaccaccgtaacatcataaattgcatctaaataattcttcatgcaatcgaaagcaacgtgag

SEQ ID NO: 453559 - DNA, 1140 bp, Homo Sapiens
ccagccttttaaatttaaagcttatttccttgccctctccctaacggggagaaatcgagccacccaactggaatcagagggtctggctggggtggatgttgcttcctcctggttctgccccaccacaaagttttctgtggcaagtcctggaacatagttgtaggctgaggctcctgcccttcggtcgagtggagcaagctctcgagggcagcactgacaaatgtgttcctaagaagacattcagacccaggtcttatgcaggattacatccgtttgttatcaagggcaaccttggtgaaagcagaaagggtgtgtgctattgcatatatatgggggaaaaggcaatatatttttcactgaagctgagcaaccacatattgctacaaggcaaatcaagaagacatcaggaaatcagatgcacaggaaataaaggaaagctgtgctttgtcattgaatcctaagttcttagctgctgatgcaagttgtcccccaaggccatcacaaagcagtggggcatgagctgtgtttcaggggccactaaataacagctggtactgaccccagaaaccgccttcatctccattcggaagcaggtgacacaccccttcagaaggtgccctgggttgccgagtgtcagaatatactcaggactccagaggtgtcacacgtggaactgacaggagacccgccaccgtggaggcagggggcaagaaactcaagaacgcatcaagagcaccagccctgggccagggaagacaggctcttcctgcagtttctcgtggacactgctggcttgcgggcagtcggtctccagggtacctgttgtctcttttccgatgtaataactactttgaccttacactatatgttgctagtagtttattgagctttgtatatttggacagtttcatatagggcttagagattttaaggacatgataaatgaacttttctgtcccatgtgaagtggtagtgcggtgccttttcccccagatcatgctttaattctttcctttctgtagaaaaccaacagtttccatttatgtcaatgctaaatccaaagtcactttcagagttttgttttccaccatgtggggaatcagcattccttaaatttcgtttaaagtttttgacttttaa

SEQ ID NO: 453560 - DNA, 1131 bp, Homo Sapiens
  misc_feature (69)..(69): n is a, c, g, or t
  misc_feature (910)..(964): n is a, c, g, or t
aggtgatcccctccagaggcaacctgggtgcgctgtcactgtggcctctcttcttcttcagtgaggctngggactcgcagactaacgtagggtttatggcaagctgtgttggcccagaggaggatagtgctgtctgtagcaaatgtatgcaaaaatgagcgcgatgactccacccacaaaggaatcttgccagtgatgcttgtagtcgcacatgcgggacagggcaatcatcatggcgcagtacaagggcaggatggcagcacagagccgccagctctttccccgcccactctcggtgaagcagtgcagcttgcccgccaagtagaacgtcgtgaagccaaggcccgaaaaggcaaaggaggaatggatgctggggaagcttttgcggccctcggacaccagatcggggtcacctgtgcaatgcatttccgagttcatcactccatctggaaagcagcggtaaaagaaatcggggcgaggtcttcccactattaatttaatagtgtttgtgcagactccattcaaagcaagagccaaggacaccgctaagaaggcttccttaatttcagtcttgtctgttcgccggataattttcaccacacaaataacagccaggggtgtgaggaaagaaattgcaaacatgaggcgggtaggtatgttatctgattgcaccaaaggatttttatagagccagatctcttctggctggatgactctctggaacggatccaaaaactctgtaaaaacgaagactccgaagagcagggctcgcaccccgatctcaatggccagctcccgcatggtgcggccggagcagctcccgcggcgacagctggtgctctccgcggctcccgcagctcggccggcgccggctcgccagaccctgggaggcgagggaggcgcgctccannnnnnnnnnnnnnnnnnnnnnnnnnnnnnnnnnnnnnnnnnnnnnnnnnnnnnntcagcctaaacctcgcgcctcgggctccggggctccgggaagccgcgccggccgctggcgatactgcggaccccacctcctagtgcggagccggggccgcctcagggactcccggatccctctccccaggagccgcctccgcctcctgggcccgcgccgggcacccg

SEQ ID NO: 453561 - DNA, 923 bp, Homo Sapiens
  misc_feature (457)..(479): n is a, c, g, or t
aaaaaagcacctttttttgttgtttccccttaataaaagaggtttctaatttatgtttctctaagatttcctttggttgtatttagaaacacaaatagttttataatcaggattgcatttgtgctgggtaaaagaggagagctgtgctttctaccccaaagttgttggtaatggagccggtctgcccttcctacaaactcaagaggctcattgttcaaggtgtaacaacatttaattgcatgtcctctaacgctttgaaacctttagagggaagatcctcattttttacaattttgttccttttcatcatagaaaacatgtttaagataaaatacaaactttacctaccccaaattcataaagtacatttagtgctgtatagcactaaaacttagagatacagacactgtacttactttttaagaattagagacagtaactccaaaaataattgtcnnnnnnnnnnnnnnnnnnnnnnnacaataaggctcttgaaaattgtcattacttgtgttttcctatacattcatctgtgtgaaagcctttttcttctttgatttaaaaaaattaactatacagttaatggtttagaacttagaactacttagaattaatgctaaagtgtcaggaagaaattaatttagcttcaataattgtgactggcctcaggaattctcccttccacacctgcccacctcacctcactgcacccgcaccgcaccagagccagagcagctgcttgtctgcagcaggacacagttcctacatacgtttcagttctttcatggtaaactcaatggactttgaaattgtttacagtgctgtatggtccaattgtttaaatgtacccatttctgaaacgatgttaaaagccaagtgtggtttaattttatgggcatgaaaccatgtaactttggaaatat

SEQ ID NO: 453562 - DNA, 603 bp, Homo Sapiens
  misc_feature (31)..(31): n is a, c, g, or t
  misc_feature (53)..(53): n is a, c, g, or t
  misc_feature (79)..(79): n is a, c, g, or t
  misc_feature (87)..(87): n is a, c, g, or t
  misc_feature (91)..(104): n is a, c, g, or t
  misc_feature (122)..(122): n is a, c, g, or t
  misc_feature (141)..(141): n is a, c, g, or t
  misc_feature (226)..(226): n is a, c, g, or t
gaccccgggccctaaaatcccacccagaaangccttatgagccaagataagtnggagtagtgtctccccccccaacacntttttccncttnnnnnnnnnnnnnngtaaataacccatacccngaagttaaagtatggtgtnaagggatgccttgaagaaggaatagttttggctcccctactgcctcccattttagaacagagacaaagatcactttgcctaatgnaaaggaaatcagtgctgttcaatggagatcttagaacacaggatgaacaggaactgtattcctcctgacagaggtaagaactgaatcaaactgaatgagttccattctatacgcttcaaaggttataattagaacttgaatcctttggaatctgggagttgcatgtagcatttaagaactggtttggcttccaatttttatatatcatcaagatggaggggtccaataaacatttgcaattcttggaattgaactggaacagtataagaactctaacccgctatgttgaaaacgaccatgagggtagatccaggaaaaaagaacaaaaactgattggtgaccttaagattgccacattctacattccactaaagctc

SEQ ID NO: 453563 - DNA, 832 bp, Homo Sapiens
taactatctgagtacatgtattgccatttctctgctatatagtaatatttcttgacaccaatggtaatgtgtttgtttctttctcagcaccagatgtgtccatatgtatttaaacagtaggagcattgtttctaaattcatctatgctatgacatatataaacccattattattatgtttcactaaagttccagcactttagaaaagtttcagttcaaagtcattttgggctcattcatttagataatactgaccattttgcactacaatttcaaaaggaacatgagaaatttggatttctttgaaagagtcaaatatgtaattacagaattgaaacactgtgttaattcacaaagtgatgtaaataataaacattaaaaatttcccaagtaatgatgacttaagcgttcaaaatccagttatgtgctttgttattgaaaacagtccaaacaaaaattcttttgttgttttctgttctctttttcaaaatacataaatcctactgaagttagtctattttttcccacttcagaacaccaggcactgatttatccattgggagttttgctttgccttctaatacggtgaaattgtgcagcctgaggcatacgcatgatgtcctgtgtagcgaatgtcacagcgcacaacattgttggtatagtcagattcaggaaccaggtagctggggtttacactgacctttaggatatagtttccaggttttacatctgtaatatcaatccactggcagtctatgtctgcaccataggtatcataacagccaggactcaatccctgtgtgtgtgcagtacatgcaaatcgcctgtggtag

SEQ ID NO: 453564 - DNA, 1008 bp, Homo Sapiens
ttcatatcgaggcctttcatgcccatcctcgggttgcaacaagtaacgtttacttcagctacaaagtggacctctctagagattatttgttgtactgtcttgttgccttaatacgaattaatcattaaaaaataaattgaaaaccagaaattcaaactgccccatagacaatcatataaaaagttgggaaaatgagaaatggagccttaaccattgaaaggtctcccctcctcccattcctagctcacacaattccaggaacagaatcctcaacataaacctaagcttcccctctgctgcattaagaaagtgtcacttctttgcgtcgaatgggttgaaagctttgggagatgaacgggaaattccaagtccaccactttcatcaatttcccttgttcttcccgttctcagtccgcactcccaaggcacgggcagcttcgccgggaagcggcttgagggagttggcctgcctcgtggccgtgggggagggcagggaaggcgcggtggcgcacagcggagtcctcttcagctttatcaccgctggggtgtaggcttcttgtcggagagtagcaccttagctggaggtaagtgcgtgcctccattttcagcgctcgcagccccaggggaagcctgaggatgcccaggtgcccccgttcccaccagggccgtggctctggaaggtgcagagcgctgagctgcctttctgcggctaccactttgaaaccggtttgctgtcgccccagccgacgtctggatggcactggctggagacaccgtgactgaggccgagttcttgactttaatttgggtacttgtggaagggcccaaaaatctaactggcttaggaccagtcttatagttcacactttcgtccgcttcattgaacgttatcagtcgcctctttcgaattggagccatgtgacgcaggcttccaagtaaaggccgttcttctagagtccaacactctatcagctcatgaggcacccgccagtagctaacaccttttcc

SEQ ID NO: 453565 - DNA, 823 bp, Homo Sapiens
aaaaaatggaaagttttttaaaatgtggaaccccaggagaagggttattcaaagccggtaaaaaaccttttgaaaatttggacccctgttttccaagttttttcccatttttctccccccccggagtggaaaaatagattttttccattgggaaaggtcaaaataggtttaatattttttaattaaagggttaaatttcggaaaggcggtcccaaggggcaaatccttttccttaatttccttttaatcaaatattgaatattttactgaattgcgatttattaaatattcttatcctcttacataaaactgctcaacagttaatcagcagtgaatcatcttgcagttatgcactttaaaaaaaatacagattaccaatttcaagtgctgccagctaaaataactgttttaacgggtatcttttgtttgttcttttcacttaattattttattgtgctttgcatctccaggcagttttctcacatttgggtaaaatgtttagcaggctgtaaacttaagaaaagggtaaaataaaattttctggagaggaacttggaatttgagggagattttatatacctttaaaaactgtaatttaattgggatgccaggtttatagcaatttgcaactttaattttccagataatttggaggttagcatttgataaatgattttttaaagtagatatgaagattttgttaatttataatttattcatgtgttattactgtaattgaaaatgttatagacacttttaaattcagtttgtgtagaaagaaatgtgttaaacaaaattatgttaataaatattcccccctaat

SEQ ID NO: 453566 - DNA, 1418 bp, Homo Sapiens
tgtggggtggtgagggtctccccaccagtgctgcaccccgcagcagcatacaggcctgtgtggcctgctggccctgtggctctgtgtacagcgctgtgcatgttacatttgctctggaaacatctctggggtttgcttgttcacgaagttcatgaagtgccgctggagagccagagaccagctgcgcaggagccggaggaacgggcaggccgctgacctgaggtctggagaaacccctggagaagggtgtccccacccagcccatacagcgtgtgtgtggagggggccttgacctccgtgatgtctactgtgcctcacgataaggacccgccatgccctggctagacagtgtgtggttttttattggcacctcagtctcaacattttcttttcggattcatgaggaaagagaaatcctggggttggaccccaagacgacgtacaacaggttctgcggagaccaagagaaggcgtgtgagcaacccacccactggaagatcacctactgaggaggatcctccagggccgctccccggacccgacaggcgcgggtggatgcaggttctgtcgccgtggagtcaccgtctactgccagccgggagctgggcggaacaggaccgtccctcgcagggttcccagggcccagaagaggccccacgccttttagagctgggctccgtcctcggcgttgccagccgccatggctgatgaagaggctccgctgctctcgggggtggcggttgttttcaggcagcgtctgtgaacccacagctcggttgccagcagtgcccgcgtggtgacccagaagcaggagtgtttgtcaggctcccgctctggcctttccagccacctttcatgtcttcatattttaagtgcattgaggatagatgcaggcgggtgagctgccctccgtcaggtggacccgggctgacatttccctgggagctggtgcaaggagaagcgtcattttaaatgtctgcagagcgaccaggggcctcatgaatctctccgttgccctccgcgcagcaggaggctgcctgtgtgtttcctcctgggatgcgtgcaaggcagacctggtgctgcaaaggaaagggcctgaggcctcagggagccccgtggagggatgacagttcaggccctactgctggcacgtcagagcactgggaagtttttcagtgacgtctctggggcactcagtggattgtctgtaggaaacttgcagctctgctcctcacaccagggccggatggccacccaccctcgcccccactggccgacccttcctcggccccgactgccccggccccagcgtcacccggaattgcccggaccttgtccaggttgggccggtcctgcccctccccccgagcatggcaagtggccacatggggggcctcccgggtctgggccatttacct

SEQ ID NO: 453567 - DNA, 837 bp, Homo Sapiens
tttcattcctcacccacgggatggttggtaggaaccctgttctagaaagaagcacttgttgaccggggttgcgttggggaaccctattctggttacaccaaaaagagtgcatctcccccacgttaaaaaatcacacattcgcgggaaatttattcccctagagggaactaggtcgttggtacaatgcctggggatttctcgccccttcctgccagcctcgaggtgacatgcagcttgggcagcccagtggacatggggcaggtgggtggaggtcaatgcgttaacaactcccagccttgaactgcagcatcagtatgaaaggaaaaggtacagtgtgtaagcacccgtcaacatttacccaccatcgaagtgtctgctgtgactcagtcccatggttttacacacacccggtcaggtccaaagctaagcaccctttcttcctactaagaagggcctgtgccaataaaatcctgaatctccttttaatagatgcaagggctgaaagggcactggctgttactaatacagcacctgtttaaatatttgttctctctttaattctcacttgtacaatcacctacaagctgcctcttctgaaatagcagttaggatatgttatgacatgcagaaaatacccaaatctagtgccaacaaggcctcgtcctcttcctctagtcactcaggccctggtggggtatacttgttgcccgtcttcccaccacaggcccgggccaaggaaaggctactgtcaatgcagaatctaatgtttctaccatgtgcatggtccccttggtggggaaaactcaatgggaatctgcttccaggggcgactcggtg

SEQ ID NO: 453568 - DNA, 639 bp, Homo Sapiens
  misc_feature (17)..(17): n is a, c, g, or t
  misc_feature (38)..(38): n is a, c, g, or t
  misc_feature (51)..(51): n is a, c, g, or t
  misc_feature (62)..(62): n is a, c, g, or t
gtaaaaaaatggaattnttgaacaaaaaaacatggcancccaatgtcaagnatctccttctnaaaaaactgtaacttcttcaaaagcctaaagatcattttggaacagcatggggtcccaccggcaactctgcccatctttcgacccagacgtggtgagcttccccaaggtggttgagggctccccagagcatacagctgctccaaagccagcagcagtgtctcatatggtggagggtcccaggaaatcaaagtgcattaggtcatggatccctaagctcttgagcagcaacacgacattgcccaagctggtcctctggatctcaggcactgtggtttcctcaagctcgtgctgataggcccaggcggtatacaggcggaagcacttccctgcagccacccgacctgccctgccagctcgctgattggctgaggccttgctgcagggtgtgacagtgagcgattccatgcctgtgcgggggttgtagctcttctgcttacagaaccctggatccagcacataaatgatgccctcaatggtgagtgatgtctcagcaatgttcgttgccacaaccacctttcgtgccccaggtggtgtgggctggaagatacgggcctgcatgtcagagggcagattggc

SEQ ID NO: 453569 - DNA, 1218 bp, Homo Sapiens
gttccctctgcccagaggcctccatcttgagtccacacatatttaaagaaattgttgttgttcatcaacctgggccctgtgccaagttgttgcctgagcaccaagtaacccaagccacctatgtgacaccttctgggcccaggagtaatttctcagcattgagggtaaaataggatggagtgctctgttgatcatttgggagatgtaggttacctgatttgtgccttaggatgcagcgtgaagcagaagtccatattgcaattatgattttagaaggaactaagcattttactcacacccacagcatcaagaatgacttcctgcagcagatattccacctgtaatagcactttggaactgtgggcaaaaccaaaaggctagtgtttccatttattccatgttggtgtatggggttgaactggaaaattccctgaggcaaaactcactggccaaattttgagagggtatagaaaatgactttagagatgagtggttttgtgtatgtgtctgatgatattcagtctgatgttccgcaattttaaaagttataataaaataccatttttttaatctggaaggacattgatatatgaattcttagaatttgctattaaaaagggtagcccccattccacaagctggttttgagggtgatcttgctctaaaaaacctcattcatcataggctcagtctgacaggttctgtacggggctatcatctttctcctcctctgctaaatgcctctttcttccagctgctcactgggtcaaagggatgtcctttctcatctgtattcttgatacatctcagatgtattcgtaagctgtgctcctttcatacttccaaaggagtccgggcttctacagaaattcctctgtacctcacacttgcaacacatgtagatagcgctttgaacaaatacactatatcttcactatagtatgagaggtcctgggggctcaaactttaaacatttcctaactcagctttacactggttttaacactgtccaggtctctgcctgaattctcttgtcgaattcatagctctccaagctcctcttgtgttggattccctatgcccctaaccttgcaggcctcttggctctaatattttaccccatctctggagggtcacaagtgcaaagcaacggaactttccttacggaaggactaataaggttgatatgcccacaggttcaaccggttggccttcgga

SEQ ID NO: 453570 - DNA, 510 bp, Homo Sapiens
  misc_feature (26)..(26): n is a, c, g, or t
  misc_feature (40)..(40): n is a, c, g, or t
  misc_feature (51)..(51): n is a, c, g, or t
  misc_feature (87)..(87): n is a, c, g, or t
  misc_feature (215)..(215): n is a, c, g, or t
ccctgtaaaaacggaaactcgaaaanacatcaaaactcgnagagttccttncccgtgtgtgtaactcgcatgttcaaatcaggtccnaagtgctggatgaatctctgctcacgttctgagcatttatactcaaatcttctctttgggcttggcctgatgcctttccaagttagagccctcattatgagcctccatgggttcaagatattttcccnagatgactctactcttcccacaagagtctgttactacaataagcttcccattctcaatccttgtctcctcacccttctctttctcaggctttgtaacttcacactcatgccgaacctgctgttcctgtactcctttcagaggggccatctcctccacaagtattttttgtttctttggctggtctgggtccacctgttgtcctgtttctccaagatccagctgcaaatcctccagaacaacaaccacgtcctccctgctctctgggtgatgctcctgctacccgggcctggagct

SEQ ID NO: 453571 - DNA, 1171 bp, Homo Sapiens
  misc_feature (71)..(172): n is a, c, g, or t
  misc_feature (176)..(194): n is a, c, g, or t
  misc_feature (208)..(295): n is a, c, g, or t
  misc_feature (699)..(709): n is a, c, g, or t
ggatgtgaagaaagagtgagcatagcaaaattgagaaaggttgcttgaaaaccaaacaaaaaaccaaatannnnnnnnnnnnnnnnnnnnnnnnnnnnnnnnnnnnnnnnnnnnnnnnnnnnnnnnnnnnnnnnnnnnnnnnnnnnnnnnnnnnnnnnnnnnnnnnnnnnnntccnnnnnnnnnnnnnnnnnnnttagccaggcatgnnnnnnnnnnnnnnnnnnnnnnnnnnnnnnnnnnnnnnnnnnnnnnnnnnnnnnnnnnnnnnnnnnnnnnnnnnnnnnnnnnnnnnnntcacgagccactgtacccaaccatatgtcattctttagacacactgcttactaaatttctctttttaaaggatatactgaatttccggttgagccaacttaacagctaattttctattttagctttaaaacattgataagcaacatgaagcaatctagaacttaacctttaagtggctttattaaagcaatccagctatgagaattatgcagaaatgattatctacaattttaccagcacataagaaattcttcttttattttgaaataccatcttctcaccatatactttgatgttatgaatcaatgtctgttcttgaacattatttattgtctttctctattaaacaattccaaaataaaatttccagcacaactaaatattgttgacgataaggggatttnnnnnnnnnnnttcttttaaaacagaagcttatatacaacttagaatctaaaaccaatagatttatgggaaaccttaaaactgaaccacaacaaacaaaaaccaaagttttaatcatttaaaaatcatgtttattgaggtacaacttacttatagtaaaacctgcccttttcagcgtatagcactgagtcttgacaaatgcacagttatgtaccaccaccgaccaaggcctggcacatttttacctcctcaaagttctccctggctgcttctcccactccttggcaaccactaacctgttttctgtccttatagtactgcttttttcagtgtcatataagtagggtcacactgtacatagtattttgagtctgacctctgtcaactggcataatgcatttgagaattatccatgttgctgtactggcagtgcattcttttttattgctgagcagtattcaattgcatggctgt

SEQ ID NO: 453572 - DNA, 457 bp, Homo Sapiens
gcaacatcgaaaagttcacactggagaaagaccttttaagtgcaatgaatgtgggagattctttagtgagtattccagccttgttaaacatcagagggttcacactggagcaaagccttatgagtgcagggaatgtgggaaattttttcgccacagctccagtcttgttaaacatcgaaggattcacactggagaaatacaatgattgtgagaaatcctttagctggtgtttcaacctcattcaacaccagaaagttcacggtgtaaaaaagtcttgaaggttactaatggaaatccattagctatacctccaaactcattcaacactggacagttcacagagtggacaatgtagtgaatatggtaaaaggcctcagccaaaggcctaaccgtattcaacaccagaaagtttagactggagaaaggccttagactgtcgctgaatcaatatgacctg

SEQ ID NO: 453573 - DNA, 702 bp, Homo Sapiens
  misc_feature (11)..(11): n is a, c, g, or t
aaaacccccancctgactcaactattccataatagaaaagcactgcaggagaaaacttgtttaaaaacattaaaactcaggtgaatataaatacattttttgttcatctgtgctatgtccatatagaaatcccgtcagatattcagtctaccgggtaattcagttggatttcgtgtctgactgaatcagtagaagaatatacacttgcatatacttacacagatatgcatttacatatacaattcagaccatgaaaatttgttttaaatacatttacttaaaacatgtacctctaaaaataaatacactagcctccatttagctaattctcagagttctttcacaaaccaattagaacagtttatcaacaatggcagacaatcaattagccgccctttaaatccattatctatcagtaaacattttaaaattcagatgtataacagaaataacatccgcagaatagaatgtagatagaattctcgctttgaaaataaatgtcttgatttccttgatatttagttcctacagatgtctacactttgcctctgcatttatctagcagtgggagagcattttctggtgacagcattctattccatgacattaccttctaatcaaagaagttagctggcattccctttgctgttttgttcgagagaaggaacacaacatcgtttgtatttgatatcactcccatcc

SEQ ID NO: 453574 - DNA, 427 bp, Homo Sapiens
  misc_feature (51)..(187): n is a, c, g, or t
  misc_feature (310)..(362): n is a, c, g, or t
  misc_feature (386)..(386): n is a, c, g, or t
  misc_feature (391)..(391): n is a, c, g, or t
  misc_feature (411)..(411): n is a, c, g, or t
gagacagtctcgctttgtcgcctcctgagtagctgggattacaggcacctnnnnnnnnnnnnnnnnnnnnnnnnnnnnnnnnnnnnnnnnnnnnnnnnnnnnnnnnnnnnnnnnnnnnnnnnnnnnnnnnnnnnnnnnnnnnnnnnnnnnnnnnnnnnnnnnnnnnnnnnnnnnnnnnnnnnnnnnnactgtgcccagcctgcagtgttagaatacttaattcttattttctgtttcctttttattgagagtgagcttatttatttatttaatttatctgtttatttgagacagggtctcactctgtctnnnnnnnnnnnnnnnnnnnnnnnnnnnnnnnnnnnnnnnnnnnnnnnnnnnnnactggggttcaagcgatttttccngcctnagcgtcccgattgctggggnttaaaaggcatgtggg

SEQ ID NO: 453575 - DNA, 591 bp, Homo Sapiens
caggggaacagaaaactagtccgaatcaggttccttcttctttcttctcgtcccttttggatgagtcccagactctgttttttctttgttgtgttcagtttgttgtgtcatccactctttttctagctgtttcagcatgtctggagtgaggagtccttgctgcaccaatctggaagcaagggacagctctcctgcatcggggctgggtggctcagtagctttactccctagagctttggtgccgcgtgtccttctagcttggctctttaaggttcctgacaatcgtgactggctccctgatggaaagccctccaaattcaacagcttatgcgtctcagacattttaatcaatttagtgatattgtgcacaccatcttggataataccatctagttctttctggagatctcgaataaggctggcatctggaaacatatccataaatcggtagcttagccacaagtaaagatccaagacatcgtggacagcttcaagatccatgaggtctttaatattcttaggtggaagtaaaggccatttgatgtatcggcgtaaccatgcaaaggtcaggggctcattcctgctatactg

SEQ ID NO: 453576 - DNA, 473 bp, Homo Sapiens
  misc_feature (409)..(409): n is a, c, g, or t
  misc_feature (448)..(448): n is a, c, g, or t
ggcaatatggatgattttaaattttctgcagagttgatccagcatattccactaagtctgcgagtgaggtatgttttctgcacagctcctatcaacaagaagcagccttttgtgtgttcttcactgttacagtttgccaggcagtatagcaggaatgagcccctgacctttgcatggttacgccgatacatcaaatggcctttacttccacctaagaatattaaagacctcatggatcttgaagctgtccacgatgtcttggatctttacttgtgggctaagctaccgatttatgggatatgtttccagatgccagccttattcgagatctccagaaaggaactaggatgggtatttattccaagatgggtgttgcacaatattcacttaaattggatttaaaatgttntgaggacggcattaaggctgttggaattttgggaggggnttttccatcaggggaggccagtttt

SEQ ID NO: 453577 - DNA, 676 bp, Homo Sapiens
agtcccattttttgattttacagaacttctttatgaaggaaacattatcctcttttcatctcctagataaaaaggtaaataatttagcatataaatgattttcccaaggctaattcggacgagacagtagagctgggatttggatctagttttctctgagtcaaattcctctgatctttcttgaaagtcactttcattttgtcccaacacatctgagcagacaccagtggtttcagaacacgtgccatgtcttcttactttccttgcccctttctttcttaacaatattacacctgaggaacagcgcagaggcggtgactgactggggaaatggtgatacccattctaaacttcaggctcagcttctcattgtttgggggcctgaaggtaaatttttgcataagggaagtgaagaaaataaacagctcagtcctggccaactgttctccgaggcatgcccgctttcctattgagaaaggcataaaggcttcccttttcttaaactgtccattctccagaaaatggtccggattgaatgtgtcaggggtggcccactctgtggggtccctgtgcagcgccgtcaaattggtcaggatcatggtacccttgggcaggtggtacccagccaaagtggtatcaactgtcacttccctgggaacgttcagggggatgatcc

SEQ ID NO: 453578 - DNA, 796 bp, Homo Sapiens
  misc_feature (695)..(695): n is a, c, g, or t
  misc_feature (710)..(710): n is a, c, g, or t
  misc_feature (766)..(766): n is a, c, g, or t
ggactctctgaacgaaattcatattatcttattaaggaagagtgttggtcttcaggaggggaagtttgctgtattggatgccatcatcgtgtccttgtcattgcccttccggttttcattcttgctaaacccctgtgaatgttcttctaaccttcctgttccccaccccttttctcagatttgacctagaattcccagcccaaatccataatttcttagctctaatacgaattttcatgttggacaaaaacctagctacaaatgggtttctatggaacttctaattaatgtgcaaaatacatattttctccaggttaagaaattttaagtcagatcatgctgacacaataagaaaatttgtttgtgtaattcattgacctcttccttccaaaataacatcaagtagccacctcagtgtgacaatatccagtcaatagtagagaatttaatccttggtcctataaaagaataaaattcattgtcgtatttatagcacgtaagccttgagtaacaggtcttaatgttagtgttggtgttgtggtttctgcggaacgtttacaagtgaagttggattctcctgggctttaaatccaaaaagtcttaatgaccggttcatgtagttcccctcttattcccctgtggtctcctcaggaggccaggcgtgtgctgggggaaagagtattaggtcatagccngggcttttatagganccaggggagggtcccttttaggctggaaacaagtgggctttcaaaagggggaaccntggaaacagtggaaaagttagcccaaaggt

SEQ ID NO: 453579 - DNA, 383 bp, Homo Sapiens
aatgctggctatgaaagtgcttcctttagttcttccctaaccctggacttgcattgagtacccgcggcagcctccttttgacatttcatttttacaatacattgggtaaggccccatgcatgaggtacctgatcaatcctgtgtgaattaaccaatgagctgagaaatgacacagacctctctgacctggcaccatcagacttctgttcatttctcagctttctctcagatgcagtagtttttccatgttttcagaaatgcatcacatgtgggtaagaagagactacctgtacttcctttatacagcagtctctaaagcagttttgctatttggcaaatccattgatagaattttagtgaatttggctgggcacagtggttca

SEQ ID NO: 453580 - DNA, 1209 bp, Homo Sapiens
gcattttaaaatagctaactttattgtcagtgaaaagataggcacaaagtggatttaaacctgcttaactttattggaactagctcagttgattacagaatggggtcacaatcattaggggaccacatacattttaaaccaaaggcgattcttctctagccatctgccaaccccagctatccattttacaaacacatgccattaatcacaagggaggccagaaggaggtttcatggctccatgtaacccatcgttgctactggaaaaaaataaacaaactcccgacacttgtcctactgatgatggatggcacttggaagacatatttccaagaatcgtggcaggctgaaattggtggcaattagcccacagctgataccttcctttgaaaacattttcagtaagaatgcacacgttttaagtaacatattccatatgcacataagcaattgagataataggagactgtgtagctaacagatatgagaatataattgatcaaagttagtgcatatgtatacactttaagctgccgcattatgagggtttaggcttgtcataaaaaggtagtttgcacaatcaaatcagtttgttcattttccaattgttatacccacccaacagtgtaacaacaaaaagagaacatgatgggtctctgggtatctttcctatggcagatgatggcagatattttaggttcctgctgtcctattaccttgaagctcaaaagcagcattaaaaggaaatccttcattaaatcaacaatcaagatacatgattttaaaagaaagctcaagctactttttatttcaaaaaaagactgttaataggagtttcatatcaagtaaagtttgttctaatgaagtttttctatacatggaacactggggtacaactgaattagaaggtcctcagagatcaccaagcagtacaagctaagacaacctggtcaccctcctttcctgaggtgccggtaaaatgcacagataggtaggagtccagaaagagtcccccaaatgttatatccacacaactgtgaaaaggtggctaattgagatttctcccataaacttgaatttttggaacaaaaactagtggagatcttctgaaaaggctgtatctatcttctgcataatatactgacatactcttcttccctctcttgtatgtacaatgttattttagcaaattattcggggatgaaacctg

SEQ ID NO: 453581 - DNA, 590 bp, Homo Sapiens
  misc_feature (176)..(184): n is a, c, g, or t
gctaatattaataagaggatgaacaatgtgggtattttagtcttgatttgttagttaagtgatatgattatggtttgtggagatgagagagctgtcagtgtttaataaatacaataaataacaagtgatgtactgttataatatttaataattaagtttagagcagagtgggttgnnnnnnnnntaatcacataaatataaataaatgtttctgagactataaaaaatcaactcaggtcataagagtgacttcacaagagtatctcaggaatttttaaatatttgaacacacaaacacaatgaaactcaacatctgtcagacatcacgtgaactactagtgaggtagttcattctttcaacataagattgcactataatccttctgataatttcatatttttgtgagactgggttttccaggccatctgataaaaaatcaagtactatatggacaccaacatggagcagaaaatgagggcagcagtgtccaatctcattccaggtgagaagttgcacagtgtccaataggtgcatacatctccttagtaagtagttgtgattaacaatgaaatagaaatgaaaaatatcc

SEQ ID NO: 453582 - DNA, 1095 bp, Homo Sapiens
  misc_feature (530)..(547): n is a, c, g, or t
  misc_feature (678)..(678): n is a, c, g, or t
  misc_feature (825)..(825): n is a, c, g, or t
  misc_feature (838)..(838): n is a, c, g, or t
  misc_feature (843)..(844): n is a, c, g, or t
  misc_feature (847)..(847): n is a, c, g, or t
  misc_feature (1034)..(1048): n is a, c, g, or t
  misc_feature (1050)..(1050): n is a, c, g, or t
aacaacaaaaaaaccactttactttaacaacaatctcccttgaaaaaactaggcatttttaatatataggagtggcacagccaaagataaaaaataaactaatgtcatcaagacaaagaattagaaaaataagcatactagaagttatttatgtttaatgcttaaaagtctgaattcacaaacaatctaccattatagaagtactggtggtcaatacaatgcattagaactatgtacaacgcacagtttagtatcaaaatctttctacactgtagagttttacgaaactgttaatgacatcaaacactaagcacttaagacaccatttttttctgctaccacattaggaacgtcaatggacagtccatttcaacttgcagcatccatccatttctagtatgaaattaagtaattttctacttatacaataaagtatatctacacggttcttttgattttgatccatagcagcaaaggcactgtacatcagcagatccacagacttaaaagatttttaaagcattcaaacnnnnnnnnnnnnnnnnnngaagtcacatattatagtttaacagcaacaacaacaacataaaagataacacaatgtttctggcacaatggcacagcctgtgtccatttcagggacatccaactaagacatggaaagaaccggaggtaaangaaagcaagtcctcatcccaggagagagtccattctttgtgtttttcagagggaggtctctgcaaaccctcctctgctgtccttgttttgtaaaagacttaacttgcacagcagtgggagtcctccccataactgtgcagctcccanagagcatgccacnaaatnnccnataatttctcataacaacaaaactgactaaagatatatatatctccttttgcaaaagaaatgtggcaaaaatatccagaagggagtaagttctctctttgaggccaaatttaatttgttcatctgcctataatacaacaaaaaaagggaactaaaaacatattacaaagacacttgtcaacgagtcnnnnnnnnnnnnnnngnccaattacttttatcgaatataatctaaagctatagatatattgg

SEQ ID NO: 453583 - DNA, 881 bp, Homo Sapiens
  misc_feature (473)..(713): n is a, c, g, or t
  misc_feature (716)..(716): n is a, c, g, or t
  misc_feature (769)..(769): n is a, c, g, or t
  misc_feature (847)..(847): n is a, c, g, or t
tgaatttgtagctgatagtaggttttacttgtgtaccccatctgcactttgatgttgtgtagatcgttttgtgagttatttgaaccgtgtaactcagagaatagtatttcctcatacataaagtgacctcacttttaatcagctcctttatagtatgttgaaaatcactgcgtgtaatgagaggtattgagagtttcttgcacacatgagtgtaaaaggttgagaactagattatacaaagtagtaagtcacagtgcatggcaactttctacaggttggattataagacttatgtggaataggagaattatattgggaaaaaattattttctctaacttgaagactccagagacacttttcttagtcatgaccagtaatatttttcatatattttgggaagaaataagctcctcactataccaccagttagtgatttatttatttatgtattttagagacagggcctccttcnnnnnnnnnnnnnnnnnnnnnnnnnnnnnnnnnnnnnnnnnnnnnnnnnnnnnnnnnnnnnnnnnnnnnnnnnnnnnnnnnnnnnnnnnnnnnnnnnnnnnnnnnnnnnnnnnnnnnnnnnnnnnnnnnnnnnnnnnnnnnnnnnnnnnnnnnnnnnnnnnnnnnnnnnnnnnnnnnnnnnnnnnnnnnnnnnnnnnnnnnnnnnnnnnnnnnnnnnnnnnnnnnnnnnnnnnnnnnnnnnttntttatttattttgaagagctcttctgttctatttactctttttctttctcccntttttccatctgttgccccaatttgctttaaactgtgttcatttttttatatattcttctcttttatttctggatgcntaattctggaattaatttatatccttcctttttt

SEQ ID NO: 453584 - DNA, 764 bp, Homo Sapiens
  misc_feature (732)..(732): n is a, c, g, or t
ctgggtctagccaggagtccacaagtgtcacgatgggagcgaagaatgacgttgacacctctgagcctatgtacggctgcgacatttgtggggcagcctacactatggaaactttgctgcagaatcaccagctccgagaccacaacatcagacctggagaaagtgccatcgtgaaaaggaaagctgagctcattaaagggaattacaagtgcaacgtgtgctctcgaaccttcttctccgaaaatggcctccgggaacatatgcagacccacctaggccctgtcaaacactacatgtgccctatttgcggagagcggtttccctcccttttaactcttactgaacacaaagtcacgcatagtaagagtcttgatactggaaactgccggatttgcaagatgcctctccagagtgaagaggagtttttagagcattgccaaatgcaccctgacttgaggaattccctgacaggctttcgctgcgtggtgtgcatgcagacagtgacctccaccttggaactcaaaatccatgggacgttccacatgcaaaagacagggaatgggtctgcagttcagaccacagggcggggccagcacgtccaaaaactgtataagtgcgcatcttgcctcaaagaattccgttccaagcaagatctggtgaaacttgatatcaatggcctgccatatggtctgtgtgccggctgcgtgaatctcagtaggagcgccagcccangcattaacgtccctcccggcacgaatagacca

SEQ ID NO: 453585 - DNA, 1081 bp, Homo Sapiens
  misc_feature (36)..(36): n is a, c, g, or t
  misc_feature (154)..(154): n is a, c, g, or t
gtctttagaatttattgaccaatataaaacaaactngggctacacatatacacaaattatttaaaacacattgctggtgctcattcaacaccataaattcatacaatagctgatatttagtagcagttcgaacatggtgtagtcacaacagatngtgtccatgtactatacataagaggggctgatttcacctattccatattttgacatattggggaaaatgggcagtggcggaatcctgaaacacaagctgcctttagagctaattgagtttttgctgcccaactgaactggaaatttattcaagatttgcagcagatatcagccatgcaggatgacagctgtagatggtgacacatccattaaaaatttgaatttctaaaattcttcatatttgtgaaatcagtacactttataacttaagaatgcatacatgttttgcctcctctgagactagatttagcatctgtaaatgagatgcaagtaaaatggttgtgagcagatacgatcatcatttcttaagtggtgaaaccatgtgcggtgggagacagtattttgaggtttaccgaactaattcagaatatgatcctaacctcccaccaaattttttaaaaaggtaaaaacagttctgttttagtgtagttatttttctctctctgtacacttttttcctttttattagactgtttctaagcaccatggcaaaatcaaatttatggattgtgtttaccagagtttacagagctccactgggaagcctagaaatctctgctgatttccctgcagtctttgaagctccataacatagaacctaatcttcacagtaataggtggtctaattctctgtgcaagctgtaggccaaaccttacttttaacctgaagataattagaaggaaaatgaaagtgagtatgttccattagttactactgaaaaggctttgcttccctgaaacccagtttgccaaatgatgcttggatgttcctgtaatcatgctgtttctagtttatttctgctgtaggtcttagtgcttgtattattttaaagaactaattttatttaaatgactagtaagaatttac

SEQ ID NO: 453586 - DNA, 836 bp, Homo Sapiens
cccagctgccaccattttattgctttccccagcagcatgatgggaacccaagctgagggatacaggtcctgatttggtaggaatattattcccaagaaatacccgctcctcacctactccctcatcctaccaaggtgcctgaaaatgttcaagacttatgttcagggtgggatgatggaaccgagggcttcatcaaagtgagaggaaaggaaaagcatctggcatgtgtttcttggataggggccagtgcagtgccatcctacaggtggctggagcagctgctttgcaacctgatcaccttgagttctgagcagggactaggcttgcaggtgagataatgggccagggcacccagtccagaaggagcaatggcacctgggcagtgccagggcttaaagcccgctgctccttttcggtagaggagaggcccatcactggtgtggtggggtgggctctcccttaggcttgggcaaggcagccacctgcccttgctctcccttagtgttccctggcctccctgccatcaggttgctgggagtggagatggagggattattgagcagaaaatgagttggatggagataaacagctcccatccctgggtaatggatggtaagatgatggagattcctaagattggtggagttgggcaatgcatagccatctgactccttcagggtgctcttgatgggctggctgtaagggagactcagtcccagcctctcccctctacaacttctgccactgttggccatgtcgtaaggcagcagctgtgccaggatagctgggtcattcagagcaccttgaaagtgttgcagggaggtgtaagaagagac

SEQ ID NO: 453587 - DNA, 489 bp, Homo Sapiens
  misc_feature (413)..(413): n is a, c, g, or t
  misc_feature (450)..(450): n is a, c, g, or t
  misc_feature (468)..(468): n is a, c, g, or t
tcggcagaggcccagctgccaccattttcattgctttccccagcagcatgatagggaacccaagctgagggatacaggtcctgatttggtaggaatattattcccaagaaatacccgctcctcacctactccctcatcctaccaaggtgcctgaaaatgttcaagacttatgttcagggtgggatgatggaaccgagggcttcatcaaagtgagaggaaaggaaaagcatctggcatgtgtttcttggataggggccagtgcagtgccatcctacaggtggctggagcagctgctttgcaacctgatcaccttgagttctgagcagggactaggcttgcaggtgagataatggggccaggggcacccagtccagaaggagcaattggcacctggggcagtgccaggggctttnaaagccgcttggttcctttttcggtagagggagaggnccatcaattgttttggtngggttgggcttttcctttagg

SEQ ID NO: 453588 - DNA, 422 bp, Homo Sapiens
  misc_feature (330)..(373): n is a, c, g, or t
tttctttacgcaagaatgatggatgtggattttgtgtttaagtcttgaaaaaagagtcagtgacctcgaaatctcttgaaagaatatgcagaaagcttcctgtgcactctcctagggtcacctagttcctgaattttgagaagcaagtgataggtcactcgggccttcaatggcggaaagtgatgttcagaaccatgtcacctctggtgtcctctgtcaggtgacaacacagtctcaacccagccatcccccatcccacaccagctgcagcaacattctctacactctcacataaaaagggttatctggggccaggcacggtggctcatnnnnnnnnnnnnnnnnnnnnnnnnnnnnnnnnnnnnnnnnnnnnaaggtcaagagatcaagaccaaacacagtgaaaccccgttgccacaagg

SEQ ID NO: 453589 - DNA, 745 bp, Homo Sapiens
tattctattcatttatgacccttcttccctaaaagcccctccacacacatcctattctcatctcagatactctcagagctgggccagcagagtggagaaagttctttgttgactaaaggaatataatgctaaagaagagaggagctatcaccttgtttaaggtactcttggaggcttgaaacagcaaaccagttactcccagcctgtgcaacaggccctaaccagatcaccagtaccacagatttttccaccagcactgccatgcccatttatgccctttgattttgacactgtagttctcagtgccttgtcttaatacactcaataactcagtttctttttcagaaaaatgacatagcttatctaatagaattctagaaagcagcaaatactgaaaaatgaaagtaaaatgttttgctataggagatcctatatccagaatttaaactgttttaattggatctgagtcatactatcatggataacacatggtttattccaaggtctctcaaaagctaatttcagaagaagcaacctctttgctgagtctaattttttctacatgggaagtgggtaccttttttgtttttcctctgaataagataaatatcattaagtatcatggcttaagaaatgatctactattaccaacactgcatttatcatatgtagtaattagcttttagtcatgtacttaataatattttgaacatttatcttgagcttttttctaatcttccccaac

SEQ ID NO: 453590 - DNA, 763 bp, Homo Sapiens
aatctcccaaagagcaactcctatcctcatttaaaagacaaaacctctgcagtggcctgtgatgctccttaatggcctacataatccagccctcaagcacctccgtgatctctgtaaaactttcccttggtcactgtgcttcagccacattaaccagcttgcatatttctcacattcaccaagcttgttcctgccttggggcctttgtacttaccatgttctgttctgagaatactctgcctcaagatatcctacaactatcttactgtattcagctctctgctcaagtattaactgatgaaacctgtcatccctactccactccatgttctgctttacttaacagcaattgcacatatggccccctgaataatatacatttagtcacttatttttacttatctgctaattaaaatgtagactttttctattctgtttactgctgtattcccagcatgttttatccgaatgtgcagtggtttcttttcttctcccttatcgtgggaagtgatgtgcacaaatacacataatggagcctgaatgtcatattgctttcatacctgtgtgaattttggtaagaaaggaaagtagcgattgacaggtaatataattacattaagtcactctcatagttagctgtttattgcttcctgctcttattctcagtccccaggaccaaaatgttgacataacttccccaatataattaggttatttaccgaacgcatgcaggtgggtgtaacaggaagattttacttacctt

SEQ ID NO: 453591 - DNA, 1885 bp, Homo Sapiens
  misc_feature (1245)..(1253): n is a, c, g, or t
  misc_feature (1303)..(1358): n is a, c, g, or t
  misc_feature (1551)..(1565): n is a, c, g, or t
cagtttattccacaaatatttattgagtatctactatgcactgttgtttttggcactggggatacagcagtgaacaaaacagaagtccctgctttatggagcttacagtctactgaagagagacgaacactaaccacaataaataaatataaaatataccaggtggtgatcagtgctttgtagaaaaacatacataaaataggataaagggatataaaatgcatgtgatggggcgattttagatatgttgatcaggaaacacttctctagggaggtgacatttgagcacactggaagtactagggcaactcatcagattatttaggaggaagggtgtttcaggcagtgagaagaacaagtacaaaggccctgaaaaggaagggtatctagcacacttggggaacagcaaggaggccagtgtagctggagaagagtgagtgatattgagagtgacaggagacaaggtaagagaggtaaagggaaccagattatgtagggactttgggccatggtgagggctttggcttttgttgagggaggtgggagcatgggagaattctgaatagtggaaggacatgatctgatttggattgtataaagaatttcagagaagaatagtataggtactagaacactaagcaaaagaaaacaaaatacacaattattagctccaaggaaaacgaaagggtatacaacgaaggatatgtaatcagaatatactatgtagttttgatgtgaacaatatttacaatgtcatactcatgcaaacagtgactactggttgaacaaaaattatataaaatgttttaaagaagtaataacagatgtaatcactaagatgaccaagcaataagagactattagggatgactaggcagattagcaagtaaaatatatgaggtttgtacaaatgaaaaatataacttttgaaataaaaaactcaatgggcagattagagcagattaaacatagttgaaaagagaatcagtaagctgaaagatatacctaaagaaattatccagaatgaagtgcagaaagacaaggagatagaaaatctcagagatgttatgagatacggaagatagaatgaggaggtccaaaatatgactaactgtattccaagaaagaaaaactagaaaaaatgaaaggcaatatttgaagagataatggttgagaatttcccagaaattatgaaaagcatgaattcactgagccacgaagcatgacatacccaaagtagaattnnnnnnnnntacatatgtaaacatgttagagtaaaactgcaggacccctgcacattccnnnnnnnnnnnnnnnnnnnnnnnnnnnnnnnnnnnnnnnnnnnnnnnnnnnnnnnnaaccagcaattagtctgatagtcgacttcttaatagcaacagacatctcaaagccaaaagagaatggaacccatatattctaagtgttgagtaaaaatacctgtaacaaactatcttttaagaatgaggataaaataaagacatttacatataagaaagactggaagaatttaacatcaagagacctgtactnnnnnnnnnnnnnnnctcacttaaacactatattcataatgaaagaaaatgatcccaaaggatgatgtgtgatacaagaatgtatgcatgtaagtccaaacaaacactgtctatataaaataacactgacaatgatgtaaaattgtgaggtttataaaaaggaacaaactaacatatttgaaaacaacagtatgtgatcaggagaggaatgactagagttgaaggtttctaagcttcctgcattctttaagaagggggctaaaatattgtttaactttagactttataagttaaacacatatggaaaacatcaaggataaccacagaaagaatag

SEQ ID NO: 453592 - DNA, 942 bp, Homo Sapiens
  misc_feature (593)..(616): n is a, c, g, or t
  misc_feature (807)..(850): n is a, c, g, or t
ggtacgatatgaattgccaaaaagtatccaaaaggtgaaaatgctataactaggtatattaaaattactcctcggggaaaggtatctatttctacaacagcagtttctcccataataacagctttagttgactccagctccttccaaagagaaacattggtcttcaactgtataatggcagcatctatggatgcttgtaaaactgtgaaacctgaggaccagtactgagcagcctcacatgattttgaacagccagctcttgaatccatataaatagaagatactggaatcatatcaggaaaaaaacgaagttcataggacatggagtctttgaaaaccacacctacaaagttgctcggcttagagagactggatgttaacatttctttttcatttgtatattcttcagtaattatgacatcaggtagatgatcagtagacactttctgcatgatgctgcttgtaatattagtcactggagtatatccaagaattagattagaaagagtaaacttgtccataggattgagttctatattaggcacttcttcatatttcttatttggatgcatcatgctaattaatattaaccnnnnnnnnnnnnnnnnnnnnnnnngaatttcctgaacactactctttttggttctgcatttaattaagtaattcttcagtagaagtgttctggtctgtctccaaactcctacctccctaattgcagtggacatgttttctgaataaacctgggcgcagtgacacacgcctgtagccccagctattcagcagggtccctagagtccagacgttcannnnnnnnnnnnnnnnnnnnnnnnnnnnnnnnnnnnnnnnnnnnacgctgtctctcagggcccgagccgcagagctgtcaggcctggacgcgctcagtctgttgactcagtgcgggtgacccagctgggatctccc

SEQ ID NO: 453593 - DNA, 853 bp, Homo Sapiens
acttcattgagactgccccatgtgctagagaggtctcttccatgttgggaaatgcctctgccctcatctgggcagttctgatctgtgttcatgggttatttttcccattgtcagggtgaggcattcactctttggggaagtgaggaagctcatcacagacgagtttgtgaagcagaagtacctggagtacaagagggtccctaacagcagaccacctgaatatgagttcttctggggcttgcgctcctaccacgagactagcaagatgaaagtcctcaagtttgcatgcagggtgcagaagaaagaccccaaggactgggctgtgcagtaccgcgaggcagtggagatggaagtccaagctgcagctgtggctgtggctgaggctgaagccagggctgaggcaagagcccaaatggggattggagaggaagctgtggctgggccctggaattgggatgacatggatatcgactgcctaacaagggaagagttaggcgatgatgctcaggcctggagcagattttcatttgaaattgaggccagagcccaagaaaatgcagatgccagcaccaacgtcaacttcagcagaggagctagtaccagggctggcttcagcgatggtgctagtattagcttcaatggtgcacccagctccagtggtggcttcagtggtggacctggcattacctttggtgttgcacccagcaccagtgccagcttcagcaatacagccagcattagctttggtggtacactgagcactagctccagcttcagcagcgcagccagcattagctttggttgtgcacacagcaccagcactatgttcagcagtgaagcaagcattagcttt

SEQ ID NO: 453594 - DNA, 683 bp, Homo Sapiens
ttttttttggatagatgtagctttatttccggcaagctcttgcatcttttccatctttgtgagaacagaaagacagaagggattaaacagttggaaccagcatacatacagagctaccaaattatcactcttagttgtgacaatttgcgtatctacttttcctccttctaaaaatagttctcacctctctcctgtctattgcctggtggatgaggcctgtatgccttcccctgggcatccacagattgcaggctggggcaaggacaatatacagacctctgctcactagctaacaccacactctcccctctcatccaagaaagtgtaatagagtctaaataagtgagaatgctaaaaataacagaatggctttcattgaccttaatttttttacagtaaattcatcacaaacattgatattttatctaccattgataatgactcacttgtgacacaactcacaaatgttgggacagcatgtttaagaaatatttttaaaaacaaaaataaatttgaagatacattgctaagcttcccagacagaccagcactctctgcctctggtatcatcagccaaggcatggtgggctgggttgactcccccagctcatacattcacatttagagtatctgggacaagggtcttaggaacatcaccagagacatttggactcttaagatcc

SEQ ID NO: 453595 - DNA, 756 bp, Homo Sapiens
  misc_feature (79)..(79): n is a, c, g, or t
  misc_feature (107)..(107): n is a, c, g, or t
agcccttcctccccccatgtctttaattttccagattgaaaagaaaagggcaacagctgaaggagaatgatgagcattnctgtgagactgcaattaaataaagtccnggacaaactcttcagtcagtttaggacccccggttacaaatatatgagagggaaaaagaaaaactggactaaaagacaaggaaaacaagaattacatattattccatggatctggattaaaagtagttttttaaaaaacgtttctttagctctgtgttcaaatgtggatgaacagatgcctatatctattaaaagacacatacactacatatagccttaaaaatatctattctacagttttttcagtactttgtaacattagtcaaaatagaatgagccaacagagtaaaaatgttcaggttttggagaaaaacataaccggaactgagtaataaattaccactgtgcgtgcatccctaaatgctattgcgatgtttccgggttaaattctaacaggtcagtgatgatgcaattgaaacgctcatcttaagcagcatctacgtggggctgaagacatttccctgtattcttattactaacagacaggagagatgtgcgagttgtttacaatagtataaatactgctttggcaattatgaacatagcaatgtaggtttcacgtggtttctctctcgtctttagcaagtacacgtcaaatctcacagcaacactgactcttggatggaaagcccgtcccgattcctgtacc

SEQ ID NO: 453596 - DNA, 661 bp, Homo Sapiens
atattaaccctaagggagattgaatagtttttaatacattgtttccaactggggtatacagatcccttggagagttggggagtgtttgaagccaccagaaaaatgtggcacatctccctcaagcttcgctttactgaagagtatgaacttttttaaacggtaagacactcacgatttatggattaaaaagttttcacatggattttcagggtagaaatagacttaagcgtttacccttgattcctagtgttacctctccagactcctcatgtctgaatttttcttctctgccatggggtacttaataaggtttttcaaacacttcccttcccttattcaaacacttcccttattcaaaacactagaaaacaatagcatttgttattctctctgatttcgagtaataatggggaaaagtaacttgagtaagtgaagagtctgtattttaaatacttgtgggtttagcacttcaagtgatatatacagatgaaaaatctaaggacgtttctaaataaattcttcaattcttatcactaaatttctcaatgaatctgcttgaatgcataaagatctgcatttagcatattaattgtgacttcacaggtgtctaacatttctttatctgctcacattcttttgataaagctagtctttgcaatcc

SEQ ID NO: 453597 - DNA, 583 bp, Homo Sapiens
  misc_feature (55)..(64): n is a, c, g, or t
  misc_feature (476)..(476): n is a, c, g, or t
  misc_feature (535)..(535): n is a, c, g, or t
tttttaaaccattcgttacgctgtgtagacagagctttattgccctggaaaagannnnnnnnnnaactctcatgcagttcagtctttccatcatttcactttgtgagtcactcacataattgtcaatcattcctctgaccttcttaagaatttacaccttaccgtctctgtgattgaagcagacttctcgctttatttcccttaggctcatttttctgtgggctctcccttaaagacacatggccacagacacctccttcacatatgtaatctgccttcccctgcggccttccgtggtcacagcaacagggactgctcaccccctccagctggggcttttctaacaagcacagtcagaaatgcgcaggcctgggggttggggatggaacagaagttgaatttagtggggcacaggaattacagttaggataggaagggattagttccagcatttcggtttttacagtaggggagantgcattttaacattatttgattgtatatttggaaaacagctaggaggattaggattttncccacacaaggaaaggttaggcaggtgaagggaattcccgttaccctc

SEQ ID NO: 453598 - DNA, 705 bp, Homo Sapiens
ctcgtcgcgtagggtatcctatgggggtgtgggtaggctaagcgtttggatgctgcatgctgcgtgcttgatgctagtcccttctgatctcagagtcccattccaatcaatttgcagcttcacataagctgttgacctgatttctgacactgcttcagttgtaaattttatactgcttctgtataaaatgcctttcttctctatctgtgtatattttataagatgtccttcttagtgtgaaagaagggaaatgtggatcatcttgtggaagctaatcactggcaggagcctggaatggctggcggacagatatatgagaaagaacaaattatgaaggtagaacagagtgtaggaactgggaattggtttcatggtataggttttaaaatgagacaggctacccttcgggagtccacctctcttgaggcggtgagcagaagcttgtcctccatatttatacctagaagtgtggactgctggttcctgcacagactgccggttattcactaggaatatttccccaagcaccacagtataaaatactacagcactctgtgttaaagactaactgtctacatctccatatgttgtagtgttgtgaaaatgtgattttaaaaattatcgccagttaaaactggctattcttttcctctatttcaagtcatttttgttcagtggaatagagacagcaacatggtgttaacc

SEQ ID NO: 453599 - DNA, 673 bp, Homo Sapiens
  misc_feature (630)..(630): n is a, c, g, or t
  misc_feature (654)..(654): n is a, c, g, or t
gggggaaggcttttcgatggggctcaagcctcgttattcataagaggattcatactggtgaaaaaccctatgaatgtaaagactgtggaaaggcctttcggcgtggtgatgagctcactcagcaccagagattccacactggggagaaagactacgaatgcaaagactgtgggaagacctttagccgtgtgtataaacttattcagcacaagagaattcatagtggggagaagccttacgagtgtaaagactgtgggaaggcttttatttgtggttcaagcctcattcagcataaaagaattcacacaggtgagaaaccctatgaatgtcaagaatgtgggaaggcctttactcgagtcaattaccttactcagcatcagaagatccacaccggtgagaagcctcacgaatgtaaggagtgtgggaaggcctttcgctggggttcgagcctcgttaagcacgagaggatacatacgggcgagaagccgtacaagtgcacagaatgtgggaaggccttcaattgtggctatcacctcactcagcacgagagaatccacacaggcgaaaccccgtataaatgtaaggagtgtgggaaggctttcatttatggatcgagcctcgtgaaacatngagagaattcataccggggtgaancctattgggtgtacagaat

SEQ ID NO: 453600 - DNA, 662 bp, Homo Sapiens
  misc_feature (148)..(157): n is a, c, g, or t
ctgacctgcataaggctgataatttattagtatataatacatgactacaataatcttaatactaacaaagcaatattttttaaccaagaactaagtatatacctcatttacaattattttaaaacaaatttgcttatgggagcaatgnnnnnnnnnntcttgcctgtaaattctggtgtaacttaattgaattttaaagaaaaagttttaactacagagactgactgacattccattgttctacgtccctgagggagaagtaccttaattgaattttaaagaaaaagttttaactacagagactgactgacattccattgttctacgtccctgagggagaagtacaggccaaaatgaagagcaatgttcacaaaggcttggtagaaataagaggagaaatttgctggaatcttcaacatctctgacctttgttctctcttggaagggcttggtttggactcaggacagagcttatcttccaaagcacagttcagggaaggagcagctgtaacaaatgttcccttaggagatgtttgtctattatgttgcttaatgtctattgacattgaattgcttttgtttgtttcagacttcaattctaaaaaaagtttgtctctgctaacagaccagtatacttccttttaccaaatgttagaggttcc

SEQ ID NO: 453601 - DNA, 1036 bp, Homo Sapiens
gagagacatttgcttaaacgtggtaaagaactcttgttttatggactccttgcttcatgttcattttgtctgtttttcttttggcttttgacaatagctcatcctttttgagtgtgagtttaattatggccatattaaaaagtccatcataaacaaagactcctcctcatggtatgaatatgctccatatgcccataatggtgcataacggacttagaaattccaatgagtcttagggttgaaatttccaatgacctgagcaaggcagctccctatagcttctggataacattttacacccagagttcaggcttaaacagacctatcaacacaattattttcggattgtctgtctagaaaacggcaatgctcaaaggaatataaataagggtggggggacatatgcttccagcctggtcctttctccatgtggtaaaaaacaatggaatggctgtgttaatttttcttttaatcttttctggcctttactatgtttggtaatggaaataagtcagggaaaacaaaatgaacaggtctcatcacttaattaatactggtttttcttctttatacttagtaatttcctagttttttaaatgataaacctattttgacaatcactaacatcaatacattttatcgtaagtcccatataagatatttaacattctccaactttcggctcagctggttacagcaccacatttccagtccaggagatgttttcacaaacagaaggagcgattcacagcattaataagcagacttggaaagacagattttattggctatggaggaagttgtatctttcttctcaatctaattttcagtccaattttggttttgagaatctatctctatcagaggggatcttaatttctgactactgagtacttccaatttataaaagagctgacttttaaaaaattctaacatctttcccaaactgtttagaaatatgccatatttgaaagacggaatactgtttgttcccaagaccaacacaagaaaaggaggtgctcatcttcgctttcct

SEQ ID NO: 453602 - DNA, 676 bp, Homo Sapiens
taacatcaagatgagtactgtatgagattttaattctataaaatcaaatgctgtaaaagtattgccaaatgcttttgcatactagaaacaaatttataaatatttttaaaacatctcaatatattaaatcttatcctggaatacaactgtaatattttgaaaaaagctatgtatctaaagcaatttaagtactcataatggaatgaactgtaaaagagatttaaaaccatgcaagttcactagaattaacctaaaccctgttgtacagggatagaggtttaaagttattttattgtaaaatacattgaattttctgtatactctgattacatacatttatcctttaaaaaaggtgtaaatcttaatttttatgccctctatttatttacccatgagttaccttgtaaatgagaagtcatgatagcactgaattttaactagttttgacttctaagtttggtactgtgaggcaagtacttaaaattttcatgctggttacttaaaaggcatttagagatttcaagaatgattttgtatacgatgttttaaattttgactgatctcatagtcttcatagaattgcagtagtcttcattgtatgaaatcccgaaagtccatgagttgatcttaaagaccactaacagactggctatcagatcccttttcactttggcta

SEQ ID NO: 453603 - DNA, 600 bp, Homo Sapiens
  misc_feature (217)..(251): n is a, c, g, or t
ggagtgtctgagatttttgttatattttgcaaatattttctctccattatagctcatcatcttttagctttgtttatggcatgtttttatgatagagaagtttcattttttatttttaagtggttacatctattaataatttcctttgtgtctctgaggttttgttgcttaagaaggacttctcaaagatttaaccttattttttacttaaagagcnnnnnnnnnnnnnnnnnnnnnnnnnnnnnnnnnnncacgatcacaatataagccagtataagcaactggttcgtgcaggatggtggtagttatcaaagagagcggggggtctaaagctctaaggagtcgtctggagaaagccaggcagagacttgctgcttttctattctacttctttcccttctcatccagcttgaaagctgcacccatcaagtgcgtcctgaatctgacgattcactatcttcacttccgccagtctgctccaggcctccatcctttctggcctaaatgaaccccaaagctggcttgtgtcctgcatccatccaccactcttgcccttgttcacttatctattgctgtgaaataactccaaaaccaagtgag

SEQ ID NO: 453604 - DNA, 623 bp, Homo Sapiens
gcaaatttaatgtgatttattcatataataactcatgctgcacttaacacaatacaaaagtatgtttttcaatagtgtagaagatgtgaattcataaaagctgtaagttaatgagtactgaataaaaatcacctgcaaaaggttctttcagaaacacacccaaaactacaataaattagggcaaggggtttgtaaatggcagcttcagtcctactccaaaccttctcacccatataaatcatagtccctgacttttatagaggaaaaaccaaaagcagttaacccctgggcctttgctcctctccttgtccacggtcccaactcttgtttcctaggcatgtgctgaatacactactagaccttgaggcttttgttcctcattgggcagtgggagcccttttggccggggccgtacactttattcagaggccaagtacctgagggttgggttccagccacctcatctggaaccaacttgtcggtttgttctctcccacccaaactcttcccccatcagaggataaggactatcacctagaatccagaatcaaacaagggcatcctttggtgattagcactatacatgacagtgatgtcaggcagggcatggagtaatagccgcc

SEQ ID NO: 453605 - DNA, 491 bp, Homo Sapiens
tgctgggattacaggcatgagctacagtgctcagcctttcatgttctttttggactttactacctttgttttctcggcctagaatgttctttgtcttatttgcctgatttttcttctcttacttttcctacttagcatcaccttttacatggttgagttagatttctctttcctgtatttctgttagagcctttcttatatgagtcattcatttaaaaatggacaattaactttctaagcttcaatagcctcgtctggaaaatggagttaataactcagtcaaagctcccttatctgatttccacttacctgagtcttcagatggatcctcccagttccctgtgaaaagcttgatgaccagcatccacatcacgctgaatgctctcaaccatgcttgtgcacaactcttgccagtcaattgtgtaacatatttattctactggttattgtaattaaatgcatggactaaatatgttaaattatgaattaga

SEQ ID NO: 453606 - DNA, 932 bp, Homo Sapiens
  misc_feature (72)..(72): n is a, c, g, or t
tcttctatcatgattcttgtatcctgaagactcagaataactatcatatgaagcagaatacttctgatgctntgagtcaagggtcccttctttactctgagagagtgaaacagatggacttttcttatctgtttcagttctggtcctcagctgtttcacaaagtctggaaggtgctgccgttggtggtcatacagtattgcaaggggagctcctgaagccacgacagcatctgagatatgagttctagtcaactctgccatctcacagatttgacgtgctgcgtctgtggtgaggcgagcagtttctgactgctgagctgctattttacacgttgcttcctgcaggacttcagttacttcccgttgtgattgaaccacctgctgtaatgattctgcatggacctgagctgctttgtttcgggtttcttctaattgtctctgactctccagagcctcttgttcagcctttagtttcaagagggccaagtctctttcatggcgttgctgttgtgcctttattatctgagctagagacacactctcctgctgagcaagtgaaatgcctctaactctttctacatctgacagttggcgcaccgactcctcaatggcgttcagataactgagttctgctgccatacgatgatggaggccagcaggagaaaagcgcttagaacctggtattggagccatgttctctgtcgttgttctgctggctgccgggttcagatcagtgagaggtgcattaggcttaaatcctgttatagttggaggcattactgacgacttagatctttctgaagaagttcctgcaacgtcaaactgcaatgatttctgggaacttggtgacaggggagaagttggagttttctgagatcttcccttatctgatgagacactcacagaatgtccagaaagatcctccaaagtcc

SEQ ID NO: 453607 - DNA, 1167 bp, Homo Sapiens
  misc_feature (113)..(113): n is a, c, g, or t
actcaatacagagtgcagattagtgcaatgcatatgagtcaatctgcagcaagcatgcagaccgatctcgagactacaacaaaggaaagctctagtcatttgatcagacatanggaaatatgaatctaagatgtgcagtttacttaaagtgataatgttatattaactgtgcccacacagggtctctctaatctaatgaaaacaggacagtcactgaaaataaggactaatcaatggccaaatgtttcttcactatgggcaaaaatgtgatttcttcatctgggctttaagagctataaataaaacacatggccgggtgcatgcctatagtcctagctatttgggaagctaaggcagtaggattccttgaccccaggagttggaggtcagccaactctaaacaaacacaaacatcattctgacaaatgaccttaatgtaggatctctttggacacatcttcagcaagcagtcatttaataaatgccttctgaataggcagaatgtagctgctcatggctctttaagtatcatatccagaatatgaagggtttggagagaagttgcataatggacttgcccctttcctcaatgggcaggtaatgtatacaaaagaacccatacccaaattatagcatttttattttccaatactatacaaaaaatagactgtgcatatcttaaccagatccagactccaaatttaaatacctttttttctatttcaaactattctaagttgctaaggtgataatccagttttgagctctactctcttccactgactacttggctctcataagcataagaattcttgccctatttcccacaaactccataaattgacatttctttttgtaagaaggggatattttcttctacacttgagtccttacatctgtgagatttcataagtatctgagatttcacactcttgctattttcttagtgtcaaacacaagaggaaccaggaactgtttctggcatttctacttaattactatgtttctcattctttaaatatctgtgaattcataatattgaatctgccacaaaaaccattttgaatatttctaaattcatgtttttttctaaatccatcctcactctttttaatacttctttcaaggggcagagtactttacagtagattactttgtttcttagcc

SEQ ID NO: 453608 - DNA, 596 bp, Homo Sapiens
  misc_feature (478)..(478): n is a, c, g, or t
  misc_feature (480)..(481): n is a, c, g, or t
  misc_feature (579)..(579): n is a, c, g, or t
gctgaggtgatctagaggatcccaagttcgacggagaactctccccaaataacgcttgagcaactggaatatgtttgctgcaagcagaatattttggggagaggaagagtagtttaattcaagtagtttaattgaacatattagtcattggtctgtctgggacgtgcagtgttcatagtagcaatgtatgtaccatttattttatctggttgtgtgtgatgtgtgtgtatgcctatttaatatgtacacatatattcactacatatgtatgtatgatatattcatatatacatgcagtctgcttgattatcagcaaaatggtcagcctttatcagatagtttcttcatgtggagttcatctgcatgtggcccttactctgaagcctcttcctgatctggagccacagtctgtctgtcttccagttcatctcagtcctcgagaaaggccccttaatatgtcactttcccattttccttnanncatggtgtgtgaccagaaaagcttgagaagatgctgctttcacaggtgagctctagtctctgagatgggcgtttctgcaagtgctctgacatgtctcngctgtgggaaatcatgt

SEQ ID NO: 453609 - DNA, 751 bp, Homo Sapiens
  misc_feature (82)..(82): n is a, c, g, or t
  misc_feature (84)..(84): n is a, c, g, or t
  misc_feature (136)..(136): n is a, c, g, or t
  misc_feature (165)..(165): n is a, c, g, or t
ggcgaatgaatgtagatatgatgttacacatgtctagcgatgtttcactgaagagtagaggtagtctcaggcagtgagagcntnagtccacccatttctatgcagtgatgcccaaaaatcacagcatatcaaggcncctagaatactgcgcatgctctggctcangggtaaggtgcttatgtcagggcgcccatcagaactgaaaatgagggcaaagactctgcatatcagtgttaacacttagctcctcaccgtctttcccagtttctttcatttaatattcatctaacaggtacccctggagtgcttactgttgctgctgcaaccaggctgggtatttacataatcttatttaccttcactacagccctcaaaggtagatattgtgaatgttccagttttacaagtgggcaccttgatcagagaggttaaattacttggccaagctgtagttagcaaattgcctgtctgggatttggacctaggaggcgttgatgccaaagtccttgttcttccctctgtcaggctgcctcccaggtgctcagggtttattgatagaggcatgagtgaacaagcgacccaaaggcttggagttttgactcacacaattgaaccaccataggcaacacagaggagtacagcaatgacattcgcattttcttaaagagatattattgacatataagtgttgatatggtcatgagtgtttgaatgaaactttctggaggggagatctgagctctttgatccc

SEQ ID NO: 453610 - DNA, 572 bp, Homo Sapiens
aaatagttgtatttatttgaaggcagtgaggaccagaaggaagttttgtgctttggcagactcctccatgttttgttcccttccccctgagtatgcatgtgcctgttcagagtctccagataccttttttataaaaagaagtctgaaaatcattatggtatataatctacccttaacagagcttttcttattacagtgctaaaatgatttctgataaaatggtccctaactcaactagaaggctaaaaatacaagaatgaaagaataagcagagtactcatgatgcctttgagaaaaatcaaaacatcatgtagggtgacctagtttccaaaccaataaataagtagtattgtaatattaaaggaaaactgttccaatcatttaaaagtacttattaagtactgctttttacagttatgacaactgtttctttctatgcatataaatcaaggaaccaaatatctgtagccatggaaatgtctgactagaatatttatattgattctgatacaaatgtcctgtgtagaaactactctttatgctgtgcagtatatcccagtgtactgctacag

SEQ ID NO: 453611 - DNA, 851 bp, Homo Sapiens
tgataagtgattactgattcttcctagtgcaaaatgcgtgctgcctctttcataagccaaagtacttgctacacagagcagcaccataccctcccgtccaaacactgtaagagtggggaaaaggaggggaagggttgttctgggggttctcagactctcagggtttccactgaaaggtccattccaatggttaaaccagcctacttatctcagaggatggataatgtggcgctgcgaagtggggaggaagctcctctgccatcattaactcgtttcatgaccagaagccatgggcacaggtgctcggctcttccaggcaggcttcccttgtagctacagctactcttccctcaggcgagcagataaggactgcaggacggcatggaagagacaggaacacgctcccctgggcacatcgaagagtcccggacaggcaaacaagcccacatgggacaagggtcacagcagcagcctaggggccaagtcctcgacctaaacttgttctttcacctacagacaaaagccttaatcaagtgcaatcaatgcccttgggatctttgccagacaatcctggggggcatgtgttcacagaactctggatgtaaacagatacacaaacatcttcagaactggatacatttttcccaatacttgttgcgggtcggttttaaagcatgtaccctggagagtgaaggtgcagcagataggtatactgatttgagtcactccacaccaggcagcttccttctccagtgtgtgcagagccactgggggacaactctccaagagtatccgcaggaggtggcagcactcaatctcaccaagtcctggctaacacaggggatcctcta

SEQ ID NO: 453612 - DNA, 833 bp, Homo Sapiens
  misc_feature (611)..(611): n is a, c, g, or t
gggtaaaagcagggcagcagggaacaaaactccagactcttgggccgtccccatttgcaacagcacacatagtttctggtatatttgttgggaaagataaaactctagcagttgttgaggggaggatgtataaaatggtcatggggatgaaaggatctctgagaccacagaggctcagactcactgttaagaatagaaaactgggtatgcgtttcatgtagccagcagaactgaagtgtgctgtgacaagccaatgtgaatttctaccaaatagtagagcataccacttgaagaaggaaagaaccgaagagcaaacaaaagttctgcgtaatgagactcaccttttctcgctgaaagcactaagaggtgggaggaggcctgcacaggctggaggagggtttgggcagagcgaagacccggccaggaccttggtgagatggggtgccgcccacctcctgcggatactcttggagagttgttcccccagggggcttctgccccacctggagaaggaagctgcctggtgtggagtgactcaaatcagtatacctatctgctgcaccttcactctccagggtacatgctttaaaaccgacccgcaacaagtattnggaaaaatgtatccagtcttgaagatgttttgtgtatctgttttacatcccagagttctgttgacacatgccccccagattgctgcaaagatcccaaggcattgattgcacttgagtaagcttttgtccgtaggtgtaagaacaagtttagttcgagatctggccccctatgtactaactgcgtgtgaccagtgtaacaatgtggcttggttatatctctct

SEQ ID NO: 453613 - DNA, 575 bp, Homo Sapiens
ttttttttggacacaagcacggtaagtttttattgttaaattactatgttaccctatgcagagcaaaaagtaaagggactgatctacttctgcattcacattttaaattcttgaataatgattaagtgaacaaatcatcagctaggaaaggaaaactgaagctagggtttccttataagtcttctaatttctctaataattagagaaaacatgctcaaaaactttagaaaaacatttttctatatgtgatatattaataaataaactatgtttacctcattaaattggaaagactcaatattaaagaaagtttatatccggctaatgcaattatcatttggatataatataggcatcaaaaaataaaggagtggcataaatttttccaaaatgttaacacttaatgctgagtttccagttccagaattgtccactcgccttgaggcgaacaatcttcagaggaaaaactagccatggtgatgctcgctgaggaatcaagtggagatgttagttcactccatctgttcaaagtgtcaatatgtgttataccctgacactaacttttagcacgagat

SEQ ID NO: 453614 - DNA, 1087 bp, Homo Sapiens
  misc_feature (12)..(12): n is a, c, g, or t
  misc_feature (976)..(976): n is a, c, g, or t
tttgataacaanctaaataagctgcagttgaagaagctgaaaaatgaaggcctgaatgtgcccctggtgtgtaagacaaatgtatctaggctctagagcaggctcccattctccaccgatacacatcatgtgccagttttgcccagatgattctaaattactctgtagtacttgcttgttctgagggtgggacctaggttctttccagtcgtggatttgtatgactgaatgtgtttcaaatgggtggtggggtgctagagctgtttagagagggcctgttggctgctcctggcttacccacttagactgcctccgtttcatacccaaagcggaggccgtcagcaccaggattgagacttcctgtgggcaccaaacaggaagagaccagcaacttcgcattacccgccattttcatctttgccagtcccttcagtcttggctaggctaccgagagccaccatacaaggttcatctctagagaatttttgcttcttagctatactttaaatattttggtcatcaaagacaagtaatgtgtctcagatgagaggcttgaatttgatggccagatataacctctgaggcttttaacattttcattttaagagtaagcaagacacatgaaattaaacctacaaggaggtatttgtggctggtgccaaagcattctgacactttggggtgtcattttaatcaaagaaatcaccccgccacctcaccgggattctccataacttccctctgcagaactaattatgttgattttgttcaagttcaagatgttagctaaaagaactatgggtggtgttttttttcccacttcccacaaacctcaacatgttgccagtcaccctaaaatggtttcacagggttaaaaacagggcacatttttgaatcctacagcaaggatgaaaggcccctagccgtgaaacagtgctatgcggagcagttgtcagtctaagtgatgctattccangagaatgatatgctgagggagatgccacatgactgttccattggagacagtgagtgtagcacgctccccagatatcgttagcactctccatgagactatcagtgaagcgtc

SEQ ID NO: 453615 - DNA, 622 bp, Homo Sapiens
cccaactatataataagaatataatccatttaagtttccagaaatatccttctcaaaactccccttcagttatggaaaagatccctcctctgtggcaataagtagggggaggggaatcaatgtgtttcaacggacaacagttcagcacaacaggaaacagcttaactttggtccacttgtctgttaggcttaattaaggacagtcaaactgccgataatcagttcaaaaacccaacaagtaaatttaaaaatatattcatgtgtaatttcattctaaaactggcagagctgttctgtcctcattctctgccttttctgcttcagaatccattgttggcttggtctctaaatcctcagcatctttgtgatcttccctggcagcctcagcagcatacggttggctagactctctctcctcttggttcatgatttctggggtcacgtggtccaaatatgcttctagaagttcagtttgtacttccaatggcatctgattgacccgttcaacatgcagctcctctacatgtacttcagtacattcttcagtatgaattcggcccacttttagataactcaataggacctgctctggaagctccctcatgtgtgaattgtgcactcc

SEQ ID NO: 453616 - DNA, 642 bp, Homo Sapiens
  misc_feature (26)..(26): n is a, c, g, or t
  misc_feature (81)..(105): n is a, c, g, or t
ttatttattgtgtttattaattttcnttaaaaagggatgtcttttcttttattccagtaccttcatataataaagttaacnnnnnnnnnnnnnnnnnnnnnnnnngagccagctggcactgccaaccaattcctatagtagtcttagaaatcctaatcctgtagaatttcctcttgtagtcaataagcaccaccatcttcaggagtatttcagtgtattgttatctacgccaagcaagcctggtgatgcagctacctgagttctcttggttatgggtgaatgttatcttcattcataacttcccagctttcatgtaggtggggatagagccacgttgagtcaacccttccaaccttttataggtataattgagaaaaaccccgtctttggatttgtagtccggttctgtggtatttggcactggttgtacaatatcagattcagggaagtcatccaaatttgaagtatcatcaatgcttttgatttctatagggattgctgctggcctttcccttatgtgctcccagtcgacaccttccaaaaagggatgaccttttatttcttctactccactatttccaattctgttttcagaatccataccaaatctgagaattaagtccttgaacaaggtagagccga

SEQ ID NO: 453617 - DNA, 1038 bp, Homo Sapiens
  misc_feature (696)..(971): n is a, c, g, or t
caaagtttaatcaactttatttcaccataaatttaacacagtgaatgctttttcaaattaataaatatgtgtgcacatgacatttgtcaatctgttcacaagtaattttttgtttaaatttgtatgaatatttttaaaagacaaaatttcaaacaatatataaaagtatattcctaaatagaaattaatctgcatccttcacttgctcttcccctaccccttaacacaaaaaggtttgctgtcaatagaacaaagcttttatcccagacatgtttcacatcatgcctctgagcagacccaaattctgttctccaggttgggaagaatgtaattgacctcagctggtgagctcagtgataggtcacatgaaggaagcaaggagtggtgtttgcctaatggctgctcctggactgctcagtatattaatacatttacagaaaaattgtgaacgtgtacaggagtaaccagtacagggtcctcagatcatgcattattcagccatatcacaccaggatttcagccacctgctgccttcttggagaggcaaaaatttagcatttatttgactcacaattgcccattgtccattttctcactaataactaaatacatatttagctcaaaactcatactagtcgattagaggcctctcatgagctctaaagtgaaaataagagcgtaagaaagaaaatgtgnnnnnnnnnnnnnnnnnnnnnnnnnnnnnnnnnnnnnnnnnnnnnnnnnnnnnnnnnnnnnnnnnnnnnnnnnnnnnnnnnnnnnnnnnnnnnnnnnnnnnnnnnnnnnnnnnnnnnnnnnnnnnnnnnnnnnnnnnnnnnnnnnnnnnnnnnnnnnnnnnnnnnnnnnnnnnnnnnnnnnnnnnnnnnnnnnnnnnnnnnnnnnnnnnnnnnnnnnnnnnnnnnnnnnnnnnnnnnnnnnnnnnnnnnnnnnnnnnnnnnnnnnnnnnnnnnnnntgagcaatttctagtgttaaatctgagataagatagcatcatcacgttaacttttaaaaatacattt

SEQ ID NO: 453618 - DNA, 891 bp, Homo Sapiens
  misc_feature (127)..(221): n is a, c, g, or t
ttttctgccacgatcgggacgactgaccatgttcactgctgtcacatggaacccttctcacttcgggcttcaaagtaactgtgaacacaggtaccaaaaccacaccagctaattttgcattcctacnnnnnnnnnnnnnnnnnnnnnnnnnnnnnnnnnnnnnnnnnnnnnnnnnnnnnnnnnnnnnnnnnnnnnnnnnnnnnnnnnnnnnnnnnnnnnnngtgtgagccactacgcccagccttttggtttcttatgtgtaggagaggataagtttctttctcagagtgtgctgcagccagacataatatttctccttggcagaaactctgctgttccaatcatacatgtagccattgagttcaatgtgaagatccaggagtgggcgttttctttcttgtctcagtttctgggagaggcactgcaggtacagggacggtgagctgtgagactgctccagcagggacatgtccgcagtacacaggctccagaagaagtcagcttctcggtgaactgtgcacagccctcgcttctgagccttgaattccacattcttcatcgctggcccatccacctccaagaggctgctgtcctccagctggccctctgacaccacatagttctgaataaaaaacatctttggcttccctgctagataagggcatgaatctcccatgaacatcctcctgatgtgatgcagggggagccctgagtgagtctgatccacaccatacacactctgggagcctcctcggctcaccaggacacacacaaagctgtcgtagtctcggtgctcgggcatacaggcaaattggccaagaatctgggatataccatgcatactgagatgcaagaatttctggacttcatagcccagggaagtgaaggtcc

SEQ ID NO: 453619 - DNA, 669 bp, Homo Sapiens
  misc_feature (52)..(53): n is a, c, g, or t
  misc_feature (65)..(65): n is a, c, g, or t
  misc_feature (103)..(103): n is a, c, g, or t
ctagtttacgcagacagaatatatgacatttttaagtgatatacattgctgnncggtatcattcntaatattatcagtactgtcattatacaaaaattttttntgagcaatgattgatagtaacccatcatacatgcagcttatgcctttctgtggcaggatgaaaatcaatttataaacatcttgtgacaagctggaattcagttatagatcaattacagattgctcactggacaatcaaggacattattagaaaacggtttccaccactagaaattcatctacattgacatccacctaaatatccagaaggtcatccccactttcgtcgctctccacagtcagctgccgggtccaccacttcttaacttcagaaccgcaggaagccgcgtcagtcatggggttcattttgcacacgacagatttcatggttgtccttcctcctaaccgtaagttgactgaggacactgaatggcttattggttttggggctgatggcagacgccactgcccaaatttcctctggggtttccctgcgtcggctgcatcttgccgacttcctcctctatccgacagcgtggggctcaggagctgctgctggctgcttgtctcaggttgcatgctgttgtcctgactgttggcattcgtgtcctcactgggctgggtgcc

SEQ ID NO: 453620 - DNA, 890 bp, Homo Sapiens
  misc_feature (80)..(88): n is a, c, g, or t
  misc_feature (405)..(418): n is a, c, g, or t
  misc_feature (871)..(871): n is a, c, g, or t
ggttgtataaattagaatatataatattttatataaaaatgaaataataagagtcaaaataaggatagatgaggatgatnnnnnnnnntaaggaagatagtaagttgaataagtaatgtgtaaattgagataaataaggaaaaagatagaagtaaatttattttagataaatataaaaaataagaaaaagcaggttgagggaaagggaagtaagaagagaggtactaacataagttattaaagagttacgaagtataataggtcccaataggttggtctttttgctcttctacctcatgtctgtttgcacaggagaccgcagccctccagaatggttcccctcattgaagctggtcactggtggaccataacaaagcaggtgtacacatcatttgttttgctccnnnnnnnnnnnnnncctgagaagtcactggtgtttaatggaaaggtatcctattagtccttggttaagataaggcagtaagagtatcactaatactatgtttttgcttagaatgaggctgatccttccactggcgtcttcacgggcaattagttccctctcttttgctcctagaaacacaggtaggagctgtctgccccctattgctgttgcattttctgagtgtgttgaaggctcatctagtctcatcacagcagcttccccagtgggattggcagcgctgtatattgcattgtagcatctctccagggaagtgcacggggccccacagaggaaaacacagggcatctttctttctgaactcctcttctgtttctcttaggggacgggggcccataaaatgattccttcacatgatcaatcagaatgcgagacattgttggactaaaacataaagcaagtaggccncgatttcagagaatgggtt

SEQ ID NO: 453621 - DNA, 908 bp, Homo Sapiens
  misc_feature (169)..(181): n is a, c, g, or t
  misc_feature (561)..(569): n is a, c, g, or t
gggagaaaaaagggcttcccctgtttttcggaaatttggggttttctttgggcagaaaacccaaaaggctttttttcccaaaggagggtaacccttggacccctggaaaggaagggttaaagggtttttggaaaaagcccccttttggggggaaattttttggaatatnnnnnnnnnnnnntttaaaaataaagaaggtttgaatcccaggggaaagcccccaaacctgggaataaatttccgggattttttaccaggccacggacaattgttggggaaggaccccccccagtgccatttattttccctgccccagtcaccagattcccatactttacaattacgatcttttgatccagtgaagaggagatcatcagtagaatccacacagagcacagcttttgtatgcccttcagctatgtgaatacactgaagtggaaaagctctgattccttttgaagcaggaaatgggttgattatgccctgcttttgttccttggcctttgatttttctgctttctcatatgcctttctccttgttacaggagaaggctctggaannnnnnnnnctgatagagatgactgcctggaaatgctgcctatcttagaaggtaagccaggtgggggagagagctctttttccctagcagaagtaccacttgtctctgtattcattccaatctcttgcccttctgcaacaggtgtgagagggccaggcaaggaggcatctcctgtactagtgtctgaagctagttcactgctatctgcatacagcaattccatctgagtggtggttctccttcgggccttgttcttaggtttcacttcaccacaaagcttcatgagatctgaagacagcgtgcttccttctgatcctgggctgtttaaaggagcatcctcatcagtcc

SEQ ID NO: 453622 - DNA, 693 bp, Homo Sapiens
gtgagaggcaggcatgctatgctctatagatctagtgagaggagatatttcaataaacccaagaaggtaaatgagtagtcaaattttcaaaaggactataactcacaaacaggaaactataatagaaaatagttggttgaaggcagagtgcccagttcagaaaagattcctctgaaaagcaatatataagcatagacttcgaggatgaagagtcactcattttgaaagagcagatgaagaaagtttcaggacaaagaaacagccatctgcaaagacctcaacaaagatatcacacagaaaatgctgtatttaatctgttgctagacaaaagtgagctacggatcacatggtcttggatgagggagacagatgatatagtttggatgtcccgcccaaatctcatgttgaaaccagatccccagtgctgaaggtggagcttggtgggaagtgtttggatcatgaggtcgaatccttcgtgacttggtgctgtctccatggtagtgcacctaccccaacacactctctctctcttgttcctgctttcaccatgtgaagtgcctgctcctgctttgccttctgtcatgagtaaaagctccctgaggcctctccagaagaagatgccactgtgcttcctgtacagcctgcaggactgtgagtcaattaaacatttttataatatccagtctcagatcc

SEQ ID NO: 453623 - DNA, 635 bp, Homo Sapiens
  misc_feature (38)..(38): n is a, c, g, or t
  misc_feature (89)..(89): n is a, c, g, or t
  misc_feature (405)..(405): n is a, c, g, or t
ctgctccagggacatgctagaatctgctgattcgttcncaaggggcactagggatgaggggatgggctgtcctccatccatggtccagngaagccagagcacaggatatcctggttttcttttcttccatcatcaatctgcggaggtcatggtggctgcactctggagaggctgagttatagccatattttaatcctgataggctttcctcatcacgcagtacatctgtgtcttccctttgtcaggtccatttgtgggtgctcaggaaatagagtctaattttaatactggctctggctgaacaaacacttgatccaattcctggtggaacagttacaggtagttacaagcctctttagtttccattcttcccgaccacgctgtgtgaaagcagtagacagtggntagctgcaaggcagctgatggcacaccccaggtctaaagctgttgtttcaggcttagaaacttcccattaaaaccccgagttaaaggagcatcgtctttctgtgtgaggcatcattaacggccaatactgctgcttctttgaggtgagccatgatttcagttctgcctcagcaactcttcagaggattctgcttcagcgagtagaggcagtatcctagcagtgtgtctcc

SEQ ID NO: 453624 - DNA, 839 bp, Homo Sapiens
  misc_feature (122)..(130): n is a, c, g, or t
  misc_feature (234)..(234): n is a, c, g, or t
  misc_feature (271)..(271): n is a, c, g, or t
ccattcaaagtattttattacatttaattaaaggtactatcaacagaactctatgtaacaggataagaccaatcagtactgacttcagccatatccaagggcctgtatccaacaaggtaggnnnnnnnnnccaacaatcataaaccatcaggatctaccttagaaagccaagtggcattctcaagtttctgtattgaccctgtactcggtctgagacattaatccagtcacagngggatgtattagtgattgcactgactccaatttggcnccacaaagaggaagagcaattctatcacccataaccaccctggccaatgaattgaggctgacttaagtgccatccagagctgaggtggtgtcactgatgactgcagctaaagtcaagaacaaattccttatcaacatttccaataggatgactctcaggatagtgataactgcctgcagtatgcataaatgaatcagttacgctttcaggaagctcctctggccgctgttgtttcctcaagagctcagtagcagcctaagaggtgcctatctttttaaaggtcactcttggagtactcaggatatttcaccttggtgactgcaaagtccacatagctggttataatggaaaatggcctgagtactacaggagtaactaagttttcaactaaacctgtgcttttatttcttttcctcttgcggttgtatgttgtttcttttagactacatctctctatactgcagtagtccctgaatgggagacttataaactttcctagttcaattaaatgtatattggtattaacaacacactttgatgctaaagccataaaacagcagtacattcc

SEQ ID NO: 453625 - DNA, 544 bp, Homo Sapiens
  misc_feature (58)..(120): n is a, c, g, or t
  misc_feature (124)..(134): n is a, c, g, or t
gaaccaacccaacatttccactggcaactgtcaacatagcttatgacatgagcactgnnnnnnnnnnnnnnnnnnnnnnnnnnnnnnnnnnnnnnnnnnnnnnnnnnnnnnnnnnnnnnncttnnnnnnnnnnnttagaaaatgtatttatgtcgatgcagaaagcctaaagatccgtgggcagtttcgtgatgacatcttatgtctgtttatttgtgtgtttgtgtgcgtgttttaaagccaggtccttcccacattcgttgagaaaaggtctgtagggcacggagatctctttctccaaaaacccaggctccaagggattatgacaactaagattcctcttactggagcaagaactaccccataggctggaaaaatagcttcatgaagtttaagaacaagcaggaacatgggagaaatgaggaattccagtttctatcttgtaaaaatgctttcatatgtgacctgagggaccaggagaggtgaagggagcccctggttctcttataaaatctctaagtttttacaccacttcaagaaatcc

SEQ ID NO: 453626 - DNA, 197 bp, Homo Sapiens
gatgctaccccaatatcccagttataatcaggcctcaacgttctgtcaggtattaatatggttagaattgttcttacaactggtaattatagtcaatagagataaaacagatgatgtactgacaaatttttgtgaacttagattttaaagaaagttgttgtataatcatatcatttaaaaatactacattagggctg

SEQ ID NO: 453627 - DNA, 681 bp, Homo Sapiens
  misc_feature (22)..(22): n is a, c, g, or t
  misc_feature (26)..(26): n is a, c, g, or t
  misc_feature (84)..(85): n is a, c, g, or t
tttacctttcgtagatgtttcnttcntaaaacatatagttatatgtttagcttacatatttatgtatattatatatcacactannaagaataataattagattcacagagtacggtggaaatacaatatattaccggtacactattcagcaagcttatggaatgacaaaaaagaatgaatcacttttcatgactagtatcttaattatcctctgtttttttctgaactaagtccaaagagattagcatttttcaactgctcagtttcttccttcaatcttggagacattctacagagatagaacctaagagcaaattaaaagtggagtccgtgacaggtcgctttcatggtaaagcctggtctcgtgtgtcttactatgactatatggtcaatgattactgcctggacaggaacgcaggagtgggtgagtcgtgctggagatgtgcaagagtttgttcttcagccctggctgcccgcttgagcacagcacaggatggcacggtggctctaagctcaggaggtctggtgcacctggagcacggcgggctgcacggggtccccatcggagcgtccgcctcctcggatgttagcgcgtagctaccctcatagcgtaccttctgtgctgttccagggccactgactcctcctcttcatcttccacaatagtcaagtcgatgttcc

SEQ ID NO: 453628 - DNA, 857 bp, Homo Sapiens
  misc_feature (14)..(14): n is a, c, g, or t
  misc_feature (28)..(28): n is a, c, g, or t
  misc_feature (39)..(39): n is a, c, g, or t
  misc_feature (64)..(64): n is a, c, g, or t
  misc_feature (133)..(133): n is a, c, g, or t
ctaccatggcgtanggaaatgccctagntttgaagactngcaatgaaccaaggtccctttcttncacccaaggcttacattctaggagaaccatgggatttaggcatgctcatcactgtacttttattaaatntcctgaccatactcatattttataagccttgctcctgtgcaatgactgatgttaaaagttctaacaaaatccctcgtgaaacccctctcattaaatgtctctgttgtgtggtctcctggccattatgaatgttgaagttgggcagcaacattacattttaatttttaaaaattctttttctactgaaagaactctagtgactggaaaatttcagctcccatttgaggacttcaaaacaaaacagaatcttcatttctgtgtagattctctgatgaagggtagtccttaccatagtcttcgcttttatagaatttatcactactatggactctttgatgaatgagaagacctgagctccaacggaaacccttaccacatgcatcacatttgtatggtttctctcctgtgtggactctctggtgagcctgaagatttgatctctgactgaagccctttccacatacctcacatttgtatggtttctctcctgtgtggactctgtgatgggcttgaagacttgaatacccactgaaacccttaccacactgttcacatttatagggtctcccttccacatgaaccctttggtgtgcttgaaggcgtgaactctcactgaaaccctttgtacacacctcacatttgtatggtttccctcctgtgtgaacccttccgatgtgcttcaaggcgcgaactctgactaaagcccttcccacacatctcaccc

SEQ ID NO: 453629 - DNA, 674 bp, Homo Sapiens
  misc_feature (54)..(119): n is a, c, g, or t
  misc_feature (207)..(226): n is a, c, g, or t
taggtcaggagtcgagactagcctgacaacatggatgtccccaccaaaaatacnnnnnnnnnnnnnnnnnnnnnnnnnnnnnnnnnnnnnnnnnnnnnnnnnnnnnnnnnnnnnnnnnntgcttgaacctgggaaggctgaagttgccgtgagccaaggttgttccattgcactccgcctgggcaacaagagtgaaactctgtctcnnnnnnnnnnnnnnnnnnnngtatgaagagtttacatacttaaacatggaattgctttaagtgtttggcattcaccgttcccgtacattacagcagcttctttcagcaaacacctggaacttgctattgagtaggtggagtacgttctgcccacacacaggacagggagctgacaaccaaggagtgggggttaaatactctagctttctcccctccgtttccctgtatctcagcagtatggagctcgttaccattgagaacctcctcactgattttgaactggtttttaccttctcagttccatttctccatacttcgattgatgacttctggtatgacctagcaaataaactgctttcacttaaatttcagtcttggaatctgctttgggttccccaatctaagacagaaatatattcattttcccatcactggacttccaggttgttttcagtttttcactgttcc

SEQ ID NO: 453630 - DNA, 944 bp, Homo Sapiens
aggctcctgctgcaagttctctctttttgttttgtattttcagcatattttcttcaacagagtcctttacaatgaattttgtgatgataacttcttgcttctgaccaagtctatggcatctgtcaaagcactgatcttcagcagcaggattcccaggctggatccattaaaaacactcgagaagctgcagacagattcaaaccaactccacctgcttttaaggacagaagcattatagttggagatcctgcttcagtgttttgaaaacactgaattgattcaactcttttcttttgggccatggaaccatccaaacgagtaaacacaaatccagaggctttaagtggtatttctattaaagacaggaatgttgtaaactgagaaacaaccaaactttttatgttgggattcttctttcttaagtcagtcaatgcgtgcattagcgcattaatctttgaactggatgtccattccatatcagactttttctcactgtcacgtgctaattcttctggaggacattctaataaattatcttcatgtatatcatttctgcataaagggcatttagcatgtggctgctcattctgaatgacttggcaaatacagggtttacaaaatacatgtgcacaatgtgttatcacaggaactgttaaagaatccaggcaaattgcacattcctcatctgaacctgagctcagaattaacttcatcttccttattaacttctttctcagttcttcaggtgtatcatttcctgaggggccattggaagacactgcatttgtaagaaggtaagtatggcaacaaatttgccgcagtctaagcaaaagacccaggacatctgcataatgtgccaggacagtcccttcattaaaataccttccaatagtggctctgccttcatttttcacagactgataaatctttctctcttcatctcc

SEQ ID NO: 453631 - DNA, 835 bp, Homo Sapiens
tttcctcgtgcttaccacagtggttttaaccaaggctacaattttgctgaagctgtcaacttttgtactgctgactggctacctgctggacgccagtgcattgaacactaccgccggctccggcatattgtgtcttctcccacgaggagctcatctgcaagatggctgccttcccagagacgttggatctcaatctagcagtagctgtgcacaaggagatgttcattatggttcaggaggagcgacgtctacgaaaggcccttttggagaagggcgtcacggaggctgagcgagaggcttttgagctgctcccagatgatgaacgccagtgcatcaagtgcaagaccacgtgcttcttgtcagccctggcctgtctacgactgcccagatggccttgtatgcctttcccacatcaatgacctctgcaagtgctctagtagccgacagtacctccggtatcggtacaccttggatgagctccccaccatgctgcataaactgaagattcgggctgagtcttttgacacctgggccaacaaagtgcgagtggccttggaggtggaggatggccgtaaacgcagtgagtgacaggaaatggaaggaacccttgtgtaagccttatttctttcttttgggtattctcaaccttccttttctgctaacactgcctacctgttgcaacttacactctccaggctttgaagagctaagggcactggagtctgaggctcgtgagaggaggtttcctaatagtgagctgcttcagcgactgaagaactgcctgagtgaggtggaggcttgtatgctcagtccctgggcttgtcagtggtcagtg

SEQ ID NO: 453632 - DNA, 754 bp, Homo Sapiens
ggcaagcacctcagcagtgtgtagcaagaattcttcttgagaaagttcttggaggccttctctctccaggaatgtgctgtcaatacctgcagctctagctgtctcagctcttccagccccacaggcaggtcccggcccacagccaccaggccctccaagtcatctagacaggggtagtggtcaccattttggatctcatccacatcagcaatccaagcttgtgccttagtcagagcttctttgagagcctggatgttaggcaggtgaacagggatgttttctgtctcacgaattatggcttccaatgtggctggtggatgcttctgcctggcctccaggcagaaatgagccttttcttcccagcgctctgcaatcgtcagtagttcttgcagctcagcccgggccttgtccacagaagggctggaggctatcttggcacccataaccaaaagccccttgacatccccaatctgatgcatggcacagggcaggctgcccatctgctcaagaaggacccggagttcagtcaaggtcagctgtggagtgtccatcctggccacctgaccactgaccagccccaggacttgagcaatacaagcctccacctcactcacgcagttcttcagtcgctgaagcagctcactattaggaaacctcctctcacgagcctcagactccagtgcccttagctcttcaaagctgcgtttacggccatcctccacctccaaggccactcgcactttgttagcccgct

SEQ ID NO: 453633 - DNA, 648 bp, Homo Sapiens
caggatagagagaagacttctgatattatactgttcccacaaaaacactactttttttccttcccctttttctctcctcactctgtgctttcctcctattccatccttaataactgagctccatctatggttttaatcttactaaatcagaaattggcttggtttcatttgaatttccttttatatgtgctcatgattaaaaacaaaacaaaaaccctacttttgatcacaatcagatctttaccgtctctaaccatttactgcctagtatatgaagtatatgaattattctaattcaataggattctaatgcaatttggcaataactagtattatttggatttaaaaagccattggcataaacagagatgtttaggggaaatgagcaggcaagcaaataatttagaaagaagtgatggtttctgtggttaaaaataaaagtctgggatttagtttttctttgccatacagaaaacagatgttgctatttttgttcaaaatacaaaacttaaattccatgcttagactctggaatgtgtaaagtaactatggataccaaatttatgatttaaaaaaatgacatttagtcttctgttcatatttgaaatcaggaaataattgtgctcctgaaatgttaactttctatcc

SEQ ID NO: 453634 - DNA, 935 bp, Homo Sapiens
tatacagttgattgaaaacaattacaatgttgaaacacaccaggagaaaacataagcaagaaaactgggaggccaactggcaagatatgaaagggaaattccagatccagtcttccatgcttgatgatggtgtccagaaaagaaaaaacctgtttggagttgcacttgtatttcagtttatgtaagtagccgaacttatggacagaatatgaactgtcccatacctctggcaaaactagatgatatcaaaaagatttatgcttcagttgtaccacatgccacacaagaaaaatgaaccacaaaatgcccatatatatttcctcggatctctgttgcctgagtcctatctcctgcctctcagattgtttcagcatcatatttaagatagttctatttcttgaaatcaaaatgtttaaaatcccatttcctgcttgctctatttcttgatttttatattttaaaccattttgagggtaacacttaggttcaaaatatttaaaagcatttgaattatcacaaaagcttggtaatttataatttaattatatgtttccacatttcatccttactttatcagtaaaggatacaccttagtcacttttgcaggcaacgtggatttactgtaatctgtctacatttattcacccaattccccttgtaaacaatggcatgaagctcggcagctgattaaggcagtcaaagggtagagcaagacctacaggctttgcaggaactgaacctatcagcctgaaaataattagtatttcattctctctggcacagcctttgacctggtacatctataggcaaacctgtaattcagtgatctgggtttcagaagaaattacttgtgagcttttacttgagtcatgaaagacattatgttgtaaactgatgttttccctgaaacatctttttgcactatgtttgtatcc

SEQ ID NO: 453635 - DNA, 586 bp, Homo Sapiens
tgcagcatagtgcttaaaactctgtccagccagagttttaaagtctttggttagaagttaaggtgtttgcaaggttctgtctgcctggtattctgctacattgtctcatatcaaaagtgccatttttaactcaaaaactattgaaaattgtcagttttatatggttcaaactaatgcactgaaagtctatttaaaccacgaggattcggcgaccttggcctcccaccaagcacctatgaagatgctttaacagaatataacttcaaaaccgtctagggaattgacaaaacaggacgcagaaccttcagaacggagacacaaatccctggaaagaagcctcccactccctgctagcgaaggtggcctcctgtgagggcctactgttttctacctctgtcacttcattccagacagctgggcattctgggtttccttggctacatctggatctaagggtgctcttaccctttttgtcccaagacagttgggaaacaccaccccctttggttgcttagcaactgtcacctgctgattccttcccaaaatcccctgagaaatgagtaagcaggttgaaagctgggcctcc

SEQ ID NO: 453636 - DNA, 585 bp, Homo Sapiens
gtgtgagccactgcgcacagccaattagacattcttatccccattgaacagataagaaaactgaggccatctcaagctggccctaatctagcacactggcctcctctcccctctcccaccgtgcagcaccccctgtggacaccacctctgtgtcccctgccttgctcagtgttttctccacttggaatgtcactccactgccgaggctgtgttactttgcagagagccaccctccctctctcttcagtggctgccctgccctgggttcccccagcaggcagtaagctttaggggcacggggccccactggattcctccgtggacacttcccagtgtcagagcacatggggtgaattgtgaccaaaccacttgtcccaagccccagccctggtagtttctctgcaatccccggccagtgaggctgcctgtgggaaagagtccaccacgctctctcacaccctcttctctgtgctgcagcccctcccacccagaacatgccttttcctcctgcagccacctggctgactcatattcttcagctcccagcttaggcattgcctcctctaggatgccttccctcccccc

SEQ ID NO: 453637 - DNA, 756 bp, Homo Sapiens
ataaatttttcaaaattggaaacgcagagacaagagcagaagagtcaatccacaaagacttgcagagtccagttttatcatagtcttatcagatgggccctcccttcttgggtgtagggctgagcacatcatctctgcagtcagactacctgggttccgggccaggctcaccagttcaactcattggctggcactgggcagttcacttctgcatctcgacttcttgacctgtaagttgggtataataaaccctatttcgaagatttgcggtaaggattaaataagattatataaagcacttagaacagtaaatggcaccttatcaatgctcagtgaacgtaagctctttttaacatcctcatcatggtcattatttcagtatgtcttccccctccactgtctctggatcatcgtgggtccatctgcttcttaatgcctaggctcagacattcttcctggatcctttcccctaagtactggaagctactaaagcaggtaccatgtttccccatggcagctcctgctgcagtggctttggggactgctgtaaccagggaaaatagagtgacagtccactctgcctaagggaaagagacttcatgccattcaaatactgccagcatgacataattcccactgttaagattagcatttttgcagaatcagaatatagtatgaagagaggtaattcggagtaaattaaatgataattctgcaatcaacttgccaactgcccttttacttttagtaaactcc

SEQ ID NO: 453638 - DNA, 566 bp, Homo Sapiens
actaccctccacccatgcagttggataatttgtgatccttgatgcaaccatacgtgctagaacgttttcctgtttaaaaggattgttcaagaaatccccacttatctcaccattgcaaggcaccacattgccatttattaatccattgacagaacgatcgatcacagactgctttggattgcagtacacttcattctctagggctgtctgagtttgcttcagttgcaattttaaatcggcaacctgagtagttaaactctttacagaagctttgtaacctagaatctgggccttcagctgtgcagaatgctcaatttcgtcttgcagttgtttgtgcagagcttgcctgcagctttcgaactcctcatgctcaaccactatagccttttcggctttccgtagttctttctgaaagactgcaagttcaggagccggctgagctaggcggtttaggagacgcaggttttcatttctactctcttccagttgttgtttaagtaatttattttgtgccagaagctccagtttctcttcttttagtagtgaataatcactcatctctttcc

SEQ ID NO: 453639 - DNA, 1042 bp, Homo Sapiens
  misc_feature (939)..(939): n is a, c, g, or t
  misc_feature (996)..(996): n is a, c, g, or t
  misc_feature (1027)..(1027): n is a, c, g, or t
cattttgaaccaatgagccaggcgaactgagtggtataggagtgggatctgtgtcgcagtttaaaaaaattccaccagatctaaaaacattgccgtcaaacagagagattttcagactacttgtggaatgtcacgtgcctcggggtatttcacaagacaggtcacctcttgtgaaagtccgaagtaattctctgaaagctccttccacgcatgtcacaaaaccatcatttagccagaaatcatttgtttctatgaaagaccaaagaccagtaaatcacttgcatcagaacagtctgttgaatcagcagacatgggtaaggactgacagtgcccccgatcagcaagtggagactgggaaatccccctctttatctggagcctctgccaagcctgcccctcagtcgagtgaaaacgctggtacttcagatttagaactacctgtcagtcaaaggagtcaagatttaagtttacaagaggctgaaactgagcaatcagatactttagataataaagaagctgtcatcctaagggaaaaacctccatctggacgccagacaccgcagcctttaaggcatcagtcttacatcttggcagtaaatgaccaggagaccgggtcagacactacctgctggctgcccaatgatgcacgtcgagaggtccacataaaaagaatggaggaaagaaaagcctcgagtaccagtccgcctggcgattctttggcttccatcccatttatagatgaaccaactagccctagcattgatcatgatattgcacatatccctgcctctgctgttatatcagcctctacctctcaggtcccctccatagcaacagttcctccttgcctcacaacttcagctccattaattcgccgtcagctctcacatgaccacgaatctgttggccctcctagcctggatgctcagcccaactcanagacagaaagatcaaaatcatatgatgagggtctggatgattacagagaagatgcanaattgtcctttaagcacgtatctagtctganaggaatcaagatcgc

SEQ ID NO: 453640 - DNA, 755 bp, Homo Sapiens
cgtctctagagtatcccctgcagattattcagctagctcagattcactcagaggctaccaagccaagaaactgatagcagaaacactggattctccctgtttgttgaacctttccctctaaaaccaacttattcagaaacacatcctttaaaaaaacaaaaggaaaaaccaaagcggtgaaacaatatcacttactggttggaagacatcactctgacatagtcattagtcttgcagagacctaacaccaggcagcttcacaaacacacagcaagtctgcagagttatattgatcagtaagagtaaacccaaactgcactaaatactctcatggccaagaggaaagcagatgctgttttcaggacaatgtgatagtgacagcctatttcctcatgtgcagcacaatttgctatgtttagtggcacttaagtattacacagtaaatactgaaaagacccagaatttttggatgtgcagaagcaatatcacattgtttatacaaaaggtgctatgctacgggattagaataccactatttgggtgtagagaccacttaaaatcttcaacacgctcccacacgcggcctctccgccggcctttgctcagtcggaccagtcgttctcgtcgaactctgagtcgtcgtcagagtcgctgtactccacggcaatgcgccgggacaggatggtggccacgtcattcaccactggctcccgctcggcctcgcgactcccgaagcagctcaagccgaagtatct

SEQ ID NO: 453641 - DNA, 375 bp, Homo Sapiens
gtggcacttaagtattacacagtaaatactgaaaagacccagaatttttggatgtgcagaagcaatatcacattgtttatacaaaaggtgctatgctacgggattagaataccactatttgaggtgtagagaccacttaaaatcttcaacacgctcccacacgcggcctctccgccggcctttgctcagtcggaccagtcgttctcgtcgaactctgagtcgtcgtcagagtgcgctgtgctccacggcaatgcgccgggccaggatggtgttcacatcattcaccagctggctgcccgccggccatcgtaactcccgaagacatgcatagccccaaatattcccgcgtgaacctcagatacagcatacaatcac

SEQ ID NO: 453642 - DNA, 1402 bp, Homo Sapiens
  misc_feature (1077)..(1085): n is a, c, g, or t
  misc_feature (1202)..(1229): n is a, c, g, or t
  misc_feature (1306)..(1306): n is a, c, g, or t
ggtaaaaaacaatctgttattttttaatatttttattgatatgctcaataataaaatacaagtgttaataaatacattggtacaggataagtttatatccaacaacagtaaaagagtgattcaagttgcagtaatacactgacaggtaaatagtataacattagaaaagcaaaattcttttaacttaaggacagactgaaccatcaggtatgggtctgagatcaagtaatacaggtagcaagagtttttcccacactggaaaatgaaggcagttttccaaatactgtgaatttacaaacattggggaagcgatacaatccatatactgtatacatctgccagtgttctctgggattcagtccgcacattttgtaagtgccggtggtacctaatgaaggcattgcatataaactccaaagtctgtttccttattctctaaaaaggtagcacggccacttgcttatatgtgtgtctggatgttttctatcaaccccctgctcccaccactcctcagccaatccaaagagaggcttgcaggctctcattctctcctacaaagctagtcttggtttctgagcttggaaccagcaggaacaaagcaccatttacaccttatttctctgcaccaattgtatggatacactagacttaggtccagagtgggcactgtgatacagttgatcccttaaaaaatttcctcctggtaccttgtcaaatgggacaaaaagcagattaagtctataaaggctgtccttctctgcctggcattaggagtgggggacaactggggcattacttctcccagggtctgtcattctgcagagttaacatatattgtgtgcagtacattacaagccatcaatcaacatttaataatataagccgtgatattcacattattctcccttttcaatctccattaaaaagagaagcacaaataaaatgctgaaggaaagccacacatttctcagagcccaagtaaaataaagcatgtgtacgaaacatagtaatggccactgaaagatagcctgtccatgccttatgacatgagtggcatgtaaagaaaatgatgctagnnnnnnnnncactctcttaggacaaaatctattaggaatttatttttggtccttttaaagaaagtgctctcaatgctctctgtttccatgaggggaattcagagtatttcaattaaagtaagaggnnnnnnnnnnnnnnnnnnnnnnnnnnnntaatgatatcttaatcaattttccctcccctgggctcaggtaaaccattttacttttgtcttgactgcacccagccnctgataaaataagtacaatttcagcagcaagaccattttttataaaagctaatatgatcctgaaaggcaaacaaaaataagtatgatgtgaagttt

SEQ ID NO: 453643 - DNA, 947 bp, Homo Sapiens
  misc_feature (429)..(429): n is a, c, g, or t
  misc_feature (465)..(465): n is a, c, g, or t
  misc_feature (473)..(473): n is a, c, g, or t
  misc_feature (756)..(815): n is a, c, g, or t
gaccaaaaacacatataccaatgaaagaaattggtttaaatttcacagcattaacattactttttaagtaaaacagttcattgaagaaagtatgtatgcagcagtggaacatgggcctgtgctttgcagtgactccaacatcctgtgcctgtcctggaaggggcgtgtcgcaatgagtgagaaggagaagcctgtgtgcaggagacgctactatgaggaaggctggctgagcacgggcaacgggcgaggagtggttggggtgactttcacctctagtcactgtcgcagggacaggagtactccacagaggataaatttcaacctccggggccacaatagcgaggttgtgctggtgaggtggaatgagcgctaccagaaactggccacgtgcgatgcggacggaggcatatttcgtgtgattcagtacgnagggcaggtgtctgtggagctggtcaacgacggcgnggccaggntgagtgatttcacgtggagacatgatggaactcaagcacttatttactatcgagatgggtttgtcctggttgggtctgtcagtggacaaagacactggtcatccgaaatcaacttggaaagtcaaattacgtgtggcatatggactcctgacgaccaacaggtaacacttctgaaatgtggtgggtgtgtgacgttaaaaccatgagggctgggagggaagaaaggggcaggagaggggagctggtgcaaaagcctctttaagaatcacaatggaaaagaacnnnnnnnnnnnnnnnnnnnnnnnnnnnnnnnnnnnnnnnnnnnnnnnnnnnnnnnnnnnnacaacatttcccaccaatatggtaacattaagttaacattttaattatataaaatgttcatacaattttattaataaaatctgcataaatatgcagttgatattagatatcaagtaagttgatactaagctt

SEQ ID NO: 453644 - DNA, 760 bp, Homo Sapiens
  misc_feature (724)..(724): n is a, c, g, or t
  misc_feature (736)..(736): n is a, c, g, or t
tgagacagtttttttgtgaggcgtggagaatgaataaagagaagtcagtaaagtaccatgacgaaaaataaatgaagtggcctagacactaacaaaaatatctgagtaaagaaacagtattggagaacagagaataattcacaaccatgcatgccatacaatgcacactgatcactcacaccaactgtgcatgatactgtttagaaattctaatctgttctagctctaacattgctaactctctagcagaaaatacacaggcagtaaaacagtccctatagacattgtaattataggaggctcagcccagttataactgaaagcacatgacctggtaagatgttacaaaataatagctgtcagcaaaggagggcttataatttcaaaggatactttttattctgctttagtttaaggtgacaagaagctatttaagtgattacatttgaccaaatgtagcactaatagccattgtaatcttctccgccaacaaaataagacaatttagaaacattgttttacttgtcttcacactttggaggtagaaatcatgaaacattaatctcatgattaccataattatgctctcaaacagcccaagtgaaagaacaatcattctcacaaaatggtgccataatggttaaagcttaatgtcttgctaatgatcaaggatgtattacacaacataaaataaatagaattcgcttgttgtctgctcgaaggntcttgggcaatngccaagggtaagttatccattttt

SEQ ID NO: 453645 - DNA, 1088 bp, Homo Sapiens
  misc_feature (164)..(164): n is a, c, g, or t
  misc_feature (1045)..(1045): n is a, c, g, or t
  misc_feature (1078)..(1078): n is a, c, g, or t
gctgaggcaggttgggctcaggaactgcagggacgtgaacatgcgcttgcgtttgaggtagccgtgtctgttccttcgcgggttgctattttcatttcctgttcgtcaaagcagcagaggagatcaaaccccgttcgtgtgtctttcctccatggataagcttnggaggtcattgtttctactgccctcacattttgtttgaaatttcagaactgtttttctatgtaaatattgaaaacttatgatttgtgcaataactcagatattttttatttaatttcctattttcacataagttatatttaagggaggagggaattttttttaaacaagcttaggtcctttcccgagctgcattttctaagttgggtcatcgtgtcggctggttgtctgacgagcatcgttacaaacaccatgatgaggggtttggggttttattttgatgtcttttcttttggtcggaagtgagtgaaggagccaggtcgccctgaaggttttccaaagggcttggctccagagccacctgggcaggactgcccgtggccctgctgtcgggccccaggcgtttgtcctgctctgaccacagagttttaatgttttggttttcacttcttttaaactgggacaacaaatccagcattttcaagtgccagaagtattaactttctaaggagagaagggttgtcacattataaaatctttaggaaaatgtgaactggaaaacgcttcggtcagttttagtgacatagcctgtgatgatgggtctggtgactattatttgcggaccgtggtacccagttttaggaatgtggagaaaggaattctgttgattccgttgaggaatctgtagcgtatgcattcgttctgttaagagcaaatctaggagaagtgcttcagctgcccagtgcgccgtggggagtgttttaacggatcgtgtcgcaggagagcacagcccagcgttggggccgggaccgctggcgcccgacgtcggaagcatacaggtatacttatggcaagtgtatttttgccacaacaaccactgtcnttgttaccttttttttgaacaagatatattccntcctggccta

SEQ ID NO: 453646 - DNA, 589 bp, Homo Sapiens
tgtattttgttttaactagagaggcaatgtgacaaagtggtaagaacagggactctgcagccaagactctgggcttgagtcctggctctcttgtttccttgggtgtgtgatcttgggcaagttacttaacctctctgtgcttcctctgtgtttcctcgcatatcaaatggggataacaatactacctacctgatcaatctgttaatacatgtaaagagcttagaagagtaccaggtatatgggaaatgctataaataccagctatcattaacattaatgttagatgagtatttttaaaatccactgtttggatgcttccagctaaatagtctaccttaattgctaaatccaaagagcacttttcagcttacaacttacttgacgctgtggaccacttcctcctcagaactcttcatttggactccaaagaccatcttctcctggttttcctcctattcgtctggctgctcttcctcagtttccttcatgggttcttcttctccattccccgccacccaatgtcaactctcttttcttctcgctcttactctctccttgggtgaatttatccacccccctgggaaaagta

SEQ ID NO: 453647 - DNA, 728 bp, Homo Sapiens
ggtgctccacaaactctcaattgcaagaaatgtttcatcattcatttttcttaaaatcaaatttcatctgattctggacgcttttcctagtgagttccctggaaattccatctaccattattgtaccacccttccctttctcccacctttccctcctgcccatttcagcctctaaaatttccagggatctaatgaagacacttgaggacttccactggtactgacttcactttggctgcgatggatgagtagcagtgcttctgctgctattttgccctcctcctgggcatggaaatttttctcagaacttgattcagacacattcgtgtaccatgcagctatttccctatttcctgccctctcctactgtcagtgtgagttcctcaggcctacatcgccctctgcctccttccttttgaaaagtcttgccagctgtctagtccaagctcataatttatctctttctcttacctctccccaaactcccagccccgtttctgccagggctagtattgcttctcaatactattgcttcaggcttttataaaagaaaaaacatttaatatcccaaaaatcatataatgcagttactagttttatctctcttttatgaatgaggaaattgagggcagggcagatggagtagcatgcccaaggctacaaagctagaaagtgtcagaacccagatgtgaacacagcctagcaccagggagatccagttaccttgt

SEQ ID NO: 453648 - DNA, 1174 bp, Homo Sapiens
gtaaaaatcctgtttactatagaacaaagaacaacaaacttcttctataagaattagatagtattttaggctttgtggtcacatggtctctgtcgaattactcaactctgccgctgtagcacaaaaacagtcatagtacataaacaaatgaacatcggctgtttgaataaaacttatgaacactgaaatttgaatgtcatataatttcctcatggtacaaaatattttgtttaaagacagttttaaaacgtccttgaaaagtgttaaaaccattcttagctcacggaccctataaaaacaggcaacaggatggatttaacccacaagctatatagttggctaacccctggccttaaaattattgctaagtcagtggcagtagggatgagaaggagaagaaggttcaaacaatgtttgggaggaagcattgaaaggagtcgataactgatccaagggaagataagatctatttttgtacataatgaagatatatgtgggacaaatagagatacagaggtctaggaggtggttggatacataagtctgaatttcaggagacagatctgagctagagatttgggagtccactacctgtaggtaatatttggagccatggtcatgaatggcaagctgcgtaaggagactggatgaagcatgagaagtaggccaaggacagaacctcgggaaatactaacagaagaggagaacatggaggcttcagggaatctgtagaatcaattatgagccttaggatgatcacaagagaatggcctcaaggaagctaaatgaaagattttcaagaatgaagaaaagagtgttaaatgccaccaaagagtattaagagaaagactgaaacactgtttattggatttgacaattagaaggatataggtgacctcaccaagagtagttttaatagtgtgaattaatatttgtcatgtggttgaatcagggaaaaggctttctgggaagagggaacaacatcaacaatgagataaaatgtgaaaaagcattacattttagtaaaacagcatgtagttcagcactcagagtaatgaatatagtactgcaaaaaaagaaacaccttaaaattcacagaaagagctgaatttagtagagggaaaggacaaccaatattttattagaatttattatggttacttaatccaagtta

SEQ ID NO: 453649 - DNA, 687 bp, Homo Sapiens
  misc_feature (120)..(144): n is a, c, g, or t
  misc_feature (147)..(236): n is a, c, g, or t
  misc_feature (433)..(545): n is a, c, g, or t
  misc_feature (635)..(635): n is a, c, g, or t
ctgtagcaatagtgaaaaatttcttattcttacagtccaaatatatgtaagtgtacttaattcttaagaagtttattttgacactgacattttagtggtattgatgatacagttctaccnnnnnnnnnnnnnnnnnnnnnnnnnaannnnnnnnnnnnnnnnnnnnnnnnnnnnnnnnnnnnnnnnnnnnnnnnnnnnnnnnnnnnnnnnnnnnnnnnnnnnnnnnnnnnnnnnnncacccttaattttaacttgtttcatttaagttacatatttgaaatgtcagactgtactttatgaactgccttaaattacttttcaaacaagatgggttataaataaggtgatgctttggcctattatttttaatatctacatttttactttttttgtgagataaaaactaatggggctggacacagtggctcacacnnnnnnnnnnnnnnnnnnnnnnnnnnnnnnnnnnnnnnnnnnnnnnnnnnnnnnnnnnnnnnnnnnnnnnnnnnnnnnnnnnnnnnnnnnnnnnnnnnnnnnnnnnnnnnnnnttagctggccctatgggtacccacctgtagtcccagctacagggacagctgagatgggaggattgattgagtccaggatgttgaggactnagtgggcaccactgcacttcagcctggatgacagagagagaacctgtctcag

SEQ ID NO: 453650 - DNA, 808 bp, Homo Sapiens
  misc_feature (289)..(289): n is a, c, g, or t
cgctctgtggatattaataatagttttcttccccagcatagtcttggttagttccaaaattattttctttgtttgtttgtttgctttggtctctacctttcatgctggtagttccccttagatgtctgataatctttggtagtctattcaaatttaggagtgaggtactaaaagaccttattggaagttctgattccatgaatgaaacttcttgtccaccagcttcaactgggtcatctggctgggccatttagttgggtcattctcgacatcagcatctttatgtctntcctctggaagtggtcagataccccagagaataattttctaatctctagtggtctggaattagaatggggtaaaagacatggggttctgttagcttataaatgttcccataaattttcactaccccttcatttatattactgaactccatccccaaatgtgccaactgttctccaggaagtaagtttctctatttaccttttccagcctctgccaggctgggagagggaccattatctggctatacaggtttgaagagaggatgtagggatctaacaacttcttatacagacttataacccaatcctcctatttttgaccctacctttatccccattttcagtggtatctgacatttggaagctgtttgggaggtctatgatgtagtcaggtacttctgagttttctccaagacaaatttagggatcatctttctcaggtgtgttacctcttgtctatatggctctgaattccacaaccttgttgttcttgtcttcctttctaatttcatcattattcc

SEQ ID NO: 453651 - DNA, 1053 bp, Homo Sapiens
  misc_feature (102)..(110): n is a, c, g, or t
gcttgttaagaaatcaaaagatgtgcatagttataaaattcaaagggtcccaattacagatgggggtaatgggaaggctgatgaggttcgagggctggcaannnnnnnnnaaagcaaaagacacagagagctttgcagctaaatcagctttggacatttgctggggtgaggaggctcctcatctcatctctttgggcagaaagcccgtccagaggttcatcccctacaccctggcactttgagcaaaccaaagccttccttcatactgcaatgtcttttttgtcccaccctttggcccctttgtttccttcatggcttcatacagtttgtgttgtacattcgtaagaattcacattgactgcaaaaacataaatgcaacaaaaacataaaagcctccaagtagtatgttatatatattttgttcttctaaatgctcttctgtcgttgtcagaggcgcagtagctaatttataacttttcctttgagggaatccagatgaaaggcccagattgctcttcaataacaagcttgcattggttatatatatcttctaaagtatctccttggacaatagctgtaaaatattctccaaattcttgttctagcttaattgctcgatcataggttttctttgcttgttcctctgttagacgcttattcatctcccataagaggttccagagaccttggttttatgaagatggcaatgggatagagctgggcaacttgtaaccgcttgatagcatttcctgatacatcaagtatacagtgtttgcctctttctgctacaaatctcacagactgcacactggttccatataaattgtcattgtactggccggcttctataaacttgtgctcttggatatctttctccatttgttctctggaaatgacaaagtgatagtctctgccatccacctcgtagtctcgctttggcctcgtagtatgaggcacacaggagccaaatttatcagggaattcagatatcaagtcgtcattgatccgatccttcatgggccccaggataatcaccggccgggtgtagtttcc

SEQ ID NO: 453652 - DNA, 780 bp, Homo Sapiens
ccatgaaagatgtttattgatttaggaggagaaggcagtacattccattcaatactgtatttgactctgattacaatttccatgcaaagctactgttacatacacacatgaaaactgaagaaatgcttacctgacaatatttcaagtcagaatttctcagctaatttagaaagcaattaaaagtgaatacagaaagacactatggattcaaacattcttcccagaagagctttctaatgtataaagacctcagagaaaagagccctttccattcgagcagctacagagggcggtgtttcctcctgccctgtacttggggagaacagactgtgcacccatgtttatggaccgaggttactccacaggcatttcagaccaaggctccgaggcctgcggcttcacgcggaaatgacgggggctgggcatggttaacaggcaggcatcttggctgcggtccagtcctgtaagggccctgcacagaaccctacacgatgagctttcaacctgactcatctcccttccatggacaaggcctctgagacaggccggggacttctgcgaccccaaagtccctgcggggggccctgttggtaaagctggaactgagtggggtgaacatctaggtggagaaggtcacctggaaccaggcctcccagctgccccccactgtgatgctgagttacagagagtgcccccacttcggggcagaggggcagaggaagacaacccggtgtttctgtggacaaatcagtaagagtatgcaggacaaatgttcctcag

SEQ ID NO: 453653 - DNA, 715 bp, Homo Sapiens
  misc_feature (488)..(553): n is a, c, g, or t
cagagtaaacaaacataactttcttcaagatgtaggaaaactgtatattcaaaaccaatctcaaactttaaacaacaaaagatatcaaacattttaaactgtacaaagcaaattagcaggatttgaatattggcagttttaaaatgtcacccatccaaaacacaaaacagggagatagccaagtcttagctccatcctaatcaaagctgtcatgcagatccagttccactcttctcatctccagcaggtacttcactcaaggaggtgacacccaaggggagtagatgaaccagaaacaagagtgccacatagaaggaagagaggagaccttggaccttagctactggttagctattcgacattgatgatattcagcgttttcccaagttattctttctcgcttctcagcacataatttacattatgcatactatatgccagaaactgttagtgcttgacatgcagtcagttaattttcacaactgggnnnnnnnnnnnnnnnnnnnnnnnnnnnnnnnnnnnnnnnnnnnnnnnnnnnnnnnnnnnnnnnnnntgtattcctaaagcactacacagtgagcaaatagattcagacctgtgcagtctaacccagaattagctctgaatcactctaccattcggtctacaggacaatgtagaccagactacaggacaatgtagatttggtctacaggacaatgcagagtgcctgtcc

SEQ ID NO: 453654 - DNA, 904 bp, Homo Sapiens
agaggactatttgtctcatagcttttattaagcaaacttgatataaccaccacacagtggcaagagatagactagctgtttccagctgcagaaaatattgaattctaccctaaagtacagatcatttgcaatataacccataatagttaaagcaaatcatagtgcagtttgtattgaatttccttatttttcctttcaatggagtatattcattttcctgtcatttgagatcagtttctgttgcttagtaactattttcatgtccagccaagatgtagagattgctgtgtgcagtaggattttctgttggcctactttccaaaacgacaaccctgtctgatcctaataagcggaaaactcttgtttcatctgaaatctcctgggtaacctcatctggacttgaagcttttaccctgcatcccatgtttccagaaagccaacacactgtcttgaaggcatactacagattcaatgcgaaaatcaaaacttaactcagaggccagtttcttacttgattttaattttccttgtagatttacaattttcacaaatttgtctaaacacactaaaacggtatctctctccaactgtgttacatgaatggaatctaactgctggctgcctgcaccaatttctgtaaaccatgaagatgcagagttcaaattgattgtctcaaactgaactacctgattcgattcagtgcctttgctaatagctacacagaccatagggtattcctgttcaggtatcaccagcatttcaaaaacattcaaaggacttggcaaaggaaaatcaaagtgctttatcaacatgaatttctgcattggctcataccactgaagtaaaacaattccagactgtaaagctccacagaggtatttatgtcccgtgtaagggtttctcc

SEQ ID NO: 453655 - DNA, 624 bp, Homo Sapiens
  misc_feature (38)..(38): n is a, c, g, or t
cttaggattacattttcagattattttttcttcatctnttatgtgtgaaaaagataaatcaacaggaaaaataagcctttgtattacattcagaatttccttatggtgtctttgtacccatctacatgcaagcaagtatctactacaggatcccttccacccaacacaccatgtctctcagttatgttgtctgttagtcaaagcttaatgtctgccacttttctttctatttgggcctatcatcccccatctccgctgaagacttgtgtcacaagagtacggatttcatcctcatattagccactataagcttatacgcctaactggcttgttatattccaaaccatcacacacaaataagatgaaacttctgcagaaattttaataatgtatcttttgtactcaagtatctctgtgaactttttatgacttcgtaatttcccctagcctcctgaagtccacattcgtacttctcagtttattgttctaacctaacctttcattgtctctatatgaatcttaacttccaattaatatggaattttcatttgtgcccaggcttctgtttcttttttcaagctgtttacccagttggaaattgtgatctctctccctcttacctcc

SEQ ID NO: 453656 - DNA, 835 bp, Homo Sapiens
agcttaaagaagatagagttttattttttgtagataaacaaagtttggaggtaaatctagacccttgaattagtcctagatcatccataagaagctaccacatggcccaagatggctgctcaaatgccagcagttgcatctacatttcagacaggaggaggaatgtgtggggaagagaagggcacacttctgtttaaggtcccttcatggaaatcgtatatgatttacttctgcctgtatttcattgtccagaatttatcccagggctgcccctagctgcaggaagagctgggaaaggtagtttttattctgggtggcgatgtgccaagctaaagacatcaggggttccatgttaaaggaggaagagggaaatgaagaatgccagacacagcattttctgccacatatgatcaaaataaatttgagaaatacttggttaaacaaaatgaaataggcttcttcactgcagaatgtctcaacctttagtgcgctcatggacattgctaatctgtaaaagaggctgtagtagtatgtagcctttccaaaatgtattaaatgatagaattggtgtgtgtgtgtgaagcaccttacggaattggtgttctgcagaggctatgcaggtaaacgtagtccttgattatagagttcaaaaataaccaagctaggcaacatgctttcattttaaagactaaatgccattccttcaatcagcctagaccacctaccctggaaacgacaggccctgggccaagtgctgggatatatggctgagtcatgattcctgctctcaataagttcaaagtcaagagagacacattctcagcaaaataatgcc

SEQ ID NO: 453657 - DNA, 400 bp, Homo Sapiens
tgatcatgattgccatctatgccctgctcactgagaccgtctacgcaggcctctttctgcgttatgacaacctcaaccacagtggagaagatttcctggggaccaaggaggtatcactgctactgatggccatgttcctcctggctgtgttctaccatggacagcagctggagtacacagcccgcctggacttcctttggcgagtacaggccaaagaggagatcaatgagatgaaggagctgagggaacacaatgagaacatgctccggaatatcttacccagccatgtggccccgccatttcctaggagaaggaccgagacaatgagggagctgtatttcttcaatcctattgatgctgtttgggggttgatgttttgccttccatcccaggggttttt

SEQ ID NO: 453658 - DNA, 688 bp, Homo Sapiens
  misc_feature (255)..(280): n is a, c, g, or t
  misc_feature (418)..(428): n is a, c, g, or t
gttttcagctcctttcacatttagccgttccccatcccccccaggcttaaaacaaagacacttttgagaggaaagaatggcacttcgcgggtcacgcacttcacatgcctaagggtccacagtagaggagtataaacgggcacaccttcaacccagattccatcacagtggttaatagagagcccagctatctgcataaaccacacaaatatcttttgcacatacctctccatgtattgtcaccacaattatggnnnnnnnnnnnnnnnnnnnnnnnnnngcatgactttcaacagatcaacatccaagcacaagttagcaacatacaagcacaagttggcaacataaattattagatctgtccccaaaagctatacttaaatatttaccccaaaacatgtgttattttagttaagannnnnnnnnnnagcaaccaaagcaagacacgatcgagacaaaggagcttagtaggaatgttgggtaagcagaggcactcggccaaggctgaaaagggtgtaaattctgcttatgttaacgcattagggagcatcaagatgctgctcagtttctgcctgtagaagtagaaaatgtttttcaggtgtccaggtacacagcaagctggtccaatagtgagcagtacctttgtgaacaagcaatactaatgggccttaaattcttgtccccttcc

SEQ ID NO: 453659 - DNA, 1411 bp, Homo Sapiens
  misc_feature (115)..(115): n is a, c, g, or t
  misc_feature (149)..(149): n is a, c, g, or t
  misc_feature (152)..(152): n is a, c, g, or t
ggagaaccatccaggagagccataagcgtccaccaaacagtgtctcaggcctcacctgaagctgctgttcctcctatcagcacactagtattaaatgggtgttccataatgaggngaatggaaataggtacaaggcatctagcttaggncanaatcggatttcggcatgtgaaggaatcccagagctgatctcattgaaatgatctatcgtacagacaaggatatgcaaatccacagaagtgaagggatttttgctcaagatcacatagctggtaaactaaggtaaggttagggcttgaacttgggccttctgactccttgtccagtcagtgttctttcatctcaccacagctgcctcctttgaaacagaggtattaagatctgtccttctggttcaccctctcatacctctttactgcctctcccacatcccccacatgcctcccaaaatgaaagacaaacaggattgtttctgagaccaagatcagtctgtctgtgatcagcctgtgtgtggttcacccagtcatgcaattaagggcagatctgggccagtggaataggatagctgattggtgtttgttactgtgaaccctagaccgtaccccgtagaatggtgtctcttgctttgtaacacatcgggccttcagtgtgctgtattcctcagaagtgagggcatctcggtccattctgcccatggccacagggtgcagagaggcagcagggcccatgcaagctgccaccctgggatttgctgggctggagttcaacagatgtaaagacttcagtgaagcaataaacacaaaactctgggagaagatatccagaattttgtacattactctgtttctttttcaaaaatgaggcagatcagatgcccctgagctgcccctttttttctgattcccaactgcaatgtcctcagtcagtgttgtccctctgcccggctccccagctctttgccaacctcttcacactccccttgagctgagcatcagtcgcctgtgacgtggccaccttctgtcctgctcccactcccgacccatgctggaccccggaggacctcctgccccgcccccaccacacacccatatcccccaccattccaatttgttctttcccgtggggaattttttttcccagcgtctccatcccttcctacatatccacacacacacaaattggtctgatcttttttccattggttaaacatttaactccatgccagaccttgttttaacccctctcacatcatgttctttccttttttgcgagttattttgcattaaccaactttgtcagtgacagatgcgtatctgaggtgtccacacgacctcagcagggagattctgctggcctggagggcgtctatacatggactataaactgactgctgagcattgaaaggcaatta

SEQ ID NO: 453660 - DNA, 636 bp, Homo Sapiens
  misc_feature (64)..(64): n is a, c, g, or t
cagaaccctgaataatatggttggtgtggactgaaatgatttcccagaaaggcttagaaatagnaaaagaatattattatgaataattgtaataacagaaattttaccttatttacatagtgcctatctcccaagaggtaaatatgctttacagacattttttagtaactctgtgaggtggggcattggggacaccatcaattctcattttccgcaagcaagtaaactacccaggaccacacactttagcagtggtagagtaaatacagacatggagatctcctaaatcccgaagtctccaattaccagatcaaatagtcttgtggtagtaataagatttccatcattcaacagaactcctaccacaaaggattaatttctaagtcctcatacacttgtgattgtgcgttatattgataaccacagggagatcaaaatggtttttggttttggcagatgaaaaagtctaacattcagtgtgattatacttcagtgtaacttctccagtttaagtgcgacacagctgattggtctatcagggagatgcagtcaacgtctaatcatggctgaagagttctcaatccgaaccgctattgcatgattacagagatagcctacaatcttttattgtcttcc

SEQ ID NO: 453661 - DNA, 1023 bp, Homo Sapiens
ttttttttgaaaagtagattttaacaaaatggtcaacaaaataattatgagttttaatgttggttatgtcaatttattagtaattttggtcttcccattagtgtcctgtataaaaatgatgagtttctccgtagtacgtacaacagcttttaaagagaacgtaggcagaataattcagacagaaaccataaataaccagaaggcaaagtgaagcaaaattgtctcatgtgatgtttatcccaatttatatcgatattcttctatcaatttttagactgttaaagtaaaatcttaatctaagtgtcttatgaatcattataaaaggattccaacctttaaaaattatgaaaggtttaaagacctcattaatagggttaggaaatgtttgctattatcctactggtcaactttggtctgtattttctgcacctcttcaggccaagaataacaatcaggtagaatctggtcataatcagtactatacatctgggagcggacaaatgcttctttgttttgcggttcaggataaactgtggctgtcttttcttggtatgcatctttcacaatcttttctgcaattttcagagaaacatctctaatggtattcaaatgaggataaagccgactctcttccaagtgtttatctgacacttgctgagctataacctcagcagtagtgaggaaaatattatctgtgatctgcctcaatccacacgccacaacaccaagagcaactccaggtaacacataggaattgttgccttggccaggatatagggtctgtccattttggaagagtgactggatcaaaaggactgccactggcaaaaattgcacgtcccttggttattttgtaagcactgctcctgcagaacattctgctttgctagttggattactcaaagcaaaaataataggccgttcattgaaggcagccatatctttgagaatttgttctgagaatgcaccaccaattgcagcaactcctatgagggcagttggttttatttcttgaacaatgcc

SEQ ID NO: 453662 - DNA, 727 bp, Homo Sapiens
  misc_feature (681)..(681): n is a, c, g, or t
gcacagaaggttatggtggcccccataagtggctcagttacaactggaaccaaaatggtactaactactaaagttggatctccagctacagtaacattccaacaaaacaagaactttcatcaaacctttgctacatgggttaagcaaggccagtcaaattcaggcgttgttcaagtacagcagaaagtcctgggtatcattccatcaagtacaggtaccagtcagcaaacctttacttcattccagcccaggacagcaacagtcacaattaggcccaatacctcaggctctggaggaaccacaagcaattcacaagtaatcacagggcctcagattcgccctggtatgaccgtgattagaacaccactccaacagtcaacactaggaaaggcaattattcgaacacctgtgatggtacagccaggtgctcctcagcaagtgatgactcaaatcatcagggggcagcctgtctccactgcagtctccgcccctaacacggtttcctcaacacctgggcagaaaagcttaacttcagcaacgtccacttcaaatatacagtcttcagcctcacaaccccctcgcccccaacaggacaagtgaagctcaccatgggctcacttactcagttaacacaggggcacggtggcaatcaaggtttgacagtagtaattcaagggacanggtcaactactggacagttgcagttgatacctcaaggggtgactgt

SEQ ID NO: 453663 - DNA, 595 bp, Homo Sapiens
  misc_feature (214)..(259): n is a, c, g, or t
  misc_feature (413)..(532): n is a, c, g, or t
gatcatttgtatatttttcaaaattacataaataaatcattttatcattttatttattaagtccagaaactgattttaggggtagagggatgagttgtgctatttaatcttactctggcggataaataaacatatggattcaaaggtgttgagtgagagaagactcttgatatgttagaagaccactgctctaggatatgtgtagaaacaaaannnnnnnnnnnnnnnnnnnnnnnnnnnnnnnnnnnnnnnnnnnnnntttcaggcctgcctgaaatatctatgtgacatgtgtcgacacatacagcccctctggtactcagtatcatattctgaaaaatgaaggtgttagacaaggatttctagcaactgttttacttctaaaattctgtaatgtggtggtggctcacacnnnnnnnnnnnnnnnnnnnnnnnnnnnnnnnnnnnnnnnnnnnnnnnnnnnnnnnnnnnnnnnnnnnnnnnnnnnnnnnnnnnnnnnnnnnnnnnnnnnnnnnnnnnnnnnnnnnnnnnntgtggtggtgcacgtctgtggtctcagctactgtggacactgaggcgggaggatcgcttgagc

SEQ ID NO: 453664 - DNA, 640 bp, Homo Sapiens
ggatcttttgccattaaatagaagacaaaattgcttcagtgagatttgttaaaatcacaaatgctccaaaattcttttggtgctttttagatctttaagagtgggagattggggatgttaatatttttgcttgcagtagtgtacattttgtaatatagaaatagtgaaaaaaattgttattaaagtctcttcagatatattcaattattaatcatgcaacaaacatttattgagtacctaccatatgtgaaacagagttcaaggtgctatcaatacagctagtcttccaaagctcgtgaccttcagatcttttgttttagattctgttatgaaaatgtcactagtgtaagccacatttttaatgcaatcaatgcccgttgtacagacagactcattcagagattaaagtgtgagttgcttgatttctttctgctatgcttcagctcagttttagcagtatgtataacatcttttaatgtgatgtaagtatgtaggtataaagttcctggatatatcagttattaagccacaattataactaagcgtgagttatggcagagacaacttgaaacactgctagtgattctaaaaatttcctaatttgacgaagaaacagggaacaggtagtatctattttaaa

SEQ ID NO: 453665 - DNA, 872 bp, Homo Sapiens
  misc_feature (260)..(322): n is a, c, g, or t
agcggggggtgtttcctggacaaagaagataaagtcgcaaatggagacatttattttcataatgctaaagagaataacaagattgggcatgtacattgtcatgtgactggatcacatggggaagcgctttatacagacatcagttccatggtgttaatttgaaatgccttaatggcaggcaaaaaccagtcatttcatttttgtaaattacagattttatcacagagtaacaaatgttgctgtaattaaacttctgtttnnnnnnnnnnnnnnnnnnnnnnnnnnnnnnnnnnnnnnnnnnnnnnnnnnnnnnnnnnnnnnntctttactttttgtatcagtaaccacggctcgcacacacagggtctgctgccacgtcgcaaaccactcagtaaaggaaattaaaaatgtatttgtcatgttaaaaagtgttagccacaaaaggctacttactttcttttccttttcctttaaaattgtaaataaataatgttatgtatcagtgtgcctgaaccttgcatatccttcacatatttcccataagcccctcagaaaggctaactgtgatgatgacactttggtacaatttagatgtctatttggtggctcctgttaaagacgcaccagtgtaaaatgttcctgtagtcactgtttgtacttgtgtattgtggaaaaagtacttttggaaggcatggggttgccagtaccacaaaaactgtgttgtatataatgtaaagattaaaatggggaaataatgagcatctgtgaataatgaggtgtcattttttgataatcttgaatggcaaataacccaatagcctgcgtaccagagacatctgtgattgttctattacttgaatagttctacagtc

SEQ ID NO: 453666 - DNA, 656 bp, Homo Sapiens
aatcaacagcaggagaggagcatacagatagagcacagaccatgtttccagttgtgatgtatgtatgaaaggtatcctgtgggccgccctctgcctaagggaacagcaggtgaaagcctgagtccccagtccatggggctttgccaccctggcctccccaatgaactcaggcccacctcggtgaatcaagttcccaccctacagggttcctgatccttaataccaaacccagtcataatcctcaaatatcctatttaaaaggggcaggaagagagatgattctaaatattttctttcagaaagtgtcttgagtaaaaaaagtttaaagacagacttgctttatattaggaagtattacaaaaacagagtaaacagtgatgttttgattctcagggactaactggtcctaacaggtactaactgggcttgtgtaccattaatcttcctgtcatatctgcttctctccaggggtaaccttatgctctcctattgtcaatgcattttcttggtaaggctgctggcagttctacagttacaatgtaactggcctatgatattctatttcttaagtcctaagatgtattctttttccaaacttgattcaattatccttctgtgaaaaattcagtagcaggccagaaagatgggtattatgg

SEQ ID NO: 453667 - DNA, 333 bp, Homo Sapiens
ataaatctctctccatagtatacaaagtctcttcaatccattagatcttaattctcacagagtaggaggagatattacatccattttattagggataagcaactacagagcagcaaactgacttgtgaggtcctgtagctagaaagtgacagctagacagtgattaaaccctgaatcgtttgcaggaaccttaacagggtattacgctacccctaaccactaaacccaattacaggactgatcaatacctgttctgtaagtaatattgaaacattgctgtatttcatattggtttcagaccccagtgctactctgaaagtgggtccgagctga

SEQ ID NO: 453668 - DNA, 1011 bp, Homo Sapiens
cactgcgttcctatctaaagagacgggggccacagcgttcagttgatgtggttgtatcctcggttttcctactgacactttcgattgctttcatttgttgtgctcaggttctccaaggacataaaactttcctgaatgatgcttataactgggagtttttgatctgggaaacagctttactactttttttattgcgtctggcctcactggggtctgaaaccaataagaaatacagcaatgtttcaatattacttacagaacagattaatttatatcttaagatggaaaaaaagccaaataagaaagaacagcttactctagtaaacaatgtattaaagctgtccaccaagttgttgaaagagctggacacaccatttagactcctatggactgacaatgaatcccttaatctacaatatcacaagagtagttatcctttctgctgtctcaggtgttataagtgatcttctaggatttaatataagactgtggaaaattaaatcataagctgagttaaatgcctggactctcccctggctggtatcaaaacttacctatcaaggaaagtgatgactgcagaaaccagtgagatacccacctgcttgttcacatgcacaggtgctctcagctctgccaaagcgaatgaatggtgtttccggaggagcaagtccttttccaactgggtgtgcatgctaaaaacctgtattttcatgcttttcaaacaacatgaatagtcagctgactaaagactgtgtgtgttgtggtaacacaaagacaattttgtaagtttgcgcttcagtactgtgacagttatgtttactggacatagtcttttgggcaactatgatagatgcccaaagcatgaagcaaatatcttttattggaaatatgcaaattcaatacttttccattatagtctatagaactggagatttcatttctctatcaaagagagatcaagcgaactattttaggttaaatccgaataaaagaactttactggaaaaaaaa

SEQ ID NO: 453669 - DNA, 464 bp, Homo Sapiens
tttaaatatataactatatttattttgaatattaaatagtttttaaattacaagcaatttattgaatcacactatgcatcaatatacagtaaaaatcttacaatttaaaaatgtacacaatttaaactgaaagttcattgactattatattgccatgaacctcttctgcctgtgttaaagcacagcagggaggcctggtgggtgtgacggccccctacgtcctcctctgcagacggaatccgacggtggatccatacaccagccccatgatcaagatcccgctcggcccacgtaggcctgagtgcttaaccagcacgtgtccacaccggtcaaactgatcttcacaggctgttggtaattcaacactggtcaatgcatctttaagaatttctttatagatgaaagagaatggttctttgttaataaagacttgagccaaccccattgctacttaggaatattcc

SEQ ID NO: 453670 - DNA, 490 bp, Homo Sapiens
  misc_feature (439)..(439): n is a, c, g, or t
  misc_feature (450)..(450): n is a, c, g, or t
  misc_feature (472)..(472): n is a, c, g, or t
cagagtttataaatatataactatatttattttgaatattaaatagtttttaaattacaagcaatttattgaatcacactatgcatcaatatacagtaaaaatcttacaatttaaaaatgtacacaatttaaactgaaagttcattgactattatattgccatgaacctcttctgcctgtgttaaagcacagcagggaggcctgggtgggtgtgacggccccctacgtcctcctctgcagacggaatccgacggtggatccatacaccagccccatgatcaagatcccgctcggcccacgtaggcctgagtgcttaaccagcacgtgtccacaccgggtcaaactgatcttcacagggctgttggggtaattcaacactgttcaatggcatcttttaaggatttctttattgggtggaaaggggattgttctttgttantaaaggtttgngccaccccttgctacttagggnttttgttttggggttttt

SEQ ID NO: 453671 - DNA, 560 bp, Homo Sapiens
  misc_feature (56)..(205): n is a, c, g, or t
cactcaggcaatccttctacctcagcctccagagtagctaggaccacaggtgcctnnnnnnnnnnnnnnnnnnnnnnnnnnnnnnnnnnnnnnnnnnnnnnnnnnnnnnnnnnnnnnnnnnnnnnnnnnnnnnnnnnnnnnnnnnnnnnnnnnnnnnnnnnnnnnnnnnnnnnnnnnnnnnnnnnnnnnnnnnnnnnnnnnnnnnccaccaattttcaatcaggaagactttttccttcttcaagaagtgaagggtttccagagtatagctacattattggcttggctgagggtgactaccaaattggcttggctaaaaggttaggatgggtaaagaattagattttctggaatgccaaaattaaatgtggactaatgaactttaggtaatacatattcataaaataattatccacatatttcctgatttatcacaggaataatgtatgaaatgctttgagtttcttggagtaaactccattactcatcccaagaaaccatattataagtatcactgataataagaacaacaggaccttgtcataaattctggataagcc

SEQ ID NO: 453672 - DNA, 504 bp, Homo Sapiens
  misc_feature (11)..(11): n is a, c, g, or t
  misc_feature (422)..(458): n is a, c, g, or t
acattccctantgaaattcacacttcttgaatgtctactatggacagagcatgatgccagttatggggaaggggaaatgaacacacagacgggtcataaatgagcactggggaaagaggggaaagctgagggagcgctatatcatcacatcaactgagcatggacttggggaaataaggtaaaccacaagctgtgactcaattcgcaagcataggtagaggacgaggttttggtatctgaatgcctaaagaagtaaataaaatcgagggcagaaaataagtccaaggtatttttaaagcaaggaaggaaagaaaatggaagataaaaagaatgaacataaaagtctcaagttaatttttatgtcagacttctgaatgccccaaaacaaaacaattctgtaaggccgaaagcagtggctcagnnnnnnnnnnnnnnnnnnnnnnnnnnnnnnnnnnnnnagatcacttgaggccagaagtcaagaccagcatgccaacatgtgaa

SEQ ID NO: 453673 - DNA, 570 bp, Homo Sapiens
  misc_feature (463)..(463): n is a, c, g, or t
  misc_feature (515)..(515): n is a, c, g, or t
  misc_feature (520)..(520): n is a, c, g, or t
  misc_feature (549)..(549): n is a, c, g, or t
tttaacataaaaaaataaatttattttgagtctgaaatactgaagaacaagcatacagataaatagtacaaagaacaaaaattagaacatgagtaatgacttaagacacaggcatttttctagctattgcatacagacacatttttacacacaaacatattttttaaagacatctctccaacattctcaaaaggcaagagctgtatttgtgacatttgtaataaatgcaacagcttttgaaacatccagtttctttcctaagtcatttgattaaaattcacacaagtgatgattacctattccattttctgaaaatacgacatacagtcatgtttcgatcaacaattgaccacatatggacagaggtcctataaggattataatgggaacttgaaaaattcctattcacctagtgatggccacggccattgttacattggtagcacaatgtattatctgttcnatgtttagattacacagataccattgtggttacagttggcctacagtattcnatacngtaccatggcggtacaggtctgtagcccngaagcgacggactttggccat

SEQ ID NO: 453674 - DNA, 673 bp, Homo Sapiens
  misc_feature (591)..(629): n is a, c, g, or t
ggatccatttattaattcaacaaatatttattaaagtgcctaccatgattatgtgctgtagaaaagacaaggacatttactaggggggattgtgggcccaatcggcatcataagcatgtctgaagcaaaagacaataatcacatccaacggcaccagttcagctcaattttagaattcagcagtaacagtacagatggcctaaagtacattctgtgtgtatctgtacgttgtgcagacacccatgtatatttatttatctatctgtacaaacactacatatgtatacacactatctatgtaaaatataatatatgtattatgcatattaattctaacaagtgtatttgtgttatctttaatatagaacaattgtatcttgaagtggtacatgcagagaattggttttattgttgatctgtggatttaatgatttctaggtgaaaaggacgtttaagtgtacaatttcttttcttaatttaatatatttatgtaaatgcatgcctgacatttggttagattggctgtgttttgtgtcttttaacatgatcaaatgattaaactttatcttatgacttgatgtacatgtgctnnnnnnnnnnnnnnnnnnnnnnnnnnnnnnnnnnnnnnncaaataaacagactgataaataaacaccaattttaaataaaaaa

SEQ ID NO: 453675 - DNA, 456 bp, Homo Sapiens
aagaaagggggcacacatgaagagcaggctgcctgagacttgttcaagaagacatcattttgtgtaactgagtcagtgtttactcattcactcattcagtgatcctatgttgcttacctataaagcatctttatgatgcctacaaaaggtggagtttatttcctggattatcctttgatactctaaattggagctttccaacctgtgtgccatgagtgtctggggcctccagactggttgccttatgttactgttctatatgtgcctgaggagagaagagttggaaagcactgctctgcataattggctttcatgctttatggatgattgagaaagaaagaatttgaaagaaacaccaggggttggtgttgtagcctaagaaaatgaaagtactacctttctttgagacacttggggatggaatgatcgttgttaaggacagattctgagaaagtc

SEQ ID NO: 453676 - DNA, 789 bp, Homo Sapiens
gtatagaaaaatactttttattttgtcattgaaaaaccattttaaaataatatatcgtgtagaataaaaaattccatgaatatatacatgtaaattatacatatatgtgaatttaattttgttaaaaggtaattggcatctgcaatttcatgcagtctaagtgaaacccataaagaaatgtgtatgaaataggaaagcaacaaaagctcataacattttaaaattagaaatcagattcaaaacccattatgatctattttaaatttatctctataacatttcaattgagacataaaacacactttatacaacatgcctcactattttattaacagcatgacttccctttccccaatccccaaaccatgttcccatctacaccccaccccacccaactctcacctcttccattagcattattacaaacatattttacaaatcttataccaagcttttccactgtctcttttcaatgtagaaatatcttatatataaacccaaataccacaaatcttcacatttatattttctaaagcagttaaacctttatagacaattctacctaaaaagccaaatgtgcttgacaatatgtcatgttatgttaagttgaccagacacagaagtcatttctgtcggatttcttgtcgatgtttgcattaagttggagctttctgatctcggctcttcttgtgccagtaatttgaaaggtcacctctctgttggcctttggtttatgcaatgcagtctggcattgcataattaaaagtctcggccgggcacggtggctca

SEQ ID NO: 453677 - DNA, 696 bp, Homo Sapiens
ctggggatggcgttctagaggtctctgccctatagacatcaagtaagccattcaaaatgccaaaatgtcgcagactcctaattagctcattagaggtaaacattaattaatcattctggtgagtttaggtaaaggttaccatcttcactgcagggctcctgggaaccctcaatgtaagaaagcattaacccacaaatcagaacattctcaatgaagttcatcaaaaatataaatcaatagaaactgtttttaactcccaactagtgtgctggaagacgaacttgtttaattgtatttgtgtaaaatgttgtagtagtgacacataatgaaatcgttcaagctggtcacccttggagacgccagcagataacacagcaaggcaggtgagatcccaggaagatgttgggttgacagctttgaatcagcacatctttcaactatcatattgcaagataaccacaaccattgatataacaggtatcacttattaatcccttactacatgccaaacactttatatatgtatacatgatttaatttaatcccattcactttgggaaactggcatatttatgtctatttttacaaaggaaggaatacttcttcagagaaaagttaactaaatttctccacagcacacagccaatggtggtaacgatgggtatcagagtttatttgatcccttttttattttga

SEQ ID NO: 453678 - DNA, 511 bp, Homo Sapiens
  misc_feature (29)..(29): n is a, c, g, or t
  misc_feature (40)..(40): n is a, c, g, or t
  misc_feature (48)..(48): n is a, c, g, or t
cccccccctaaaaccctttttgggggaanaacctgtaccngaacaaantggagaaaacgggtaaagctgtaaaagattcccagtgtagccttctcctgagaagttgtgagcccagtcccataactgccttccctcacatcccatctgattggcacccatttcctgcagcaaacccccaaagcagggtgcccaatatgcagatggcatagggagtatcatccctcagcccaaatcacttttccatctctaaagtttcatctattttggaagtcatctccaactaattgtgtctggatttagttgctaaaattgtcttatttatgaagcagcaatattcagcctgaaagcatttctgccatagttgttgtagttataatcgccaatggctgatttttttcattggaaagtaaatttaagtaattcgtgggatgtggtatattctgtgtcaacttcaagataatcactcattttctcgttatattcaggtctgaattaaagttaagttaatcac

SEQ ID NO: 453679 - DNA, 803 bp, Homo Sapiens
  misc_feature (49)..(49): n is a, c, g, or t
  misc_feature (56)..(56): n is a, c, g, or t
  misc_feature (68)..(68): n is a, c, g, or t
  misc_feature (74)..(74): n is a, c, g, or t
  misc_feature (83)..(83): n is a, c, g, or t
  misc_feature (114)..(114): n is a, c, g, or t
gatttaaacttttaacctttcaaattccaggaccctggaattatcaacngaggganaatggagtggantaatcnttggaaagntgaccccagaattataccacatccccacggnttaccttaaatttacttttccaatgaaaaaaaatcagccattggcgatataactacaacaactatggcagaaatgctttcaggctgaatattgctgcttcataaataaataagacaattttagcaactaaatccagacacaattagttggagatgacttcccaaaatagatgaaactttagagatggaaaagtgatttggctgagggatgatactccctatgccatctgcatattggcaccctgctttggggtttgctgcagaaatggtgcaatcagatggatgtgaggaagcagttatggactggctcacaacttctcagagaagctacactggaatctttacagcttaccagtttctcaattatgtcagatacagaataatcaccaaaaaaggctttagaggggaaaaatactctaatattttgaattttaaaaatagatttaatttacctttcctacttaccttcctagatggcataatctacacttaaatgacatttaaaattagaaattatattaacttcgagcattgttttgtgtcctaaagagatattgacaggtaaattcaaaagttgtatttgtgacttaatcttatttttacatggctaaaagtggcctatgctcttctgtggagttttcctcttaatttcttctattcttgatattaaacgggaggacatatagattg

SEQ ID NO: 453680 - DNA, 687 bp, Homo Sapiens
aattgctttcatgaagattcaaaaaaactagttgaattctgctagatgagtacacttgtaatcagattaaatatattttaataaataaatactagatttggaaaagatactcttaaaagaatgctgtatttgattcaaataatttatattatagacaaaacaggaaatcctagaatcggaaatttagatttcccctgatactgatgagaataccagctgagatgactttcactggtgcaccgtggtaaatcttctgttctctgatatagttttaagatggcaaaagagttcttctgaatgacttccatcatttacagccttctccataaattcagtaaatggatttataggtggcttcacagcgacttctccacataagctgaaaggcccccgccgtctgcgtccgcacgtcgtcgtgacgacagcccgccgtcgccgcgatataaaaaaagggtcagaggcccacggctgctgcaatggaaaccgtggcaatccttcttgtgctctgagtcggctaggagggagcgggacgcagggggcactacagtgggtagactaggaaggaaggcaagggacgcgaggtgggaaccaggcgaattcctagacctgttgccgcagaagagtgcccgctcaagtggaacaaaagcgcagctagtaaccggctagtggcttctctggcaacggcgc

SEQ ID NO: 453681 - DNA, 946 bp, Homo Sapiens
  misc_feature (33)..(33): n is a, c, g, or t
  misc_feature (35)..(35): n is a, c, g, or t
  misc_feature (70)..(70): n is a, c, g, or t
  misc_feature (371)..(413): n is a, c, g, or t
cgcggctctgtgtcccctgctagccgtaggtgntngacccgcagcaccgggagatccagaagtgaaacgncaggctctctggaggccaggagatgactctgttgacgttcagggatgtggccatagaattctccctggaggagtggaaatgcctggacctcgctcagcagaatttgtacagggatgtgatgttggagaactacagaaacttgttctccgttggtctcactgtctgtaagccaggcctgatcacctgcctggagcaacgaaaagagccctggaatgtgaagagacaggaggcagcagacggacatccagagatgggatttcaccatgctacttcaggcttgtcttgaactcctgggctcaannnnnnnnnnnnnnnnnnnnnnnnnnnnnnnnnnnnnnnnnnngtgtgaaccaccgtgcccagccaggcctcaatgtttctgtggacaaattcactgctatgtcttctcattttacccaagaccttctgccagagcagggcatacaagatgcattcccaaaaagaatactgagaggatatggaaattgtggccttgataatttatatttaaggaaagactgggaaagtttagatgagtgtaagttgcaaaaagattataatggacttaaccattgttcatcaagtacccatagcaaaatctttcaatataataaatatgttaaaatctttgataacttttcaaatttacatagacgtaatataagtaatactggagagaacctttcaatgtcagaatgtggcaatcctttcaatgctctcttcctactgacatcagaaatcacctggaaaaatccaaatgtgagatgtggcaacttatcatgctccacttctgactgaacatgacctgaagaactacatgcagattacacgtctaactgtcatctacaatgatttgcgaggactcgatgtaatgca

SEQ ID NO: 453682 - DNA, 1154 bp, Homo Sapiens
tcaaatctcttatcatatggtcccaccttattaattttattttctactccttttcaggcatcgtatgtctcagttactttcctagagattccaagattggaatttccaatttccactgttctgtattgcactgttttctaggtgcagcttgaatactgcttctaccctgaagctttctcatcctctgagcacctcatggactgtagccaaaggggtctcaaagccacaggcagtctgacaaaagtgctctcccctttcttccataaggaattacaacctgtatgtctgcaaatctacactgcctcatccctccttctcagtgtatgaccttgccttgctaactccagagaaatttcagagataaaggtgaaaagtccttaatttcctaacagcaaacctacagatttagtatctaaacccaccttttcttccttttcctcacgtaaaggacatctttcctctaaagccaatccttcctcctctcccctaggatccatcccttcctgtttttcgaagggctaagtttctctcctattagctcctttcccagaagcatttgaacatgcccatcactccagatttacaaacacaaaacctccgaaccccatataacatttctcctttgcttactaccctcttcccctcactttgacgatctcaagcaaaattctttccctagcttccatgtgcccctgctagtttcccacccctcatgactcgctttgccaacctctattcgtctcttgattgttgtcatcctacccctggggaatcagtgaccacttacatattcatgaatcccaagtctgtcctgaaacctctcctccttgtgtcattatcacagctcttaccaagggaaccagtcactggactacatatcatgattaactactctgaagcgtaccacatagatgaggaaactggattttgactttggtcctgaccacagctttctcaggccacgcagggctaggctgtctaggtggcagtgttttgtatcatggaatgagcccaccatagtgaccaattgctgtaccacgtggatgtcactccacctgttgtccttggcctctcacaggcagcaatgtgcagcaggactttctttgccatacttccagcataatctatgccgacccgtcacgaagggggatata

SEQ ID NO: 453683 - DNA, 768 bp, Homo Sapiens
tcatacatatcagatatgcactttctcctttataaactcatacgtatcaggtgggtttagagcaatattctacctcagccattattctctgagtacaagccaagaatgcaaactgtcacatgatctgtattgccttgcatatttatgcttatgggccagagtagttttaactgacgttgaaaacagttgaacactcttacatctcacgggaggaatagagtgaatataaaagatttttctcagcattttacagctgaattgttctacatccagtattaaattgttttaataaaataatactgccagcatccaaagaagctaccatgagaacaatttctgaattattcagtacaatttcataataatattttcatacggagatctctcaattaacatatgagagaaattgtctttattatttgagagcaaagtatttttgaagacatgagtgggtatctttatattaagtgaagtcttaagaaaaagatccccgtgtgagcattttaatgtaactttatgaatgccataaatttgaaaaatgtgttttttgttctctggaaaattgagagcaggactttttaacacttccattctgagacgttaaagagagttaatataaggggtctcatataaaaactaagctagaggagaaccaaagcgttttgaaaagatacagttagtacaactgtagggaccagccccacagggttggtgggtctctccccatgtgtggagacaagagagtgtgtagaaataaagacacaagac

SEQ ID NO: 453684 - DNA, 858 bp, Homo Sapiens
  misc_feature (808)..(808): n is a, c, g, or t
cctcgtgccgcgacccatcacagctgcaagttttgctttgttcattgaaggtgattttttagttttaaaatatatatatctcataatatacaatgttgatggtatatcaatccatcaagcattttattagaaagactttataatattattaatttttcttttagttttcagtagataaaactcagtctcatcatgggagttagaaaataccagcatcacttaattgtaaagagaaaatgtgaaagtattttccaatccaatgtttcaagtgcctcacttattgtgaatctcaaatatcatcttgagatggtttaatggcagtttggccaagtgatttctaagagattttattaatttatgcattaacaatagtattcaactttcttaggcattataacctaacccgatcatttgattggaataactgaatcattcattgattggaataaaataaagaaaacaaaatgcatctcacatgccagaagacctttaccagaagtggttcatgaaaatcagtatgcattgaccattctctgcctttcccttttggaaaatttttttgtaccttcatatcacagctgaatagttatcaatgccatttccatttggaagtatctaaataaccacaatgtgatcacagcttctccacgagccttcctgaagtaaagctggtatgcttgctataatacttggaacctgttgctttctcttcctcactctttaaatgtcataaggtcacacagttctttggatcagaactattcagttatttcttcatgattctgcctggcttctgagtctctcatcngcatgtatgtaaagtctgacacatgatgagcaacggagcactacgtttat

SEQ ID NO: 453685 - DNA, 603 bp, Homo Sapiens
  misc_feature (237)..(312): n is a, c, g, or t
  misc_feature (562)..(562): n is a, c, g, or t
  misc_feature (588)..(588): n is a, c, g, or t
gaagaaagaaagaggaagtgacctgcccaaagctgatcagatcggaagtggaagcactgaagcagcagtggtcccggttctgagttcagctcttcccagtatatttccttttcaatcttgggaagtctttctttagccagccccaaccctgggagaaatcagtacagcatgagccccctgaggttgctggaatgccatacagtgggaagaactctggagtcagagatacctggcacnnnnnnnnnnnnnnnnnnnnnnnnnnnnnnnnnnnnnnnnnnnnnnnnnnnnnnnnnnnnnnnnnnnnnnnnnnnntcaggactttggatggaaacatcaggtgttgagataaaataaatcatcaggagaggcaggctggctggtagccacaaaggctcccaaggtgaatgcagcccaggtctccatcctcagttgggtagactagaaattgtctctttgtgttctatccatcagttatccatgtgttcaccttttatcatctacccctcatctgatgcaaatctgctgatgtgaatctggcctgctgttactagctggtgactgnagcagttcctactttctgctcagttnctcttgtaaatagga

SEQ ID NO: 453686 - DNA, 1156 bp, Homo Sapiens
acattcactatcagaataagttcctcttttccggaagcaatctgaccagcttactaaggcactgggaggcttgctgaactaaaaggtctcggcttttggggtccatctctggctcctcgagacccttcatcctcatttgattgagcacagtctcagctcccaggacattgtatcttttctcagggttttcttttgcatatttcagtgcccactgggtctttccagatccgggtagtcccaccatcagaatcacctcacattcctctatggtcttgggagggactgcagtgcgtacacgctcctcaacaggcacagcatgaatgaacacaaactcttctggtggtgggaagaagggctcctccttctgaccgaagtttaattctaccacaccatttttgcagaggacatggggtagaagggcccggtctgccagggaatccttgctgatccagaatgccacacctaggtcttctccattcttggagaaggaaagttctacttcttcagtctcaaaattagccaagcagccaataacatcattctcccccaaagtctggcccaattcctcaaattgtccattttctgccttgagtcctcgtccatcgaaaccgtaagagaattcatcttcaccaagctgtggacgggaaaaatcaacagaccacccaactcgaaggagagagacctctgtgcagccttctttcattgggagattctgggttacctttgcctcaaagcagacttttccctttgtcactccgtaagtactccttgccccagaccaaagggtggggaacttctctgagaaaagtggctgccctccatagcggtctttgctcacttgaaaatgcagatccgaggtatacgtgtccaggttcacaagagtttgatcctcctcctcatcttttgcctcttcttcaggaggcagtggagactttgagcggctgtggtaagcctcctctcggaattcatagtaagctcggccatgttcatccttctcatcccgctgtctctttaccccccgccgctcaccatctgagcctgctggttttgacttttcactatcctggtcatctccctgttcctcggcggccttgtcacccggcacctcggatcccggcgtctcgtccccgctccgctcctcgggttcgtcttcctc

SEQ ID NO: 453687 - DNA, 1015 bp, Homo Sapiens
agatcttaaaatccacgatcagatgactgtgattgacaagggaaagaaaagaactttggaagaatgttttcgcaggtgtcaaatattcatccgcttattagtagccctgaagatattctaatggtcacaaaagatgtcataaaagaatttgcagatgtcggcgtcaagttcctggaactaaggagcacgcccagaagagaaaattctcctggaatgtctaaaaagacttatgtggaatctatgcttgaaggtataaaacagtccagccaagaaagacttggacattgatgttaggtattttatagcagttgacagaagaggtggccctttagtagccaaggagtctgtacaacttgccgaggagttcttcctttctgtctgagggtacagttcttggccttgacctcagtggagtccctactgtaggacaagcaaaagacttcttggtacctctctttagaacgctcatacagccggtctgaagttagcattgcttctttcatagattccgaaccaaaaaaaggaaacacaaatactcctggatctgcttcctgacagaatcgggcatggaacatttctcaactccggtgagggaggatccctggatctggtggactttgtgaggcaacatcggataccactgggtaaggcttggagtttcaggtcttccagatgactctctgtctctcccccaatccccaggttgcctggggattacagagaagtactgttctaaaagtacgaatgtcatctagctattaaaagatggagtgtgtgctttctgagccttatttaaaacagaaagctttagcttccattagaatataagctctatgagagcagggcccctgcttgtcttattcgttgttacattctccaatgcttggaactcaataagaattttttaaaggaataaagggtcatctagaattttaaaatgactttaacaaaattgacatgtgttatgaaaatatgtaacattatttaaaaattaaacatggaaaatcccaagtat

SEQ ID NO: 453688 - DNA, 715 bp, Homo Sapiens
  misc_feature (440)..(511): n is a, c, g, or t
  misc_feature (553)..(611): n is a, c, g, or t
atgagccaccacgcttggccgggatagtatatttttatagcacttcccctactgattgctgccttctctgtggctacaagggacccacagaattacagggaagttacagggaagcaggtttcatctcaatattgggagagatttcaaacaatcacacctgcctgagaaggagtgggctgtcactaggaatttttattcccagtccgtcaggaattttgtagaagggcttcatgtgctggtaccaataggacaggaagattttaatcagctttactatctatgtttttttatggaaactgtgtgtatgtatacatacattttccaaaaagaaaaattaaatgattatagagattatgtttttcagactactcacgtatctgcttttcttactccccacctctagctgataattcctagttcattggtttttcccccacacnnnnnnnnnnnnnnnnnnnnnnnnnnnnnnnnnnnnnnnnnnnnnnnnnnnnnnnnnnnnnnnnnnnnnnnnccagcatggcaaaaacctgtctctactatgaaatgaaagcannnnnnnnnnnnnnnnnnnnnnnnnnnnnnnnnnnnnnnnnnnnnnnnnnnnnnnnnnncctcctagtctagagctttgctaaacaacaaggtggtccacaagccaaggagcaacagcatcaactggcagcgccttagagaatcagaccccagacccactgaa

SEQ ID NO: 453689 - DNA, 494 bp, Homo Sapiens
ggggggggcctttctctttgagcccagttgctgtggtggccttttgcgccgggcttttggtctctcacccggtgctgacgcagggccaggaggccggggggcggccaggggccgactgtgaagtatgtaaagaattcttgaaccgattctacaagtcactgatagacagaggagttaacttttcgctggacactatagagaaagaattgatcagtttttgcttggacaccaaaggaaaagaaaaccgcctgtgctattatctaggagccacaaaagacgcagccacaaagatcctaagtgaagtcactcgcccaatgagtgtgcatatgcctgcaatgaagatttgtgagaagctgaagaagttggatagccagatctgtgagctgaaatatgaaaaaacactggacttggcatcagttgacctgcggaagatgagagtggcagagctgaagcagatcctgcatagctggggggaggagtgcagggcctgtaaa

SEQ ID NO: 453690 - DNA, 980 bp, Homo Sapiens; identical to SEQ ID NO: 324946

SEQ ID NO: 453691 - DNA, 685 bp, Homo Sapiens; identical to SEQ ID NO: 324947

SEQ ID NO: 453692 - DNA, 909 bp, Homo Sapiens
ctactctatgaggatccccgctgagatgacagtcggcgctgtcaaagagctgaaaaacctcttggagctggagcagtttcccatccacaccatagatggcgccctccacaccatgcgagaggagtgccacgatgcaggagtccgtgactcggtgtgcaggtaactgtgcaaaattctgcagtttctcttgcatttcctgtgcagtctggtcacatagaacatggacgtcatagcccaaaagcttgaagagggtgactagagtactgtggtccacatcccctccagagcgaaattccagttctttctctccagtgaagtgcacattgctcaacaccagtgctaggccacgaggccgagactgcaacctatatgccagctggaagtgtgtttgataaaattcaggagtgcaaggcttcacctgaaggcagacaggaccatctttattgtctagggagtgttccacagtatctgtcgacaggcggagcttcttgtaaaggggacaggactcacacaccggaaaagggagactcaagtcgtagtcacagctcaacggtgggagtacatgctgaagcccagaaagggtggtgagcaacatatcctccaggtggccttgcttggtctccctcagtgcttcacagaaggcatcaaaagcttggggacccctcttaggcagcaagttgaggagttccacattctggctgaaactgcccactttggcctggatgagctccctcatttccaaggtgatgatgtccttctccagaagatgttctaacaattcgctcaacaacagctgtttggctagcaccactcggttcttttttagagtttcctgatgatgaggatgcatgccacacactcccaatatcctgcgtcccctgtcagcggccatcagctccttgtgctgga

SEQ ID NO: 453693 - DNA, 693 bp, Homo Sapiens; identical to SEQ ID NO: 324949

SEQ ID NO: 453694 - DNA, 524 bp, Homo Sapiens; identical to SEQ ID NO: 324950

SEQ ID NO: 453695 - DNA, 884 bp, Homo Sapiens; identical to SEQ ID NO: 324951

SEQ ID NO: 453696 - DNA, 308 bp, Homo Sapiens; identical to SEQ ID NO: 324952

SEQ ID NO: 453697 - DNA, 686 bp, Homo Sapiens; identical to SEQ ID NO: 324953

SEQ ID NO: 453698 - DNA, 333 bp, Homo Sapiens; identical to SEQ ID NO: 324954

SEQ ID NO: 453699 - DNA, 332 bp, Homo Sapiens; identical to SEQ ID NO: 324955

SEQ ID NO: 453700 - DNA, 641 bp, Homo Sapiens; identical to SEQ ID NO: 324956

SEQ ID NO: 453701 - DNA, 652 bp, Homo Sapiens; identical to SEQ ID NO: 324958

SEQ ID NO: 453702 - DNA, 671 bp, Homo Sapiens; identical to SEQ ID NO: 324959

SEQ ID NO: 453703 - DNA, 846 bp, Homo Sapiens
agcgggggatgtgacctccgccattgccccagctaagcagcgagagcttgctgaagcccagagggctgtgggaccatgagggcagctctctggaccctgggactcgggccccttcttctgaatctctgggcagtccccattggtggaccaggtgctctgaggctggcgtacagacacagcacgtgcgacggagtggtgttggtccgacaccacggggcatggggatacgtgtgcaaccaggagtggacgctggcagaggcctctgtcgtgtgcaggcagctgggctgcggccctgccgtgggcgcccccaagtatgtcccgctgcctggagagatggccaagccctggcttcacaacgtgtcctgccggggcaacgagtcctccctctgggagtgcagccttggctcatggtgccagagcccgtgcccccacgcatgggtggtggtcgcgctgtgctccaacggcactttccgggagctccggctggtgaagggccgcagtccctgcgcgggactccccgagatcagaaacgtgaatggggtggaccgcctctgtgtcctgcatgtggaggaggccatggtgttctgccgggagctggggtgcggccctgtgctccaggccccccgccgggacgtgggcgtcgtcaggaagtacctggcctgcaggggtaccgagcccaccatccgcagctgcagactggacaacaacttccgcagcgggtgcgacctgcggctggacgcagaggtggtctgctcagggctggggaaggcccaagtatggagcggagatcaggtctgcgttgagctccaggagctggcgtccggggcacaccgctgtgccaccctc

SEQ ID NO: 453704 - DNA, 562 bp, Homo Sapiens; identical to SEQ ID NO: 324963

SEQ ID NO: 453705 - DNA, 395 bp, Homo Sapiens; identical to SEQ ID NO: 324964

SEQ ID NO: 453706 - DNA, 294 bp, Homo Sapiens; identical to SEQ ID NO: 324966

SEQ ID NO: 453707 - DNA, 322 bp, Homo Sapiens; identical to SEQ ID NO: 324967

SEQ ID NO: 453708 - DNA, 718 bp, Homo Sapiens; identical to SEQ ID NO: 324968

SEQ ID NO: 453709 - DNA, 272 bp, Homo Sapiens; identical to SEQ ID NO: 324969

SEQ ID NO: 453710 - DNA, 1069 bp, Homo Sapiens
agggtaggagcgcagcagcaccttgtggcgggtggcagcctcagcccggcgccgccgctgctcgcccaggaactccttgagccggttggtggtgaaggtgagcgtctggcggcgcagcttcatcaggtaggcgtcctgcaaccatgggtgggccaggcagtcctgcagggagggccggctccagggatgtacagagagaacctttcgcaagaagagggtggcgctctgggatgtattggggtacagctggaaggcatcaaagcggccccccacaatccgagcctccgtttcctgggggtctggctcatagaacggggagcgtccactgagcataatgtaagtgagcacacccgctccccagatgtccgtggcagagccgatgggttctcccttcaccatctccggagccatgaactccagcgtgcccgtgcggtggccaaggggcctaagggcctgggggttgtagggctgggcactgccaaagtccacaatcttgagggcattgtcaggggccagcagcaggttgtctggcttgatgtctaggtggagcacgtggtggccgtggaggtagtccaggccttgtagcagctgcaccatgtaagtggccacgtcatcctcagaataccggaacctgtcactgagcccacagaggagttcccggttgccacagctctcagcaatgagcacgaggtaccgaggggtgatgtaggcctcgtgcagggacatgatccgctcgtggtgcagggtccgcagcacctcgtactcctgcaggacccgccgcttgccctcggcagcatagggcacgatcttggccacgaacgttcgccccgtggcattctcccggcacgctcgcacaacaccaaagcggcccctggctttctcctccaggaagctgtagggtttctgagggggaccctgtcgaagagtggtaccctcaggacctgggagagcttcaggggactgctcccaggggagctgaccacctccttggccgggctgaggctctgcacagtcaccttggtaggctcaggagggcctcgtgccgaattcgccacccaggcctcgctac

SEQ ID NO: 453711 - DNA, 708 bp, Homo Sapiens; identical to SEQ ID NO: 324972

SEQ ID NO: 453712 - DNA, 656 bp, Homo Sapiens; identical to SEQ ID NO: 324974

SEQ ID NO: 453713 - DNA, 453 bp, Homo Sapiens; identical to SEQ ID NO: 324975

SEQ ID NO: 453714 - DNA, 531 bp, Homo Sapiens; identical to SEQ ID NO: 324977

SEQ ID NO: 453715 - DNA, 604 bp, Homo Sapiens; identical to SEQ ID NO: 324978

SEQ ID NO: 453716 - DNA, 596 bp, Homo Sapiens; identical to SEQ ID NO: 324979

SEQ ID NO: 453717 - DNA, 618 bp, Homo Sapiens; identical to SEQ ID NO: 324980

SEQ ID NO: 453718 - DNA, 1067 bp, Homo Sapiens; identical to SEQ ID NO: 324983

SEQ ID NO: 453719 - DNA, 385 bp, Homo Sapiens; identical to SEQ ID NO: 324984

SEQ ID NO: 453720 - DNA, 382 bp, Homo Sapiens; identical to SEQ ID NO: 324985

SEQ ID NO: 453721 - DNA, 677 bp, Homo Sapiens; identical to SEQ ID NO: 324987
  misc_feature (186)..(186): n is a, c, g, or t

SEQ ID NO: 453722 - DNA, 458 bp, Homo Sapiens; identical to SEQ ID NO: 324989

SEQ ID NO: 453723 - DNA, 833 bp, Homo Sapiens; identical to SEQ ID NO: 324991

SEQ ID NO: 453724 - DNA, 511 bp, Homo Sapiens; identical to SEQ ID NO: 324992

SEQ ID NO: 453725 - DNA, 372 bp, Homo Sapiens; identical to SEQ ID NO: 324993

SEQ ID NO: 453726 - DNA, 444 bp, Homo Sapiens; identical to SEQ ID NO: 324994

SEQ ID NO: 453727 - DNA, 949 bp, Homo Sapiens; identical to SEQ ID NO: 324995
  misc_feature (124)..(141): n is a, c, g, or t
  misc_feature (182)..(182): n is a, c, g, or t

SEQ ID NO: 453728 - DNA, 641 bp, Homo Sapiens
  misc_feature (26)..(26): n is a, c, g, or t
  misc_feature (60)..(60): n is a, c, g, or t
  misc_feature (65)..(65): n is a, c, g, or t
  misc_feature (125)..(125): n is a, c, g, or t
  misc_feature (618)..(618): n is a, c, g, or t
gccccagggaacgggttttcccctgnctcaagagctcaattgaacgtgcaacagtgggtnagggnaacaggccccaggttggaaggcgccgcaggtggcaacgacgacacagttaggtggcccgnccaggggatagcaacggcgtccctcctccaccgctcagctgcagcccgcagtcctcacagtggtaacatgccacgtggtagtctctgtccatggacaccacacggatggttgtctcgcagccctgtgcagggaggataggacgggcacaggaggcgcattttggtgcaaaaaccgtgtgatagtctcgcacgcagtagatgttgttctccacgtccacggtgaagggaaccccgtccaggcactcattgcacacggagcaccggaagcagcctgggtggtaggacttgcccagggcctgcaggatcatttccatgatgagatgtccacacacgctgcatttgtcggccgtctgctggaacccggagtacaggaagtcctcctggcagtacactttctcaccccacgttgtagaacgccttcccacggagtcgtctcccacacgagtcgcaggtgaagcagtcagtgtgataaagactccccattgccctggcnacgcctgctgggctccgtagatg

SEQ ID NO: 453729 - DNA, 329 bp, Homo Sapiens; identical to SEQ ID NO: 324997

SEQ ID NO: 453730 - DNA, 941 bp, Homo Sapiens; identical to SEQ ID NO: 324999

SEQ ID NO: 453731 - DNA, 764 bp, Homo Sapiens
ctccagagcctgatgaatagcaacagcaatttccgggaggtcttggagaagctggagagcgaccccgtctgccagcgcctttccctcaagtcctttctgattctgcccttccaacgcatcacccgcctcaatactgctgctccagaacattctgaagagaacacagcctggctcctcggaggaggcagaggccacgaaggcacaccacgccctggagcagctgatccgggactgcaataacaatgtccagagtatgcgacggacagaggagctaatctacctgagccagaagattgagtttgagtgcaaaatattcccgctcatttctcagtcacgctggctggtgaaaagtggggagctgacagccttggagttcagtgcttccccagggctacgaaggaagctgaacacgcgtccagtccacctgcacctcttcaatgactgtctgctgctgtctcggccccgagagggtagccgattcctggtatttgaccatgctcccttctcctccattcggggggaaaagtgtgaaatgaagctacatggacctcacaaaaacctgttccgactctttctgcggcagaacactcagggcgcccaggccgagttcctcttccgcacggagactcaaagtgaaaagcttcggtggatctcagccttggccatgccaagagaggagttggaccttctggagtgttacaggatatgggggacaatataacatccatcacagagttcctcctactgggatttcccgttggccc

SEQ ID NO: 453732 - DNA, 594 bp, Homo Sapiens; identical to SEQ ID NO: 325002

SEQ ID NO: 453733 - DNA, 430 bp, Homo Sapiens; identical to SEQ ID NO: 325003

SEQ ID NO: 453734 - DNA, 557 bp, Homo Sapiens
tcctagctatgatgaccaaaactttcatgtctacgtttcaaaaaccaaagatggcccaactgaatatgtcctcaaaataagcaacaccaaggctagcaaaaatccagacctgattgaagtgcagaatcacatcatcatgtttctgaaagccgctggatttccaacagcctctgtgtgtcacactaaaggagacaacacagcttctctcgtgtctgtagatagtggctctgaaatcaaaagctacttggtgaggctgctgacttacctcccaggaagacccatcgctgagcttcccgtcagcccccagctattgtatgaaattggaaaactagctgccaaattggataagacactgcagagattccatcacccaaagttaagtagtcttcatcgggagaacttcatctggaatctgaaaaatgttcctcttctggagaaatacctgtatgccctgggccagaatcgaaaccgagagattgttgagcatgtcattcatctgttcaaggagaaggtaatgaccaaattaagtcattttcgagaatgtatcaatcacggag

SEQ ID NO: 453735 - DNA, 601 bp, Homo Sapiens; identical to SEQ ID NO: 325005

SEQ ID NO: 453736 - DNA, 750 bp, Homo Sapiens; identical to SEQ ID NO: 325007

SEQ ID NO: 453737 - DNA, 410 bp, Homo Sapiens; identical to SEQ ID NO: 325010

SEQ ID NO: 453738 - DNA, 730 bp, Homo Sapiens; identical to SEQ ID NO: 325011

SEQ ID NO: 453739 - DNA, 607 bp, Homo Sapiens; identical to SEQ ID NO: 325012

SEQ ID NO: 453740 - DNA, 400 bp, Homo Sapiens; identical to SEQ ID NO: 325013

SEQ ID NO: 453741 - DNA, 453 bp, Homo Sapiens
ggaccgccgtctcagcctctctgtgcctgatctcctggaggctgaggccttggccccagagggccggccttactccgggccacagtcttcctacacctcggtgcccagcagtctgtccactgcagggatctttcccaagagcagcagtagctccttgaaacagtctgaagaagaattggattggagccaggaagaagccagtcacctccatgtggtggaaacagactcagaggaggcctatgcctctcctgctgagcggagacgggtgtccagcaacggcatctttgatcttcagaaaacttcccttggaggggatgcaccagaagagccagagaagctatgtggaagcagtgacctgaatgcttctatgacatctcaacattttgaagaacaatctgtaccgggggaagccagtgatggcttgagtaacctccccagcccttttgcgtacct

SEQ ID NO: 453742 - DNA, 769 bp, Homo Sapiens
gggtgtcagaaactccgctatcagactgattggagtggtttgactgagactctgggatgctggaagaactggatcccgatttaatgctggagctggataaggaagtccaatcataggctgactctgtcctcttcaaggcttcttggtagttcatatagagctgcttcccatactttgcaatgcggatcccattgacccactgatgcagtgtcctcacatcatcacaacaaaggtatttgatatattgagatttcttctggatttgtggatgcttcagcaccagacaatagtctgtaggtgctttgtatttgttccgatagtcctggccataataaacgttgacatgatccagctggagaaagcacaccagatcccgagagacctttgcttttcctttgggaacatagtagataccagatgctcgcaagagaaaataacgctttttccaggacttcttgccatcatccttcaaccaaaggactccttcaatttctggtacagttacagaacttccacaaaaacattcctccaagaggacttctttgtttctatctgccatctcagctgtttcttttttccccaaaagataattctgtgggtttttgaaaagtgcatatttttctatacgctccataaatataagcttgttttggctatctcttgtccaattaagaagattttcaaccaagttttcatggtcttcaaagattctctccatttgtaattcagaaacggtttctaccagtgaccagtctaaactataaccgca

SEQ ID NO: 453743 - DNA, 707 bp, Homo Sapiens; identical to SEQ ID NO: 325015

SEQ ID NO: 453744 - DNA, 562 bp, Homo Sapiens; identical to SEQ ID NO: 325016

SEQ ID NO: 453745 - DNA, 764 bp, Homo Sapiens; identical to SEQ ID NO: 325017

SEQ ID NO: 453746 - DNA, 733 bp, Homo Sapiens; identical to SEQ ID NO: 325018

SEQ ID NO: 453747 - DNA, 724 bp, Homo Sapiens; identical to SEQ ID NO: 325020

SEQ ID NO: 453748 - DNA, 306 bp, Homo Sapiens; identical to SEQ ID NO: 325021

SEQ ID NO: 453749 - DNA, 620 bp, Homo Sapiens; identical to SEQ ID NO: 325022

SEQ ID NO: 453750 - DNA, 488 bp, Homo Sapiens
tttttctggagcagttggagacatggttaactctgagatgctttcattttgtactgtgcaggcactgtgtatctccacggaataccaaggctgcctctgaacttggatgaagcctgcaatatgcatggccaggctgagaagaatgttgaaaatcacagagagtagcagaggtggagagatcagccgtcctgcaggtctgaaaggcaccagcttagggtaggcaccattcagattcattgttacaccaataagagttgtaatggccagatcctggaacagaaactggtaatttgaaaggctgtttgtctcccagtagagcagcagaacaccaacatactgaatcatgctgtacagagccatgtacttaaacatgcaaaaggaggtaacgagagctgcacgtccttcccccacagtcattggctccatcaccacacatacctacaaagtaactaagagggaaccacattaattgtagatgactcagtggt

SEQ ID NO: 453751 - DNA, 748 bp, Homo Sapiens
tgactgatgtctcccagcttcagtgctgcctgcttcttgtagcccttgactttttcctctaactttcccaggcgaatgttgctttttatgactttattaagcactccatccttctcactttctaaacattttgccaaacacataagactgtcacgttcctgggttatattttctgccaggccaacaaggtttgccaggtactgatgagcagacatttcgttccccatggctttttccacctgctttttgaggacctcaattttcttttgagatttcctattgattttctgtgctcgttcaagttcggcttccagtgctttgttttgctctgtcaaactgttcttctctaacagcaggctcttcttctgcgcttgcaggactgtcagcttctccatcaactcctccatctcagccctttctttctcttcttccttctgtaattggctttttaattcattcacaattgatttatgaacttccactgcgattttgccatccgagtgtgttttgagttcttggcatttggcacgtaaaatctccagctgttccctgttctccgccagctccttttcctggccgtgggtttttgcctccaggagcattagttgtttagtcagcttagaaacttcttggaggcgctcctggtggctgtccttggctttcctttgctgaatctccaactgctccagcaacaacttgttttcctctaaaaccagttttgcttgagtctgaagctgacgccattcct

SEQ ID NO: 453752 - DNA, 1039 bp, Homo Sapiens
  misc_feature (35)..(35): n is a, c, g, or t
  misc_feature (39)..(40): n is a, c, g, or t
  misc_feature (959)..(959): n is a, c, g, or t
ctgtactcggcgcagctggtctctcggtgaagganttgnntcatcttcctgcacgacgggctgatccgggtcaccgacctggccgagctgcccagcgagatcctcggggccccagaggccgcggacaccgacctggagattttaacctttgagaccaagaacccgtcggaattagcagaacgtttgcgctctgtttgtgggaatcagagcaatgcctatgcccggctgctggaataccgcctgaatgccttgcgaggactgtggaatgcccagcgccagctggccttagaagaacagcatgaaagggaaagttcaggtgatgaggaaactttggccctgctcaaacgccagggcttgttgcagcaacctgagcaagcgcccttcacatcgaggatggggctcctgctggtcttcccccttattcagtcccagagtagaacagacccctctctctgtaacataactgctgaggtgctattgaactgccttcgtgactgccagcctttgagcttgaccaaggagcctgctgactgtctcaatggaattgaaactttgctgtgctcttggctagaggagacttctgacacaggccgacacatcccacataagcaaaaagaaaatgctgctgctgccctggtggctttggcttgtgccaggggatcattgaaaactttcgtccacacagtccatctattacagaaacagacggatctagggtccctgcctgtagctgatgtgctatataggctgttgcttttggaaggggggcctggatctccctcctgtttgcttaggggcaaacacatagtatcatggggttatgaagacatgttgcctgcgccggatagcaacactggctccagttctgaaaataaagatgctgacttgggacgctgtctcacggcagatggtctttacctgtatactactaactcagttggaagaggagtaagcaaatngggatctggattacatggtactctcagaggttttgtgtactgccggaacgaggagttggaaccaggatggaaagggggat

SEQ ID NO: 453753 - DNA, 536 bp, Homo Sapiens; identical to SEQ ID NO: 325026

SEQ ID NO: 453754 - DNA, 737 bp, Homo Sapiens; identical to SEQ ID NO: 325027

SEQ ID NO: 453755 - DNA, 691 bp, Homo Sapiens; identical to SEQ ID NO: 325029

SEQ ID NO: 453756 - DNA, 725 bp, Homo Sapiens; identical to SEQ ID NO: 325030

SEQ ID NO: 453757 - DNA, 906 bp, Homo Sapiens
  misc_feature (7)..(7): n is a, c, g, or t
  misc_feature (209)..(209): n is a, c, g, or t
aagtccnttcggtagcctgctgggggccctttcccaacatgtcaaataggataccaagtatcgcaccagcacaccttcactgcggaggtacgtttctacctgcaccagttcattcactgaatcaacatctaagacgactccatgaagcccaaaggttttcagcatcccttcggatggccaaaattttggcagagcaagttccaacagcnattgctggctatattaattgctgtctggagagcgggttactaactgtgagaccttttttcgaactttatcaattgtgaacttgtttgcttcgtctttaatgtcttccaatggtgggaagataaagttctcttgggatgccaccattctctttcgtagagaaattcaaccgtctgtcgggcaatatccaccatacctagttgtaaggccccctttatctggtccaggcccgatttccgctctgcttcattgcggaagcgtcttcggatggtaggaaaaaccttggtctcccatgctttcaccagcagggcgtagtggtcctcctgagggatgtcatcatcgtcatcatcatcgctttcatcatctgcaatgggaggcgggtgagggtctgggccagaggtgatgaaattctcatagctgagctcgactttataatgacaggaggtgtcactatcatattgttgctgagcggtggccacggcagcaatccggcatggtggcccatgagtgcctgggtctgatgcaatactggtgccagcatcattgtcactgtcagatgccatggcgaaaggcagggcctcaaagttagcgctgatctcttctgctaggtcagtgcacagtcagcagcattgcggtgggcctgcccttccgcgtaggcaaacggccgggagccaaagttagctcgggttttgtttcttt

SEQ ID NO: 453758 - DNA, 578 bp, Homo Sapiens; identical to SEQ ID NO: 325032

SEQ ID NO: 453759 - DNA, 746 bp, Homo Sapiens; identical to SEQ ID NO: 325033

SEQ ID NO: 453760 - DNA, 428 bp, Homo Sapiens
tgtaagtgggcgttcctggggcccggtacgtgggcacagtgaccgggtggggggcgacaggagttggggagtgagcagtcagcagggtacctgctgacatggccatggtggtcccagccaccatgcccatggtgaccccgttgcctctaggaggggggatgggagcagggtacaccgttgcaggcatgccgttgggctgcaccaccgtggtgtggtggatgacgtgaggaggtgctgcatacagcggctgtgtgtagtacgtgccttgctgtgcatacgggctctgctgggggtaggcacttcgcacagggtacacggcagtctggtaggggttcggggaggaggagtacggtggcacagccccgctggtgggggaacaggacactttgtaaggtgtgccaggagtgtaacctgtttggaaggtagga

SEQ ID NO: 453761 - DNA, 728 bp, Homo Sapiens; identical to SEQ ID NO: 325035

SEQ ID NO: 453762 - DNA, 460 bp, Homo Sapiens; identical to SEQ ID NO: 325036

SEQ ID NO: 453763 - DNA, 438 bp, Homo Sapiens; identical to SEQ ID NO: 325037

SEQ ID NO: 453764 - DNA, 550 bp, Homo Sapiens; identical to SEQ ID NO: 325038

SEQ ID NO: 453765 - DNA, 324 bp, Homo Sapiens; identical to SEQ ID NO: 325039

SEQ ID NO: 453766 - DNA, 604 bp, Homo Sapiens; identical to SEQ ID NO: 325040

SEQ ID NO: 453767 - DNA, 367 bp, Homo Sapiens; identical to SEQ ID NO: 325041

SEQ ID NO: 453768 - DNA, 749 bp, Homo Sapiens; identical to SEQ ID NO: 325042

SEQ ID NO: 453769 - DNA, 1231 bp, Homo Sapiens; identical to SEQ ID NO: 325043

SEQ ID NO: 453770 - DNA, 687 bp, Homo Sapiens; identical to SEQ ID NO: 312274
  misc_feature (291)..(328): n is a, c, g, or t

SEQ ID NO: 453771 - DNA, 267 bp, Homo Sapiens; identical to SEQ ID NO: 325044

SEQ ID NO: 453772 - DNA, 437 bp, Homo Sapiens; identical to SEQ ID NO: 325045

SEQ ID NO: 453773 - DNA, 407 bp, Homo Sapiens; identical to SEQ ID NO: 325047
  misc_feature (87)..(87): n is a, c, g, or t

SEQ ID NO: 453774 - DNA, 608 bp, Homo Sapiens; identical to SEQ ID NO: 325048

SEQ ID NO: 453775 - DNA, 746 bp, Homo Sapiens; identical to SEQ ID NO: 325049

SEQ ID NO: 453776 - DNA, 396 bp, Homo Sapiens
tgaatgtggagtgcgtgacggccgtgcgggccggcctgggctccatcatccccctgcagctgctgaccatgctcagcccactggagatggagctgcgcacctgcggcctcccctacatcaacctcgagttcctcaaggcccataccatgtaccaagtggggctgatggagacggaccagcacatcgagttcttctggggggccctggagatgttcacccaggaggagctgtgcaagttcatcaagtttgcctgcagccaggagcgcatcccgttcacctgcccctgcaaagatgggggtcccgacactgcccatgtgcccccgtaccccatgaagatcgcccccccagatggcacagcaggttccccagactctcgctacatccgcgtggagacca

SEQ ID NO: 453777 - DNA, 510 bp, Homo Sapiens; identical to SEQ ID NO: 325051

SEQ ID NO: 453778 - DNA, 737 bp, Homo Sapiens; identical to SEQ ID NO: 325052

SEQ ID NO: 453779 - DNA, 551 bp, Homo Sapiens; identical to SEQ ID NO: 325054

SEQ ID NO: 453780 - DNA, 765 bp, Homo Sapiens; identical to SEQ ID NO: 325055

SEQ ID NO: 453781 - DNA, 743 bp, Homo Sapiens; identical to SEQ ID NO: 311743

SEQ ID NO: 453782 - DNA, 363 bp, Homo Sapiens
gaaacactgccatctcctggggagatcaagcaattgacagcttgtgcaacatggcagtttttgttcagcactacaaaagactgctgtctctttcaaatcccagtgtctgtaagaaactgtgggaacttttttgtatacttactacaaccaactcagggatgtatgggctactgtgcggaagggttctttgccaagattgtaaagtccccccacacgtgaaagcatcaaaacagacatctcacatttttccactggacataatgattgagtgtgttaaaaattctttggtttcctcaagtccattcctgttttaattaaaggatgaagaaggctatttctgatgcaccgattacacccatgtgg

SEQ ID NO: 453783 - DNA, 376 bp, Homo Sapiens; identical to SEQ ID NO: 325056

SEQ ID NO: 453784 - DNA, 832 bp, Homo Sapiens
aggaagaggcagatgcggcgggagaggtcaggccccaccctaaggggaggcccgccttcactgggcggcacaggaaggttgaccaggaggcacatgcgaaaaaagatctctgctgcacgcctccagcgcctaggagcaggcaaaggcatgagagggcgcgtggggccggggcttcagcacctggaggtcttttcaggaagaggcagatgcggcgggagaggtcaggccccaccctgcggggacgcccgccttcactgggcggcacaggaaggtcggccaggaggcccatgcgctcccgctccgtgctgcaggcctccagcgcctgctgcagaaggcggggggaggggaaggctgtgacaactgcatcagccacggctgggctgacccgactgaactgcctgatctgcctccgccaggccgcctgcagccctgcgccgtctcttgccactggctcgccggctgcccagcgccctgctgtgcagaaggagaaggcctgggattcccggtactgcttgaggggatactgggcgagagccttggtaacggcgcacacgtgccgactcagctcctgccaagaggccaccagtagcacgatccatggtttgcccagacgctgcaggagtatccagggcctcttccacctccggccagctgacggccacctcggcaccggccaccttctggctctctggctgctgtgtcccccgggaaacgtgctggcgagacctgagcagaggtgaccattcctccccgctccccatggggcctgccctgcccgagcttggcctctgccagagcccacctggagaagtgggatcagctgtgccacagc

SEQ ID NO: 453785 - DNA, 346 bp, Homo Sapiens
gtcttcctggcatagctgacacaactgtggcttttcagagagcagcagctgatcctgttcatccatagggtggggttgcagcctgtggctttcttccaggggcttttttagtttaacattttcctcttgcattttgtgcttcccatccatcttggattctgacttctgggaaccccttcctgggatgctcctgtcgttttgtaatcttctttctttttcctgttttagttctaactcaagctggttccgctgcctggtgagctcctcgacttccagctgcagactgttgatcttgtctccaaagtcctgtttgaagagccggttgtccaactcagcagattggcgg

SEQ ID NO: 453786 - DNA, 373 bp, Homo Sapiens; identical to SEQ ID NO: 325062

SEQ ID NO: 453787 - DNA, 545 bp, Homo Sapiens; identical to SEQ ID NO: 325064

SEQ ID NO: 453788 - DNA, 715 bp, Homo Sapiens; identical to SEQ ID NO: 325066

SEQ ID NO: 453789 - DNA, 400 bp, Homo Sapiens; identical to SEQ ID NO: 325067

SEQ ID NO: 453790 - DNA, 662 bp, Homo Sapiens
gtctgccaaggaactttgttaaggtcttttgcatacgtgcctggtggagattgggcagtaagtccactatatccttctctgtcacatccttagatatgggcgggggcttctgcatggtgcatgggccattagggatccaggagtaccagtccagctggcccaggtggttagaagcatgctgacctgtgcatgtgaagatgcacatggtgacaaagtggcagagctgagcccgggactctaaggagatgaggaacccctggtcttgggccctctgcagtccagtctcagtcatctctctgcaccaggcctgcagctctagatcatccttcatggcttggtcactattgtagaaaagcccaaccatcccctccacgtacctattcccggctgatgattccccacagcctgatggcatcttagccataaaaagaagatttcacatccaggagcccacggtcagccaggtcatcaggaggacagagggaatgataggtcaaacaagccatggctctctgaagaatgtccacgtggcttccactaccagtgctcaccaccaggtcaaaaattccccattcggagacaagactactctgggccagcgtgttgatcgccatggtgtagcggaagtgggggatcaggagcttgtagatgcggccagaagg

SEQ ID NO: 453791 - DNA, 593 bp, Homo Sapiens; identical to SEQ ID NO: 325069

SEQ ID NO: 453792 - DNA, 734 bp, Homo Sapiens; identical to SEQ ID NO: 325070

SEQ ID NO: 453793 - DNA, 668 bp, Homo Sapiens; identical to SEQ ID NO: 325074

SEQ ID NO: 453794 - DNA, 874 bp, Homo Sapiens; identical to SEQ ID NO: 321032

SEQ ID NO: 453795 - DNA, 861 bp, Homo Sapiens; identical to SEQ ID NO: 325077

SEQ ID NO: 453796 - DNA, 1026 bp, Homo Sapiens
tccacatggactgggaagcaggacttatgggttgttccaattacatggctacaatttggcggaggctcttggagggctagatgagtggggtcctgaattaggaaacagagctgctcccagcctcctgctcagggctagggagcagagtctactgggactgaagaggggagtgaggcagggcagaccctctcttcttgggcaaagggcctggcctgggcctggtggccacctcaagaaagaggccaggcctggacaagtgggcaggttgagcgtggggggagaggcgggcagggcttgggcagtggtcacagctccgactcaggggtgctggccagcaggtagccgctcccatagcgtccattggggttaccgctggtctccaggggtgatgtgctgccgggccccagataggaacggtgagtgggcatgggggaaggtgcctcactgggcaccttgctgaggatgaagcgggtctcatcgttctcctccaggttggagatgtccttcatcatgcggcccttcttgtaggacacggagagggtgttggagccatcagagagcaggtggaagtgccgcaggacgaacaccacagggatgggcagcgtcgccacgacgatgagggtgatcaggagtgccatggcccagttggggaaatacaggtagcgctcggcagcctcctccttgatccaggcgctgtagcccgggggcgtgacccccagctggatgatgctggctgtggtgagcacagccatgcatagtggagacacgaacttccacatgtagaaatagaagcggtaggggcggaagcccagcatctccgtcagctcctgcatgaacttcttggttccataaatccaggccacagcgatgttctcaaggatgacgatgagagtgagtggcagggtggctgagtagtcatcgaacatggtgacaaagtagtttccggagcgctggacgaacaacagccccacgaggaatgcaaagacacagcagcccactgtgaacatctccttgggcaccttgaag

SEQ ID NO: 453797 - DNA, 538 bp, Homo Sapiens; identical to SEQ ID NO: 325080

SEQ ID NO: 453798 - DNA, 609 bp, Homo Sapiens
ccgggtgacagcacaaagatgaggggtgtggtggagttggagtctttgaacaccactgacaggttggctgtatggggttcaatgaagcgtggctccaggttggtggccacaaagtcctgcatggcgttggtaaccttgtccccacgcaggcagcggaggactagcagcttctggaactggtctaggtactggtcccagatgccaggcaaaggctcccggtggggctcaaggctgtcgaagatgacccggaattctgagaggtgcttcacgaagtcggaagagaaggaggaaaaggttggcaggttcgagagtgctaggatgtctcgccaagcccggtctgacagccagtccggtgccggattctcagtcatgatcgagatggagcccccagacaggaggtatcgccactcactctggttgattttgccctcgttcatcatgatgcgaacacacagcaggaaggcaaacatcagcttgtgcttctcaaagaggctgcggcagacgttgctgtagaggctgtaggtcaggtagcggttgatgttggagatgcgcttcttcaggtggtctgctctctctgagttggcgatgcccgagaggaagatgttgaga

SEQ ID NO: 453799 - DNA, 665 bp, Homo Sapiens; identical to SEQ ID NO: 325083

SEQ ID NO: 453800 - DNA, 548 bp, Homo Sapiens; identical to SEQ ID NO: 325084

SEQ ID NO: 453801 - DNA, 727 bp, Homo Sapiens; identical to SEQ ID NO: 325085

SEQ ID NO: 453802 - DNA, 372 bp, Homo Sapiens; identical to SEQ ID NO: 325086

SEQ ID NO: 453803 - DNA, 564 bp, Homo Sapiens; identical to SEQ ID NO: 325087
  misc_feature (91)..(91): n is a, c, g, or t

SEQ ID NO: 453804 - DNA, 624 bp, Homo Sapiens; identical to SEQ ID NO: 325088

SEQ ID NO: 453805 - DNA, 436 bp, Homo Sapiens; identical to SEQ ID NO: 325091

SEQ ID NO: 453806 - DNA, 629 bp, Homo Sapiens; identical to SEQ ID NO: 325092

SEQ ID NO: 453807 - DNA, 834 bp, Homo Sapiens; identical to SEQ ID NO: 325093

SEQ ID NO: 453808 - DNA, 428 bp, Homo Sapiens; identical to SEQ ID NO: 325094

SEQ ID NO: 453809 - DNA, 649 bp, Homo Sapiens; identical to SEQ ID NO: 325097

SEQ ID NO: 453810 - DNA, 870 bp, Homo Sapiens
tgcattagagtctactttaatgattcaaatctgggtcatccaagaactgctcctctgaagggcaatgggaagggtgctggggcagggaggcttcacatgaggtctcaatcagccacagggttgcggcccacagtaggaagtggcccagagaagccgcatgatcttatagataatttcttccttagagggtcccggcgcctgcatcatgtccagccccccatatgaacacctataggtaatcttgacagggttggccacctcttgtttcagggccttagaaaccacttcggaggtaatgcactgatccctgttcaccttggccagggggctctcagtggttttagtggggaaaagtgccttcccatccttcaggcatggttcttggggatgcagtctgctggcatgctccatcttttggatcattgcatcctgggtgatgtcatccttccagaacagaccttggggtataatctgctggagcacaacctgtaaatgctggaagactggggtggcaaatccttggaggggccaaagctgccccactcctacttggtcctgaccatctaccttgttccagatcagtggtgttagggctggacctggccagagccttccacatcccagttgaagagaagcagcttccttgtactgtcactcctggacccctgacctctgttcccactaccaggccgctttgtccacttcaagtcttctttaatttttcccttcctccatcaccacttgccatattcttcaacccctgggcctcattcactcttggtaccaacttacagataaccagatttacaaagagcagcctgtagaagttcagatgcgcagaggctcagaaagctgagcacatgggaatag

SEQ ID NO: 453811 - DNA, 609 bp, Homo Sapiens; identical to SEQ ID NO: 325100

SEQ ID NO: 453812 - DNA, 503 bp, Homo Sapiens; identical to SEQ ID NO: 325102

SEQ ID NO: 453813 - DNA, 647 bp, Homo Sapiens; identical to SEQ ID NO: 325103

SEQ ID NO: 453814 - DNA, 708 bp, Homo Sapiens; identical to SEQ ID NO: 325106

SEQ ID NO: 453815 - DNA, 1288 bp, Homo Sapiens
gtcatggcttgtcctttgatttgcagaccatttcttacccacatattgctgtggatttctgcaagacttgcttgaatttggagtgggtgaatcattagtttcattaacatttcctgatctggtaaaacagaatccaaatctagttcttgacatttcacagccttactcaaaaacatagcatagtaacgatgtagtggcagatgaaaagtgacttggttaggtgctggctcgtctacgaagttaatagcatcaaaccagtcttgaagagcttcaaggcaatatctaacaacatttcgggtatactcttgagtttccctaactttacaatgtgataaaagcccccacattggctgtgcacaggcctcaagttcagcagcaaaggcagcatagtaggtctgagactcaaattccacatgctcgtttagttctcgcttgtttaagttcataccttgaaagaaagatacaaagttcatccatgtaactaacaaaccgtgatcctccaaaaatctcttggccacactttgatgagaaagaatattaataaaatcactaacaagaggccagtaagtgttattcttcagtaatgcttctccacagttcactaccacatgtaaactattttcttcatcttgtagctcacttttaataaggcaactttccatcatgtataatagcacagtgaccataatatccagcagctgacattcttctgttacctgtctggctagctcctcattgctgaacaactgaacactaatatgcacaattctgttagacattgtgtctgattcatgacttttcttcagtgttttcataatgaaagcataatgctgaacaaaagtttttgtaaaagcaaccttatactcttgatctggaagcatgttgagtaagaaagttaccatcttttgagggaattcatattttatagtccaaaataatagttcttctaggaagcttttatgcttcaaaacatccattatggattgatctttggtgccactgcttagttttaccctttttctcttgcccagaccttgactaccatcctgatcatcctcatctgaagaatccacttgtcccaaagttcctgttgcgcctatgaaaccttgaacagccagagaactagtaccagcagatggctcctgcacaccatatacaagcttatcctcaggatatgtaagtccagagctctttaaagctataaggtacttttcatgacttttctttacgcaagcattttctccaagaccagaagtcagatctttgtagttttgttggttgtcaaaac

SEQ ID NO: 453816 - DNA, 698 bp, Homo Sapiens; identical to SEQ ID NO: 325108

SEQ ID NO: 453817 - DNA, 372 bp, Homo Sapiens
  misc_feature (313)..(313): n is a, c, g, or t
  misc_feature (345)..(345): n is a, c, g, or t
  misc_feature (353)..(353): n is a, c, g, or t
agagtagatactcaactagcatttattgaatcaagttcaatgcccttattttacagatgaggaagcaggtccaaggcggagaaatcacttgcatcatgctacacagtgagttagatttagaatcaagattagaaccaatttctcctaaattctggtcttaggtagtctcaggcctccagttgagatgggtcggacatgtgtgtaggagatgtggggccttccttgccttgttccggcggcacggttaggagaccagcatgctcaggaagatggccagcatgcagcaggcctgggcaggccaggcacagcgggnccgcaggcaccgcggcctttttccaccagggnacggtttnggcatccatgcagcttggt

SEQ ID NO: 453818 - DNA, 819 bp, Homo Sapiens; identical to SEQ ID NO: 325109

SEQ ID NO: 453819 - DNA, 612 bp, Homo Sapiens; identical to SEQ ID NO: 325111
  misc_feature (253)..(262): n is a, c, g, or t

SEQ ID NO: 453820 - DNA, 223 bp, Homo Sapiens; identical to SEQ ID NO: 325112

SEQ ID NO: 453821 - DNA, 170 bp, Homo Sapiens; identical to SEQ ID NO: 325113

SEQ ID NO: 453822 - DNA, 304 bp, Homo Sapiens; identical to SEQ ID NO: 325114

SEQ ID NO: 453823 - DNA, 517 bp, Homo Sapiens; identical to SEQ ID NO: 325115

SEQ ID NO: 453824 - DNA, 762 bp, Homo Sapiens; identical to SEQ ID NO: 325116

SEQ ID NO: 453825 - DNA, 884 bp, Homo Sapiens
gacatcactctgacagaaaccccctgccccacaggggtctggacagtccggaatttctcccaagtccttgagaacaccagcaaaggggacaagcttcagagccctcgattctacaattcggagggatatggttttggggtaactttatacccaaatagcagagctttctctggttacttgagacttgcttttcatgtgtgcagtggggagaacgatgctatcctggagtggccggtagaaaacagacaggtgataattaccatccttgaccaggagcctgatgtccggaacaggatgtcctcaagcatggtgttcactacctcgaagtcgcacacatctccagcgataaatgacactgtcatctgggacaggccgtccagggtgggaacctatcatacagactgtaattgttttagaagcatcgacttgggctggagtggtttcatttcccaccaaatgctgaaaaggaggagtttcctgaaaaatgatgacctcatcatatttgtggactttgaagatatcacccacctcagccagactgaagttccctctaaaggcaaaagactgagcccccaaggcctcattctccaaggccaggagcagcaggtctccgaagaaggttcgggaaaggccatgttagaggaagccctacctgtcagcctgagccaggggcagcccagccgacagaagcggtcggtggagaacacaggccccctggaggaccataactggccacagtacttcagagacccatgtgacccaaacccttgccaaaatgacggcatctgtgtgaacgtgaaggggatggcgagctgcaggtgcatctctggacatgctttcttctacacgggggagcgctgtcaggccgtgcaggtgcacggcag

SEQ ID NO: 453826 - DNA, 939 bp, Homo Sapiens; identical to SEQ ID NO: 325118

SEQ ID NO: 453827 - DNA, 715 bp, Homo Sapiens; identical to SEQ ID NO: 325120

SEQ ID NO: 453828 - DNA, 962 bp, Homo Sapiens; identical to SEQ ID NO: 325121

SEQ ID NO: 453829 - DNA, 344 bp, Homo Sapiens; identical to SEQ ID NO: 325123

SEQ ID NO: 453830 - DNA, 766 bp, Homo Sapiens; identical to SEQ ID NO: 325126

SEQ ID NO: 453831 - DNA, 463 bp, Homo Sapiens; identical to SEQ ID NO: 325129

SEQ ID NO: 453832 - DNA, 715 bp, Homo Sapiens; identical to SEQ ID NO: 325130

SEQ ID NO: 453833 - DNA, 364 bp, Homo Sapiens; identical to SEQ ID NO: 325131

SEQ ID NO: 453834 - DNA, 1334 bp, Homo Sapiens; identical to SEQ ID NO: 325132

SEQ ID NO: 453835 - DNA, 726 bp, Homo Sapiens
atttgctttcagaaagggttaacttctccttaagtagctggatttctgtatccttctcgtgggaggttaagtgagaatgaaattctttatctctgtttgtagccaacaatgattcgaggtttttaactgtatgtctctcatttgaaagttgttttttcagtaggtctgactctgactttacattttctaattccaccacaaccctctcaaactcaaggtttttcgaattcaattgctgggtcataatatctttgcctgaatcaagtttaatgcaaagttctctaagagatgacaagtcatttaatactgttgctttctcatcttcttgatgtctcagctcttcttctaatcgagacatggcttttgccattgatgagatctgagattcataagcatgatgggcatttatgtgctcttgaatttctttttctaatagctccactctttctcgaagatgtctcctctcagtgtcaatagaaagaagttccagtcgaactgagctgctttctccctcagcttgatgggctttgacctcccagtcttcagcacggttatgaagcatctgaaatctatctaacaaatcttgattttctttttccttggcagccattaagctctcccatcgtgacacctctgttatgtatttatgaactctgctcttcatttcttctttttcttgcactgctgcttccaattccaatgagatttcttgattttctcttgcca

SEQ ID NO: 453836 - DNA, 314 bp, Homo Sapiens; identical to SEQ ID NO: 325135

SEQ ID NO: 453837 - DNA, 428 bp, Homo Sapiens
  misc_feature (327)..(328): n is a, c, g, or t
ctggtggagggccagctagtgccagttgccagctgacggtcctggaagggaagtcgggactctacttctcctctctggactcaagcattgacatcctgcagaagagagcccaggagctgatcgaaaacatcaacaagagccggcaaaaggaccatgcactcatgaccaacttcaggaacagcctgaagaccaaggtttcggatctgacagagaaattagaggagaggatctatcagatttataatgaccacaacaagatcatccaggaaaagctccaagagttcacccagaaaatggcaaagatcagccatattggagaataatatnnctgaccaacttcaggaacagcctgaagaccaaggtttcggatctgacagagaaattagaggagaggatctatcagatttataatgaccacaacaagatca

SEQ ID NO: 453838 - DNA, 603 bp, Homo Sapiens; identical to SEQ ID NO: 325137

SEQ ID NO: 453839 - DNA, 1199 bp, Homo Sapiens
  misc_feature (956)..(1018): n is a, c, g, or t
ggtgaacctgcagcagggcttgttggggctgtcagggctctccgtggccaggtgctgggaggcgatctcagcgcacagggtctccagctcggtctcatcattgatgctctcaaacttcttgacgtaattgtaggtgaggatatccgcttcctgcaggtcttgctcagggtccaagggctcgcccaccagcgtcttccagaaggagggcaggaggtccaggggcagcgggacgtctgcccgaattgcaatccccagcagctgccccaggaagtgcagcagctgctcctccccgtaggtgatggggctcggggtcaggatatacttgcccttgttcttattgacagctgagctggggcacagcagcagcagcgacagcgaggaactctgcagctccttacacacctgccacaggaagtggcggaaagagccgctggtgccatggacctcctcgccagtgaagcggatgttgaaggcatatgtggggtcaccgccactggccagcttgacgcagagctgagacgacggcactgaggccagctgcctggcagcctgacagaagtaggagttttcagaagctctgatttcccctcccacaatttccagtgggtccaaggtgatctcaggggccgcgtggtccgctgtcctctgcacagtggcattcagcactcgattcatcacggtcaccttcgtgtcatagaagatcagccctttggcctccttcagcagggcggcgatgctgtgggtatacatgggtgtctggcgcagctccaccaggggcaggaagaaggtctccagtgtggtgttgagggactgcagcaaggcgcagcgcaggcgcaggctctcgatgggcacgttcaggagacaggccactctggggtcagcagcatccgcggggtccaggtacacctcatggggatggagccgtgcgggtgtgatggcgaggtggcggcatagcnnnnnnnnnnnnnnnnnnnnnnnnnnnnnnnnnnnnnnnnnnnnnnnnnnnnnnnnnnnnnnngcatgtcggacatcgatgcatgcgcacctctcaaagtgaagatcgtaaccacaggacaagatcgccctccagacgctacggatatcttgcctggctcggtcaataacaaatttgtgaaatccttccagcgtcaggtatttttcctcagggacttcttgtttttttggtaggtgacttttcc

SEQ ID NO: 453840 - DNA, 791 bp, Homo Sapiens
gctacttttccacagttagaagattatttcactgataagtcaattaaaggggagaagctggtgcccggatccagagaggttctgacggagatatttaagagttgtgcccgttcagagcagaggctgagcctgacaccagcgaagcccatcagagtctctgacatttatcttagcaaagagcagatcaactcccagaccccaggcaacctcctccacctcttcttcaccaatgtccggccgccaaaaaaggtgctggaggatccgctcacccaggtcctgaggaagtatggcgtgccaaagcccaagtttgacaagagcaagtacagcaaggccgggaaggagcagcaccccgtgaaggtggtgagcaccaagcggcctatcaccaagccgcccgccaaggacaaggctgtgctcaacagcgtcaggactgccttaagtgagaagaagccaactgtgaagccaaaatcaccagaaaagagcaaaccagatgaaaaggacccagaaaagtcacctaccaaaaaacaagaagtccctgaggaaaaatacctgacgctggaaggatttcacaaatttgttattgaccgagccaggcaagatatccgtagcgtctggagggcgatcttgtcctgtggttacgatcttcactttgagaggtgcgcatgcatcgatgtccgacatgcacagaaggcctcaagaaagtggaccctggagatggacgtggcacttgtgcagtacatcaaccagctatgccgccacctcgccatcacacccgcacgcggccatcctcatga

SEQ ID NO: 453841 - DNA, 663 bp, Homo Sapiens
ctcccagacgcagatggttgacgaatgcagcaatgatgtcatcatcaagaaaatcaaacaagaaatccccgaagattattacattgtggcaaatgcagaactgacaggaggagtagatggaccagccctgtccttgacacagatggcaaaacccaagcctcagactcacgctggtccctcctgtgtagggtctgctaaactgattccccatgtcacatctgccatcagcacggagctagacccacacggtatgtctgcatccccctctgtgatctccagaccaattgtccagaagactgctagggtatctctggcttcaccaaacagaggaccccctggtacacatggcaccaaccaacaggtggccatgcaaatgcctgtgagcacatcccatcctaacaaacagatcagtatccccttgtctgccctgcagctgcctggacaggatgagcaagttgcctctgaagagttcctgtcccatctgcccagccaggtctcctcctgtgaggtagccctttctccctcagttaacacagagccagaagtgagctccagtcagcagcagcccccagtcgctccagccataaccactgaggccacagcacagtgcataccagaccaggatgaaagagcagctgagctcagcagggagcagaacgagaa

SEQ ID NO: 453842 - DNA, 366 bp, Homo Sapiens; identical to SEQ ID NO: 325141

SEQ ID NO: 453843 - DNA, 442 bp, Homo Sapiens; identical to SEQ ID NO: 325143

SEQ ID NO: 453844 - DNA, 282 bp, Homo Sapiens; identical to SEQ ID NO: 325144

SEQ ID NO: 453845 - DNA, 524 bp, Homo Sapiens
  misc_feature (28)..(28): n is a, c, g, or t
gtcggtgagaatccagggagaggagcgnaaacagaagaggggcagaagaccggggcacttgtgggttgcagagcccctcagccatgttgggagccaagccacactggctaccaggtcccctacacagtcccgggctgcccttggttctggtgcttctggccctgggggccgggtgggcccaggaggggtcatagcccgtcctgctggagggggagtgcctggtggtctgtgagcctggccgagctgctgcaggggggcccgggggagcagccctgggagaggcaccccctgggcgagtggcatttgctgcggtccgaagccaccaccatgagccagcaggggaaaccggcaatggcaccagtggggccatctacttcgaccaggtcctggtgaacgagggcggtggctttgaccgggcctctggctccttggtagcccctgtccggggtgtctacagcttccggttccatgtggtgaaggtgtacaaccgccaaactgtccaggtgagcctgatgctgaacacg

SEQ ID NO: 453846 - DNA, 815 bp, Homo Sapiens; identical to SEQ ID NO: 325146

SEQ ID NO: 453847 - DNA, 1234 bp, Homo Sapiens
ggggggtcagaagacacctggcactggaccagcagcttcttgccctctgccacatgtacatcttgcagcttctgcttgaagtctgggtctgtcccctggctctctgatctctgtgtcagtatctgtggtccctgcatggcctctcttgcagttcacatcattcttaacgtctttcttgaggttcttctttgctagcggatttcaggttctcatcaggcttggcattgcccatgggcttcagggtctcggcaggcttggcgttgcccattggcttcagggtctcagcaggcttggcgttgcccacgggtttcaagggccctgaaggctgtgcattgctcaggggcttggaactctccactgccttggcattcagggtctcggcactgctgctgccattctctgctggtaatttcttcttgccacccagcactgagcgaaaatccggggtggcaggttttggcggtggcaccttctcaggcacgggggtcttggaagtccccttcttggccaggacagagcgaaaatcgacctgctgggggctgtgcaccttcctctcttcctcagacacagtctttggcttcacttgccgctgcaggttggcacggaaatccatctgctcggctgggatctccttcaggtcgtcttccgatagggtctttgtactcaccttcttccccaggaggtctcggaagtccagctgctccacctcctgctggcggatcgcctcctcagtgtgctgcctcgtctccacgcgcctcttcagcacccctcgcacgtcctcgccgtcttcctcctctagccaaccctgccctcttgctggccagccaggcctcagggacccatagcggtcactaccaccaccatcagcaccaactcctccaccacagaggtcctcgcagctggcaggctccctcccccgtggaagggctctggcagagctgttctgtagcatcagtgacacctggcaactgcattcgccaacccggttcttgagcaggatctcatactggccggcatgccagggctgcaccttctttagaaccagggtgaacacgtcctcattctgaagcacctcgaagtggccagtgtctttgcagagggctttgccatctctgagccagtgcacggtaggaaaggggtcaccagctatggcgcaggagatgaggacactctggcccggggaggctgtcactgagcgaggcttactgatgaaccagggctgggtgccatcgtg

SEQ ID NO: 453848 - DNA, 410 bp, Homo Sapiens; identical to SEQ ID NO: 325148

SEQ ID NO: 453849 - DNA, 501 bp, Homo Sapiens; identical to SEQ ID NO: 325149

SEQ ID NO: 453850 - DNA, 735 bp, Homo Sapiens; identical to SEQ ID NO: 325150

SEQ ID NO: 453851 - DNA, 941 bp, Homo Sapiens
tcctgaactacggcctgttccagccggccagcaatgggcgtgacggcaagttcctggatgaggagcggctcctgcgcgagtacccacagcccgtgggtgagggcgttccttccctggagtttcgatacaagaagcgggtgtataaacaagccagtctcgatgagaaacagttggccaagctccacacgaagaccaatctgaagaaatgcatggatcacattcagcatcgcttggtggagaagatcaccaagatgctggaccgaggcctggatcccaatttccacgacccggagaccggagagacccccctgaccttagccgctcagctggacgactctgtggaggtcatcaaagctctcaaaaatggtggagctcacctggacttccgtgccaaagatgggatgaccgccctacacaaagctgcccgagcgaggaaccaagttgccctgaagacccttttagagcttggtgcatccccagattataaagacagttacggcctcaccccgctgtatcacacagccatcgtcggaggtgatccctactgctgcgagcttctcctgcacgaacacgccactgtgtgctgcaaagatgagaacggctggcacgagatccaccaggcctgcaggtacgggcacgtgcagcacctggagcacctgctgttctacggggcagacatgagtgcccagaatgcctcggggaacacggccttgcacatctgcgccctctacaaccaggacagctgtgcaagagtgcttctgtttcgaggcggaaataaggagttaaaaaactacaacagccagactccatttcagccacagaaagcagctaccagagaccataggtgggtgtcagtggcgagttcccacacttctgctgctcaggaccaccggacacacgaagccagggccgccctgccatctgcgtcccccagagtgctg

SEQ ID NO: 453852 - DNA, 763 bp, Homo Sapiens; identical to SEQ ID NO: 325153

SEQ ID NO: 453853 - DNA, 811 bp, Homo Sapiens
agtagctaacaccttttccttcccaagcatcaaaggcatccatcattttcttcaactctgctactgaataatagctccaaatgtactgaacattatttcccgcctctcttttaaaaatgcctttgctgtgaattcttcctcccagctgcttttcaatagcgtctgttccatcagtttttgtggcatatacaccaataattctactctcacagcttgcaccagatgtgttaagatagtggagaacccaaactgttggtttattgcagactaagccatatgaatcacagaagtctgttaaagcctttttaagttctatatttgaccttaaagaatatgtctccatttcattggccaaatggtcagacaggctgtatggataagggatgccaaagtaatcagcctcttcctgtagggcgatgcgggtttgctcatctgtgggaatctgaacttctccatgaaggtaatccaaaaggtatttaaatagacgtccatcacggtcaataacacaagcccctgactcatctgtttttagaggaaagcgaccactgaacatagatgccaacatggagtccttgaagcggcacaaggactcccgccgggctgtgtaaatacagccacccacgttcagtcggagaacatctagcacctcttcttctgccttgtggccttccatttctcccccaggcacctgaatttttgcctcccaacactttcagaaacttcaaaacaatgatgtcttggtctccctctgcggcccgccagaccctcggcgcggccgccggacgccgcggggcggacgcggaagtccgct

SEQ ID NO: 453854 - DNA, 859 bp, Homo Sapiens
gggtcccccatttcatgcccaattgtcagacagctgaggataaggatgcccaaagtaatcagcctcttcctgtaggcaatcgggttggctcatctgtgggaatctgaacttcctccatgaaggtaaatccaaaaggtatttaaatagacgtccatcacggtcaataacacaagcccctgactcatctgtttttagaggaaagcgaccactgcacatagatgccaacatggagtccttgaagcgggcacaaggactcccgccgggctgtgtaaatacagccacccacgttcagtcggagaacatctagcacctcttcttctgccttgtggccttccatttctcccccaggcacctgaatttttgcctcccatcactttcagaaacttcaaaacaatgatgtcttggtctccctctgcatccaaaaccatcagggacgcttgggaaaacgaagacactccggccacagcacacagttcctcagaaagtctgaggaggggtcgggatctgcccgcgaaccccactttgaaaaacatcgctcaaggggctcacactcctcttccgaagcgggaagagccgggaggagctggggagccagaaagccccgccacggtcttccgcggcctggagaccccaaatcggcccgaagcccgagcctgcagcccggggcgcgcgcgttaccagcgcggcccgtgcccttcctcagggcgccccgccgccttccgggcccgcggcccatcccgcgcccggctcttccgcaccgggggggtggggcgggtcggcagcttcccagactgacctgcggcccgccagaccctcggcgcggccgccggacgccgcggggcggacgcggaagtccgct

SEQ ID NO: 453855 - DNA, 782 bp, Homo Sapiens; identical to SEQ ID NO: 325156

SEQ ID NO: 453856 - DNA, 453 bp, Homo Sapiens; identical to SEQ ID NO: 325158

SEQ ID NO: 453857 - DNA, 660 bp, Homo Sapiens; identical to SEQ ID NO: 325160

SEQ ID NO: 453858 - DNA, 740 bp, Homo Sapiens; identical to SEQ ID NO: 325161

SEQ ID NO: 453859 - DNA, 612 bp, Homo Sapiens; identical to SEQ ID NO: 325162

SEQ ID NO: 453860 - DNA, 285 bp, Homo Sapiens
  misc_feature (50)..(50): n is a, c, g, or t
cccaagcaactggccctgggcaagctcccagggcatcttgggcagtagcnaggaccccagtagactgccccgagacccaaccaccttcctgtagggcgagagtggcagcgacgtgcagctgttagccgtgtcccaccgtgggctgcgactgctcaaggtgacccaaggccccggcctccgccccgaccagctgaagattctctgctcatacaggtgcgctggcccacgaccctgggctagaggtgggggcaggtggcaaggtgaccccagttcatgcccgatccc

SEQ ID NO: 453861 - DNA, 699 bp, Homo Sapiens; identical to SEQ ID NO: 325163

SEQ ID NO: 453862 - DNA, 283 bp, Homo Sapiens; identical to SEQ ID NO: 325166

SEQ ID NO: 453863 - DNA, 488 bp, Homo Sapiens; identical to SEQ ID NO: 325167

SEQ ID NO: 453864 - DNA, 666 bp, Homo Sapiens; identical to SEQ ID NO: 325170

SEQ ID NO: 453865 - DNA, 663 bp, Homo Sapiens; identical to SEQ ID NO: 325171

SEQ ID NO: 453866 - DNA, 758 bp, Homo Sapiens; identical to SEQ ID NO: 325173

SEQ ID NO: 453867 - DNA, 795 bp, Homo Sapiens; identical to SEQ ID NO: 325174

SEQ ID NO: 453868 - DNA, 337 bp, Homo Sapiens; identical to SEQ ID NO: 325176

SEQ ID NO: 453869 - DNA, 902 bp, Homo Sapiens; identical to SEQ ID NO: 325177

SEQ ID NO: 453870 - DNA, 580 bp, Homo Sapiens; identical to SEQ ID NO: 325178

SEQ ID NO: 453871 - DNA, 275 bp, Homo Sapiens; identical to SEQ ID NO: 325179

SEQ ID NO: 453872 - DNA, 813 bp, Homo Sapiens; identical to SEQ ID NO: 325185

SEQ ID NO: 453873 - DNA, 618 bp, Homo Sapiens; identical to SEQ ID NO: 325186

SEQ ID NO: 453874 - DNA, 764 bp, Homo Sapiens
ataggtaccaccaatgagtcttgagctgttattttacttccatcagctgatgctgaaataacttcaggttgaagaatgtatacaccatttaaattgtcagctaccattttgagtaaataaaaacaagctaaaagtttctctgagaataactgacccttttgttgctgagtcagcaaaagttttacagtatttgaggtcagctttatcaaatgccccacatcttgtttgtatcttatatcccaataatggattgataaacactgatgaaaaagttgaaagatacaaagtatccatgcattatgtcttgagcttttgcttaaaacaagatcaagtttaggaaaaggacattttataaattgaagaatgtaaaaaaaatgagtgatacaaactactatgtaatttaacattaaatttttttctgtcacagtttttgaaattcctatagttcacgctgcaagtagacttttctggatagaatgcagttctgtaatggttctatctgtctcctcactatcatcctttgcatgtatcgtatcaaacatagatgctaattccaatcttccttccttcatattacgtacacagcacatcatctcttttgttcctataaggacataagttgtctggtaagtgtctgccttcgttagtttcttctgcttcaaaatcctgaaaatctgctgcattttcatttattgtttcttctgcctgcaagaatttggggacagtgaaatcggctgaactttcatttccttggtgttctaaca

SEQ ID NO: 453875 - DNA, 820 bp, Homo Sapiens; identical to SEQ ID NO: 325188

SEQ ID NO: 453876 - DNA, 829 bp, Homo Sapiens
aaccaatctctgtcctgagtcctaacccagagactacatgatctgtttaattgtggaaagctcaaaatcaataaatatttaggagaaggtgttgaaagccacagaaggtggtggctccgtccttcctgttgagaggcccctagggttcatagtggaaactccccaggggaagagccgacccttcctgaaggcgtggcttcccttgcctgggccacagatgtaattgggtgcaggaggtggccatgggagagaaaggccccgggagaagagtgaaggagggaaaaggagcctgtgtgctcatctccctggaagggggagccttcattaacccacgcacattgacactgataatggtcctgagaagtgggtgacatttgggaaagcacaaaccaggaaagcagccgctagtgccatcatcatgccctttctaaatccccctgctgccaccctgggccatgggcactcttattagcagacaagactctttagaagtgaaagcgtccgcagcagggatgcttccgatatggggtgcgtcctatccccgttctgtctggaaagacggtgactgtctgcctcgtgttcaggaagaagacatgtgcagaccaggctggtggaacctcgagcttcggcgctcaacagtggggactgcttcctcctgctctctccccactgctgcttcctgtgggtaggagagtttgcaaacgtcatagaaaaggcgaaggttggtacctgaaaaataaaaatgctttagctaacatctcctttacgcaccggaggagtgttcttcctgacgtcagtcacaaagcttctcaaaagccaggtgttgcat

SEQ ID NO: 453877 - DNA, 357 bp, Homo Sapiens
acgatagccgacagctgaggtgtctgcaggctgtgttctcagtggctcccaccagatacccgatggtcctgtcgatttgctgaatcatcaacttccttttctctgcctctggcccgaatcgatgtcccacgttatctggctctctgtagcacagagtcacaaagtcaaagtcttcctaggtgaaccagttcatgacagtatcgatgttcccctccgctctgtctcgttgctgtttgggtgaatgtaggactccaccagggaccgcttgacagcctcacccttgtatttagcacctcccctggaatagtggaatgatgccgctttgttcccctgctggacggtggagatgctcgtggg

SEQ ID NO: 453878 - DNA, 612 bp, Homo Sapiens; identical to SEQ ID NO: 325190

SEQ ID NO: 453879 - DNA, 603 bp, Homo Sapiens; identical to SEQ ID NO: 325191

SEQ ID NO: 453880 - DNA, 1060 bp, Homo Sapiens
tgagctggtaccgcttactgggcgtatgtgggagcaggtggtccagaaaaagctagcacactgcagtcctctttgatcagttcagactggcccacagtgtagctgtagttggcaatcagggtagcaataccaacataggacctcaccaactctgccagaagacgaaggatagtggaggtaggcattaaaggtttgctgcccttgcctttctgtttgccttcctcagaggcccggtccccttctttatctttcttcccatctcgagactcctctggagttgaagcctctccttgggaggtcccagatgcggaagtctcagtggaggcaccatctgcagcaaagacctgactattaatggaaaaacctgactgcgtatcaaagtcactgctctgacgcgtaagtgaccggtactgctggtatacatcatcacccatgtcttgcaggagctggccaacctcttgggtcataaccccaggtttaggatcagatttatctgcttcctctggagcatggtatgcagccagagcattcagcatatcatagatcacttccttgatagtatcagggatgacaggcagaggtgagggcttcaaaggggtggtcttcaccagctgtacagcattagggcctttaattctaagattctcaaattcatcatctgaagcagttcctgagcctcgaggggcaggaagggcgatgcggatacagcagttggccacttctgtgaatatgtctggattgcggcatgcggctggcccaaggacacgaaggatgtagttgatctcccgagagccgaggctgccagacacaacaccagaggtagtgctaccagctccacttgtagctgctgagcgaacaaccttttccatggtatgacgaagggtacaggggtcctcaatgatgtgtcttaggagaagggtgaccaggggagtcaacccattgaagcctgagctctgggtcatattcaagatcatgcgggtactcttcagttctgcaaacatcatgtcatatttgtggtcccgggtgagcctcagacagagacgaagggtggcatgcaaag

SEQ ID NO: 453881 - DNA, 426 bp, Homo Sapiens; identical to SEQ ID NO: 325195

SEQ ID NO: 453882 - DNA, 368 bp, Homo Sapiens; identical to SEQ ID NO: 325196

SEQ ID NO: 453883 - DNA, 845 bp, Homo Sapiens; identical to SEQ ID NO: 325197

SEQ ID NO: 453884 - DNA, 659 bp, Homo Sapiens; identical to SEQ ID NO: 325200

SEQ ID NO: 453885 - DNA, 1021 bp, Homo Sapiens
agtacatcctggggactttggctacatcatccttggcgaagtccgaacccacttcatcaagatcatcaccaccagagtcactttccagctgtcatttcatgcagacgaagcgtgtccttcatgagacaggattcagtactgagctagatcgtgtaaagaatctgcctcattgtgaaacggaaatatttgaagtgagatttgacccacagggggccaatcttcctgttggaagcaaagaagtcattctgcccatcaaggtggttggagggccaacagttcacatctgtctccaagccaaggtgaccattccaaccatgactctctctcgtggaaaagtggactttgccacaattcagtgtggacagtgcctggtggaaactattcagctttccaatcatctccaagtcccttgtgaatggttcgtccagagccaaaagcctgttgacaagctggagaaacacatgccgaagtacttaagacagaaactacgcgctgaattaaagccaaagacacggatcttcgaaatccagcccatttctggagtcttggatcctggtgagaagtccaacgtgcaagtgaaattcatgccaaaagaagagaaattctacagccaaaccctggtgtttcagattgcccagagtgctcaaaagcttaccctcctggcacgtgggcaaggtctagagccacgcctggaatttagtccttcagtcctggatctggggccactgctactttgtgcacctggagacgaggccgaggtgatagtgaagaatccctgcaacttccccattgagttttattccttagaatttgatcagcagtatctcatagaagaaaagatcttgcggaagctgaagggctatgattcctacaacaccctgctgctgcctccccgcaaccctggggagaagctgcccccagaactgtacgagtacttcaaagagataaagaagtcaaaagaggagcagatgagggagagatatctggagaatctggcacaggagaatgaagaggaagatat

SEQ ID NO: 453886 - DNA, 381 bp, Homo Sapiens; identical to SEQ ID NO: 325202

SEQ ID NO: 453887 - DNA, 1050 bp, Homo Sapiens; identical to SEQ ID NO: 325203
  misc_feature (138)..(194): n is a, c, g, or t

SEQ ID NO: 453888 - DNA, 627 bp, Homo Sapiens; identical to SEQ ID NO: 325206

SEQ ID NO: 453889 - DNA, 407 bp, Homo Sapiens
ttgggccaaagtggcttatactgcaatacagcgtcggtatatgagatttgtcacagtttggaagcagtctattccatcaactagccaaaaatgcaaacaccctgaggattcagagaacaatttctttgaagggtttccttcaagatactggctcccagctttcttctttccacaagcctttcttgctgctgtgcttcaagactatgggaggtcccgaggaatcgctgtggatgccctcaccttcacccaccatgtgatttccaacaccactgacaaggatgagaagttctccgtatttatgccaaagaaactcaacatagtcaggagagcgtttaagggctcagcttcctctcacactggagtttacatttttggtttattcatcgagggggcaagatggaatcgaa

SEQ ID NO: 453890 - DNA, 577 bp, Homo Sapiens; identical to SEQ ID NO: 325208

SEQ ID NO: 453891 - DNA, 583 bp, Homo Sapiens; identical to SEQ ID NO: 325209

SEQ ID NO: 453892 - DNA, 467 bp, Homo Sapiens; identical to SEQ ID NO: 325210

SEQ ID NO: 453893 - DNA, 409 bp, Homo Sapiens; identical to SEQ ID NO: 325211

SEQ ID NO: 453894 - DNA, 706 bp, Homo Sapiens
tcagcggcctcctcatcatttaccaagaggtgtccaggctgtggtcaaagtcagctgtgcagaacaaagtggtgttgatcaccgatgccatctcaggactgggcaaggagtgtgctcgggtgttccacacaggtggggcaaggctggtgctgtgtggaaagaactgggagaggctagagaacctatatgatgccttgatcagcgtggctgaccccagcaagacattcaccccaaagctggtcctgttggacctctcagacatcagctgtgtcccagatgtggcaaaagaagtcctggattgctatggctgtgtggacatcctcatcaacaatgccagtgtgaaggtgaaggggcctgcccataagatttctctggagctcgacaaaaagatcatggatgccaattactttggccccatcacattgacgaaagccctgcttcccaacatgatctcccggagaacaggccaaatcgtgttagtgaataatatccaagggaagtttggaatcccgttccgtacgacttacgctgcctccaagcacgcagccctgggcttctttgactgcctccgagccgaagtggaggaatacgatgttgtcatcagcaccgtgagcccgactttcatccggtcgtaccacgtgtatccagagcaaggaaactgggaagcttccatttggaaattctttttcaggaagctgacctacgg

SEQ ID NO: 453895 - DNA, 438 bp, Homo Sapiens; identical to SEQ ID NO: 325215

SEQ ID NO: 453896 - DNA, 658 bp, Homo Sapiens; identical to SEQ ID NO: 325216

SEQ ID NO: 453897 - DNA, 542 bp, Homo Sapiens; identical to SEQ ID NO: 325217

SEQ ID NO: 453898 - DNA, 312 bp, Homo Sapiens; identical to SEQ ID NO: 325218

SEQ ID NO: 453899 - DNA, 305 bp, Homo Sapiens; identical to SEQ ID NO: 325219

SEQ ID NO: 453900 - DNA, 856 bp, Homo Sapiens; identical to SEQ ID NO: 325220

SEQ ID NO: 453901 - DNA, 280 bp, Homo Sapiens; identical to SEQ ID NO: 325221

SEQ ID NO: 453902 - DNA, 701 bp, Homo Sapiens; identical to SEQ ID NO: 325222

SEQ ID NO: 453903 - DNA, 496 bp, Homo Sapiens; identical to SEQ ID NO: 325224

SEQ ID NO: 453904 - DNA, 506 bp, Homo Sapiens
ggcctttatgttggcctgaggtgctggccaggttaccattttctgtccatattcttgcgaaaccatcatatgaacccatagccaatagtgttccatcactgttccagtccagtgaggtgacatctttattacttgggacgtcgtgccccccttgtcgtatacaatgtctcaacacgagctgggtggagcccccgttgctattctcattcaggttccatatccttgcagttgagtctccagatccagaggctagcaaatcactgacagggttccaggcacaaatgaacacctcagactcgtggccccgaaggactgtggctttgttgggtggaatctcaacatccccatctatttccattggctttgagtgattattgatttcatgtgctccattctcttccccgttcactgtggcctctcggttctttggaggattttgctgggaaatagcagctggggtcatggttgccgcctttgccattgctgatgcctctgcggctgctgca

SEQ ID NO: 453905 - DNA, 782 bp, Homo Sapiens
gcaggcactgctcagtgccctgcgtgatgggggccccgataaggtcatgaccgttctgctgttctaggccaaggaggaggccaagaagggtttcgaggtgcagaaggtcaagatgcagcaggagatctccgagctcaagggcgccaaaaggcaggtggaggaggcgctgacgctggtgatccaagcggacaagatcaaggccgcagagatccgcagcgtgtaccacctgcaccaggaggagatcacccgcatcaagaaggagtgcgagcgggagatccgcaggctggtacgtgggcaggcaggggcgggcgtgggcgagggtgcaggcgtgggctcggggagcgggcgggcagcaccggcttcaccccccatgacattcttagcacaggctcctcatgccacccctgttggttttgaggacgctagagtcgcgagaccactagaaaaggttcagaccctcagtcaggcccgcacggggcaggccagactctcacctccgcttttccacagacaccagctctacttcttttcttaacttgggccacagcaagaaacctagaaatcggcactgcccatccacaccgcagggttcacggacatctcttcttagtgtcccgggtcacacctgacaccaggcagggctcagtgtttcgcagcaggagtcccacacatcctcacggggggactcagagagaattctccagtgattctccagttgaactcacaggatccaaagaggcgagatcaggaggccccggggggtgggatggcccccagctgcc

SEQ ID NO: 453906 - DNA, 537 bp, Homo Sapiens; identical to SEQ ID NO: 325227
  misc_feature (368)..(368): n is a, c, g, or t

SEQ ID NO: 453907 - DNA, 618 bp, Homo Sapiens; identical to SEQ ID NO: 325228

SEQ ID NO: 453908 - DNA, 516 bp, Homo Sapiens; identical to SEQ ID NO: 325229

SEQ ID NO: 453909 - DNA, 913 bp, Homo Sapiens
agcgggggggtcccggaagcggaaggggagagcggcccggcctgggcggcggcgccggaggaggcggaggtggcgcggcaggaggaggggaaagagctgctggtggtcgggagagcggcggcagcgagaggcgagccagcggcgacgaatgaagaactttttcacttactgcaggattttcagcttcagcaagcagttagccattttggaggcgctgctttgccagtcaatttctcatttaagcgtgacagcaactgtgttctcatggagaactgttattgaagagagatccatttggtgggatataattaaaaaaaatgaatcaaaagaaaatctctaaatgcagattccagaaaaattacagcacatctcagtgaatttgcaagtggatcatccttccttgtgggttagcaggcagttataagattgcaaaatgggtctccggattcactttgttgttgacccacatggatggtgctgcatgggtttgattgtctttgtttggctatacaatattgttttaattcccaaaattgtcctctttcctcactatgaagaaggacatattccaggcatattaataataatattctatggcatttccatattctgtctggttgccttagtgagggcctccataactgatccaggaagactccctgagaaccccaagatcccacatggagaaagggagttctgggaattatgtaacaagtgtaatttgatgagaccaaagcgttcccatcactgtagccgctgcggccactgtgtgaggagaatggatcatcactgtccatggattaacaattgtgttggtgaagataatcattggctctttctgcagttgtgtttctacactgaacttcttacttgctacgcactgatgttttctttctgccactattactatttt

SEQ ID NO: 453910 - DNA, 903 bp, Homo Sapiens; identical to SEQ ID NO: 325232

SEQ ID NO: 453911 - DNA, 449 bp, Homo Sapiens; identical to SEQ ID NO: 325234

SEQ ID NO: 453912 - DNA, 360 bp, Homo Sapiens; identical to SEQ ID NO: 325236

SEQ ID NO: 453913 - DNA, 509 bp, Homo Sapiens; identical to SEQ ID NO: 325237

SEQ ID NO: 453914 - DNA, 393 bp, Homo Sapiens; identical to SEQ ID NO: 325238

SEQ ID NO: 453915 - DNA, 354 bp, Homo Sapiens; identical to SEQ ID NO: 325239

SEQ ID NO: 453916 - DNA, 409 bp, Homo Sapiens; identical to SEQ ID NO: 325240

SEQ ID NO: 453917 - DNA, 484 bp, Homo Sapiens; identical to SEQ ID NO: 325241

SEQ ID NO: 453918 - DNA, 290 bp, Homo Sapiens
taggcagggggacccttgggggcgtacggaagcacagaagataggctcttggagaagacgggaaagttcatatgctttgtattgaccacacgtacaggcccatagtttgagatattcttcaggagcagaaggttggctggttcagaagcaatgtttcctccagcaaatccccccaccacaatcctgccctcccatgccaggctgaggagaacagagaagcaagcaaaagacactgataacacacgcaacatacattcacacccattaggaaggctcagtctcgtaaaatc

SEQ ID NO: 453919 - DNA, 866 bp, Homo Sapiens; identical to SEQ ID NO: 325243

SEQ ID NO: 453920 - DNA, 333 bp, Homo Sapiens; identical to SEQ ID NO: 325244

SEQ ID NO: 453921 - DNA, 556 bp, Homo Sapiens; identical to SEQ ID NO: 325247

SEQ ID NO: 453922 - DNA, 792 bp, Homo Sapiens; identical to SEQ ID NO: 325249

SEQ ID NO: 453923 - DNA, 567 bp, Homo Sapiens; identical to SEQ ID NO: 325250

SEQ ID NO: 453924 - DNA, 286 bp, Homo Sapiens; identical to SEQ ID NO: 325251

SEQ ID NO: 453925 - DNA, 255 bp, Homo Sapiens; identical to SEQ ID NO: 325252

SEQ ID NO: 453926 - DNA, 605 bp, Homo Sapiens; identical to SEQ ID NO: 325256

SEQ ID NO: 453927 - DNA, 342 bp, Homo Sapiens; identical to SEQ ID NO: 325257

SEQ ID NO: 453928 - DNA, 657 bp, Homo Sapiens; identical to SEQ ID NO: 325259

SEQ ID NO: 453929 - DNA, 536 bp, Homo Sapiens
caaggccctttgggaatgttgtgattaagtaagttaactcggatatgggtcccttctttgagtgaaatatcagtcatgctgagaggtttgtcatagtagtcagaaaaaagatcatccaagtaaagctgtgaacgagaaatgacatccatcactcttctatttctttcaaataggatatttctcaacctgtacagcagtgcaaatgttgccgtttcttccctttcaaatcctccttttgacactgaagtgacacaaaggtcaaaggcaccatccaggtatatgaagagttcaaaaacactgaaagctatggttgtatgtgctgggaaaacaatagctttgtcccttcccttgggattctgttcatccataaagtgaaaccgcattgcttcccctcgaattccagcatgcacagacagtgagcactgtcgtgtggttcggatgctctccatgaccacacacaatactgcctttctgctgctccttgactgacgtatcaagctgtggtcatggagagtctccgtcgaactgggtaccga

SEQ ID NO: 453930 - DNA, 618 bp, Homo Sapiens; identical to SEQ ID NO: 325262
  misc_feature (66)..(126): n is a, c, g, or t

SEQ ID NO: 453931 - DNA, 717 bp, Homo Sapiens; identical to SEQ ID NO: 325263

SEQ ID NO: 453932 - DNA, 459 bp, Homo Sapiens
agccagccaatcatgtattgccagcctcattctggaattctgattggtacttggtcacaggctcctctcttacctgcacccctgggcccgcacgtggtgattggccaccccggccttggcctgccgaccccgggagtgccagtttgacatgtatgcgcccaagctggacagcccctacttgcgacattccagcgtgagtttcttcccgtccttccctcctgccatcccgggactgcccaccctgctcccacaccccggccccttcgggtccctgcagggcgcttttcagcctaaggtgtctgacccgtaccgggcggtggtcaagaagccggggaggtggtgtgccgtgcagtgcagatcgcctggcagatctaccgtcaccagcagaagataaaggagatgcagctggacccccacaagctggaggtgggtgcaaagctggacctgttcggcagaccc

SEQ ID NO: 453933 - DNA, 689 bp, Homo Sapiens; identical to SEQ ID NO: 325267

SEQ ID NO: 453934 - DNA, 764 bp, Homo Sapiens
ttctaagaaagtaaacgttcctccagaaaaagcaatgatgcatataaattttcaccgaccgccagcgaagccgaagcctcagaaggtgaaggaaattgagtaccagaacctcagatttccagtagatttatcgaatccatttgctgtggcaactgttttaaaccaagaaccaggaaaattgaagattaaagaattaagagaagttttggaccagggcactgaaatttcaaaaacgagacagatgaaggaggcactctttgaacagaaagtcagacaggacattcacgaagagatggaaaatcatcttaagtggcaggtgcaccttggtaaagatcctatgtcttttaaacttaaaaaagagcttactgaagagtggcaaaaagcatgtgccaaatataagctagacagaggagatcctattttggatgaggaatttcagcgacttaaaacagaagttagccataaacgggtcgttcgcaatcaagaagagaaaatcaaggaatttcatcctacttttgatccactcattaataacacttggctcagcaggtccagggcacaaaaacggtttcaacaagtagcacgcaaggtcatgattcagggacgattattcaatatgctgagtgctgttcgtgaaatggacaaagagagtatactgagaaagattggccaagcaaaacaatcgatagcacaagaggcgaatttcttcatattcttcctgaggcggatcagtcaggatgattataccagccggttctctgtgt

SEQ ID NO: 453935 - DNA, 839 bp, Homo Sapiens
ttgtcttgtcccttggtttcaaattttcgtagtgcttcactgaacagatgccttcataacatggaggtatgctgctcttgctgagagatattctagcctcacagactccaccatggaataaatactaattgaaaaccactgtggggtgaaaggtgggggagggaaaaatacacaaaggagagatgtttctgtggttgttttcccagcactgcgtctctggcactgcagggacattccggtatagggtgccaggccctgtgtaggtagaagagtctccgtcccaagaaaggactttacttggcctcttgtttctcctgcagtagtggaataatcgactcccacgccatgaggcacttctcataatactggatgttcttgtcagccatccccatgagtagctgccggaagtcctgcctcttgttgttctgccaccttttcatgtcagctttcaggtcagcattgaaacactccatccgatcctgacatttctcgacgtccgccggtaccttggggcggtcttccttccgcagagccacagcttccagtttggcttcatactctgcttgaacttggtccctcttcttcaatacactcttcatggagtcagagtataaaatatattccctgagcacaggtaggaagtcttctgtcatgtcatctgtcagctcttctaaggctgtagagcagttcccaatgcaagctgacacaccctccaggggttcggccagctcaccctccaaggcgctccatgaggagtacgcaggcccgtattctctcctctcctccaggtagtctatttcttctttgatgatccgctgggctattcgatcaatggttcc

SEQ ID NO: 453936 - DNA, 496 bp, Homo Sapiens; identical to SEQ ID NO: 325271

SEQ ID NO: 453937 - DNA, 824 bp, Homo Sapiens; identical to SEQ ID NO: 325272

SEQ ID NO: 453938 - DNA, 732 bp, Homo Sapiens; identical to SEQ ID NO: 325275

SEQ ID NO: 453939 - DNA, 154 bp, Homo Sapiens; identical to SEQ ID NO: 325280

SEQ ID NO: 453940 - DNA, 500 bp, Homo Sapiens
cggccttattcccgagacaggatatagaatagcctatggaaataatgctcgtccagtcaccaaccagttgcctgatcagagctggaatttactactgggacaagagtgcactccgatttgctttcattttttccagacgcttcactaagtggccgttgctcacctcgagctcttctgttttatccaatgcagagcggagctctctttggagtttccgtttttctgccttaagttcatcttctattttttctgcattttcagccgctgatttgtaacgtgatacttgactctctaaccttattacattttgttctaatgcagttatctcttgctcagattttgcaagtttaaatttgaggtcgctgatctgtctgttggcatccctttgtaggtccattacatgcatgtctgtcccgttttccaagacatcatcttcagatcgaagattgtgtagattgccaatcttgtgtctctccaccagctgccctttgagtttctta

SEQ ID NO: 453941 - DNA, 384 bp, Homo Sapiens
ctgctctagaggatctatcctattagacatcatgaagaattacttgtactcctggggctctctccggaagggaagagggaactcctctatggatagtgcagcaggatgcagcggaacccccccgatttgccgacaagcccagaccaaactagaagtggccctgtacatgtttctgtggaaccctgacactgaagctgttctggttgccatgtcctgtttccgccacctctgtgaggaagcagatatccggtgtggggtggatgaagtgtcagtgcataacctcttgcccaactataacacattcatggagtttgcctctgtcagcaatatgatgtcaacaggaagagcagcacttcagaaaagagtgatggcactgctgaggcg

SEQ ID NO: 453942 - DNA, 511 bp, Homo Sapiens; identical to SEQ ID NO: 325284

SEQ ID NO: 453943 - DNA, 746 bp, Homo Sapiens; identical to SEQ ID NO: 325285

SEQ ID NO: 453944 - DNA, 571 bp, Homo Sapiens; identical to SEQ ID NO: 325286

SEQ ID NO: 453945 - DNA, 223 bp, Homo Sapiens; identical to SEQ ID NO: 325287

SEQ ID NO: 453946 - DNA, 342 bp, Homo Sapiens; identical to SEQ ID NO: 325288

SEQ ID NO: 453947 - DNA, 495 bp, Homo Sapiens; identical to SEQ ID NO: 323506

SEQ ID NO: 453948 - DNA, 609 bp, Homo Sapiens; identical to SEQ ID NO: 325290

SEQ ID NO: 453949 - DNA, 778 bp, Homo Sapiens; identical to SEQ ID NO: 325291

SEQ ID NO: 453950 - DNA, 501 bp, Homo Sapiens; identical to SEQ ID NO: 325292

SEQ ID NO: 453951 - DNA, 893 bp, Homo Sapiens; identical to SEQ ID NO: 311246

SEQ ID NO: 453952 - DNA, 613 bp, Homo Sapiens; identical to SEQ ID NO: 325294

SEQ ID NO: 453953 - DNA, 513 bp, Homo Sapiens
  misc_feature (479)..(479): n is a, c, g, or t
ttctacgagcgcatttacagaatgggcactgtgcccggccaaatccagaatccttcaccagtacccaacagtccatccacaatcttaacgattgccctctactgctccttgggccccctgtccccaaaagcctgtccaggcaagactcacagcttcagatgagtggcaaccaccagaagcggccgtctcagggctactgccatttgctttcgtgttcctcttcgctgctgctggaacaccagggcggtttctctgccaatattctttgaactttttcttggctgcagctaatttactctgtccagtttcttctgccattgtggggtggggagggaggcggggctggggccacgtcagccaaatcccagcgagcgctgatcaacacgtccagtcacccttaaagaatcagaaataaatagggtgggcatgggtggttcatgaatttaattcccagcatttttggggagggcaaaagtgtntggggtttacaagtttgaagccaccttgcctggg

SEQ ID NO: 453954 - DNA, 452 bp, Homo Sapiens; identical to SEQ ID NO: 325297

SEQ ID NO: 453955 - DNA, 568 bp, Homo Sapiens
cggtactacttttccacaggtcagtctgacctagtcatgaaggtcagcaaaggctctccaagtgaccatagaactgagaactacaggataagcaggattaagtataagaattggggaggaaaaaatgttcaggacatgagagggaagggcacgcacagggcaagataaagttgggaagtaggcctgaccatgcagtgctcttgggcatgctgaagattttgattttgattcttagaggttctaagcaaggagcaggtgacaggatcagatttgtatttttaagagattattttggctgtggttacagaagatggaacgcgggggatgggtatgagcaccttttcgctgactctgagaaggaggaggaagatattgaggacattgaagaaaatactagacctaaaagaagcagacctacatcgtttgcagatgagctggctgcccgcatcaaagggggatgccgtgggtcgagtggacgaggagccgacaagtgagccccagccgtgttgatggggagtacggggggagtagtgcaggggcctctgctgggttcaccaaaggcggattt

SEQ ID NO: 453956 - DNA, 730 bp, Homo Sapiens
atcctgaatgcagcctgctgaggcattggaatacactaatatagatattgcatgcagtttggcctgaactgcctgcaatcgcttcctgtgattagaaaagccatgggccagtcgtatgtgtgtaaataacagcatctgcttatccttaggagtgctgtacattttggtaagagattccatgatttcagaagggctttctgaaatcttgtcaagttgctctatgtgaatataatgtagtgtgttactagttgtccttttctcaattttgacctcggccccaggatctgcatagaattcaaagtgtagtgtagttgcactgggtggatatttcatcatatgcaagtctctgcaacattctgcaagtccaaagccattctcctttccaccccagctctctgccaaatgttgtagccgagttagcagcggggtcctcttgtcagatcccagacgagtgatgtagtttgatcttttgctaaatacatataggagattgaggactgccagcaccacttgcatatcagaggaagccaataaagttgtcaaatgctctatggaactgtacagatgccgggaaaagctgtactcaatgagcaaggctgtgaagttcaacacagccaagagaagcattttcagttgctctctttctggcctatcacatacgagcatccatgacatattctccactgtctgtccagcatctgccagtattccatcgaagcggtccaacagg

SEQ ID NO: 453957 - DNA, 535 bp, Homo Sapiens
tcactacccggcacccaccctacctgaagctggtgatctccttcctgttcatctctgctgctgttcaggtggagcagagctacttggtcctcttctgcacacatgcctcccagctacaggtccccgtccaggtcctggtactaactgtcctggtctcagccgtgctgagcaccccgctgtgggagtgggttttccagcgctttgggaagaagacttcagcctttgggatctttgcgatggtgccctttgcgatcttgctggctgctgtgccctcagcacctgtggcatatgtcgtggcctttgtatctggcgtgagcattgctgtgtccttgctgctaccctggtccatgctgccagacgtggtggatgactttcagctgcagcaccgtcacgggccaggcctggagaccatcttctactcctcctacgtcttcttcaccaagctgtctggcgcatgtgccctgggcatctccaccctcagtctggagttctcggggtataaggcaggggtctgcaagcaagcagaggaggtggt

SEQ ID NO: 453958 - DNA, 441 bp, Homo Sapiens; identical to SEQ ID NO: 325306

SEQ ID NO: 453959 - DNA, 1079 bp, Homo Sapiens; identical to SEQ ID NO: 325307

SEQ ID NO: 453960 - DNA, 1136 bp, Homo Sapiens
  misc_feature (356)..(356): n is a, c, g, or t
tttggttttttcaaaaaatttgtggaaggccaaactggatctcccggcggaggggggaaatcctcccattccgcgcaaatttcccggcccctaaggcaggtggggaaacccccatggcccccaaagggggatgggatccaaaaattggtcaacctctttctaagttctccttttcggcagcccagcgttcaggccgggaactcctttggcccgaggggagtttctcatcctggtacgatgtggcatagtgccaaagggccagctgggtgcctttcggaatcagatacccgccaataaccaggtcttctgggtgacccggccgttccctggcagcactgaaacagctcagggtttcnttaaggagagctctgaccagcgggaccttggggacatcagctgcagttggaacatgcctttcccctaaattcttcacaatctcccggtacaccgtctgctgcacttctgggtgccttgccaggaggtacacagtccaagacaaggtgaaggacgtcgtgtcgacgccggccagcagcatctcagtcacgttggcgtagatctcctgcagcgtcagagcctggctaaggaagaggtatgtgagaagtcccccgctcaccctccggcctcggtccatttggtactgtatgtccctcaacttgttgtcaacatgaatttggctgaatttgaagagtccatcccaggacctgcagaattcccgccagggctttgggatgaaggggcgaagccatctggggatggcgcctgcatacatggaggtcttgaacatgctaaacatgagctccagggcctcgatgtattccacagtcagctgtgggatgctgttttccaggcagcccaaacgactctcataaaggatggtggccactccttccattgaatatttgaagaaaagatcattgacattggtcacggtttctccatcttctgcctggctcctgaggaggtagattcttttaattaagtcagcaataacttggttgacttctccagaataaatggccacatctttcggtttcagaattctttgtctcagtacgcttctcatcttgagccactgttcaccctccgccgagatgagcccggtggctctcccccgcaagtctcggtactcccgccag

SEQ ID NO: 453961 - DNA, 326 bp, Homo Sapiens
cgcagtcagaggaccctaaggcagctgacggccaatactggccacaccattcatgttcactaccctgggcctcgccagcccaaccctcctcttatactgcagaggttgcttggtccctcagctgctgctgacatccttcagctgagcagcagccttcccctacaaagccggggtcgggcccgcctcctggtaggcaacgatgacgtccacatcatcgcccgttctgatgatgagctgctggatgactttttccatgatcagagcacagctaccagccaagcaggaaccctgtccagcatccccacagccctgacccgctggacaga

SEQ ID NO: 453962 - DNA, 654 bp, Homo Sapiens
aagattccaataagaaacaacactttttatagattcaaaagcagtcatagcatcttctatatttccatttactgcatccaatatagcaaaagttacgtgtgcgtcttcttcatattcaacaatttctgatgcctgaatgtctacactatgaaaatgtttaaacagaggatcaataggttcaggaatactgttcttcttttttattatcttcaacaatggcaaaactttcttccaataatgaacacttctccctatgtattctcgttgatcataaaaagaattaagaccgctgcccattttctgaaggcattttgcccaatgtacaagcagagcaggttgaaggccatgtttttcctgggctcttagagtgtttatttcatgatgaactagaagtctcaattttgctacgtttccaggtactgcttttctgtgaatcagagtacaaaccgcatcccaccaagatttttgtctttctgtacaaagctgtttacacacaggaaggggcaggcataacggctgataggagctgtggtgagaattacatttctcctttaattgtaagtggctggtatatactactccaaggagaaatacttcaagatctaaaatacatattgattcaggtgcatttgtttcaagccttgaggtttcctg

SEQ ID NO: 453963 - DNA, 452 bp, Homo Sapiens
aattttcaggctgaataattatcagaacttaattattaaggaataacagtaacagctcagctaatatgtaacattcactgtgtgccaggcattgctcctctaggtgcttaatatttaactccattaactattttgcagcaattaaaaaacacatctcgtcataatatgacccaagctgctgttttcagaacaaaaaaactttcaataaaaagttcatgattttaaaaaattaaggtaatgttcattaaaaatgcttatactttaaaactcaccgttttctgaaggtattttgcccaatgtacaagcagagcaggttgaaggccatgtttttcctgggctcttagagtgtttatttcatgctgaactagaagtctcaattttgccaagtttccaggtctaaaaaatagttcaatttactaaaattgctttctaaatacacagttcagcgctta

SEQ ID NO: 453964 - DNA, 338 bp, Homo Sapiens; identical to SEQ ID NO: 325313

SEQ ID NO: 453965 - DNA, 505 bp, Homo Sapiens
gttcaaagaagaacacacttttttttactttaatgcgttagctgaaaaggctgcggaggcacttgaggctgctgcggctagggagccgctggtgcccaccttccccacactaggtgtagaggaatcagccgaaacaggagcatcctctggatagggctgtacacaccccaggttccagccacaccatcagtattagtagaccgggaggtctgaagtacggcgccgtgtctccacatggagtttcctcttcaacttcaccaactcttgtggtttttattcttctaattccactgtttggtaaattacatatatgatgtttttgcctgaaattctgtgaacttcgttttgcagccaccacacttccatgtggattttgtttgtctattagctctcctgtccatttttcagggacacgctccagtaaaagaggccaatatttttgttgccaaaagcacactcagtcaaacaccccatcctttaccaatcagaatatctctgagaacaa

SEQ ID NO: 453966 - DNA, 662 bp, Homo Sapiens; identical to SEQ ID NO: 325315

SEQ ID NO: 453967 - DNA, 499 bp, Homo Sapiens
ttcatcctactgtgtggctcaccacgatgagcttcgcagtgttcctgattcacaccgagaggaaaaagggagtccagtcatctggagtgctgtttggttactggcttctctgctttgtcttgccagctaccaacgctgcccagcaggcctccggagcgggcttccagagcgaccctgtccgccacctgtccacctacctatgcctgtctctggtggtggcacagtttgtgctgtcctgcctggcggatcaaccccccttcttccctgaagacccccagcagtctaacccctgtccagagactggggcagccttcccctccaaagccacgttctggtgggtttctggcctggtctggaggggatacaggaggccactgacaccaaaagacctctggtctcttgggagagaacactcctcagaagaacttgtttctcggcttgaacaggagtggatgaggaacagcagtgcagcccgggagcacaacaaggcaatagcatt

SEQ ID NO: 453968 - DNA, 596 bp, Homo Sapiens; identical to SEQ ID NO: 317042

SEQ ID NO: 453969 - DNA, 466 bp, Homo Sapiens; identical to SEQ ID NO: 325316

SEQ ID NO: 453970 - DNA, 346 bp, Homo Sapiens; identical to SEQ ID NO: 325318

SEQ ID NO: 453971 - DNA, 442 bp, Homo Sapiens; identical to SEQ ID NO: 325319

SEQ ID NO: 453972 - DNA, 713 bp, Homo Sapiens; identical to SEQ ID NO: 325320

SEQ ID NO: 453973 - DNA, 421 bp, Homo Sapiens; identical to SEQ ID NO: 325321

SEQ ID NO: 453974 - DNA, 755 bp, Homo Sapiens; identical to SEQ ID NO: 325322

SEQ ID NO: 453975 - DNA, 418 bp, Homo Sapiens
  misc_feature (377)..(377): n is a, c, g, or t
  misc_feature (406)..(406): n is a, c, g, or t
aaaaacacaataaatgttttatttaaaattgatcacttttaactaacatttgttctttttctaaactcaatactcattctcattaataaatgagctataaagttatcttgatatttttatgggcatgaaatttactatacaaatatgcaacagtcagtattatgatgttctgagcctctttactgctgactacacagattacaaaaacctgggattgcaggaatctatggcttaacagttacctacacaccttccgcactgggaatctagggctgaagtcttgactttgtaatattttctctacaatgtcatctggcatccacccggggggtcatcaactcggcttcagctggaggtttctacaggaatcttgtttncactgggggcatctggctggaggtttttnccgaaggccgta

SEQ ID NO: 453976 - DNA, 687 bp, Homo Sapiens; identical to SEQ ID NO: 325324

SEQ ID NO: 453977 - DNA, 400 bp, Homo Sapiens; identical to SEQ ID NO: 321655

SEQ ID NO: 453978 - DNA, 601 bp, Homo Sapiens; identical to SEQ ID NO: 325325

SEQ ID NO: 453979 - DNA, 554 bp, Homo Sapiens; identical to SEQ ID NO: 325326

SEQ ID NO: 453980 - DNA, 888 bp, Homo Sapiens; identical to SEQ ID NO: 325330

SEQ ID NO: 453981 - DNA, 710 bp, Homo Sapiens; identical to SEQ ID NO: 325331

SEQ ID NO: 453982 - DNA, 710 bp, Homo Sapiens
  misc_feature (87)..(198): n is a, c, g, or t
  misc_feature (214)..(230): n is a, c, g, or t
  misc_feature (662)..(662): n is a, c, g, or t
tcactttcaaaatcaaaaactgctgctgtggaaattgttccgatgctgtcaattataaagccagagccctccggggaaatgaagtannnnnnnnnnnnnnnnnnnnnnnnnnnnnnnnnnnnnnnnnnnnnnnnnnnnnnnnnnnnnnnnnnnnnnnnnnnnnnnnnnnnnnnnnnnnnnnnnnnnnnnnnnnnnnnngagactccatctcagnnnnnnnnnnnnnnnnngagagtaacctcaggtttagtgccttctgcaaaaaataacatagttttgtttttagcatagtaattttaatgcctgtttaccatactagtcttaaatttatggtagtgttttaaagtttcctttataaatacatttatggagttaagcactgaattgatatgttttaaaatgttaaggaatccaaagttcacctggctcctggatataggaaagacaaatcaatggtatgtaaatgactgagccttgagccacatttctcgaaaatagatagaaaatttgctttaatccacaatgaatacccaagggagggccttgcatgttagagggttacttttctaattccacaatggttcaggggaaaaacttaaatctcgaagagagagagaggtggctaccttgtcaaagactgggttggtgtccactgaggtcangaccataacaaaaggcaaatgcgtgcaggagaaagtgtaagattggta

SEQ ID NO: 453983 - DNA, 228 bp, Homo Sapiens; identical to SEQ ID NO: 325332

SEQ ID NO: 453984 - DNA, 748 bp, Homo Sapiens; identical to SEQ ID NO: 325333

SEQ ID NO: 453985 - DNA, 378 bp, Homo Sapiens; identical to SEQ ID NO: 325334

SEQ ID NO: 453986 - DNA, 650 bp, Homo Sapiens; identical to SEQ ID NO: 325335

SEQ ID NO: 453987 - DNA, 356 bp, Homo Sapiens; identical to SEQ ID NO: 325336

SEQ ID NO: 453988 - DNA, 686 bp, Homo Sapiens
tcgtcttgctgcagccttcagcaagtcttccggcgtccctagagaagaagcatccagagggcctttggagttatccatcgacctggatctctccttggctttgttggatctctcattcctggacctccggtcctgtgtatggctgtggcttcggtgcacttttgagtgggagcttcccctagaaggttcaggaaaaggcatctcagttctccttttagccaattcaccagacacatcccattctggtgtcatggggaagtgggactcgagcacgtttgtgttctgtgcatgatgaagttatctcctttgtgttcaatgatgaagcagccctccctgggcaccctggtaagaggatcacagaagtcatactctctttcagctgggatatccagatgtgaaccgtcggaagggtctcctttagacacccgtgtcttgctgtgagaccgagactttccatgggacttccgatgagtcctactctttttactccttccgctgtgatgggcagaggacccggctttactcctctgggccttttcttcttccgtttcttcatgagcgcggtgtgccgcatgacattttccacggtcaggtctgggttaatgcgcctaatgatttccatctctacttcccgagggatcgtagctggcgtgtcctcgtctcgcaggggccactcttcggaggaa

SEQ ID NO: 453989 - DNA, 225 bp, Homo Sapiens; identical to SEQ ID NO: 325337

SEQ ID NO: 453990 - DNA, 729 bp, Homo Sapiens; identical to SEQ ID NO: 325338

SEQ ID NO: 453991 - DNA, 252 bp, Homo Sapiens; identical to SEQ ID NO: 325339

SEQ ID NO: 453992 - DNA, 1031 bp, Homo Sapiens
agcggggtcccaactggcgaggctgctggggttgcagcgggacagttggggcggccccgcaggcccaggtgaacaaaaattgtttgctggcccccaggatactaactagacctttggcctgactcacaggacactaaggctccttttctgaagaagccttttaccagtctcatttaggggatgggaacaacatgtcttcacctagggactttagagcagagcctgtaaacgattatgagggaaatgactctgaagcagaagacttgaatttcagggagactttgccttcatcaagtcaggaaaacacacctagatcaaaggtttttgaaaataaagttaattcagagaaggtaaaactttctcttcggaatttcccacataatgattatgaggatgtttttgaagagccttcagaaagtggcagtgatcccagcatgtggacagccagaggccccttcagaagagacaggtggagcagtgaggatgaggaggctgcagggccatcacaggctctctcccctctactttctggtacgcgcaaaattgtttctgaaggagaactagatcagttggctcagattcggccattaatattcaatttttcatgagcagacagccatcaaggattgtttgaaaatccttgaggaaaaaacagtatctgtatgatatcatgcaggaatttatggctttagaacttaagaatctgcctggtgagttcaactctgggaatcaaccaagcaacagagaaaaaaacagataccgagatattctttctgatgattcaacacgcgttcctcttggaaaaagcaaggactacatcaatgctagttatattagaatagtcaattgtggagaagagtatttttgaatcgctactcaaggaccactgatgagcaccagagatgacttttggcaattggtgttggaaaataattcgaatgttacagccatgatatccagagagatagaaggtggaattatcaaatgctaccattactggccctcttctgtgaagaagtgcattggaattg

SEQ ID NO: 453993 - DNA, 563 bp, Homo Sapiens; identical to SEQ ID NO: 325342

SEQ ID NO: 453994 - DNA, 608 bp, Homo Sapiens; identical to SEQ ID NO: 325343

SEQ ID NO: 453995 - DNA, 222 bp, Homo Sapiens
gtgctggtgcgcatgggcggcctcttcgtgctgctgctgactgtgggtcgctggctggacctgctgggcatccttgtctccctactgggcgagctctggtgtctcgtgggcgtccgcaccctgcttgacctctgccagatacaggattttccatcccagaggcctccagtgtcaacaccaagccagcccctgccctcggcaccccagtcccaaagttcggcc

SEQ ID NO: 453996 - DNA, 291 bp, Homo Sapiens; identical to SEQ ID NO: 325346
  misc_feature (196)..(226): n is a, c, g, or t

SEQ ID NO: 453997 - DNA, 750 bp, Homo Sapiens; identical to SEQ ID NO: 325347

SEQ ID NO: 453998 - DNA, 662 bp, Homo Sapiens; identical to SEQ ID NO: 325349

SEQ ID NO: 453999 - DNA, 790 bp, Homo Sapiens; identical to SEQ ID NO: 325351

SEQ ID NO: 454000 - DNA, 1328 bp, Homo Sapiens; identical to SEQ ID NO: 325352

SEQ ID NO: 454001 - DNA, 806 bp, Homo Sapiens; identical to SEQ ID NO: 325353

SEQ ID NO: 454002 - DNA, 700 bp, Homo Sapiens; identical to SEQ ID NO: 325354

SEQ ID NO: 454003 - DNA, 412 bp, Homo Sapiens; identical to SEQ ID NO: 325355

SEQ ID NO: 454004 - DNA, 328 bp, Homo Sapiens
tttaacaaaacaatgtctacagagcattttgctttgtatgcaaatggagcagtactagaatttttagttccttgttttcttcaatactggaatgtaactttttacaatgccttttactgattattattttttggatgtctcccacccatataggtgagcttctcttacaaggccctgtatttatcaaagaacccagcaacagcattttccctgttggttcagaagataaaaaaataactttgcattgtgaagccaagaggcactccatcacctcattacaggtacagtgcaaagtttgaaaattcaaataaaaaaaactaaacacaca

SEQ ID NO: 454005 - DNA, 482 bp, Homo Sapiens; identical to SEQ ID NO: 325356
  misc_feature (196)..(196): n is a, c, g, or t

SEQ ID NO: 454006 - DNA, 668 bp, Homo Sapiens; identical to SEQ ID NO: 325357

SEQ ID NO: 454007 - DNA, 513 bp, Homo Sapiens; identical to SEQ ID NO: 325358

SEQ ID NO: 454008 - DNA, 429 bp, Homo Sapiens; identical to SEQ ID NO: 325359

SEQ ID NO: 454009 - DNA, 594 bp, Homo Sapiens; identical to SEQ ID NO: 325361

SEQ ID NO: 454010 - DNA, 794 bp, Homo Sapiens; identical to SEQ ID NO: 325362

SEQ ID NO: 454011 - DNA, 656 bp, Homo Sapiens; identical to SEQ ID NO: 325363

SEQ ID NO: 454012 - DNA, 730 bp, Homo Sapiens; identical to SEQ ID NO: 325365

SEQ ID NO: 454013 - DNA, 275 bp, Homo Sapiens; identical to SEQ ID NO: 325366

SEQ ID NO: 454014 - DNA, 388 bp, Homo Sapiens
gtacagcatattaacatttgttttttcttcattttcttgttttaaggtgcatctatcatgctcttccttcagtttcttgggaaattgctgaggttatgttttcccaatctttctttgttgggttaatctgtcagcagcagcagaagatgtactatgacatatattttctgatagttgtattttttcacttttgtatgtattatttccttctttgacctgtggttgcttcttttcacttctttcacgcctttgttgctcttcctctgaagccactggtaaggctttttctgctctcaatgtctgtacattctttctttgtactgctcctttcacagcaggatcttccaaaagggtgctaggcttcaaggaaggatgttttgcaggaggt

SEQ ID NO: 454015 - DNA, 642 bp, Homo Sapiens; identical to SEQ ID NO: 325368

SEQ ID NO: 454016 - DNA, 308 bp, Homo Sapiens; identical to SEQ ID NO: 325369

SEQ ID NO: 454017 - DNA, 854 bp, Homo Sapiens; identical to SEQ ID NO: 325370
  misc_feature (655)..(767): n is a, c, g, or t

SEQ ID NO: 454018 - DNA, 716 bp, Homo Sapiens; identical to SEQ ID NO: 325371

SEQ ID NO: 454019 - DNA, 537 bp, Homo Sapiens; identical to SEQ ID NO: 325372

SEQ ID NO: 454020 - DNA, 649 bp, Homo Sapiens; identical to SEQ ID NO: 325373

SEQ ID NO: 454021 - DNA, 481 bp, Homo Sapiens; identical to SEQ ID NO: 325374

SEQ ID NO: 454022 - DNA, 441 bp, Homo Sapiens; identical to SEQ ID NO: 325375

SEQ ID NO: 454023 - DNA, 1747 bp, Homo Sapiens
  misc_feature (48)..(49): n is a, c, g, or t
  misc_feature (52)..(52): n is a, c, g, or t
  misc_feature (57)..(57): n is a, c, g, or t
  misc_feature (60)..(60): n is a, c, g, or t
  misc_feature (114)..(114): n is a, c, g, or t
  misc_feature (129)..(129): n is a, c, g, or t
  misc_feature (133)..(133): n is a, c, g, or t
gccccaccgtccgtgtgggggaaccatgctccctccaaaacctagggnncgnttganggncccagggcgctggggaactggccagggcgctggactctctttctgggttctcanccagcaccgggaacnccanccccagcccatagtcagggaagtgccgcggccgagccttcatcaacccctagtgagtttcccacagaactgaatcccttttcccaaattcagctgtgcatgagccctttttgtttggtgccctggagcactagtgtagttcaatattctcttcagaaggaaaactccagcagccaccgggctgacatgatgtgtgctgaggccacatgacctgaatggacgggtcatgtgggagagggccctggtgggagctgtgggccacacggctgagttcttccaatacggaagccccgagctggtaggctcacacgctgtggggcagcccagagttgctggaagctttacagggggtgcgtagctaatggcgtcggtttcgctcggtcgctgtggaggggtacccccgctattggggcggctcctcccggcatgctcaggtctcaaagtacttgtagatcgccgtcacatacagcatcacgttctgccagtcgggtcgttcagtccgtaccatttcattaatgtccagtgtggatttgatgccgacactttcagctgcctggaaagccagcatgaagttccttctcttatcctggctgttcagttcttgatatggaatgtgggcagggagatatgtatgcaggagggcacagaaggccagcccatcattccagctgctgctgaagtttgtaatgtcaatattctgatagccttctgttttcttctgacaccacttcagcaaggcgttcctctttgatcctccatattctctggccaatgctgagagagggtctttcctttcttctcttattcggcttcgggtggtgggagtcacagatgccgttggagaagaggacagggaaagctgtggagacgtggttcccatagccatcagagaggctggcgacgctccctcctgtgcagaaatgtcccgtttcatttcttcactacttcgtcgagacactgagagggtcttggcactttccatcgcaggcactcttggcagggaagcaggccggctggctgaagatgttcttaacagatgctcttgaacagggatttccccatagtttggttctcttatctgacagggctgtcaggggtttggatgttgagattggtccacttatggaatgtctctgcataggggacacagctgctgcaggaggggttttcataggacttgggctcaggggcgttcgaggaattgcagctgcagcagggtttggtacttgagatgcactgtcaaaggacttgatgagggtttttactgtaggagttggctctgaggaagtcgaggaccttctactcagtcccattccctgccttaaggctgccaaatctctctcaacggcattcatgtaattgtatacccggcctcgctcctcctcgttgcttgcgtgactttatttcctccaattcttttgtgagtttctcatttgtgtttcttgagcctcatgtaaccggcgctttagatcaccaatctcctcttgggcttcagatttaatgtcatttgcaatgactactgcagtctggagatcagcctgaaactgccgccattccgcagattcttcccgaagttcccctcgtgccgaattcgccccaccccaggcctcgcgtc

SEQ ID NO: 454024 - DNA, 1261 bp, Homo Sapiens
  misc_feature (26)..(26): n is a, c, g, or t
ttggaaccccggaactaaaacccctnccccaaaactgtccaacattaataaggttttttcgccctgtaagggaacggccaggatggaaggagcaagacttggagctcctggtgaaagcccttccccacacttgtcacacttaataaggcttcctcatctgtgtggactgccctgatggataagcagactcgagctccttgtgaagcccttccccacattgctcacatttgtagggtttttcttctgtgtggtctctctgatgaagtagtagctctgagctttgactgaagttcttaccacactgactaccttcgtattgtttctctgcagtgtggattttctcatatggatgaccatctgggctgggtgttaagtattttccccacagttattatggtcacagggtttctcctctgtatgagctctctgctgactacaactgaccaccctgtgatttccatccatgaatgtctttgcagttacagtcaatgggatccaaagattcttttaactggccattctggcaagttgcctcaccatttaacaatggcgaggccagttcttgtccatcagacaccagtttaacttgaaggttctctgaacaactttccccctttatcacttttctctcagtgctttcttccattacaaagagacgtctgctttcctgatgatcctgaggctcattcttacagaacttcactgaagagtcttgtgtgtctatttggcttgagactttcaaaggcaaatatgtttcactttcaatgttttcgaaacaaccactttgaagagtcatcacactgtccctgtttctggaaataggagaagatgcttctccccactgttgacaaggggaaatatctagttcaggctccccatccacttcccctcgatgattcacaatacaatcctgacttccagtaattgtactggccatgccttccaaaactagccaggaggaaagctcatgtaacagatcctgaagtgttttctgctgaagattctccacagaattttcattcaagtctccaagaccaagtttctgtagttgcccagcatcacagctccgcacagcttcctgggagcagagtccaggtgacctcactcctcctcggtgaaggccacagaggcatccttgaatgtaactggttcccggaccctggtcatttcttactcccagaggggatggattcctcccacgtggaaccccacgcctgcaggggccagattccggcctcgtgccgaattcgccacccaggcc

SEQ ID NO: 454025 - DNA, 1021 bp, Homo Sapiens
gccggaggccaagacttccgtctaagggaaaaattttaagggcctggcgtagtcccctgcaaaaaggcttattttaggaggtatatcaacaaaaatttcaacccccattttgctccaataataaaaaaatgttttttaaaactgttactttttaaaccaacgtgaaactaatgaaaattggttgctgctttgagaatcatcttgtttggagaaaaacatcctgtgcttcaccagttgctggcatgctttacagagataaggtctgtagtctatgtccacatcacacagtcgtcgagaggcatgagaaggttcttctgatgagctcgaggctttctgcattatagtttgtgtcgttgcaaaaagaaccaggcgatagtcatttacaagcttctctaagcactgagaacatttcctcagagtagactcctgtaagttcacactttctcctccattgacgcggtctatccagtaaaaagctgacaggctatccaaaatcaaaaggcagagagatgggtgactacaaaacatactttctagtgagtaaagtgtaagaagtaagtgggtgctactactgcagtacaccaaaaaaaatcttcccaggcagtatttgattatttcttcagagctttgggatagtctgtgctcaagaattgtaactagccggagcatatcaaagtggtaatctgtatcaataaataagacttctacttccaggccaccttctgatttgggaagtatacatcgtgctgttaggtgataaagcatttctgtttttcctgttccttctgggccatgaaattcaagaatatcaccatgcacaggtgaatcttcatcagcaaacagatttggttctatttctttcaaggaacttctaccttcaagtcgggcaaggagctcggtcccagactcagccctatggaaggcactacacatcgccccgaaggctcggcgcaggagagactcaactttcccgccaccaacgccattcaccaaccctcgtgccgagatcgccacccaggcc

SEQ ID NO: 454026 - DNA, 794 bp, Homo Sapiens
gcttattcttaccaaatgccaggttctagttttgcaccatcatctactatttatgcaaataattcagtttccaattcaacaaatttcagtggttcacaacaggattatccatcctatacagcctttggccaaaaccagtatgcacagtattattcagcatcaacgtatggagcgtatatgacatcgaataacacagccgatggcacaccctcttcaacctctacttatcagttgcaggaatctctcccaggactgactaaccaaccaggagagttcgataccatgcagagtccctccacacccatcaaagatcttgatgagagaacctgtaggagttctgggtcaaagtccagaggaagaggccggaaaaataatccctccccgcctcctgatagtgacctggagcgtgtgtttgtctgggatttggatgaaaccatcattgtttttcactcactgctcaccgggtcttatgcacagaagtatggcaaggatccccccatggctgtaacccttggactccgcatggaagaaatgatttttaatcttgctgatactcatttgtttcttaatgatttagaggagtgtgatcaagttcatataagatgatgtttcctctgatgataactgggcaggacttaagtacctacagttttgcaactgatggcttccatgcagctgccaagtagtgcaaacctttgttgccaacaggtgtcagacgcaggggtcgactggatgaggaacgttggttttcgtaacaggaagagtacacagactctcttcacccctacaggaac

SEQ ID NO: 454027 - DNA, 1020 bp, Homo Sapiens
  misc_feature (126)..(126): n is a, c, g, or t
  misc_feature (292)..(292): n is a, c, g, or t
gaaaaaaaattgggggccatccctggggggtaataagggggtattttaggtaataatcctttggacccactggatggaaccaataaataaatggaggtttttttggccccattcttctctcccatnccagaggaaaattttttcatttagtacaactcgtttttcctttgatacccttggtttgcaggagaaattggttttggtggtttctactacgtaatccaatatgccttgtgttatttcactgttgccttgaagtttcgtttccaataaaactttctttctctttttnttctgtccttcaatgggaacttcatgcaacaaaatttcatatgacttagctctgtattcccgagaattgagactggcagtattctttggacgaataacagcaacatatgcatcttctatgttttctggatttcccattgctggggcaactagatgtggagatggttcagtctcccacctccgttttccctcgctggagtcgaacttgctcctcctgtttcccgaagggcaactagatgtggagatggttcagtctcccacctccgttttccctcgctggagtcgaacttgctcctcctgtttcccgaaggacaccgagaggtcccacccgtacgggctgccgcgagtgcctctctggccgctacattcaactaaatgggtgggacagtcacctggcgagggggggcagggaccgtcaccgctttctcattcctccttccctcctcccaggcacagcagcccggcccagcttcctgtggcagaaaaaccctcagtcgccaaaagaaagccgtcttgagggttcccccgcgctcccacccgcgccccaaaagctcaggtctctggagtcggagaccctcctgcccacctgctctttactgtccttccctctcctcgcacctcagcaccattcacccctcaccctctcccgaaactacggggtcccaggtcttcaaaggccttagctttccaccccgccctcgtgccgaattcgccacccaggcctcgctc

SEQ ID NO: 454028 - DNA, 714 bp, Homo Sapiens
  misc_feature (19)..(19): n is a, c, g, or t
  misc_feature (53)..(54): n is a, c, g, or t
  misc_feature (433)..(468): n is a, c, g, or t
actaaaaatacaaaacgtnagctgggtgtgttggcaggcacctgtaatccccnnctactcgggaggctgagctgcttcttggcacctctgccctcctgcatttgcgttcgtgggcctaccacttcttccaactaggagatgataccaggtttggaaaatggaaattctaaggagaccaggttcctatagttctccagcattacatccctgtacaagactctctgagcaaggtccagtactctccattcttcctagtgaagttcacagccacatccttgaatgacgtaaagccctgaaacacctgcatggggttctgggactctgctgtccggcaaagagcagccatattttccttcttaagataccccttttgggaaagggcagggtcctcagagggcagaacatacaccaggtgctttccataaatcagtannnnnnnnnnnnnnnnnnnnnnnnnnnnnnnnnnnntctgtgctgcccacacacattttacaaggttgctctgttctggagtttgcaggtccaatcctccataatcatagcctttgcgccactaattgggtgtagcaacctttccgttctccacatatcttcctgggaattgccagcattctgccaaaaacctgtccagcgtctgctcctccccggtccagacacagagagggttctctgctctgggggacagggaggacacagactcgccacgcgcggagc

SEQ ID NO: 454029 - DNA, 916 bp, Homo Sapiens
ttcggcagacgcgtcacaagcgggttctggcaatgtgcgtgacccgcgaagggtgatatccgcctgcatttggccttgccccaaattgcttaagcatctaccaggcgggtatacgacaccgcgaaccgtgggccctggttctacgatgagtgtgaacatattcgcgaacgtaactcacaagtgtttgtggacaattgattgactcggccgcggaatccctgaaggtgtacatattctggaccaatcccggatgttgtgcctggtgttgggctttgcggattgaaggcttagcccgtctccagacctggggctcatggttgggcggccttaagggattcatgggctgctcaaaattcccaagcaacattctcaatccttccccctctcttaggtaacattgctctttaaggtcttcagcagagacccaggggctgtagacagaagacctcgacatatcactaagctatcttcaggcagagatcctacaacctgtctctcttgctattagacgctaagatccttgtctggtcttcccttcatgtcctaggctggagctgggtcccttgcccatcccctctgctcccccatctctacctgcctccaggtcctggggagaaagtaggatctcatctgcccagcccaatgggcaattgcggttcatctcatgcctgctgggttccacagccctcaggtggctcccctcacagagggggaggttggggaaggcttggaaaagggaatagcgtcagaggtaaccacgcttcattaaaaagtccagaaatccagagccaaccaggccagctggtggctgctgaccccaaggcaggaagccaaggggcccaggtcctccctgagtggtgagcggcagcgcccaccccagacaggcctgggccctgggccagggtcagtggaacgc

SEQ ID NO: 454030 - DNA, 1175 bp, Homo Sapiens
ttattttgggggtataggggaacggggagatgcggacaaagcggctttcttttcccaagagattggggtgaggggaaccccttgggggtaagagagtgggggaaaaccagagccccaaggccaccttttggcaatcccagtgggaaggcttagggggtggaacgaaaaggcccgtgtggggatgcccccctcttcccaaagaaaaaggctgccggaaaaggggtggggtttggacaaaacttgtggggtttccgtcctaggtggccaggttcgccagaaaggggcgggtgcccaagggaagggactttaacgcaggtgggggttgaaactgctgctttgttacagttcagtacctaaagaccccaggaggccagggttagttcggtccccaacggaagggcttcagtggacttgaaaaagggcaagggaagggttgtgttccacaaggcaccctgtgcaatgtggagatctgacaagctgttaatatttcgggggactgtgatgcattcctgggatcctgccaggccaagcggtccatcagaatcgagaccccaagcatacgcctggccttggtcatttagcgatagcgtagggagcttctccacaggggagcaggctacaatattttgggcatccagggcaacaacctgctctggtttctttctggatttttcatgacctagctgtcctagatcattacatccacatgtgtacactgttccatcatccagaacaaacacagtatgtgtgagtccacatcctacatctcggacccttttatttataaagaagtcactttttctgggctgtagtacaatttcttcatcaattccacccaaacctagctgcccaaaggatgcatttccccagcacaacatgcttgtaattattttggtcttccagtttcaataaaaaattctcttgtgaaaccccggaaagttggaggtaccctatgtctccacatcaacagaaaatggagttcttatcgggttccttagagaaaagcggacgccactgctgtccagtccagagacagccgtcagcgacccggatggagcgggcggggaagaacgggaggcaagcggggcggagcctcgtgccgaattcgccacccaggcctcgctacttaagggttatatcagggccgtgggcgacaggcaacaagttttttgcgg

SEQ ID NO: 454031 - DNA, 1189 bp, Homo Sapiens
  misc_feature (1092)..(1108): n is a, c, g, or t
ttccatacttgataggtcacaccagggctgtaggggacagcccacgttgataccagtggttacaccgccacgaagtcgacgcgatcaatctcggggaggcgatcccctgaaaaagaggctcgcggtaagttcaatagggttaggcgtcggcgaggaaatagcgcttggtgtggtccacggtgaagcctataggggtagaggtgtttcccatatttccggaggcgcccggtggggtacctgttgggtccaaaataacgggagtttttttccccgaggtaggtacaatttttttatgccccagggcctttggaaggggggaccagcccttgtggggagtaagggttttggcattaggagcgcaagggaacttatgcttccccctttccttagaatttgtggataatcctgttggggctggcaccgggttatgatcgggaatttgacccagaacccatccttgtggcattgggcccccagtggcagcaaactgcaggttgttgcccatcaacggtctggaactgtgggattacttgatactgaatattaggcatcacttccaggtagtcctgtcagaacttgctgtttctgtaagttgggagcggcagccacaacatactgcccaccagagactgtgcgattcttggaagactcactgccattgctgccattggtactgctgccactctgttcctttgaggtaggggtagccccagaggaggaagagatgatctgccagccattggcaccctgtgaaagttgtgtggctgtgaggtcaagctcacctgttccccctgactgactcgggccctgggagttgttgctgttctcattgggtgactcaattctgctgcaagttgctgccagcagagccaaaggggatggctgggactcctgccctcctcctccagtgctgctgctactgcctgtgctgctacttcgagcctgtgaaaaggcaccaccaccattaccattgcccccattattgccaccaactcctttttcaattttcaccacagctgtcatttcatccatggagtgatcttggtcgctcatggtggcagctgagggacaagctcaagggggtcctgtccnnnnnnnnnnnnnnnnnccgggaaaaacgcggacgctgacgaggcaagcgaacccggacccctcgtgccgaattcgccacccaggcctcgctaccttg

SEQ ID NO: 454032 - DNA, 974 bp, Homo Sapiens
  misc_feature (124)..(124): n is a, c, g, or t
atgttcctggggatttctcttgcctcgctttggaccctggtggtttctttccattgacccacatctcctctgacttcaaaaatcatgctcattcagcattttctttctttaatagactggtcancccagaaatagctaactacccattttcctcccgcaattcctagaaaatatttcagtgtccgttcacacacaaactcagcatctgttttcataacaacatgagtagtctcttcagtaattagattagttaaagtgatgtggtgttttctggcaaacttgtacacgagcataaattcttctggggtcaggccagacaccaccatggacattcttttgttgaccctttctgttgaagctgtcaattctggcttctccctgctcacactttcttccattgcattataaccagcagtatcagtagtatgagcagcagctggaccctgggcagattctgcaactttcaattggggaactttcaatgcagaggttgaagatggtatgttgccaacacgagctgactctggggctctgtcttcagaaggatcagattcagggtcatcagagaagaggctgattccagattccaggtaaggggttccctctagatcttgccttggcaagtaagatgtttccgtcaaatcgtgtggcccagactcttccagctgttgctcctccacatcaacaaccttaatgagctcctcttgagatgggtagtttctattctgaagactcccagagcaactgtgcatgtaccacctatcatctaatgatgggcatttagaaggggatgacctttccactcctggttctttatttttactggtagaactatctgcagacacctcaaacttgtcagcagaaaggccttctggattctggcttatagggtattcactacttttctgtgaagttaatactgctttttctgatgtgcctcgtgccgaattcgccacccaggcctcgctacctta

SEQ ID NO: 454033 - DNA, 1068 bp, Homo Sapiens
gctttttcaacccttattccccgggagggggttgggattccgttccagccccttttttaaaggaggagaaggtggcctgtaaaggtggtcattctgaagggtaggatacgcccgggaaaagttcgggtcccaaggcggcgaaaaagtggatttcaccactttcccccagggggcacctggtatgtttgggaagcaatttcgggcgttctttatccgaaaaaacactgctgataagcctttaccaggagctgtggggagggataggcattcacaactgcactggccatttccagggctgactcggttcagctgctgaatctgtctcctccagactagtgcgagtccccgccagcaaggtccaccttcacccctccagcccagtcactttccagacagaaggagaaggtagtttcatctcggagcttcttgaagggcgcctcagccacagcctttgtgaatgcgcatgtgaagtcggccagctctttccagctctgcacaatttgagcctgggcttctgtgtgtagctgcagatccaccaatgcctcttcagcgtctaccctggataccatggaccctatgctggcctctggttgtctctgctgctgcttcttggtctgtttatttgctccctgtttccctcttcttggaggattctgagcactgaagcatttctcctgatccacaatcaccagtgacagagctttccctgctgtctttgctgtgatgtcagttacaaagccctgaagcgtttccttccctttcatagtgctgtccaggcttccctgctttccattgtcgatcatggacacaaatgcctctgcccggagcaacaccagtactgttggctcctccacccagtcctctctgtcctcagacggcccagcccttctcctccaagtgacactgcaaggcacagcctgcgcctcaatcacacagcggcactccatggtctgcagtgctcctaggagctggcccccaccttccatctgtaagagcactggatccagcactacaatgatgtgttttaagcctcgtgccgaattcgccacccaggcctcgctaccttag

SEQ ID NO: 454034 - DNA, 1052 bp, Homo Sapiens
  misc_feature (75)..(75): n is a, c, g, or t
  misc_feature (116)..(116): n is a, c, g, or t
  misc_feature (120)..(120): n is a, c, g, or t
  misc_feature (122)..(122): n is a, c, g, or t
atcctttcggtcctcccaggtagatccagcccggatttaagagttttctggcagtccttgagtccagcgcgaaanatgtgatttttcgccagtcccatctgctgctgtaatttggnttgntntcccaggagcctctgtttgagctctcgtccagtctccagcttctgctgtaagcttcggggcattcattttcaagcatagcatgcttcttctcccaggtcattgagcttgtcagagaggctctcggccttcagcttctgctctttgagagcctgctgcagagcgagaatctcagccttgtgctccttcactgccagctccaccacctggcgagactcggtgatccgctgatcggctctcgccctgctctgtttctcggtgtccagcattctctgcagctctcgaacccgacactcaaactgggatttctcatcacccaggacgctcctccaggcctcccactgccgctctttttctagcagctcatcgtttagggcctccaaatccatgacctgttcctccagcatggtgcacgtggtcttcagagcctccatcgtttgcttctggctggtaagctgcatctctcgttccgtgatctcccggcggagatggtccacttcacttcgcagttgtacaatctcgtcgttggcgccagaagcctcatcgagttgtttggacaagtagaagttttggttgttgagttcagcgttgtcctcggtcagctggtttagctgctcctccaggtctgtgattacagtacagctgttacgaagagcatcaaatttgcgctggatttcatctctatgtgccgtgagtgcctggatctcctcttcagcttctgctgtggtctcttccagctctgtcttcgcctggcgaagctggctctccagggccgcccgtgcagcctgcagggctgtcaactgtgactcgcgctcctgcagggagagctgtagctctgtgagctggcgcttgagctccagtttctgctcctcgtgctctagactgacctcccgccctcgtgccgaattcgccacccaggcctcgctacctta

SEQ ID NO: 454035 - DNA, 1028 bp, Homo Sapiens
gccaggacttggggggttccagtggttctttttccacaggaaaaaaagggtcaacccccgcggagttgccatccctgggggtagtccccttctagggacccatggtttccggagggttttgagataggacggcccgattgctgccccttgggagctgggtttggccccaaacccatgacatcttatattccagagtttccttgagcatgttttcctcctcttgggaaaagttcagcaacactgacacagcttttataagatgaaaagcctcggattcgcgacaagacatgaattttaaaaccacatgtttaaggtactcaaagttgatctcgcgggcatctgtcaggtcagtgttattcgtgacggaaggcgccatgtttgccatctcaggtccaggtttctcccggacttcgaagagctcattatcgggtctgattttcagctccttctgcagagtcttccggagctccagcatccgctgctgcatctgctttatggtcttatttttctccagaagttgctgctccaagtcctgtttctccttctgtagctgtgtgagatccatggccccaacctcaccatttggtgttcttcctgcagttggaagctggaacacagggtcctgcatggccctcgaggtcacgtgcgactcattgactgagagtgcttcggcctgcaatgggccccgcagcctcagcaggtcctcctgctccgcgaccactgcagcctcctccgccttgagggtcctcagggcctccagctcggcctgcagctggtgtatctgcagcagggcagagttgtgacctcgctccagctggagaatctcctgctctttctggagaagcacttcggttttttcccgcagattctgttccttctcgtctattatggctgtcaggttagctgcctgttgctggaactcttccctttgcttccgcacctcctccagggcttgagccatggccacgctcacaatttctctttggctccacctcgtgctggattcgccacccaggcctcgctaccta

SEQ ID NO: 454036 - DNA, 1190 bp, Homo Sapiens
  misc_feature (288)..(302): n is a, c, g, or t
  misc_feature (388)..(397): n is a, c, g, or t
  misc_feature (677)..(705): n is a, c, g, or t
  misc_feature (766)..(793): n is a, c, g, or t
acatgggcggcgctatgtttctgcgggtatgtcgtgtcgtgagcgtgcatatatggcctcgttttatgcggcgtcgtagtgcgcgggcggggaacccgcgggcgggcagtgtactgcgtgggtgcccgcgcggagcgagagtgtggtgaaatgccgcgggcaagcttagaggtcgtcggttgcggtgtcgcgacccacccggcccactgtgtacatgtggctggtctgcgtggctgcgggtttgctctttgggtgcgttctgcctacaagtggtgtggggttcagccnnnnnnnnnnnnnnnttcgagggcaacccgcagaccgcgttcctatggtacaggtcgggaggtggggggggcatcccactggtgtgcgggcatgcataccnnnnnnnnnncttaacaggggcagatgcgcgttcaccgttcccgggtacccattcccagctctcgtaaggggggagggactcgggggctagcccgttgcatgcgtggccgggttttacgatgttctttcttgagggtctcgagtctgggggagaacccgcggagtctcgttttgctccgtcagcccccctgatgatcccgagtagtgcacgttcgtcgagtgggcgagggtttcccacattcatccccctcctggcctgggtgctgtctggtccggcccccccaaccccnnnnnnnnnnnnnnnnnnnnnnnnnnnnncgctcttgaccccggccccgcttttttcccaatacgggtcccgacttcctcgccctggctnnnnnnnnnnnnnnnnnnnnnnnnnnnngggacgacagcgtcctcccgacgggccgcgaggggggagcggcccctcagtcccggcccggctgctggctgcacagtgggtcccggctccgggggtcaggcctcggcggggcctagtcccacaggctaaagccggcactggcgacagccggtccggccgggaaggctggcgggcgctgccatcccggggctgggggtatcggagggggggtgagaggttacgtgaggttgtggtacgtgaggtgactggggggagggtgatggggggtggtccccgggctccgcctctcgccgccgccgccgtctgcgtcccggctgccgcgcacttggcgcaaacttcctcgtgccgaattcgccacccagcctcgctaccttagaacgtgatagtactgccggtc

SEQ ID NO: 454037 - DNA, 819 bp, Homo Sapiens
tggttccacgactgcctgggcttttgccacttgccgctgagcccaggtgaggatcccgagctgggcctcgaaatgacagcagggtttgggcttgggggactgaggcttacagccctgcaggcccagccgggcagcattgtccccactcttgttctggctgagtcccttccgggggcgacgacacgacaggaccaggtggagcagttcctggcccggcacaaggggccaggcctgcagcacgtggggctgtatacgcctaacattgtggaggccactgagggggtggcaactgctggaggccagttcctggctccccctggggcatactaccagcagccaggaaaggagaggcagatccgagctgcagggcacgagcctcatctgcttgctcgacaggggatcctgctagatggtgataaaggcaagtttctgcttcaggtcttcaccaagtccctttttactgaggacactttcttcctggagctgattcagaggcagggggccactggctttggtcagggcaacatcagagctctgtggcagtccgtacaggagcaatctgccaggagccaggaagcctaaggatgcccagggctgggtgcagccagctgtcctgcagctctggggagaccagcacagaactgaggaacatctgcaggaggcccaactagtgaaaggctttgcctccggggggcaggtgtgacttccatttcatcagtgcctgccagaagctgtgtctctcattgggctccaaagaggtgggattttttaaaactaaaacatttcttattacaccacgtgtataataaatactcgcta

SEQ ID NO: 454038 - DNA, 983 bp, Homo Sapiens
ggccacctgggcaccggaaccggacacagagaatttgaaaggtacccgtgatcacgaggactcctggcggtccccgggagcccgggcatgtcaccggggcatcttggctcaaccagaggtcttgaaggcccgtctcaaagctcaagtcaaggtcgaagcacggggtctctggaatccatggggacatgccagaagcaatggcaggtgtcagccaatcagtcaggtaagacctctgaccagacggtcagaaacgttcagcaacaggtagagcataaagctctaaacccccccagtggaaggctacagttcgtggtcccacagcgcaagagcacatggcaagtggcatgctgactcagacagccgggcactgagaaaagtgcgaagccattggtcacagactctacattcccctcatcctgttggccttccatccctgtcctcaaccgtccgcagaacacctcctttccagcaccttagctcctgcctccctcatggacctattcagtcctcaagggtgccctgctaaaggactgggctgaaagctaagaggagaggtggcattcaatgtgtcctgtgtcctcctggggttgattaaggggtcgatgcccaatagagtccttcatcttggcgttcagcccagggtccagctgccaagggaaggcttggcaatcaagggtgatggagataagaatgaaaaggggcaccaccctgtgccaaagctggcatgttgtatatctgagagaggagctgcctattcacagtgtagggttgtcaagctggaggcagggagagaaaagcaagagctttttggttcctcttgaggatagaatctataggaaaatgtaagagggttaaaaataaatttcccatgcatccatacttttttctcttggtagactttcttgtcatctagtttaaatatgaaacatagtgcatgtacgtggttaagacattttagctaggaatgatggtgcgtgcctgtg

SEQ ID NO: 454039 - DNA, 508 bp, Homo Sapiens
ttttgtggcagtgacaatagttttatattaaaagaaaaaatacagttttcatacagcaaaatctgtacaatatcattgttttatttaatataaagatcgctacccaccttccttccatggttcccaccctccacgttattttccctttctgcagcggttgcactacaggtagctactgtgtattatggacaaatgagaaatgaattctttttctggctgtccatctattttatttcaaataaggaaaagtgtatttggattttgtgtaaatacatctagtgatgacattttttcaatgtttttaaaaaccgtgtacagtactacatgtggtagagcgttttctcaaattgtctattgtagcaaaaatgtttttgtcgtaaacgtgttttgtctcctttttttgttgctcttgccacttcgtctcctcgttcctcggcgcctggttccctcctgctcctcccacccccacaaccagtaccaatgaacatagtagagttgtaatgtttac

SEQ ID NO: 454040 - DNA, 967 bp, Homo Sapiens
cctaaccagccccccttgttgggggagggattccgggaagattctgggaactgtgggcaacgatttcctccatggagagcagtagaggggtggtgatggacctgctgcaccgagtgacgcaaggaagggtgccatgctgggactctgctggggcaacgtgggacaagtggccaggtcctgaggtggcataagaggattttcctgattgaggccctcttggccttgggaaaactggctcatcctctgctgtggctgaccatgctgctgcatggaaaaatccccacgtgccatatagctgcccatctgctgcatgtgctgagggtggccctgtgcagggggccccgacggagccggctgcggtggctgcggctgtggctgctgctgctggtagggggctcgtatctggtctggtacctgaacagccctggggccccacatggagctgctgtccacaaaggattgcccatgcctctcattctgcatgccagggtagacacccatctgaccgccaccactgccaccatggggcacctgaggaacgggaggggtgtgatactgcgagtgcggagacgcgagtccgttcccaggggtgttgctcatcattctgttcggctgatccatcagatgcatcttttgttgttcatactgattatagtgatcaaaatgtgtcagctttgtttgattttgattagttgaaggatgatgaagggatggctgtaaaggagcaaagccttggtctattggcatttgctgacccataggatttactggattttccgggtaaccacattctccgaggccttcaagaccttcactgaaaatattcccatcctcgccaaaaagactcatcattcctggatctgccatcttcttccaacacacggctcctccaaaccacagctcaggagcttgcctgtgcgtcaattcactgaggtgtttgcctcgtgtttgaatcgccacccaggcc

SEQ ID NO: 454041 - DNA, 1021 bp, Homo Sapiens
caattttccggaaagcccagttccatggagggttcttctgcatgggtcaagcccttggagcaagagcgctccgcttctggcgggggaggccctcttttcagacgattccctcaaggcctggcttctccctggagggggaagctcaggtgggagcgggcagcgtggcctggccaggtcagggctgtggaggttctgccccaggcaggtcagaggcttggggtcagtggtgtggtcttggtgtttaggggagctgccctctctctgttggggattgctttccatgactgttccagggctccctggcagtaggatggggaccttttcctgtccctcttgaactctgggtcaggcagggaaaactgctggtgaattctggagacctcggctggggggcaggaaccaaggctccagcaggtaggatttattcatctttaagctggaaggagaaagctctcttgcactggtggtatcgttctttttcccactgctgctggggagaactggtggcacagaggccctcacgtcaccacttgggctggggctctgtgcagactctggggaaggcagttctgtcttggaggcctgaggtccggacaggagagcaatgtccagagtgccctcgatcggcttcaggcatgagacagacctaccttccagcttatactcggaggggctcttcctaacaggggactcaggagcaaccaagccaggcttctccgttccactgtccacccggcctgttaaggccttgaggggaacaaaagagacggcactcatctgagctgcatgggtgctgctgacaaaagctcggctctcagaagccggcgggggctcctgctgcccacccgtgggtcggactgggttccctggcaggcattcgtgggagccagctgtcatcttgggcttcagcacagggcagaggttgtcctctttgtcctcaagtgacatttctttcggaggtaatcgatgttggccagcttgctgtctaacttttccctcgtgccgaattcgccacccaggc

SEQ ID NO: 454042 - DNA, 1039 bp, Homo Sapiens
  misc_feature (72)..(72): n is a, c, g, or t
ggcccagaaaggagcttcgggcatttttgtccagttccgtgtgctggccgtcccttgctgccccgtcctggncgtggggcactgctggcttgccgtagtgagggctatggaggacagtcctaaagtgggtgggggtgcagccagtggggccagaggcatgctcatggtgctctttccccagcagcaatcctatgctccccttccaggtcttctcttccttcttttcctcagccagctggctgctggtaagagaggtctggcgagagtgtgtcccagtagctgctgctatggatggaacggagcgggcaggacgtaggctggaggagtctgtcttcccggcatctttacgagatcgctgctgcaggaccttaatcatagcatctttctctatgattttggcatggagatttttaatagtgtattccatgtcctgacaccttctgttggcctgcaccacctcctcctcctcttgccagatgtgggcctccagcgagctctctccgtagctgccattccgtgagtggttgatgatcgtggtgtccctctcagctgctgcagtggctgcggcattcatggcaaagtgtcggatggtgctctcctccaggtacttctgctcccactttgtcatgtcggcctccagggccaggatccgctcctccttctcccgcacaagttccaggagggctggggcattgtattccggcatgttggctggctggccatttccatgtttctgctgggttctcagtgcatccagctctctctccagccaagtccgcagtctccgctccatctgttctcgcttctcacatgcagactgcagctgggtcagggcctgctgcagcttctcaactttctcaacatatgcttgcttctctcgtaactcctcttccagcttgatgaccctggcctgggcgttgctcaaagcctggtccaggatctcgatgtgtctccgatggtcctcacttgcagtccgcactgctgctaactccatttctaatttctcctcgtgccgaaatcgccacccaggcctcgctac

SEQ ID NO: 454043 - DNA, 980 bp, Homo Sapiens
  misc_feature (90)..(144): n is a, c, g, or t
  misc_feature (204)..(204): n is a, c, g, or t
  misc_feature (566)..(595): n is a, c, g, or t
gggggggtcccgaaagggcgtcctgccccgaggaggcgccgtttgtttgctttggcccgggtccccatgggggtgaagcaagcgcaagannnnnnnnnnnnnnnnnnnnnnnnnnnnnnnnnnnnnnnnnnnnnnnnnnnnnnnagggggtaaagccagggcaggccacttttccttcccccccattatcccattttttccctncccacgcccccatggggtaaaagcaggcaggacactttccttccccccccattatcccattattccctcccactccccatggggtaaagcaggcagacactgtcctcccttgtccagacgtggaagcagaggtggagccgtcatacaactggtctagagcagagccaagttcagaggcgtgatgtctctaggcttttctatgagagccttttgtgttataagggtcacctcaacgttaccacgagtaatagataattctgatctgagtcaacccatggctaagagctactccagtggtgcagtctttagaatttacacaatgcttccacatatctataactgaagtatgactgagtttcccnnnnnnnnnnnnnnnnnnnnnnnnnnnnnncaggaactattcagggacatttccgtgtcccatgagtggcagagaagctgtctggtcttgcttttccaatcatggtctgacagaggtgtggggctcacctatgctccccttccaggtcttctcttccttcttttcctcagccagctggctgctggtaagagaggtctggcgagagtgtgtcccagtagctgctgctatggatggaacggagcgggcaggacgtaggctggaggagtctgtcttcccggcatctttacgagatcgctgctgcaggaccttaatcatagcatctttctctatgattttggcatggagatttttaatagtgtattccatgtcctgacaccttctgttggccctcgtgccgaattcgccactcaggcct

SEQ ID NO: 454044 - DNA, 1017 bp, Homo Sapiens
  misc_feature (36)..(36): n is a, c, g, or t
  misc_feature (61)..(61): n is a, c, g, or t
  misc_feature (66)..(66): n is a, c, g, or t
  misc_feature (85)..(86): n is a, c, g, or t
  misc_feature (91)..(91): n is a, c, g, or t
  misc_feature (97)..(98): n is a, c, g, or t
  misc_feature (154)..(154): n is a, c, g, or t
ggagggaaagaagaccccaatggattccatcctcanatgtaaattccctcccacaggtgcncctgnaattcatggtgccgaaacnncaatncccagnncacaaagtaagtgctcaaaaaaagaatgaatggaagattttaaaaatgtacaaacnaaatggctccccccaggggctcggtgtggacagcttcagcctacagaactatgagctatgcttccctcctgggaactctaagccaaggctaagagcaactgaggagagctggcacattctcaaagagaaaaaataccagggctagagggaaatggcagttaacagtcagggatccaggcacagtggcagacagggggttaattctgcagtctcctcctctgtagcaaaagcatctgtttttgtctttgaaaataggaaattgatttagagttcacatgaggtctctttccttggcaagtcctaaggtaccactctagaagcagaggccagggtaggatcaacaagttcccaccatgccctacaaccatatttaattctagagatttcattgccagaagagccaaagagggaactgaggctcagagagtcacaggaggagctgcccttcctgacctctgggagtactggtcttccagcccctccctcttcacatttgctttttcctggcccagggcccaggctactgctgctggtctaccgaccatcttcaccagacaaaacagaggctcagatgacctttgctacgggtcaggggcacagccatggtgctctccaaatagtggggcacagccatgctcagaggcagggccttgcctcagctcagctaaactcattaattccatgcttgccctgaatgcccactgcaagctagggaggcactgtcatcagtgctggaagccaacggtgagcccaggaaatgcttccctcccttttcgagctatgctcttggccagcagggtaggaaagcttgctgtagagtcaaattctgggagaagcctcgtgccgaattcgccacccaggcc

SEQ ID NO: 454045 - DNA, 714 bp, Homo Sapiens
  misc_feature (74)..(138): n is a, c, g, or t
  misc_feature (610)..(610): n is a, c, g, or t
  misc_feature (613)..(613): n is a, c, g, or t
  misc_feature (667)..(667): n is a, c, g, or t
  misc_feature (670)..(670): n is a, c, g, or t
  misc_feature (684)..(684): n is a, c, g, or t
  misc_feature (686)..(686): n is a, c, g, or t
attagctgggcgtggtggtgcatgcctgtagtcccagctactcaggcagtcaaggcgggaggatcgcctgagcnnnnnnnnnnnnnnnnnnnnnnnnnnnnnnnnnnnnnnnnnnnnnnnnnnnnnnnnnnnnnnnnnagatcctatctctaaaaataacatctgtcccatgtattagatagaacatatttattctaaaattattttctatctgaaattcaaacttaactgggcatcctgtctaactacttcgcagccccaactactgaagggttaagggcagaaaaacaagatcaagctccctaccacctaggctctgggacctgcccaccaaggggtctgggatctgcccggggctgtggagctgggacacctgtggcatctgccccctcaagctagcttttgagcccagaagaatatttttacaaacatacaccatctttaaagccaagcaacaagcccaggttttacaagaaatgtattctggctgaagaaagtaaggttggacttgaggtgtgtgtgagctggaattcagccccccatttaaaagccaggcctgctccagaggcccctctggcactgcagcaggtcccgggggcctttcagaacnggnacgtcctccggagcctgttcccatggcgccccttagagggaggagcctgaagcnacncccaggctgccagncngtccgcccacctttcccgtggcagagat

SEQ ID NO: 454046 - DNA, 855 bp, Homo Sapiens
tatttgctcgttccattactgagccatgttgcaccctgttccttatggggttttagtgtgccataagagtcctgtgggaaagtcacatggtgacttgttgtgaataatatgtttgggaaaagatccaaccaggaaataagcgtcctgtgctgactggcggttcctcagagctccacacggggaggaaaccgtgagatttgcttaaccgacttacgccgcagccgcactcgctgagaaagcgctttgtgtgattgggggagcaggcttaatgatcgcttagctggtaagatcatttcaaataaagtgtaattacttgtgcaaaatctgcacacagacattgccaagtgtcagttcatttgcttcatggaaacgtcgtttcaagtaatgtttggtctaaactttctgcatctgtaattggcaccaccttctccggtgaccagctgggggtgagggttttcttgtttccttctgaaagcttccccgcagatgggcgcctgccttaatgccaggaaggtcccgcagagcgtcatcctggccagggggtgcaccttctctagtgagtgaggggagggggcccttcctgaagatgcatcccttcccccgcttcctctctcggaactgccacactaggtccagcctgaaaccatggagcccggctgtcctctgggccagcttcccctgatgccgagggaagcttccatcaccccaggcagctcagggtcacctcctggtcctcaggttctgcaggtgtctgtcccatagctgggttcccagcactcagcgccacctgggctgacgtgatatgtccggacacatcccgggctccagaggtcacaggctgctggtcatcgctgc

SEQ ID NO: 454047 - DNA, 1330 bp, Homo Sapiens
ttctctctccttcttcattggtcatttcccatctccgctctattcattctttctttttcgttctctcctgtggttttttctcctatgctcttttttgtcttcccccttcattttcattttctttgtctgatttatgtcggtgtctgtgatctttggtgcgctctctgtgtcctttctctctctattcgtattttccttttttgcttggctggattttatttgctgtccacggggtcgtcttgtgctcctacttcttttcttgtcttcttcctgctgctgtcgtgcgctcgtcgttcttttctttttctgcgtctctacatagctctatctcttggcttcatgcggcgtgcgtcggttctgtgatccttttctattttgcattgtgctgttttctattgatattagttgtgatttcttaccttaacactttcgcagtttcttacccgcgcttgtctgtttctggccttttatttccacaggcctgcactctctcttctgtcttttttcatctcccactcctcttctctttagttgagcatttactcctattttatctcctcgttgcgacctagcagtcgcttgctcttgttgctttccttctttctcgtctcgtctctgtgtttctgctgaattttttttgtgtggaagatttgctcctgcacctctattccattcgggtcccacctcctcttacaacttcctctctttgtgtttaacgctttgcgcacttgttgggctccgcgggcagtgtttctcgcccgtctttcctttcttgtgtctatcgtcttttctgcgtgcctttcctgctggtgtgcgctttccacccagtcgcactgtgttattcggtgtgctgttgtcaatgttcctttctcacggatggtgtaattgtttgtgggtatcttttcaggggtcttttctcttggcctctatccatcaagcccatgttgcttgacttttttttgttatttgtctttagcttaggagtatgtatcgtgtgtttgtttctttcgctattcttagtgtccatgtgattgtgtcccatgatctccttgatctcttctggtatccactccatgcctctggcctcccaatagtgcttatattcagtttacctgctcaccttgtaacttcagttctaacaagctcaaaataaattatgactttgtagcctacctagtttactctctttgttagagcagaagcaacattctcttttggtctactgctaactaataaggaagtaaaattctcaagctggttttcaaaaatgcagtgcataaatgcatgctataatttatcttgagaatgtatatttaagcttaatttaagc

SEQ ID NO: 454048 - DNA, 918 bp, Homo Sapiens
  misc_feature (13)..(13): n is a, c, g, or t
gcggcctgcttgncagagcaggagggttcccttcgtttttatcttgattctgaggaacgaacattggctgcattcccgacagccggggccaggagcagggatgtaggtttaggataccaggagaccctggggctgatgtggggggcacagagcaggcgccacttctggaaccttccccaccaaaggctgttcaggaccaacgagcatgactgcactggtgaggtctgtgtgtccacctggccagcccgggatgcccaatagctggggatgcgctgtttctgggggagtctgtgaggtgcctctggctgagaccagcgtttgcagtggtggactgtggcgagcagatgcctccctgtgttgcatgggatcatgcaaccccttgaagggctgaagagtacaagaaggcagaggaaggaggaacttgcctctttcctcccacctgcctgcttgggctgggacactggccttctcctgccctgggactgggtccccaccatcagctcccgggtgctgccctcaggcttgcactggagccacaccaccagctttcccggggctccggcttgcaggcggtagctggcaggacttctcagcctccgtcctcatgtgagccaactcctcactattggtctgcttctctgaaggaccccaactcatgggtccacctgaccgtggtccaagtcccatcacactttgcaaagctgactgcagctgctgctcactggcctccctgcctggccccttccatgcaccctcctccagcatccaagaggatcctgtgaaaacccacgtcagaccatggccctctgcaccgcctcctgcaaggcatgcagtggaggaagagtgacctcaagtcactcgtgtgaccacgcggggttgcccccgtcacctcctcgtgccgaattcgccacccaggcc

SEQ ID NO: 454049 - DNA, 1105 bp, Homo Sapiens
  misc_feature (244)..(244): n is a, c, g, or t
aaatgaggagaaattccgggttttcggaattgaataccttgttttaccctgggggcaaccaatctggtttggggaaattccctcccgaattggccaagaaaaagggctttggatttccctcctttaaatcaaccatgggcgttcccctccttcaataaattttttcccacctttattcatttaccatttaaggttctttttttggaaggctttcaaaaactgtaaggaccttctgaccccatgnttgtttgccatggtagggagttgggtgacatctttccattggatgtagataatcgctcataattcttccctcccattttgattggtagtgcaaggctgtggggaagtatcataactgttgctaggtgacggggacattcccgaatgctgcgtctgtgtggaagctgtagctgtagaggaagatgctgggacattgttagtactattcccatatgaacttcctccatagctggaccttcttccaaacttgtcactatgctcttgatcaagacggtccaaagtttccaaggcatggagaatttcatgtttagtcattccagtacgccgaagtcgctgaagcagatctatctgctctatggtaaatctgggttcatctgtataatgagacatggtttccagcaaaaccactggaaaggaactaagcatactttacatgaggcggatcaatatcctttccagagatgatctgcgttatctaccattccaatgcttcttcactgttccattccaccagctgcaaatcacctcacagtttccagaactccacaccggagaccccacctccaggattcaaaccttccgctcatcgtagaggaaaccagaagagttggggggcagtcgacgcctttccaggaccggaccccacgaactgccccaccccacagcccgcgtctgggtcacccactcggaagccccctgcttcctccctcctctcaatccggccgcttacgagacccatccccagcgtccgctcacttcctccccaaaacccctccaaaaaaattgttttaagtgaagagaaagaagtgaggaaagagacttgaggcctcgtgccgaattcgccacccaggcctcgcttctt

SEQ ID NO: 454050 - DNA, 620 bp, Homo Sapiens
gatcttgaggcccaacatgcttgactctgcccaaaagtctccttcctcagcaggatgcagcctattacactcagcacagtatctggcactcttaggttcccggtccatttcaaacctcctatgctttccttggcatcggctacacatcatagtattcattgcctccttgaggtcatcttgcagcttggacagaaactcatttactgaccggctcagctcattctctgccattcgtttcatctcatactcctttcgcttttcagcattgctgacaatgtccccaagctgctcgcaaaaaccttgaaggcctcctcagcccggggatgatgatttttgtcaggatgaaccatcactgccagctgtctataggccttcttcagttcaacatctgatgctgtggcctcaacccccagtacatggaaagggtttagctcatcctcaggaaccccagccatggtcaagagtcgagccacttcctcttcaggctggcagtagcgcccactagctacaggtgcattcccctgcctattaatattctgcttgacccaaggcaactccagccagccccactgaactattcttaccagccgctgccatggcctgctatctctcagcagagc

SEQ ID NO: 454051 - DNA, 786 bp, Homo Sapiens
caggaaagaacaggaccctgaaacttggaatgagaacacctgctcagattcggatgaaactggcaaatcactttaaagctcccttggcagcggaagtaccctgccctcctgtgtctgaggacaccgcacttcctttgcctgaagatcctgtgataacttcatctgggaggatgccttggaaagggttgctcgctcttcagagctggtacagtcaccgcctgtgataacttcatctagggagggtgccttggaaaggggtgattgtgctacatagatgtatacaagttactcaccttgtgaatggcgtgccagctgggacggactgccatgaaagtagtggggatcatgctgctaacctagttggcaggactacttgctgtagtgataggcaagcaactgaagcaggcactgaatgcgttgctcggagcgtggtaaattatctgtctctgggaacgcacgtcccagccggcgcatgtctgttgttgtcccagcgacctcacagccttgacttgtttactggaaggacagcggccaaagatcacactcgagtgtgcctccccccctctctatcctgcgatatcagttaccaaaagaacgaacacaaacacccaagacaggttattatgtgcggatttcaacaattgattctttgatttaatgatcaaagaataggctcacacctacaagtatagtagcgccaactaatttctctcatacaactcacgctacacacagattacgcctacgatgttatataatatctatacaagttacatcagtcacaat

SEQ ID NO: 454052 - DNA, 1271 bp, Homo Sapiens
  misc_feature (70)..(70): n is a, c, g, or t
  misc_feature (100)..(100): n is a, c, g, or t
  misc_feature (125)..(126): n is a, c, g, or t
ggcgctttctgtgggcttctaatattcacaggcacatatctctgtacagcgggcgcggacagctatgcangtggccccggcgtccgggcggtggctatcntctccggcgtcgcgccccgtcctgnncagcccccattatatggcccggcgggctttcctcatgggcgcgtgtaccgtctcgcctcagcgcgtgcgctgcccctgcgtgtcttgcggcggacactagtgccgcgcgcacgcccagacgcgcggctagggcgtcttgaggctgcatcacgtggcgttgggtcccgcgcggcggcagcggcgtcgccggggggtcgccggtcgcgtgtggccgacctaagctcgtagaagcgtaaggcgcttcgggaggccgctgattcgcctcgcgctctcactcgcggggggcccactgagggaaaatccgccggcgccctaggccgcccgaacgggcataagagggccggcgggggtactcaaaggacggccgattctccccctggactactttagggggaggcccatgtggggaagcgagggggccccgctcgcccccgatggagctccaggtcgttccgcgttgcgcggggagcatagggggcggtgggcggcggggcccaccggtgtgtccgggggcactccgatcgccgggtgcggcctgcgcccccctgcggggggggatttgtttgttgtcgcggtgctccttcctatttcccacttgtgcataccacagcctcgtgtggaagggggttgccttgggctggccgacaaggggtgggcggacctaggagggggaggtccagagggtggcccgtttgagtcgggccgccagggctgcctgtccttaggctggtggccttccacgcataggcgctaacccccatccctacaagcctggccccccaggctctgggagcataagtgccccagccaggaggtggaggccaccccggaagcttccggctgtcccgcccacaccatgcacggtgggcccgggggcgtcggctgctgtgaggctctggagactaaccagcaccctccctgcaccagcccacccgccagcccccagccccacactctgagagtctgggagttgccgagaagttaaaatgacccaaagaccttcctagaaaccaaaagtgcaccaaataaagtagcaatgcctcttcctttgtcaccgactacagaagcacatcattctcccaggtttttgctctcatccaagttaagagtaaggccaccctcgtgccgaattcgccacccaggcc

SEQ ID NO: 454053 - DNA, 539 bp, Homo Sapiens
ttcgttcccgctcttccaccatcagtgtgtttctgctccaccagaactaactggtcctctgtaaaaccgccgatggtaaagagtgttatcgtctccatcatccattagtggtactgatgtgtcgaaaaaatgctgggatctttcctctcgagttcttcatgcctgagtgatcctctttgggtagagtatttcaaaggcaagtttccttttcgcctgcctgtcaatccaagggtggggtctgtttaaatgcttgtcatgaaggctggccaattctgttcatcttctgcgttaatccggccaacatcatactgaatttcatccactccatccacccacttaggaggtggccgttttgtcacaccaatcgctgcttctggattaagctgatgcctgacaccagtgccatacggtcatcagcaagctcgtccagctcttgctcggctaacagcccttcctttcgtggacggcctggtcctccactgccagcaggctgccggcctgcaggaagacaccagcgcctgcctccccgccttctctcc

SEQ ID NO: 454054 - DNA, 418 bp, Homo Sapiens
cgttaagaattttcagcaactatattcaagtgtttgatttttaaattctttctttctttttaataagaaagatgacctaaaaatcagtggtatttgtttgtcctcagaagccgtagttgaagaaagatattagagtatacacagaactggagccatacattgtgctaattttttacattaagtacagaagtctgagcacagcatgaatgcttctgcctgacaggaccacaaagcagcagaagttagggataaatggagatagccatgagtagaactgctgtagggcttcaggaggctacgcagacctgatcaactgcaaagtttccaaagtaaaagattaaaaactttcagacggttcttacctctacccgtgtttcacaaatagcctgaggatccaactatttttaaagcaaattgg

SEQ ID NO: 454055 - DNA, 1100 bp, Homo Sapiens
cctggtttagccaagaggccggcagggtttagcagagttttggaaacaggggttaacccaattttgcattcccacggggggttcaaatcggtaggtggtgggccacaaacggtattttaactgtataaacccatttggtgtttggaacatacgttctggtcttgcaaaattaaccatattcaaagatccaaaaagcccccgggttttccttcagacccttgatataatatcaagagttgggacattgggtctggatattcccacaattcttccaggcaagacttcacggtaatatcttgccccaatagataagaaggtacaagattctgaagacaccacccatccttctgttttctgatggtttttttctctttgtcatttatatcagacactggaataagacgaccaatgcataagggacgatttccataaggatctcgtactgcataaataacatctctgtgcattataagcagggagtatgctgtgggtgcttccttcatcaagtttttaatcctggctacccagtctggggtgtcatcttgttcctgaggaggggtatacgccagtaactgggtaatcatttcactatcagaacttgtagacagaccaataccatgacgcagaagctttttccttaatcgagcagcatttaccaattcgccattatgtgccacagctatcttcccatgaagtgtttcaacaacgaagggctgacaattttctagttcacattttcctgtggtggcatacctggtgtgtccaattccaagatttgaaacatataattttttcaaattgtcttcagtaaagacgtgatttacaagacccattcccttgtgtgatttgaatgttggcaccgaactcccatcactagtcacaataccagcactctcctgaccccggtgctgcagccccacgagtcccagagtgatcacatgcggtacatccagctgcgtgggccactctcctgaggcgatgcacccgaacacgccacattcctctcggatccccaactcctccagctccatgtcgccgccgaaagcacgtggaaggacctgccgctgcagccaaggtgtaagcaccaaccagctgccagc

SEQ ID NO: 454056 - DNA, 1034 bp, Homo Sapiens
  misc_feature (78)..(205): n is a, c, g, or t
gaggaataatgttaggctatttatttgagatactattattatgattattattttagagactgggtctgactctgtcannnnnnnnnnnnnnnnnnnnnnnnnnnnnnnnnnnnnnnnnnnnnnnnnnnnnnnnnnnnnnnnnnnnnnnnnnnnnnnnnnnnnnnnnnnnnnnnnnnnnnnnnnnnnnnnnnnnnnnnnnnnnnnnaatgtaagaatttattgctatcaacattcttcttagaactgcttttgctttcgttgcatcccctaggttttagtatgttatatttccattctcttttgtctcaagatacgtttctcttttgatttcttctcaaccaatctattggttgttcaggagcaggttgtttaatttccacatctttgtgatttttccctgaattccctctgttactgatttctagtttttttaccattgtggttggaaataatacttgttatgatttcagttataaatttgttaagacttgttttgtggcctaacatctgatctattctggagaatgttacatatgcaatggagaagaatgtgtattctgctactgttgtatggaaaattgggcccatttggtcctaagtgtagttcaagcctagtatttccttattacttttctgtctagttgatgtatccattgttgaaaatgggatattgaggtcccctactattcttatattgctatctattttcccccttcatgtctattaaaatttggtttatacctttaggtgctctgatgttgagtgcatatgtatttataattgttatgtcctcttgatggcttgacccatttatcatcaaataatggcctttttttgtttcgcgtgacagttttttagactttattttgtctaagtacagccaacctctggctctttcttggggtactgtgtaccatgggaaaatcctttttcaattccttcccactttccaaccctggaatggggttccttaaaaagctaaaaatgaattctccttgttgggccagccatatataggtttgggaaccttaaga

SEQ ID NO: 454057 - DNA, 1028 bp, Homo Sapiens
  misc_feature (88)..(88): n is a, c, g, or t
  misc_feature (103)..(103): n is a, c, g, or t
  misc_feature (181)..(181): n is a, c, g, or t
accccattcccttttgcagtgccggtcagccggggattcttgccagcccctttctccagtggcttggggcattcccactgcctccttnttcctttggctttgntgctccctccagctctcaaatggcctgccgtaccgagcccagcaccccttggcacaggcgacatagccttaccacttncctggtgtatctctacccagtgactgggagaggggtccctgtgacctcctaactcccactgcagctcctctggcttggccactcttttcagatcattctctgacagcacctcagcaccctgaaatccacagagttcagttggaaggtcatcatgaatgagaatcagcagccgctgaacaaggggaggatctcctgagtcctgaagttggctcaaggcaggaatgagtgctggaggcagtggaggtgcctgacgaaggtccagcaggacggacagccccatgtgtctgtagatcagggcctgagcagtgacgtgggaggtaatgaagatttgttttcaagcgtgtctcgggaggttgtgtgggctcctcaggagggcacggtgggtttaatggtcagcagagctcgcccactctggtccacccctcccgtcaggatgaggaatccagatgccatcaagtcccaagctacatcagggtgatcagagagcggagactgcaagggcctcttctggaatgttgtccccttttccttcctgcacagtctccagcggaggtgttggagtgtcagacagggggccttctgggcctgtgtgtcctgccatacacagcaggcctggcccctccagctctctctctccggccccctcttctgtaggcccacaggcttcagagagctgaggctctttctcgcctgctgttttgagctcttttggctcagattctggcttccctgagccttcatattccctccttaacccaggtggcattctggaagcttgtgctcacttggtgagggcagattgccaagggcttcttgggatggaaagggggatctgggtaccgagctc

SEQ ID NO: 454058 - DNA, 910 bp, Homo Sapiens
ggtgtgggaccagccggcagggcccagcccgaccgtgctcatgtgcagccacagggtgccaagaaagaaccccagctgaaaccgccccaagaagccagccaaaggagatggacgaagtgaagctgggcccggagcactgtcgggttcgggggcactgggagaccaggcctgagtttgtacactgctctgcctattccccaggaagataaggcttttcaaagctagataccattaagaggagcataagtaaactcgaggagctaatagcgaaggccagcggggaaggggcccttgggtaaatagggctcgaattggagcctcaagctggcccaacgctatgagcacctattgggatgagggcgcgggcaatgtctttttcctgcctcctgaactgcgaggtctcgttttccgacgctccgctgcagcgacatggtctctagccagtctaggatttgcagcggcagtcagggccgggagctggaaacgaggtctcctgcctcccaggcaggtctgggcttccattccttaggaagagctcaaatgtacacatgtgaaacattcactaaacccgaagatgtctgcacacgacagctctattcatactcctcacccaacaaattccactctcctcaagaaagcctaggggtttgtgggaggtgggtctggcggcagaaggaaagcgaggtcacggagaccacatccctgaatgatgcctggctcgactcaaacgcaacacgcgtgaatgctagggcaggctgctcctgcgcggccctcctccacggaatgccagggagggagcgcaaagccaccagcgcggcggagctggtgcgcctccggcccgcctctccggtaacgggtcgcgccgcactgagtccttgcagcaaacctgccgaatcccgcccgtggaccc

SEQ ID NO: 454059 - DNA, 1103 bp, Homo Sapiens
  misc_feature (21)..(21): n is a, c, g, or t
  misc_feature (28)..(28): n is a, c, g, or t
  misc_feature (40)..(40): n is a, c, g, or t
  misc_feature (49)..(49): n is a, c, g, or t
ccaacctcaactaaaaacaantccccgnccaacaaaaatnaaaactgcnccttccctgaaaaaaatcctgggtttggtgtgtgtaaaaacacagttcccttaagaactcaaaagaaaaccctgaaccaaaagcttccagcatttgaaccttccccccgctccttcaacaatctttaatagacttcgaagtgactggaaacccaccagcttctatcccttctccctgaaaaacattgcccacttttcttcttgctatgggctgtggagctgaagtgttctggaggtaccgtgttttggaggcccgggacccatttgttcgagggggagggggaggggcggagtcttttcaggcagtatttccaccttagctcctctgagcacccatccaggcttggccctgaagcaggtctgtgtcctcacaggatggtgcagaagacactgcggttgctgtggtaaccaccttccacccgggctgtgatcctcgttgccatggctgtcaccttctgcccaattgtgggctgccgagggacgtctgagagaattttcaaggtggggccgtgctggtgggttcaccaggcgccacgtatcagactttttcttgaagaccaggaacttgttgttttgcatgatgcattctcggttgtttgagatctgctgaaagatggtcttactggttttgccctggaagatgatgttttcctgcaccagggccttggcacaggccccgcacggcgatgccgtaggcccggaacgagtggatccggttctttattactttagtgtcggacctgggcagcagctgcagcccgctgccccggttgccaatgatatcgttttcaatgacgatggtgctgtcgcccttggtgataatgccgtggcctctgttgtcatagataccattgccccggagctccactttgcactgggcctcaaccttgaccccactttgccggttgcaggagatgctgttgttggccactcgggtgggttggctgctctgggccacagtaatgcctctgtccccattcgcgtggatcacattggtgatgacatgcagtgcctcgctgctccctcgtgccgaattcgccacccaggcctcgctt

SEQ ID NO: 454060 - DNA, 928 bp, Homo Sapiens
ggccgagcggtcttttgtctggaccatcggggtgttccccgaaggattcccggtgcgtatctcccgaagaaccccttgttacgaaacgggaagggcctctcctgcctcctttcctcaatcaagttacgtacccactgtgctgaagaccaacccgggggggaaccggccccaaagtttatctggaagtatgtaagggtatgccggcagaggaccttggggggcccactagacggcgcggggttagggctcaacgggttagaagtgacgttgtgccagtcccccggatcggcctcgcatccggtcccccgtcagcagccccccactggccccgtcactcccagatttgtcccctggcacgcgccaaggttcccggccgccgcccaagtcaaaggccagtggaaattcctgcacaggttgggtatacatagctgcccccgcttgccactactgggggctcctcacccgcctgaaatgatagggtccttggagttgaggcggtctcggaagcttcctcagcagcagtgctcccagccacctgcctcaccgctggatgaggagacttgcatctcttggggggcttcctccttgacatccccgggcactggtgccagcgcatgcccttggaataggcaatgacagggtttggggtgcaccccagggccagctcagcagcatgcacatcatgccccgtggcggctcagggcagctgcaggtcattgcacaccttggcagcagtgggggcaggtaaagcgggtggagggcactccagtccggcccagggagctgtgggagcccaccacacgtgggcactcttggtgcttccagcagctttctcagggtggtgaaggtctgggcacagtccccgcatcggtgcactccagctctgtgcagggcacagtcccagctgggctctcagccagctggggcc

SEQ ID NO: 454061 - DNA, 1151 bp, Homo Sapiens
  misc_feature (385)..(420): n is a, c, g, or t
gtagatgggcgagagggccagaacgcaaggtgtttccctcgatttttttcttggtaacaggtcacagttttagagcctccctggtgccacccccctatccccagtaaggacaagtcctgctcagaagctacacgagtcagctcctgtccaacttctacgcactaattggtagcttttctggttcacagggtttcaaacccctcatatgccaaagaaagtcattagagttctctagaaagaaatatgtacaattgctaaagggaccgtcctgggtatcgtctacaagttattccagttagcttggtgtcaatgttttgcctatggctgttatttggttcaatggcagaataaggcgacgctttgaacaatttgcaattgaattagnnnnnnnnnnnnnnnnnnnnnnnnnnnnnnnnnnnncgtcgggcacgtgactccaaaaagttaccaaaccaaagccacagggagctttagctgggagggcaggggttctaaataaataaacatctttacagataaaacacttcgattgcagaaatatcactgaggttctttgagaaggccgtgcagaggtttgcatgctagaagataactttgtttgaggatttctctgcagactgcctgccactccggagacgagggaactccagagtctatttgggaagacttggatttgcgagcggtacatgcagggaatgtttaggcagaagcagggtccttgttgacaagctgctctgtttcccgttgtatttgcatttggctcgactgggaacgctggaggtctggatggcctctctctgcctcgtcgtccccggctagttcttacagacagacttcacagagctctccaccagcctttttagagagcaaggctgtcttgccaagatccgtcgagcgaccggctttccttctgtctcaaggctgatttgaaagaaggacagccccgtgtgtcctcagacttgctgtccctcattccaaccagacttgatgcttgtgctgggggagcgcaggctggccatggaggagctccgcacgtgcttcccggcccccctgccctcccctgctcgggcctggctcacccgaggggaattgggtttcgagagagtggagtcagcgactggactctgtcagaaccacagctttgtctggac

SEQ ID NO: 454062 - DNA, 925 bp, Homo Sapiens
ttttaaggggggtggttgttaaaaggaagggcagaattgtgctggcagttgctttcacaccaggatgctgtcaaaggccaagataaggtcttagggatgtgccgttcctgccagcgatccttttcaatttctgaatctggccccacaggcaatctaaatactcttcttgtggatgtggtttatcagcagtccatacctgtaacatgggtacatgagtcttttggcgtcttttaagatagctttcagtgttggcaaagatgcggtccatctctgcatctttcttttcgtacaactcctttccaacccagggcaaaagatgacagaaagtgcatacacataccaatctcgtcgcacctgaggtacatcttctttcctgagttacgcgttaccaaaattttcaaacatagcaaccattgatggggcggcaatcacagtgacaattcacaagatcagataaaaaacggaccaaatacacggcttcattataattgtttgctttcaatgattctttaagttgacgaatcatggcttctacaaattctccaccataaattgtaattcctggcattcagtagtccaactaatgttgtataaattgtcagcttctcaggtaataggcgtgcaactgtacaaagaagccttaagatcttgctcttgtagttaggaagatcagcttccaaaacaccagccaagccttctaggttgctctccaaagagcaggcactcttttctcctactttacatattaaagattccaaatgatcttcagtttcatttgcatcagaggtctttctccttttgtgaggctgcccaccgtcgttctcgtcgctgtgccgccgtcgcgacatgctgccctccggtgcgccgcggaaccgagaggccaggcggcctcgtgcggaattcgccacccaggctcgctcctaga

SEQ ID NO: 454063 - DNA, 992 bp, Homo Sapiens
  misc_feature (80)..(89): n is a, c, g, or t
  misc_feature (231)..(451): n is a, c, g, or t
  misc_feature (463)..(595): n is a, c, g, or t
ttcggtgagagaaacagggggtggtcagagaaagccgggtatagggcgctaggccccaattcgaatggccacttttgttnnnnnnnnnnaaacaaaagaagccctcggagcccgcgctatatatacagatcggggggtatggattaaggcgggggaggacagggaagggcagttttaccaccggtcccccccaggggtggaagtgccctaggggcatttgtggctccgcgnnnnnnnnnnnnnnnnnnnnnnnnnnnnnnnnnnnnnnnnnnnnnnnnnnnnnnnnnnnnnnnnnnnnnnnnnnnnnnnnnnnnnnnnnnnnnnnnnnnnnnnnnnnnnnnnnnnnnnnnnnnnnnnnnnnnnnnnnnnnnnnnnnnnnnnnnnnnnnnnnnnnnnnnnnnnnnnnnnnnnnnnnnnnnnnnnnnnnnnnnnnnnnnnnnnnnnnnnnnnnctccttttatcnnnnnnnnnnnnnnnnnnnnnnnnnnnnnnnnnnnnnnnnnnnnnnnnnnnnnnnnnnnnnnnnnnnnnnnnnnnnnnnnnnnnnnnnnnnnnnnnnnnnnnnnnnnnnnnnnnnnnnnnnnnnnnnnnnnnnatatggacgtaccttttgggggacaccattcaccccaccatgctgcctctgcacaggagtcagctcccaggaaccccaggtttctttgagtgaagggaggcggtagttgggacactgcctccgtgggccaaggaagagcaggatcacagcagtctccccatgccagaccctcactccgaccccacagcaggagggggcaaggttcctgggtccccacagcccagccccctctccccctggctgccgcccatgggcgtttgaccaacgctggcctgtggctcaggggcaggacaggcgtggcctcacccaccctcccactgggctccaggggagatactggcaggttgcagtccccaactagctgggaccctcgtgccgaattcgccacccaggcctc

SEQ ID NO: 454064 - DNA, 736 bp, Homo Sapiens
  misc_feature (492)..(655): n is a, c, g, or t
ctcggtatgcttgggattctctgggttaaaataatactcttgtgatagtgacccgtggattcttgtatttgatcaaatgttttcaaactgacatcccttgatgggtttctccaggtgtccaaatccgtgcatcaagtctttttggctttagaacgttactttgggatttttttcaacagcatcccttggggagtctaaagaatgtatctctcatcttgtagaggtattaagtgattcgatttatttggtagattaaatgggcaggcattgtcaaatgtggcgatactgcatgggagggcactgtcaagtgaggtgacattagatctcatctcagttatatttatgggtatgttgttgatatgcgtgttccaaaaattgcatacatttatacaaatttaatatgatttgtaattttgatagttatgctaaatatttgctaaagttatatttgtataaacatgtcacgaatggctgggcaccgtcactcatgcnnnnnnnnnnnnnnnnnnnnnnnnnnnnnnnnnnnnnnnnnnnnnnnnnnnnnnnnnnnnnnnnnnnnnnnnnnnnnnnnnnnnnnnnnnnnnnnnnnnnnnnnnnnnnnnnnnnnnnnnnnnnnnnnnnnnnnnnnnnnnnnnnnnnnnnnnnnnnnnnnnnnctgcttgacccaggattcggaggttgtatgaccgagatcatccactcactcccgcctgggtgacaaaggtagatctatccc

SEQ ID NO: 454065 - DNA, 851 bp, Homo Sapiens
  misc_feature (115)..(126): n is a, c, g, or t
  misc_feature (251)..(251): n is a, c, g, or t
  misc_feature (645)..(667): n is a, c, g, or t
tctttttaagaaacaatacccccttaaaaaaccaaggggccctaaggtttcttgccaaatttttggaaaagccccaggaccccctggaaaaatttttggagggctaggttttccnnnnnnnnnnnngggttggtaaaattttcccttatttttaaaattaagggtttccagtaccttctttttacaaaattgtttggggcaatctgtttttttgttccttgtaagggaccggaaaaaaccaacccattaantgccccaacacacacacatacttccctcctatcttctttcccaaacagcttctacaatttcttttttgaaatatgcatgtcttttaagagcatttctctctagaaaagacagtgttatataaaaagttaaatacctgccttttgagaaaaaaatacatttaaacaattctaccatattcctaggtcagagaattgctcactctcttaaatacggtgctactgactgtacagaagaactgattaagacatacactttaagtgatctgcgccaaggtggcctcaatgaccgcaaatgagtgtgctttgacaaagagcagttaaaacggtttgttaaagggatcagcccctttgttaacagttgattgtcaagaaaaaaatgaaataaatatacatnnnnnnnnnnnnnnnnnnnnnnngacattgcttacctcttgtaatccttgtatcattttttaattaggccagcaaatcaaaatgcctttcccactccactcggcaaacaagcctgtgcctcattttacttaaacaccaaatgatcaagaaggaagaaaccaaataacacatctcagccagcctcgtgccgaattcgccacccaggcc

SEQ ID NO: 454066 - DNA, 767 bp, Homo Sapiens
gttataaggtcccgccagcaaccgcgcgttgggattcgtggtgttgctggagacccgtatggtgtctgcagtcagcgaccctccaacttcaactactggatcaaccatgtgtgagtgcatctccatccatgtgggccaggccggagtgcagatgggcaatgcctgctgggagctgtactgcctggagcacgacatccagcccagtggcaccatgcccagccacaaggccctggggagcagtgataactccttcaacaccttcttcagggagacccagcctggcaggcatgtgtcctgggctgtctgtggacctggagcctgctgtcataggttggcatcaactaccagtcccccacagtggtgcccgggggtgctgtagccaaggtgcagcgggcagtctgcgtgctaaacaataccacagccatcactgaggcctgggcccgcctcaaccaaaagtttgacctgatgtatgccaagcgggcatttatgcactgttatgtggacaggggcatggaggaacggtgagctctcttgggcctgagaggacctggcttgcctggacgaagggattatgaacgtagggcacagaaatctttggacagcgaggcatgagcatgaggaggttctaagggggtccttggcacctggtaacacctgggtctctcgcaccacagtcgtgtgtgtatctccattccactgttccctgaccccctacaaataccatggatattgcaagcgatgtggaactctgtgggaattctgcccag

SEQ ID NO: 454067 - DNA, 213 bp, Homo Sapiens
gaggcctgggtggcgaattcggcacgaggatgaaaagcactgcttcaagaggaaagagcctccttatctgtccccaggtcctttaaccacatgggctcactgaagattttctaagttcaggggcaaggagcatatcagctgcctggtggaggaaattcagtctcaccactgagatggtttcttttttggagacagagtcttgctctgtcaccc

SEQ ID NO: 454068 - DNA, 1016 bp, Homo Sapiens
atttaagaatgtttttttccccttttacttttccgaaaggaaggaggagcccggatcttccaatggcccaccgggaaggttgccagcaaagccacccccaacaacccagattcaagttcaggagaggacgggcctccctcattagttaccactggctccggcatgttcagaggaagcttattctggtaattccaagcaatgatccatgagaagtacaaggtttctcactgactttctagaggggccccaggagaaacttctgccttcccccggcccccaaaacatgcactcaattgctctcatgcagccaacatttgtggagctcccgttctgccagaggtcagagcatcaactagatcctggccctgtctggccactgaggatagggcctcaggctgtgaaagtccaatgcactcacctgtgttcctggcaacacctgcacctgagtgcagccccagcccaggaatggcagtggaaagaatctgggctctagtttcctgcctatctggcctcctcccagagcccagctctcagggaagccgcagccccaagggtgagcatgtgggacaggcttaggaaatccccagccttaaggccttgcatccaggggagcagagctcacccccagcctctttcctcacttccttctggagacccacaacctgctctgtatcatcagaatggcagcttgaggccccttggggccctccctcagttcggataggagtcaggtgtctcctccttcattctatactgcctgcctgagaaatctgccatcatctataattcacccaggtcttgtcttaggcacaaaggaagggaatgctttttcttctcactaggccaaaagtcaaaacacttcatcctggcacttgaggggtgcccagcatctcctggaacacagtatttgtgcctagtacctctgccttgctctaggagcccaaacgtcctgtccaggtttcccagagtgctcactagccctcctcgtgccgaattcgccacccaggcctcgctac

SEQ ID NO: 454069 - DNA, 765 bp, Homo Sapiens
  misc_feature (388)..(422): n is a, c, g, or t
ttaatactcccattagggggttatgattataaattttccatgtccatttttgggtattcagggattataaatttttaaaaaaaggctattcatgactgatatgacccccgtaaaattagctaaaaaaaagatatgaccccataaattagctacaaactgttaagtacagcatataaatgggtaaagtaaagttgtcccaaagcaaagttccaggactcagaaagctttggttgagatcagagattgagtcttacagatttcacaatgctaacagttaatggcatatcttatcttgattgcctcccctagaaatactaactattaaagttggaaagagcaaaatagtttttccttagcacatgagataacccagagatctttctgactnnnnnnnnnnnnnnnnnnnnnnnnnnnnnnnnnnngccctgagtgctaaaacaagcaaactgattacaaaacaggcaaaaccccataccctctattttcaagtaaatttgtattcactggctgcagtttaaagggaaaaaacaacaaatttcaaagtcatggatttacaggaaggacttgacacactgactctagggcaggttaggtatatttcacaaggaggtccaggctgtggtagagatttggtggtcagtcctgaccagaccttagagggtacttgtgagacaccacaaaatcagggggaatggaagcctcttaaaataattatttgaagaaaagcccataattccccatacttccacagaagctaaaggcacc

SEQ ID NO: 454070 - DNA, 1065 bp, Homo Sapiens
  misc_feature (353)..(353): n is a, c, g, or t
caaaaccacaaacccaaaatggggaaccaatataccccagggtgggaagggggtttaaaaaaaagatccaaaaggtaaggttaatttttaggaaatggggatctattcaaagcttaagggattttataaggcagcccactgttccccttccagttttccaaggggcccagccccctttcctggttatttaattagggctgtattccaaatctcataatggaggaaaaaaagagaaggcttggcttgtctccctgggagagcattaaccttgcggtgatctgattcattcagcaaggtctttcaaggaaaagtttcaactttccaagactgaccacagtagaggtctgagaccntgagtaccctccaagaatgtctttggacatctttaacagaactaggactctaatggtgccgaagtggctatgtaggcaccagcattgccctatgtcagaaatggaaaccccatcagctttttatgcagaggggagttgcatttggcttttgaagacaatagccttagctcgttcctaatctcttctcttgcctgattcagactctctcatccactattgtgtacttactgtgtcaccgtgaatcattttttaccctttcaaaagtgtaagaagctttctctccttaaataggctatcagctatctggggcagagaagatgggactttaatggggccttcctatgtttcatagagggtgccaagtttgaaaagaaaaatggccctaccactaatctctgtagcagaagaaggagaacagcctcccattactgcagtgaaaggtggggatgagatgagagggcaagaaaacaatggctaaatctcactgtagaaagggaggcttttcaccttggtcagcactgctaagattgttagaacagtcagagacacccttgtggcatcaggccgttaggatctgcaggtaagacttgagctccaccttagccttaggtcccaaggagtagggaaccagctctctgttgtctgacctcctcttccactcccatcagcaggtcctctgtggctccctcgtgccgaattcgccacccaggcc

SEQ ID NO: 454071 - DNA, 436 bp, Homo Sapiens
gtcttacaggctttctaaagtgaagtaatctcccagatgcatgttagcatgctatgtgatttgtagcatggttatcaagccatgcctacggcaacaccagctcttcactaattctagtcctggcacggctcgatgcattctgtaactttctcaccacgagagccagtcttccctagactgagggccccatttctccattaaacatcctgcaaacctcaaagatccaagtcaattacagccccaagctgctgttctctagacaaataaacgcagggatggaagatgaaggcacgcacctgcagagcgctgaggagctcgtagagatgaacaacgctctggacaacctgctcactgtttcttttaagcataactaccaggttagcatttccacccttttttaggccgctatctgattccgtactccccaacggtgcga

SEQ ID NO: 454072 - DNA, 1041 bp, Homo Sapiens
cattaggcttctctttgtgtgctgttgtccgttccccgtgcggcgcttcccgttgcctgtgccccggttgttgccaacctgctcccgtggcgatggctttggtagcgtctgtggatttctgtgcccaattgaatcgcggggttgtgcatcccttttagcttctgaggccaggttcaggggtcccggacgcagccttgggccttgcccacaggtcttggcgtgctggctggatgttgctccggctgcaggactgggccaagtcccacccatggcgcccccagcaggagagggcttcaccattgcgttctctgtgtcaagtcagtgcagtcattgtgtttttaagaaattttactgacactgactgaagacaggttctaataagccttccttggagcccaaatgggcaaaaatgtaaggattaaatccctcgcttggaatcggctaccaaaagctttgtgtgacaagaaacatttctgaggcctgtgtgaggcctctctgggcaacagacaggagcagcaaagttgcagcgtgaggcttttggaggcacaggccattcggggggtacccgtctcagcctagcgcctgaagccggcatgcgccttttgtgtggatgtggtctgtgttgttttgagccttgggacacttcctgtcctgcaggaacttatgcaaggacaggaccctgtatttctggaatcttctgagtgttctaagataggggcatcactgtcatgacctgaagcgcctctgcgtggtgaggagagcctctgcttagttagcgggcgtcaggtaccatgtgggaaaacactggaccactgaggtaaaacttctcctgggcaaaagaccccggggaaagccaatttccatgatgatgaaatttttgagtaaaccataaatcctaacataaaaggaactagcaaaatcaatgcagatcagattcctcaattagacaattgttttgccagcccctttgtgaatcatgcttgggttcataaatgagaagaaacaacttggggtgcatgaagcaagctgctctctgccccc

SEQ ID NO: 454073 - DNA, 1088 bp, Homo Sapiens
ccggtggggtcccagacctgggaaaaaaagggaaacgggttgggtaaattgggaaagggggctggtttctcccccaggaagaccccgtgggtgggggcttggggaccaggccctccaatcccttttttgaaaagggggaagaacagggttcttccctttcattggaactttttgggaaggcggagaaaaagactttggacccccggggctgtggggagggaccagaggggtggtggctaagcactctattcagccccggggtttcagggagtgactttcattccttgagccctcagtttccccccggcttgtctcactggatatctctgagcctttccatcccctcaggacctggggcggccctctgatagaggaggaagggtcccagccacagtcctgctaagccctatctctcctaccaggtgccccacctcaaccagaatgcctggaacaacctggagaaatatagccgcagcttgacccgcagctaccaaaacgtctatgtctgcacagggccactcttcctgcccaggtaaggtggaaaccaggggggcggcagaacctcccactcacccgaggcccctactgccactcacagggccaggcttgccccaggctctgggtcaataccagttccctactcatctggtttcttggcaagcctgtcagcttccctgcctcgagtcccctcattccacctccacagccaaagacctgtcgggtacccctgaccatctctcctctgcccatgggcagcagcaggccctgaatctgcccccgcttctccctgctgtcacctcttggcatgcccacccaatcttgttctgccaatatggaaccccccgcaggtctgcagtgcaccaagctctcccaccttccccccgcaggtctgcagtgcaccaagctctcccgccttccccctgcaggtctgcggtgcaccaagctctcccaccttccctctgcaggtccgaggtgcaccgagctctcccgccttccccatgcaggtccccagtgcaccgagctctcacgccttccccatgcaggtccccagtgcaccgagccctcgtgcccaattcgccacccaggcc

SEQ ID NO: 454074 - DNA, 1022 bp, Homo Sapiens
  misc_feature (95)..(95): n is a, c, g, or t
  misc_feature (288)..(288): n is a, c, g, or t
gaattttcccaggcgccaagccaggggtcccaggcttttgccatggaagaccagaagggccgctgggccggctgtggggcaggagccatgggtcntggtgtcgtttttggaaaattcgcttcaggttgtgcagaaatggacgccaggagaggccagcgccaggagttgcaggagaggcggactgtggtgggggcggtcagggtggagaagtggacaagacttgagatgctgtctgtagcagcagtggactcagtggtggccccagaagataagccacatcctaacccnccagagccctgcaaatgggatcttgtttggaaaaggatctttggtagatataattaaataaaggattttgggatgaaataattctggaatatctgggtggacgcctaaatcccatgacacaagtgaggcggaggaagactcgagacaggaggccctggtgaggacagagcagaggacggactggaggctggagggaggcagcctcgaggcaagccagggagcccctgggccaccagcagctggaagccagggcaggctccccggctgtggtccgaaagcatcccccagattcatgttggaaattccatccccagcagggcagtgctgggagttagggcctgggggaggcgctcaggccgagggccctgccccatgcacggattgatgctgctgtgaaaggactggccagcatgtgttctcacttctgatcttccccaacatgaggatgcagcagaaggccttcacaggtggcaacgtggtgaccttgaatgtcccagctcccagaactgtgccgaaatcaatttgttcttcataaatcacccagtgtgtggtgttctgtggcagcagcacggaatgactgtgcttctcccctggagcctgcagagggagtgtggctgttatggactctggaactgagtacatttctattgtttgaagacaccacctcgtgataatttccacggcagccgcaggagactgagaaggcggcctcgtgccgaattcgccacccaggc

SEQ ID NO: 454075 - DNA, 924 bp, Homo Sapiens
caagatttggttgcccccaaggccagccgggtcatctccctgcatggggccgtcccgcaactgttccaccagaatggtttccccctggggcccctgcaacccatccggggggccttcagtttgccaaactggaccgggcgcagtcaaagaaataatgagccctcagcttctgttccctttcggcaacccccatccggtttttgtgaggcccatagcagtggagatcttcttgcccctttctaatcccactgtgacgcccggatggtggggccagtgttaatgaaggacacgctggtgttggggctacaggagtggttcaggaggctgataacagggaagatgcctgtggcaaggcgcacctgcctgctgtcggtaacgatgctccctttaggtcctgtgtgttgtatggtggtcatcgcctgagcgttacactgaagctgtaacatgtgtctcagcatcgccactccccaaatagtcacgtcaggacacaattcaggtgtcactgctgctttaagctgagaggagttcacaatcctctcagttgggatggcctgtaaactggctgcttctagctgtctgcacagtgcagaaacacagagagcacagaggaatttgtgctctgggctatggttttcagtgtggggcaaaaggttgaagacagcattataattattttcatacttcccattaatatcgcatccaggaattggggtctcaacgatgttgccatttttctcactctcccctaggccataattaagtgtcttgacctgattgttgctttcacgtaaacagatgtccttgttactaatcttatcacaaagcttcgttatgattttgcgaacatcctcaaatcccaccaaaagagtcaacctcagggcaatgtggcaaaagacacccagtgtgagaagcagccctcccagc

SEQ ID NO: 454076 - DNA, 999 bp, Homo Sapiens
  misc_feature (194)..(239): n is a, c, g, or t
  misc_feature (737)..(755): n is a, c, g, or t
  misc_feature (770)..(774): n is a, c, g, or t
  misc_feature (778)..(779): n is a, c, g, or t
  misc_feature (781)..(782): n is a, c, g, or t
  misc_feature (793)..(795): n is a, c, g, or t
  misc_feature (797)..(800): n is a, c, g, or t
  misc_feature (803)..(828): n is a, c, g, or t
  misc_feature (850)..(850): n is a, c, g, or t
  misc_feature (928)..(947): n is a, c, g, or t
  misc_feature (949)..(951): n is a, c, g, or t
gagcgaggcctgggtggcgaattcggcacgaggaagagaggtaggcttttaaaaatgtcactctgttcacagtaaggcaagcaagggaagcaaaatcaatttctttctagaggtgggataatgggtagggagtggaagactttaggaaagaggtgccccagtttctgagtcacttcatggcttcaatattcatnnnnnnnnnnnnnnnnnnnnnnnnnnnnnnnnnnnnnnnnnnnnnntgttgcagcaggtagttagtcagagctgagcagggaaggagaggctcctccgccccatcaggagatgatcaggcagttgttaaactgtctctctcaaataatcattggttgcagccgatgccagggaaagacagtctcccagtagatagaaacgccagaaactggtgatcagcagcttcccagtaagatctcaggaggtgggtgagtgggcttaagcatgtgcatgaagaggcaaaatggttgagcttagctggtacatgaccttcctctaggaacactcaactgataagggaagaacacctcaagtgagcacacatatagcttcagtaaacacactcacatgcagcccctcccaagtgctggcaggccattgtacatgcagactgccaacatataaaaccacaagtcaaaggtcaaaccatgcacttgaatctctcaaggtccctactggccctcttccacgtgtactttatttccttgcattcctgttctaaaacnnnnnnnnnnnnnnnnnnngagacgagtcccttnnnnngggnncnnccgcgggtggnnngnnnngtnnnnnnnnnnnnnnnnnnnnnnnnnnccttcccccttcccgggtttcnggccctttctcctgccctcgccccttcccgagggtgctgggggttttttggggttggggccccttcctggccccggcnnnnnnnnnnnnnnnnnnnngnnngggaccgggggttttccccctggtttgggcccggggttggttcctccg

SEQ ID NO: 454077 - DNA, 900 bp, Homo Sapiens
caatcttccatgtcgtgtggatcttgtgggttctggttaggcctgtcacggaagatgaatatgtgtctccgggggaaagcggaaaggaggccatgccccctcccagtgcctggcttgcagagctgggcctgccccgaactaggtggtaatccggggtttggtaccttgtgcatggagtgcaggatccaggtgctctgggggctccaagcgtgctgtttggtgagcttgccacgatggaaagacacaggctgccgcatcccaatgtgcaccagtggcaggagagtcggggtgaatgtagacacggtcaggcaggcggggctctgccttgccgctgggctcccagcgccggccctgccagcggtagcgagccccatccaccggaatcacatccagaagaaacaagtagcgggcctcggggtccaggccagtgactgacactcggcaggcagggaacatgcgcctcccagctttggtgatgatcatttctgttcccacagagctgaactccttccatagctcccggttctccaggctcaggctgacccccgggagggaatggagggcctctggagctgatggggccggctcagtgcccatggcagggggcagaaggggcagaggtgggtgcgcggccagggtgcggggagcagcctccatcccggagaggaagcaatccagtttaggggtgtccagttcggggtagcggtagccctccgctagggcgggtgggaagctggagtcggccccaggttgggcgggccccaggcggtagccggcccccagggacgggtacaattctcgtggatggtacatgttgtagttccgtctggcctcaggtctcgctgcttagggcccccggtgagtccgacagctcctcgtgccgaattcgccacccaggcc

SEQ ID NO: 454078 - DNA, 1120 bp, Homo Sapiens
aggcccccatttaattctccccccccgggggaaagtctctattccccacggtggcccgggggggtctctcccaggggccggggaattaccgggggtcccaggaggggccgcgaatgggcccctcccatgtgggattccaggcggaggcccagccacgcaggggagagcagccgggggaaccaagcccaggcccgggatcatttcaaagctttgccggggggcccgggcggggcacagacccaagccttgggtactgtggggtggcatggatgctccttgccttgtccctgacacaaaagaggcccccgtccggctgggaccaaaagccagagaccagtaaacccaaaaccacgggcagttcagaatgggagacgtcccaggccccaggtgagaaacaccgagctggctacagatgcccaggactgggaaggcttcctggaggaggaggcttgaatggggcctagaaccagccacgggacacctcagaggtccttccaggggttggacagaatccgaggcagaagagaaaagcaaatccgatcaaatcactgggcttcctccctcagggctgtgtgctggggttaccccaacactgaatctctgcatttactgagtgagtgtctcttccaggaaggggtgggcacggccctcttgcccactggtgggtcccagcatccagcagctggggatgctccgtaaatatctcgtgaaccacttgctttgcacgtcttgtttaattcaatccagttccacaaacgttcatccagggaccgtgacacacagcacactggctctccgttctctcctgggagtcctcctggtctgaagaccagactatccgagttcctgccattacagggcagcagaggaaaacagaaatcatcgtaacacaaaaaccgttacttcactggtgtccactcacacacccctctccgccaagcttcagaatctttccagcgacgatcccgagggtctgcagcagaggggctgaggcccgggacgggggtggtcgcagcgccctttcctgaaaaaacggggttcggctctaaggcgcccccaagccctgccggcagcgcggaaccccctcgtgccgaattcgccacccaggcctcgctacctt

SEQ ID NO: 454079 - DNA, 871 bp, Homo Sapiens
tggtgtgttgccttggtgtatatgctccttttgctgcttttttcttggctcttgctgtgcccgggttctcttctgcaggcccgtgttcccctttgtttgtcgttttgcccatcactcttcgcttcgcccggtggacgggtccacgccgtatggggctcttccggtccctcccttcccaatctgcttcttgccccagtccagtcactggaagtttcgcgagcctgactctggctttccccgccgtatagtcaactctgctgtttcctcttggcaactgaggggcattcgtgcgccttggacatgaaatgttctggagcctcactgtgaggtccagtgtctctgcggcagtgttgctcctttttggcctggttgatgatgtagctggtccagatccagttgcgcttgaggtgtccgtagaagctggaatcgagccctgcggcacccagcccatctccagggatcaagccttcatccaccacctcacggcttccagtggtgtactccagcatggcgcacttgcgctccaggttgtgcttgtccatggcgctctccgtgctccttctgcaggctgccctcctcgtcgctgccctggtctgtgctgctgttcttcctgacgcgcgggcagcgcaccacgcctagtggggtgttgaggcagacgcactgcaggtcaaaccagtagttttccacatcctgcattgagttcaggacatagaggcgcctctcgaagggccggctgctgcgggccaggttgtaatgtgggtcgcagatggtagtgtcaacatgactgcattcttcttcaagaagataaagacctgatctttatcctgaaactgttgtccgtgggaccgaactgtagcagccccatgtagcc

SEQ ID NO: 454080 - DNA, 479 bp, Homo Sapiens
  misc_feature (365)..(365): n is a, c, g, or t
  misc_feature (380)..(380): n is a, c, g, or t
  misc_feature (396)..(396): n is a, c, g, or t
gcccccctgatggttcctgggcctaggggctgttcatggcagagggaagccaccaaggtgccattgaggattggtgtctggctctctatgggcaagagcgccaggggacacacagtgggaccggaaccttccagaatgtctcctcagtcaggttttcaagggggagggaatgcggagacaggagaaaaaaagtgctgagggccaaagctggtgcagggtgacggtgcgtcttggtaaggcaaatgagaggcagtgaggtgatctcagaatggcgttgaggcggtcagattaggccgggctggctcacacgagggtcccgggcttggctttttcctgcccgtaccactggacatcagctagttctngatagagcgaggaanccaggaaacagctatnattgtagctcccagtctgccaggttaggatgtggtgggggctgcttgggggggtggctccaatttcacttgacggtgtcgagc

SEQ ID NO: 454081 - DNA, 646 bp, Homo Sapiens
  misc_feature (603)..(603): n is a, c, g, or t
  misc_feature (618)..(618): n is a, c, g, or t
ttggtagtagaacacgagtcaaatctttctaccttagggcatagttgggttcttggactaagtgacacataggagaagtcggatctgagctcttttgtcacacaagtgctaacgaacagaacatgagccacgacagttaaccactgaatggatcgcaatgtgcttttcccttggtttcccataaaaacgaaaatgaaacaccttgtgtttaaaaataggatacgcttttactggttggtttaatgagagagaaccacttttggccattatcaccttacgttactacaaatcctgaaaggaaagcagctttgagtcttgggctcggctgaaccccctgcatggaccggggctaacagtaccctctacgactcccacaggtctctctttgtgtccagatggatggcgactgtgagtcagcaacgccagccaagacttcctcgcctttaccgtgggcattggggcagtttttcaggctctctacagagagagaagtggggccagtaagggagagggctagagagaggacaccagtttacataggggttgactttcacttgtgtgtagtaggcagtttcaggaattttaaaaggaaattttccttgncagaaaggaatgttnttcccctttgggccccccttaatttttt

SEQ ID NO: 454082 - DNA, 489 bp, Homo Sapiens
  misc_feature (386)..(386): n is a, c, g, or t
  misc_feature (391)..(391): n is a, c, g, or t
  misc_feature (427)..(427): n is a, c, g, or t
  misc_feature (435)..(435): n is a, c, g, or t
  misc_feature (444)..(444): n is a, c, g, or t
  misc_feature (460)..(460): n is a, c, g, or t
ctcgacaccgtcaagtgaaattggagccacccccccaagcagcccccaccacatcctaacctggcagactgggagctacaatgatagctgtttcctggattcctccctctatccagaactagctgatgtccagtggtacgggcaggaaaaagccaagcccgggaccctcgtgtgagccagcccggcctaatctgaccgcctcaacgccattctgagatcacctcactgcctctcatttgccttacccagacgcaccgtcaccctgcaccagctttggcccttcagcactttttttctcctgtctccgcattccctcccccttggaaaacctggattgagggaggacattttgggaagggtttccgggtcccattgtgttttccctnggggnggttttttggcccataggaggaggccagaacaccanttcttcantggggcacnttggggggttttcccntttggccatggacagccctagggcagggg

SEQ ID NO: 454083 - DNA, 877 bp, Homo Sapiens
  misc_feature (471)..(679): n is a, c, g, or t
ccttgatgacctctctacggctcgtccaacgacctcctctttgtacctccacgtcattctggccgccttgtccccctcgcttctacgctcactatcagacgggcatcagactacctagctccaagctagctcacccgcgcgtctagctcgccctgtgacccgctatccagcttaccctcgcgcacgatatttccatcccgcacctgaccttctcgtgccgtatatccgctgagcaactcttttcaactgtacgcgtcgtctagaactccatccgcacttaacacgagcctctcttctgctcttcagcggtttagtccgcgccggcatctatgctgctctctttcctaccacaggtctaactccctggctcactctacgtagtgttcatcactcactcgttcttacgtaagcctatttagacatggatcgagtcttcggccagttgtggttctgctgtccacgttcttaaannnnnnnnnnnnnnnnnnnnnnnnnnnnnnnnnnnnnnnnnnnnnnnnnnnnnnnnnnnnnnnnnnnnnnnnnnnnnnnnnnnnnnnnnnnnnnnnnnnnnnnnnnnnnnnnnnnnnnnnnnnnnnnnnnnnnnnnnnnnnnnnnnnnnnnnnnnnnnnnnnnnnnnnnnnnnnnnnnnnnnnnnnnnnnnnnnnnnnnnnnnnnnnnnttgaaagtgtttttatttactcttcctcttgaatgatagcttagctggaaatacttttctctcctcaatctatagatattatttgattttcttctggcctttatttttgcatgcatgaagtctcctgttagtctactttttgttcctttgtaagttattttttctgtctggtttcctcccgtctttccttccttcctt

SEQ ID NO: 454084 - DNA, 1282 bp, Homo Sapiens
cgcgcacacatactggagaagtacgcactgttcatggtcttcatggaccaccatgcatccatattcgtgctgttgtaactctttgtacagaccagggatcagtggagctgagtgcaacctcctccccatgccatctgcagagcctgtttggctaagtgggtgccagtcggtatcctgctgcccccatccagaacagccagcttgagaagcctgaagactggcctgatacagagactccaattctgaggtctcctgctctgtgtcttggttccaatgtggatgcaaaaggatgtgatttctctctggataggttacaccacgtaatgggaatcatgaggggaggacttcattcctggccctaggtggccccatgcttaagctgaagaatcacagaaccttgtggatattcacccaggaatccaaaggcaagggaagtccccaaagtgcagtacttgctgcccagatccttagaccttacatctctcacttgggacagcttctccttggtatatgtctggttctgccaaccctgggctggtcctccgctagaagtttcaccattaggcagcccagagtttaaggcaagagaagaatgttcagtggactcttcccaggaaagtggtctatccccaccctccagagaggattgttgctttgcccatggccagtggcctttctcttgaccctttgagaaaggaggcttagaatcagaaggggaagagttcttccttagactacctgacaaacttctatccttgaaacctgtactatccctcatggagacaccctgcatcctctggaactgctcagccagagaacggacaagcccctttgtgctgggaaactctggcctataggtctcctcactgcctctgtccacttttaaagtcaatgaagttttgaggctttggccttggaggcattggttagttttctgcacaggatcaggacagtgaagcacaaatgaagaagcaacaggcattatggggtggcaggttctatacaggggaaggctgggctgagctgatgaatttgaaggactacagcctaggctgtgttcatcacccctctcagaggtggctattccaggcatcaccggggaggggttagcaggatccttcttttctgggtacagctgttcgtgagcaatgcctcttccttcttgtggagggagcttgctgcaactgctgttgtcacacactagagccattgcagcttaccctctggggcatccaatggctccctactatgatgagaattcttctcagtccaactctgagaa

SEQ ID NO: 454085 - DNA, 1149 bp, Homo Sapiens
  misc_feature (245)..(245): n is a, c, g, or t
  misc_feature (731)..(1099): n is a, c, g, or t
tgttaagggttctggtgtgattttggagggtgccccctttaataaatgtttttccgggggcctttttcaaaaaacttggcccatttttaaagaccttaggttctgaagaatggccttcccattccccccccgggccattttccaaacaagttctgtaagggtggaggctaggccagccctctaagcccagaattcccacctcaataggcggcccagcccctggaggccaaagaggaaagcatttntcaagcccaacatttcaggaaacaaagttataaattcttccaggccaaatggaggtcaaaaagttccacggttcctttcattccaacaagcaaaaccaggctttctgcctcgggggcagagtgaggccaaggcccacagattttatatggctttatttgtttctgattttaggaaattttcccatcaatgaatgcatttcccttcaccgacaactccccgagatgcacgttggcaccatcacacccatcttacagatgaggagaacaagactcaggaaatccatggattgagacaggggaatgatcagaagccaagcctccctgctttcagtatcacccgctttcccctacacagcactgttcctcactctcaaacacttccaagatggtagaagggaggggatcagggttggacctatccctttgctaccagaaatgtgtgatgtcttgaccacaggtagcagccaagaggcaatggaatcgggnnnnnnnnnnnnnnnnnnnnnnnnnnnnnnnnnnnnnnnnnnnnnnnnnnnnnnnnnnnnnnnnnnnnnnnnnnnnnnnnnnnnnnnnnnnnnnnnnnnnnnnnnnnnnnnnnnnnnnnnnnnnnnnnnnnnnnnnnnnnnnnnnnnnnnnnnnnnnnnnnnnnnnnnnnnnnnnnnnnnnnnnnnnnnnnnnnnnnnnnnnnnnnnnnnnnnnnnnnnnnnnnnnnnnnnnnnnnnnnnnnnnnnnnnnnnnnnnnnnnnnnnnnnnnnnnnnnnnnnnnnnnnnnnnnnnnnnnnnnnnnnnnnnnnnnnnnnnnnnnnnnnnnnnnnnnnnnnnnnnnnnnnnnnnnnnnnnnnnnnnnnnnnnnngaaatgtattctctcctcgtgccgaattcgccacccaggcctcgctactt

SEQ ID NO: 454086 - DNA, 1308 bp, Homo Sapiens
ctgaggagacgttccctaaaggcgcagtaacagtatctccaagtcccctggccccagctccccaaaggagcccctgctgttcagccgtgacatcagccgctcagaatcccttcgttgttccagcagctattcacagcagatcttccggccctgtgacctaatccatggggaggtcctggggaagggcttctttgtggcatggctatcaaggtgacacacaaagccacgggcacagtgatggtcatgaaagagttaattcgatgtgatgaggagacccagaaaacttttctgactgaggtgacagtgatgcgcagcctggaccaccccaatgtgctcaagttcattggtgtgctgtacaaggataagaagctgaacctcctgacagagtacattgaggggggcacactgaaggactttctgcgcagtatggatccgtatcccctggcagcagaaggtcaggtttgccaaatggaatcgcctccggaatggcctatttgcactctatgtgcatcatccaccgggatctgaactcgctacaactgcctcatcaagttggacaagactgtggtggtggcagactttgggctgtcacggctcatagtggaagagaggaaaagggcccccatggagaaggccaccaccaagaaacgcaccttgcgcaagaacgaccgcaagaagcgctacacggtggtgggaaacccctactggatggcccctgagatgctgaacggaaagagctatgatgagacggtggatatcttctcctttgggatcgttctctgtgagatcattgggcaggtgtatgcagatcctgactgccttccccgaacactggactttggcctcaacgtgaagcttttctgggagaagtttgttcccacagattgtcccccggccttcttcccgctggccgccatctgctgcagactggagcctgagagcaggttggtatcctgcctttttctcccagctcacagggtcctgggacgtttgcctctgtctaaggccacccctgagccctctgcaagcacagggtgtgagagaagccttgaggtcaagaatgtggctgtcaacccctgagccatctgacaacacatatgtacaggtaggcgaagagcgaggtaaagacatagcagcaagtaatctggataggacacagaaatacagccattaaaagaaagtttaaaagaaggaacttcacccaaaccatttgcatacagtacgtgtattcatctttcgatattcccctgtccatatctacacatatacttattatatagtacatagtctgtattttgcctgtggcag

SEQ ID NO: 454087 - DNA, 1037 bp, Homo Sapiens
ccttattccccccggatgcaaatccctgaaaggcgttcttggaacttctttttccaatgtaagccatgattcctggcatccaggaggggaacccagggggaatttttcagcctggctgggcaagctggaaggagccccctttcctttccagggtccccatgataatctttttgaccaccatcgaccctcataaatcttcggtttccagctgctggatttcatattctaacctctcctggtccttgtcccagggcttcctggtccagcttccaggctaggcctggagccctgactgctctctgctgccactgttcagactggcaagtttctgcctctgctcttcaatctccatgcccagggtggagtgcctctgcagcgcagaatgtctcctctccagcctggccagggcccgctccagcgcctctctctgctgcttctctctggactccaaaatctccttttcctttttcctcactttttcctcctgacgtgcaatgttggcagtgaattcaaaggtggcttggagcttttgcagctggtttgcattggcctggtactgtgcaagctgttcttctttttcttccatttccttttctacttgataaagagtgttgtctaagctgagagggcctctgtcaagaatttcaaatgctctctgcttttcttccaacagagttggcaagtgattctgcaggaggtactgtagctggcgttctttatattgcagcctgtactccactggctttattttctcgaaatcttgaggcacttccgtgacatctgtgacactctcatcatgtttttccaacaatctagattctttgtcatgttcacattttaaacactctaggatctcctgttcttcttggacttcttttttcaggatgtctttctgctgaaccaggtccttctccaagttcactagcttgacaggctgccttctcttgtattcgaagaaacgcagttgagccttttctaactcctcgccatcttcatcccctccggcacgagcctcgtccgaattcgccacccaggcc

SEQ ID NO: 454088 - DNA, 948 bp, Homo Sapiens
  misc_feature (827)..(843): n is a, c, g, or t
cgagaactgtcgcacatccagattggagacattgtaggtataactgtgctgagtgggtggctctggggcggggctctcctgtttcaggaggctcaagatgtctagttggctcttcagggtatagccaggcaacactgcatcaaactgcttcagccaatcagggccagtgtctgggctcttgccttccagacccttttccttcccaccaggaccctcagcttcccccttctttggctcagtgcctgcccgggcggggctctctgggaacagcacctcataggagttggggatcttcatgctcagcagctccgccactgccaccatcacgccattcaggttcttggctgcagcagcagagactgtgagcatgactgacacctcacttcctttgcccttttcccaagttgtgacaggcagctttccagggacctccaggccaagggccccataaggtttggtatctgggaagactgggatgctggcccgaggaatgagggggatgacaggggagagggcccggtcctcttgctcccaccggcctgagcccagatgagggaaacgaggggcctcctcccccaagatgctctcaggggatgaagctggcacaatgctgtcaggagaatcgctatcctcatcactctccatcctgacatcctcagtctgattgtgagggggtgtaggcaaggcagccagcaggtctagactcttcacctctgaagtatccctcagtgccctttcactatcccgggcagaggcagcatccttggggtgctcccccagctcttcagatggggtgacgccattcaccatcttctgctgcaccgatnnnnnnnnnnnnnnnnncagcgacgagggtggtgtcggcgggttactcaggttattcttggtaagcagctgggaatagtagtcagggccagtgggccctcgtgccgaattcgccacccaggc

SEQ ID NO: 454089 - DNA, 1041 bp, Homo Sapiens
ccattgggcgtccaaacccggctccctgttctgggccatttctgggggcctggaggggaaatgtgaacagggttagtttgcccggcatttgggagggcttttcggtttgttgaaaaaagggtgaaagatcttccatttttccctgagagtggctctttcatgcaccttccaagggggttgctttccggttccatcccagtgtcttgctcacccccctgtggtgaaagttctccaccatctccctctccggagggtgagctgggctgcttggcgaggggcacctcccctctggggcctgagctgggctctgggctttggtttctcccagccggagcactgcacacatccccagtccccggtttctcattctccagtgacgcgtgatccccacgtgcgttttttgcatctctggcatcctcggtgctgttggcagtagacaccggagcactgctgcctgccgagttcacagaggaatggtactgaggtataacaccaacgaatttcaggccctggcttgcagcctcctggatcttcttaatgaactctgggatgagtttctggtctgtcgggtggtctaaggaggaacagcaatctaattccaagatgtagccttcattgtgaagatcagttttctgagatctgtcggttttcttgatcaggatggctctaaagatgtgctccaggggcgtcttctcccgctcatgggtgggctgcacgaaggggtgcagggccgccagcgagaagccctgctggtacagctccaggagctgggcgggcaggtcacgcagggaggccagcctcactgctgaggacccagggagctccgcagcactcagagtcgtgaactccaggaagcggtattcataggacacatctatcttggtttccacctgaggcctcttcaaagttgaataaatattcccaggccgtttttcatcacgtttctctaacttgttcaatccgcaacccatttcagcagctgtagcctccaagctcccccacctctgccctcgtgccgaattcgccacccaggcctcgctt

SEQ ID NO: 454090 - DNA, 1080 bp, Homo Sapiens
tcccttccaaaaaaaccccccccgggagcccatggaaaagccccccaatgcctttcccacaccccggggccagaaaaaagggaccaaatttaccacccattaaaatcttcaggagaggaagctaactggcttgctggggcagtgtgaaacagaccttaaggggtgaaaaaccattgccccggaaacatttttcagcccccacctcagcagggaacatgtgatttacaggaaattaggagggtttacaaaatgttagcagctcaagtttcttccccgggaaaagaagcaggagaagctctaagaaccgtatccgagaaagtgctttgttcactgctaagcttctgacacgagtcagttattaatacccacagctcactgcctcacacttcaacccaccagtgaatgtctatagtgaataattataaaacaatatattacaaaactctaacacaggctgcaccagagccttccgaagcccaggacagccacgtggccaaaagcatggacttcagatatgatcttgggcaagctgttggctctttttcaccccagttcctccatcctttacaataaacaaaatccttctggaggtgtcttgtcaagaggtgtcttgtcaaatgatgagcaaatccacttcaagtgcctggtctttggaagccctgttggttgctgttattacagtggagtttcagagctcttaaagtcatatctccatcttacttctgctgccagacaaacctctggaggccacgattccgagccttgtcagccaccctctctggtcaggtccaggacagagtgagtccacactggcttgtcactttgtgctcttgtcttccccgcagggcaggactggcaccgtgtctgatgcctcagccagatcagttcaatgcatgagcctaggccctagttgtgaccacagctccagctccccaaacctccgggggcagtgaagggttgtttatgaagcaggctgcgttttattattcagatgaatttgtcaactccctggcggatccctcccctcgttaacgccatcttaaggccctcgtgccgaattcgccacccaggcctcgctac

SEQ ID NO: 454091 - DNA, 623 bp, Homo Sapiens
  misc_feature (304)..(365): n is a, c, g, or t
ggggcaagatgatgatgtctgaggtgcggatgccgcatcgctgggggccgctgtccggctctggcggcgcggggccccccagcccgcgctcccccgggctgtggcgccgccgctcgtgctcggtgaaggcgatgcgggaccacgtctcgttattgatgttctgcccgtacacccgcagcttgacccgggtccgttcgctcacccgcagcgcccccccttccatgaacgacacgtcgttcgtgtcctccagtcgcagcccgatgatcaccgtctcctcattctcgcccaccgctgcgcagccgcnnnnnnnnnnnnnnnnnnnnnnnnnnnnnnnnnnnnnnnnnnnnnnnnnnnnnnnnnnnnnngtcccccggccgcgagcgctgaggcttcggcgcgccgccatctgccaagtgggcagtgcggcggctgcctgcccgcccgccatctttactttgggttctcaagcgccacagccaatcatagggtggctgctccatgctgcggcttgcatcctttcaacccggcaggcgcgagcgcaggtaccggcctctgggcgagactgcaactgtgcaacgcacggccagtgctcagcagttcgacctccctagactgccccagct

SEQ ID NO: 454092 - DNA, 1045 bp, Homo Sapiens
  misc_feature (24)..(24): n is a, c, g, or t
  misc_feature (43)..(44): n is a, c, g, or t
  misc_feature (49)..(49): n is a, c, g, or t
  misc_feature (61)..(65): n is a, c, g, or t
  misc_feature (96)..(100): n is a, c, g, or t
  misc_feature (103)..(106): n is a, c, g, or t
  misc_feature (123)..(125): n is a, c, g, or t
  misc_feature (128)..(129): n is a, c, g, or t
  misc_feature (270)..(270): n is a, c, g, or t
gttggaaaccaaaaggggacttcngccccaaaaggaaaaaagnngaaanaaaccaaacccnnnnngcggaaaaacccgggcaaaaaacccaaaatnnnnnaannnnaaagggaaacccctttnnnccnnccgcgatgtactagtgcttgtttggcattgtgtgtgcagtgcttcccaaccttaaatatcacctcttcatgggcatattgggggataacatgttggctaaccttagctggtgaggtgctgaggaaagactaacctctcccnaatcctttctgttcaagatgcctgttgaaggcaaatgcattacacccccactggggtcttggaagaggcctgtaacagagctgcagtaggaatggggcccctggcagccacaggcatttggtaaaactgctgtctgtgtgaggtaccagcgtcagtgtggaagccgccattcttgtcaacatgaaataggttctgctggaagctacacgaggggagcagccgcttttgctgtttgacctcagggctgtgaacaattctgttctgcatggagtgcttgtttagccattcttgcttaaatggctggctgtgtcctagctgactgatgccggaactgatgacacaaggcacccctttaacatctggctccaccaacaattttcctggttcacatttaacttgagtgtgttctcctacagtcctagctactctctttttggggtggttttctcgctttctcatttggagtggtgccagagtccctgccaagtagcccttaccatctggatttggagagctgggcggaatttcaacgtttctctctggtgctgttttacccactgaggtagtttgaagaggcaatggaagcctgttgatttcaagcttggctcccaatctgggctgtggcaacactttttccaaaggcaggttgccctgtagtaactgcgtcaccagcggattgttagcctccacagaggacagacgacagcctgagctccctgcaccagggactctcttcaggcctcgtgccgaattcgccacccaggcctcgctccct

SEQ ID NO: 454093 - DNA, 2083 bp, Homo Sapiens
ggtgggggtgacttacacatttaagattttaaatttttgactgagtgtttttgaaagccttagaactcttcaatttcttacacttccatcatcacagtcaggtcacacacaattacaaatgatacacatctttacactaaaatggaacacattttgtaatcctgataactgtgttcagattagaataattgtgggaggagtcttgcaatagtattacaaatgcacactacttcatccagcttatcttgatctttgcagaaatgcacttatttcctttccagccgctgagtgcacactttgttccttctcaaaatgcatcattttgtttttacttaaatattttcatattctttggcatcaggaatcacttagatgagatagctccattgtggcgagagcgtgacctttccaaaggtactcgtctgttatctggattccttggaatccgctttcgacggtctctgaatgctgcacctgattgtagggcttctagaagattatccatcacaccagtctcatcaccctctttgtttatatcaatgagttgtttctttttcttctggcgttctaacttttcttgttcagctttctcttttgcaagttttgccctcctggtcttctcttccatttctcttctcttattgttttctctcactgcttccaaaaacaaagttcggaagttgttgagatcaccaaagaactcttctatgctcactgtctttgagtcaaaaatgaagtattctccaagattctcatagagcttcatcatgttgttgtgcatggtggagagtttttcatactgttctcgggcagtctttgtaaagctggtcatcttttccacaaacttatcgtgttgattttctgcttgggggaatttcttgatgtcacgttccagatgaacaatttgttgttccattgatgcaaggttgctcttgagaatttgagctgaaactttgcttgcactttctacgtgttccagttcttcaggaaattttaggatatctcgatatttttcctcacaaatgtcggcaataaaatgcaaaagggttgttttttgatccgctgatttagtatctctgatcttacaaaggaagttgatcttaaatcccaaagactgggcatttcttgagcctgagttcaatgtagtttccaccaaggaagaactaactctaaaaggtctgttaaagctttcacttttcttcagttcttcacaggcaagagttactgctatgatgcttggtttgatgttgtttatgtgttcttcaaatgtgagcttgaacaggatactactgagacgaggctgtaacattttcacagagctcatcacaactccaaattgttcaggctcacagaggtcatcatattcattcttaagctctgctaattcgttgagtatcttctgctcaggaagatgtttcacaaggttctgaattaaagcctcactcagcatgtcttcattaacctccagaataacgtttcttatgtcttcatatggcatgcgatatgatcccagaaagatggacagattctgagctgttttgggatccaaaattctcagttctttcactttcttctttgtaggcccagtcttcttttcttctaatgcttctgcgttcttttgaacttttatctgagtagcaaaattcaatgccaatttggcaaagagatctggattctcaaacttgtcttctttgactcttaaccagaaacagttctcagataattctgtgggttcaatctttgaccaattgattctcttcatggacacttcaggtttatacatttttttctgcttcattccataaggtagattaagtgatattcctgggggaggaggaactcctccaaggggtggtggtggaggaggtcccccaaataaaagtggtggtgggggtggtggtggtatccccatcattccaggtaaaggaggtggtggaggaggaagaggagctcctccgggtagaggtggcgcgggtggtggtggaggcggccctacacctggcaatggaggtgctgcaggaggacctggaattcctgatgaacttgagagtacttgcctcgtgccgaattcgccacccaggcc

SEQ ID NO: 454094 - DNA, 998 bp, Homo Sapiens
acaaaggtaggcactcccagctgattcgggcattctctttccatggttggctagctcattgtgcacataagtgagtctcctttcttcttcgggttacgatgttagatatccaaaatatcgttgctatgtataaaagcaatcccagtctggatcagcagggcataattttggatccatccgtatgttgggacaactagtttcccactagattgggctcttaaaggttggttgcggtaaatccttgtggccctccatcttttaacgtgataaattccactaccggcttgaaacagaaatgttccactgtctttggtgataatcgtaagaagcaattccgactgttccaatgcgttttctttctcttaatagttcttcttctcgagaatacattccatagtccagtgttgcctgaaaaagatccaaaagaggcttccaagagagcattaagactgctgctctattgatagttttgggaatttcagaataaaacagtgtattttctctgttctcaccagacatggcaaggtaatagattctgtctgaatgaggtccatctggatcattcctcttcacaaacatgaaatcatgtggtgccttagccatcatgtagccatgatattttctggtatcggcaagcagctttttaagctgactccaggaataccgctcaacataaaaaggctccaatttaggccgatcctgtgattcaatattctcctcacagtccgcagtttcaaatatctcaacacccagctgttctgtttccattgctgctgccatgttgcattttccttccccccggccccgcccggaccgtcccgacgtgcgctatggagcgggcctgcgccgcttcatgctgcgccgcctccactccggtcctggttgcagtggcttcctcggcggcggcgccggtgacaacccaggcggcgaacgcggcactaagaagcagcggcggcagtagcagcggccttggcctcggaggctttttttaccccgct

SEQ ID NO: 454095 - DNA, 1052 bp, Homo Sapiens
gcggtcggcgctctcgcatttttggtctcgtgtgggatggagttagttgcttcgcacaacagaaaataatctgccacggtagtgtctgttttcccttggggctctcttgtgggcccggcatcgggccccattacacgctccttgccggtttcgtgctccgccttccctattaggcccggggaagctttcacaagccgtcttattgggggtcgcgcgggagttttcggggcgaaaccgccccaaacattgggccttctattttagaaccccctggagttctcactggagatctccaggttagggggccacctggccgaggaacccatgaggcccccaaagatgacgccgagggtcttggggatgtccgggtcgtctgcaaaggctggggcgctttccaggggcaggtgcaccccctcaatgagctcaccctcctccaccaggcccccacctggaccgctacgctgggcatctgtcacctctgtgtagaacatggtctgtctggagccagtcagtcccactccagaccagtatgtggcgacccggcgcagatcagagggggccaagtggtagccacactcctcccaagcctccttgcaagccacttcctccagcgagagcccaggctggtccacgaggccggcacacagctcaactgtcacccccgctgagccgggcagggctggctgtagctcccgaggcccgtcctggtctacagctgctagggaccctgggaagcggcgctccacctcacccgcatacacagctggccggaactgcttcaccaacaccaggctcctccgagaagagttgaataagagaacggtcacgctgtcatgcgtcttcatgaagtcccaggacttctgggcaccattctggcggtaatgcagcgtgagcggccgcaggtagggtgaggcggcgcagcggcccacggacgccccctcgatgcgctccatggcggcgcccggacaggcgggggccgacacggggcggcgccctgtcccgacaggagcgtagggcgggcgcgtgaccctcgtcttggaacgccacccagc

SEQ ID NO: 454096 - DNA, 1130 bp, Homo Sapiens
ttgtcggcgggttttgccgagcggcgttgggatacacaaggggggtttactggggctctccgggatgaaaatggggaggtgggatgttttttcatccccgcccacgacaaaatcccccgagaagagggggatatattccacgggaggctcctacatggtgcccccatagggggccagatctttgccccggaggtgctccgttccgccttaggggccaattcttttaagttcctagcgaggtgtaagaggaaaaaatgggtcagcccagggggggtatccctcgggtatcaatgcccccccaggtttatgaaggggaggggacccttttcttctttttgggttccggagatttggcgtcctcctggatgaaccggggcccatcgtgccataccgggggccccccttggccggtagctttcttgtggcgccgtcccggactcccagttcccggccgggcagccgagccccagcccaaagcagtcggcccgtgccgccagcctccccctgtcgcgtgtcggcctcggtttcccaactctgcgccgtcgggccgcggcaggatgattgcctcgcatctgcttgcctacttcttcacggagctcaaccatgcccaagtgcagaaggtaagtcagcgcgggcggggcggcaggctgggctctggcaaagtggtctggcctccatcagtctcttcctcgaccctgcggggacccgcttcctccctactccgggcctgggagcggaaaaagtttgggcagccgggacactcctgggcgccaggagccacgtccgctaagcacagccggcgagtgcgcgcgggcggggagccgaggtcgcgctccgccgggcgccctccctccctgagctccggcacgcgctcacgctctctcccccagtccctttttccctgttactggaggggcgggtcaccccgcaggtagtcagggattgctgcgcccacgtgggagggagcccccttctgcagcgcgagttccggcgagagcacgtggagagaatcgtggctgcgggaggctgctccgctgccgcgtggggccgccgggggccgtccgcgctcgcggaccgcgtgtaggagacgagcggttcctcgtgccgtgtatcgccaccccagggcgtcg

SEQ ID NO: 454097 - DNA, 1022 bp, Homo Sapiens
  misc_feature (30)..(30): n is a, c, g, or t
  misc_feature (40)..(40): n is a, c, g, or t
  misc_feature (50)..(50): n is a, c, g, or t
  misc_feature (55)..(55): n is a, c, g, or t
  misc_feature (60)..(60): n is a, c, g, or t
  misc_feature (78)..(78): n is a, c, g, or t
  misc_feature (102)..(102): n is a, c, g, or t
  misc_feature (114)..(114): n is a, c, g, or t
ccttttcccctagggggctattattcttgncccttgtcancatggtttanggtgnccttntgcccttgatccccctcntggaaggggaccggctggtgaaanctgtctgcttcncccagaaaaagaaatcaggggtctaaaatccaactctacgaatttagtttttgttcttgagcctggcagcctgcccctgggggttctctgcttctgtccttgagggtcttctaggggggatgtggtgggatctgctcggttccctgttacaggagcatctaaagaaagggaggttactattttaccagctggagagctaatatcaagagtctgtgaaacattatttgacacatcaccccggggagtcacctgaatccttcctagactcttcctgaaatacgttggtgccatttttgtttgtaacttctctgtctctttccagagatagttgtccttgtggctcttcctttgtagggatagaagctatcttctctcctggatttattccacattcatcacttctaggctcatctctaggagacaacaaaggctctgtgtatttgggggcagtttcttgtatatgatttgtacaaaaagattccaatcccatttccaactggacatggggctccaactggagctctagtgtgtctccttgagagacattatttagtcctgggttgctggccaggcaggctctgtctgggttagggtcaccactggagagggagaaggagctgtctccatgctctatggttggttctttgggggcaatcccatccaggtcttgagatagaggtaagatttgggaaggccttgcctgagcagtatctgggccagatgaacctgggttagaacagtgaggagtgcttgctgaggagctggcagcagggacaacaccagaattctctttattgttggggtcaatccggaagcgaatggcagaaatagaagacactcgagagtcgatgactgatttggtttccatggtctcgggctccccctcgtgccgaattcgccacccaggc

SEQ ID NO: 454098 - DNA, 1067 bp, Homo Sapiens
  misc_feature (80)..(80): n is a, c, g, or t
  misc_feature (795)..(804): n is a, c, g, or t
  misc_feature (919)..(919): n is a, c, g, or t
cagggagaaagggtggtcctgcctggtgtggggagaacccttgcactctgagagctgggacctgcctgctacttgcagtntcgcaagcttccggaagcaagaaggggcctggagttagctgggttccatgtgagcagtttccccaccttggtttgctcccctcaaagcaatctaacagaaactgccccctgcttccccctaatttttgtggtggtttctcagtattcttatactgaaccatgttttctgcacccccaaccttcagcttttaaaaaggcttgccaatttgttttttcttcccccattttggggttttgataagggattcccataggcctctttccctaaaacacacaatgcatctaacattgtcctcaaaccccaaggaccccagtgcagcgagtgggaccttttcttcctagtctctgtcttatctcctctgggggctccagagcccctggtcacttatttttctcctattttcttccttttcagttccacccagttcccacaccactcccccagctgagcatcttcctccatgagaactgtccagggctgctgggagagaacattgtggaacagtgagggagaggtgttttctgcatcatctgagggtcgttactcccgggtcagtgccattgcggtacttccccgaccctataggattttcctaaggattttgatacaattttatagggttgttcagagacatattgggacctcttcctacaattaatagggcttttatccactatggtttatagggtttttctgctacagacttaaagggcnnnnnnnnnncctacatatttatagggtttctaacccaacagtttttctctactgccttataagtgcttcccaccaacaattttatagggtttctcatcactgatgtaaaagcactattttttcnccagggttctttctcctccactccactaccatctgatagggttatcctcccttccccatgtaatttttttgggggaaaaaatccagtgttcctctctggagagagcgaggcccctgtctcccctcgtgccgaattcgccacccaggcc

SEQ ID NO: 454099 - DNA, 1043 bp, Homo Sapiens
accattggttcccccccggcaatggttccggggactggatggtgggggttgagttgggcccagagccctttggctggtcccatggggcggacccttgatgttcgtaaaggggtgtctggccttgaggcccagtaagggtaaagcgggtgtctgtcgtgatgttctgcagctcctgttggcctgttgatgtctcggaacacccacggtgtagctgatgatgcgcccgttcctctcccgccaagcactgggcgggttcccaggccagttctgtggtagacgtggtcagtcctgtcacatgcaggttttgggggaagccgctgggcaggtcttcgggggtcctgatctccttctcgaactcctcacccaagccagcccggttcttggcagcaagccggaagatgtaggtggtccccttgtgcaggccggtgactgtgaagtgctggtcatccttgccgaaatctatggtgttgggccgcgcctcgtcggcccggcagtactgcagccggtagcccagcagctcgccaggcagttccttgggtgggtgccactggagcagcgcagtgttcatggccgtggtgctgatcatcatggtgggccggcctgggactgcacctgttgtagtgacaattttgggcttgctgcgggcaccatcccccttggtggtataggcagcaacagtaacggagtaggtggtctccggggtcaggccgctgatagtggtttcctgggcctcggctagcatgacgtcttggatgatggggagtccacggggctcgccattctccagccgcacgtaggtgacctggtagccgcggatctggccatgctgcttgctggggacaggcagcttccagtagacatgcacagcagtggagttcagtggctccacctccaccttccgcggaggcccgctgggcacgtcctcatcggtgcgcaccagcaccgggctgctctcggggccggggcccacgtctgtgtgtgcccgcacccacacccggtactccgtcccctcgtgcggaattcgccacccaggcctcgctcct

SEQ ID NO: 454100 - DNA, 728 bp, Homo Sapiens
  misc_feature (72)..(72): n is a, c, g, or t
caaaagaagtgaaaattctatattctagagactctttttcaaaaatgagcaaccaatatattcaattatttnatagctcctaaaacatctcattcacatagtgaattttcttgagaattgtactataattattttccataaggttttccataatatttacatttacaggatttatttccagtgggagttttcacatgacctttaaagtaattgttaaaattcagaattttctgtatttctaggatttcaatctggtgggcattcttttatttataaggtccatctggagtatgtgttaccatgtgtctctgagtgagttataggataaatgaaggcattctcacattcgataccttcataaagtttttctctagaatgagttatgttataccatcaaataccactggaacaactgcaggccttaccacattttaaacattcatatggattttcttcagtgagtcctttcaagttttcaaaaagaaatggaaaaattgaatgctttaccttattgcttatagtcatagggtttatctccagtttgattcgtttcatgtatttgaggaaatctgggaaaattaagtactttcctacaccttacattcacagtttctctcaagtatgtgactgttcatgtttttgacaaaaactgtagtgattaaagcctttacatttttttacatttatagggctttcctcgtgccgaaaacgccacccaggcctcgcta

SEQ ID NO: 454101 - DNA, 821 bp, Homo Sapiens
ctattcccaaaaaatcctctaggggcggcttaaggaatttagggaaaaaagtagattacttttgggggccccctaaaaggggggccaccaaagttttaggatggcaggcacatcttttttatagccggggtttactgaaattttttaggccccgctgttgaggacctaactactgggaaaaaccaggatggcttttcaaaaatattactgtttcatggacaaaagcccctaaatcaccccaagagttgtgagccagatataacaaggtggttagggttctcttcatgcctggtaacagaacatccattttgcagccctatgggtcaaggaataatttttattttcaagtctttttatttaagaaattgcatttcataagggctatagctgcactagttattttggtaacagatttgggcaaaatacattgaaaaccttgtagaaaggattcaccattgtagatgccattaagaacatttatgattcatgggaagaggaaaagtatcactgttaacaggagtttgaaagaagctgattccaaccctcatagatgattccgaaggctgaagacatcagtggaagaagttactgtagatgtaatggaaacggcaagagaactataattagaagcggcaactaaagatgtgactgaattgctgaagttgcataataaaactttaaatgaatgaggagtggctcatgaatgaacaaagaggtttcttgagggaggctactctagtgaatatgctttgaacattgctgaaatgttaacaaagattgtagaaaactatatgaacttggccaggcgcggtggctcatgc

SEQ ID NO: 454102 - DNA, 1054 bp, Homo Sapiens
  misc_feature (182)..(182): n is a, c, g, or t
tgaaccccctgagggagagaaccccttgccgtggcacccttccaaccccttttttccacaaaattgtcttttgatacaggtcccaaccttaaggcgcccccaagccaaggacccaagcacagttccaagatgtgggtggtgggtgaagacatcccatgctcgcccttgcaggaagcctaagnatgagaaccaactccttcctcagaaaagaagctgagatgtctgcaaaaccggcctccacttcacacagcaaggttctttttgccaagcagagctcagcctccgaggacacagacatctacagcatcattatccttaccaagttacctcgtgcttcccagggtgtcaattcaattgtagccactctgtcttgcaacagcttggctatttgggcttctcgtatctgccatccagctgcctcctagtaaccccagagatggctgggagatcagactccagttgtctttcttgggactgtgaccctgtgcctgcaaacagagggcaggggagttgccagcctcacatctgctcagggagctcatcgggcgctgagctattcctatccttgcagctgccagcacaagtagcacagctactcagcacagctgagtggccaactgtgatgccaccaagggctcgtgccgagggcaggtgggaaacacgaagagcccaagccaaaggagcaggcaggtcccccggggcctaggtcacatgtgctcacaagatgttgggctggaggggtgggggtcatggggttggccacacagactcatacccacaaacacagttctctcactccacacctctaggccaaacagagtctgtctgcttaaaatgaaactaggtcatttgtgacctgctgtaggacccacctggcagcagttcttcatcagctggtttggctgcaagggaacagggcagtaagcaaacggcttgtcacagtgatacacacgcttggcacttttaacaactgctcttgctggagctgtctgtgaccaagcagagccgggcaaaacaccagcttctccctcgtgccgaattcgccacccaggcc

SEQ ID NO: 454103 - DNA, 757 bp, Homo Sapiens
catcttgtaggctttctaacaaatttccgccactcttctacaaagaactgagacacgatgtagaggacatccgtatcctctggccagttactgagacacggtctgtttttatcctggaacaaatttgggagagaagtcttttgctcgtttgcaatcatcttatgtaaggcttcattttcttccccttctctttctaaaatcttgcactgtgaacagcactctttgtaacttggaaactcaggagcctttggaaagtactgctgcagtttgctccaagcctctttagaaacaagccttctttcattttcagatatgcataactcaccatgtggacacagaatatcttcattaaaatttaattcctcctcttcttttctttcttcctttgattcatctttatttaaggtgctaccgttcatctttccgttgctttgttctgcatcaccatcttgctcatccagctgttcaagagctagctggcgccaactccgcaaggaggacttccccacccaaaatccatcgctgccctttactgctgctttcagcagattattaacagttttataatcttcatttagttggttcttcagacgcaatatgcgacaacgttctactacacattccttacacagggctttcacagttagtcttggacctcctaccatatctactatagaaaatgtcagctgcatattcagatatcctctcggaagtatgtagtcgactacatacttccgacaaaaagcaagactgtctc

SEQ ID NO: 454104 - DNA, 1127 bp, Homo Sapiens
  misc_feature (289)..(290): n is a, c, g, or t
  misc_feature (472)..(592): n is a, c, g, or t
  misc_feature (642)..(715): n is a, c, g, or t
tgtttattcgatgccacgggtatcaggctagagaatacacctccagtgtacctggtataccttgaggataggagaggaaaaactggctatgagacgacaattactgaagctgagtgatgtgtacatgaaaatttactattctttttttatatttgaaattgatgaggtgctgggaagctggctttctgaggggacaacaggaggggaattccttgatttgctgcatttatcactttccatggtgtaaaatactcctgccatggccaatttgttattgacatatcactannaggcagagttggagagagatgtgcaaagatggctcccaactagaagataccactttctgtaatcaactttttataatgaagtttaaaaatattaagccctgatacattatagggtaaaaggaaatattcatataaattaatttaaaaatcaaaatacaaggctgggcacagtggctcacacnnnnnnnnnnnnnnnnnnnnnnnnnnnnnnnnnnnnnnnnnnnnnnnnnnnnnnnnnnnnnnnnnnnnnnnnnnnnnnnnnnnnnnnnnnnnnnnnnnnnnnnnnnnnnnnnnnnnnnnnnacaaggtggcacacacctgtagtcccagctctcaggaggctgaggcaggnnnnnnnnnnnnnnnnnnnnnnnnnnnnnnnnnnnnnnnnnnnnnnnnnnnnnnnnnnnnnnnnnnnnnnnnnngaacaagactctgactcttaaaataataaaactacaaagcttatgtttactctagctggcctcttatctaccaccaccatcccacctcagcccagtttgaaatgcaattccacagtaagtaatccctcacgttaagcttcatcttagctttattcctttgtatctgagaagcattttttaactttccatatattattcaaaatgggtgaccaaatgaaccatctatacaatctttgctcaattaaaaatatcatttctactttcttcattgtgcttggtttggatattccaaacaatcaatttaacattatcctagctacttacaagcttatactttaaagaatcatactgaggtgctttttcatatcaaatttacctgtttattccctcgtgccgaattcgccacccaggc

SEQ ID NO: 454105 - DNA, 581 bp, Homo Sapiens
  misc_feature (79)..(117): n is a, c, g, or t
ccgaaagcccgcggggagggaggaggacagagggtaagggaaaagaagcgcaggggcgggaaagaaggaggtggtctgnnnnnnnnnnnnnnnnnnnnnnnnnnnnnnnnnnnnnnnactaggcagcggcggaactcatgctgctatctttccggctgaggaccacaagcggggccgggctacagatgctgcggctgcccgggcagcgctagcaccgaggacctgacagtcgggtaggacccggccgggcggccttggcggctccagctccccatgctcggggacccggtccagccccccatgctcccggacccggtcccggaggctcctcagccctgggatcggtgcttctcccctccctgcccccctcccgcctcgaggacaggttgggggttcggcctctcagccgccgccgcggtgcctcctcttcctctctcgggttctaatggtctgggggaacccgttggggccaagaccaaaatctacaacctgcagtctcttccgcctcccacgcttcagaagcgggtgtatacgacggccagttcttccgcagtaccgggcacccatcggccaatccgctg

SEQ ID NO: 454106 - DNA, 1063 bp, Homo Sapiens
  misc_feature (130)..(130): n is a, c, g, or t
  misc_feature (299)..(299): n is a, c, g, or t
  misc_feature (302)..(302): n is a, c, g, or t
  misc_feature (412)..(412): n is a, c, g, or t
  misc_feature (519)..(519): n is a, c, g, or t
aacttcaggttaagttaggcttacggaaagttgggggttcaagaaacattttcaaggaatttttctttgccatgaggcaaaagcttggcaaaggtcattcagggtggggcaaatctccagagtcaatctncgtagctttctttgcttgatcactggtccatttcccttgtctctccagacagaaaggatgtggttttaaattccctttctgctctcctgggctgttctggtaggctgctcccacagggggctgagcattcagcaacgtttgtccgggcgttggcctccccctccatcantgnttcagccagaattaacttttggtgaagttgcttattcccaggttttaaactcctttcagctcccccctgcagctccaagatctggctttgcagctgcgtcaaccacctcnctgggtggcaggggagacgatacatatttcctaatgaccggggatggttttattaggattggcaagcggggacttcttagcctctctgttggtaataccagggaggngaaaggagggcagcctgccacccaggcaccccgtgcaggttctctggccgatgctctgcgctgagtgcagtgttgatcggtttctcttcccaagcctctcttgttgcttcatgcttgaatctcagcaggtcgccctccgtggccacagtctgcactgaggcatctttcagtcctaccttgggcacttcgcctgcctttactagctgggcctcacaagacaacttcagttcatcatgtggcttggaaaatgagttggtttggacaaaatgtacaagttcacctttttgcttaggtgtcttctcagttttaccatcaaggtgttctccagaaacttcctgctctgtcaagaatagttgtcccagaagcagttcccgtaccactttcagaaggtctggcctggattccagtaataatgtggccttctcattgaacaaaggggcaagcaggtttatgaatgcaccttcttctaggcagccaggtgcgtgggccccatcacaatctgaaatcttcctcgtccgaattcgccacccaggcctcgctcctt

SEQ ID NO: 454107 - DNA, 1207 bp, Homo Sapiens
  misc_feature (88)..(88): n is a, c, g, or t
tctcccggccaagggggctgccagagttttcctttccgggaggttccaaccccggggggcccgctgggtccattccctctgccctctnctgggagcggttttcccacaggggcccgccggattctgcccagtcggggtccccaggctcagggccaagtggagtgctgggaggcgtgagcaagcaggacgagtccgtgtgcggggggccagcctgggagcccccacggcccgggtgccttccagggggggcctgtgcccagggagcccccctcaagggaagagtacgctccggggccacttcccgggctgctgggccagggtccctgggagccagggggcagctcggggcctccaggtgcccgtcaaggaccacgtggtggcataccctcgggggcacactggttgggaggccccactgccaggcctgccagggctgccggggctggctctgctccgcagaccccacagaaagtggcggacgtagagcaggtgctggtagatgctgtcgtccaggcagttggcttccaagtccacctggaagccgtcgctgggcaggacgatgggtggggggttttcgtaggactccagaacatcctctgacctgaaggcctcggggctgtcctgggcccctggctcccaggtgctcatggggcccatggccgaggccagctggtagtgagtcagcagccggtgcagctgtgctgggctcagtgcggggaacgcagcccgcagggctgtccagctcatctggatgagctgggccctgggtgtggccagcaggttgagggtgcaggagagcttctggaagaagtgctctccagccgccccgaagccggcgctccgcatccactccaggagctgctgcaggcgggcgcaggcctggacacctctgggccagtggaagcagctcagggaggggcccctgtcgaggagctggttgagaagcagtgtcccggagaagaagaagaggtaggcgagcatctgcgaggccacctcggggtgcacctgcagctgccgcaggaggtccagggctgcctggtacacagacaccacgcggcgcagctcctcgggcagttcgggggccgaggaccagctctcacggcgctccgtctggaatggcgggcactccaggagtgccgggaggcagatgtacagggacttggagacatagtagcctcgtgccgaattcgccacccaggcctcgctc

SEQ ID NO: 454108 - DNA, 914 bp, Homo Sapiens
  misc_feature (200)..(237): n is a, c, g, or t
  misc_feature (369)..(401): n is a, c, g, or t
  misc_feature (422)..(720): n is a, c, g, or t
ttttttgaaatttttccccttaaaaaaggattggggtttaagaaaaattcccttgttggggcccttttgagaccctgggatatttttggcaagttagaaatttccatatgtccccccgcttttcccattaatttctccaataagtccgaaagcaaaaatttatttttttggggaaacgcccttggtggggaattcccggnnnnnnnnnnnnnnnnnnnnnnnnnnnnnnnnnnnnnnattaatttaaaagctgggtaatggtgggtatgcaccctgtagtcccagcctacttaggaggctggaggcaggatgattgctggaggtcagcaattttcggctgcagtgtgctatgactgtgcctaggaatannnnnnnnnnnnnnnnnnnnnnnnnnnnnnnnnataccccatgtgtaaaaaagnnnnnnnnnnnnnnnnnnnnnnnnnnnnnnnnnnnnnnnnnnnnnnnnnnnnnnnnnnnnnnnnnnnnnnnnnnnnnnnnnnnnnnnnnnnnnnnnnnnnnnnnnnnnnnnnnnnnnnnnnnnnnnnnnnnnnnnnnnnnnnnnnnnnnnnnnnnnnnnnnnnnnnnnnnnnnnnnnnnnnnnnnnnnnnnnnnnnnnnnnnnnnnnnnnnnnnnnnnnnnnnnnnnnnnnnnnnnnnnnnnnnnnnnnnnnnnnnnnnnnnnnnnnnnnnnnnnnnnnnnnnnnnnnnnnnnnnnnnntgaattactttatctaattaaactattaaataaccagttaaaatccatttgaaatataaatatatgattataagaataggcagggtgcagtggcttacacctgtaatcccagccaggaactttcaggaactttattgtgtagtcttatggcatgaaagtacaatatcatatctacctatctgtatcaatatatc

SEQ ID NO: 454109 - DNA, 1050 bp, Homo Sapiens
gggttttccttttcccaaaggcgttttttattgcaggcccctgggccaaggtggggggccccgagaaagtttggagccaccagggaacttccagagccccaaaagagggtgttccccagacctggctcgggggagctccctaggtttgggcttcctttaaaggttagccgttctctcctagtcacctgcaaacatggtgagtgggtttgggggcgtttttcagccctgtttgtgttacagctctttcagtcccgcccttcagcggttccgagttcttgtcgcaagtccaggaagaatgaggtatatggaaaactggagggtgagcaaggcagagaggagcttcattgagtgacagaacagctctcaggagacctgaagtgggtagttcctttctgcaggcacgtggtcctgaggagtgtccagctctcaggggagaggagacccggagtgagaagctcttatccgcaggcaggtcatcctgacatctctctgcgagtctagctgagtctgggacttctacgggttttgaagggaggaagtgtgtgctgattggtccatgggtggccatcggcggggctggaaaaaacaccaaaagttctcactcccgcggtggactccactgggaaccgacaggccccaggcctcaggtcgtccctgtcttcaaagtggggcttcaccgggaccgcccctttccacccgggaacctatctgcctacctgctgccattgacaggtttgtccaccgcaatgccctggctatccgtgccatgggggacctgcaggcccctttcagccttcctccccgtgctcgttggcacccaaagtctggagggggcagaggcggcagggggctggcatggcagggctgccccgagtgtacgcacacccggccgggttgcaaagcgcccggacttgaccaaaactttgctcagtgccggctccgtcactggtagtcgggagaagccacgcatctggagcaggcacttctgagcctgcagaggaaaggggacttcccggggcccccgcctcgtgccggaatcgccaccccagc

SEQ ID NO: 454110 - DNA, 1058 bp, Homo Sapiens
  misc_feature (682)..(763): n is a, c, g, or t
ttacacccacgctcgatagatgtcggggcgggcaagtacaattgcgagggcacccctttgttgccggggagcagccgattagtgttaaatccgcgaaccggcaaaggcgccgcggggaccaaggggttgggaggccttactcaccataggccgggggaaacccttgggggccccctgtttggcaggggaccagggctggggccgggcccaagccccccctgggcaataataggggatggggggctgtcataaggccagaggttggaaggttgctcagttcaagctcagggttgggccagcttcatctcctgccaggccctgccactttttctgcttccccggaatgcgggcccccccgccccataaggaggttcagtgttgaggttgccaccacagccaccatcagaaccagagggcctgggggcttgtgcaggtccatgcaggtgacgttatccacagctagctccatgccttctgggcacaggcattcagccagctggagctctgcctgccattggcagtctctcaaagggcagtgactgcagttgaggtgccttcggatctctacctctccgtggttctcggtgactgccagaggctgcaggaagagctcgctgctggggtgtatgaaggatactccatcttccccatcagcccagaggttgtcagtctctgaagcgtnnnnnnnnnnnnnnnnnnnnnnnnnnnnnnnnnnnnnnnnnnnnnnnnnnnnnnnnnnnnnnnnnnnnnnnnnnnnnnnnnnaagggtcgcccaagcctcggagcagccctggccgccctccgccccctcctgcagtgagcggccggcctgcggagagggagcccgcgacgtccagccgcccccaccacctgccgccccgcctctcccgccgctcccgggcgcctccgagcggttctccagtttctcgggggaggcctgagtccggcctcggtcccgcggcctcaggtaggcccgaccgccgcctccggccgccaccagcaacggttccagctcgccagcgcctcgtgccgaattcgccacccaggcctcgctccta

SEQ ID NO: 454111 - DNA, 1333 bp, Homo Sapiens
  misc_feature (145)..(145): n is a, c, g, or t
attttttccaaggcccacaatgccccgtagacccagttctctattaggggcggggggcccttcctggggacagggccggggcttccttccctggggacggccaagcagacaggcccctttcccagccaggccccaggccccgaanctttttttaggggaagccgatggagaaccctcccatcccgggggtcccaagtcccaggccggccctgttccaaccatttttgggttggtccagtaccagcgggcctgttctcttttcggtgcccttgtggaaggcatccaaacttcattcaggactgaaccgccagaagaaagctgtttctggcccagtgggatttggcaccctgactggggggactgtcctttttccagcccgggtcagcaggaggggtgttgccccacggttccgggctggagggtggccagggccaacacacacacagtcaccccactggggatcagagccaggcgctcctggaaactctccttttcaggctgggggaagtggccagattccaaagccctgaaggaaaagaggcgctggatgcgggccagggggacatctccaggcatctcctgaaggctcagcccctgcagctggtctgctatttcaagtgatcctcggtgcttctgggccttgctgagctgtctgtggaggtgggtgagcagctggtggcgacaggtgatggagacagactcggtgacaaggaaagcagtggcataaggatcccggtggcccagacacaaggccaggaagcggcagaggtgggcatagagcccactaggaggacagtgactaatgccccggaaagcaacactcagggagtcacagatggagtccagggtagaaagaccagtggctacgggggctgaggggagccggagccgaggaccaaggtccttgtcactctccttgtctgggcatgggctgggcagcttcttcttgctggaatccagcctcagcagctcccattctccagaagctgcctcagggcccggagctggagtcttcccacctgaggctgagtcttccccgtcagagcccctgaggatctcaaagctcatttttctccagttgtcaatcagttcttcctcagggatggtcctcatgatctcagggccaggcctggcctggtcactggccctctggggaggccgctgctgacaatgtcttgatgtgagcttcttggctctcggggtcctggcattcaggccagggttcccaggggcactatctggggcagccacggcatccgtcattaggctcagggccttccatgctcgccctcggccccgggaagcagtgcctcgtctggcagcatgactctga

SEQ ID NO: 454112 - DNA, 1125 bp, Homo Sapiens
  misc_feature (314)..(323): n is a, c, g, or t
  misc_feature (377)..(436): n is a, c, g, or t
  misc_feature (455)..(477): n is a, c, g, or t
aaaccctttgggaattttggccccctctttgtttccgccaatcccaataccttgcccccaaaaattcccgggggggtcttagcctccttaaaaaataaacccccccaaaaaaggtggcttggggcccttgtatggctcccaaccccctttatatccccaggccacttttgggaaggccttgaggccaaggcgggatccacaaaagttcaggaaggtccacggacccaagcctaaccccaaatatggggggaaatcccaggttgaggattccaaaattttttatttaaaaaatccaaaaaattagcccaggcatnnnnnnnnnncggcctatagtccccagctactcaggagggctgagggcagaaattgcttgaacnnnnnnnnnnnnnnnnnnnnnnnnnnnnnnnnnnnnnnnnnnnnnnnnnnnnnnnnnnnnggagcgagactccacctcnnnnnnnnnnnnnnnnnnnnnnntacacccagaatctgacctcctctcaccatcccattcaaccaccccaagcctgcaatgctgtgtgactggcctcaggctccaatgcctgggcctgtctgtcctctgcagccgccacagcgatgctctgtgaagtatcagccagcacctggcactgtcctgctctgaacacttcgcagcctctctcaagcagggttccagagcctgaggccctaatgctctcaggcagccagtgtatgcaactaaggagctgctctcccaggatgaggtgcctcccatccctgggagaactgaacaaataatcactctagtcacttctgccttccagggctcaggtgagccccaatgagaaaggctcctccacaggcttccaactaagagtaaggcaaaatctctccgtgaccttccagactctccatgagccagcccctccgttatttcttggaactcatctaccatcttctctccctcagtaactgcactggccacacggcttctgtgcaatcctgcatttgtcctagctggccccgatactcagaatgtccttcttggctgggtgtgatggctcacgcctataatcccagcgctttggaggccaaagcaggagaatagcttgagcctcgtgccgaattcgccacccaggcctcgct

SEQ ID NO: 454113 - DNA, 1000 bp, Homo Sapiens
gggccgggggccccctccggaaaacaaggcctgaagtgggaaattttcttgaagaaccttggaggttttaccgtcgaccgggatggacggcctctttcccccgggttcccggggtttcccctgggcagcccccaaccagagccgggggctcccattacttccactttctaagggagaaggggtctgggctggttcccactgtggacttggaggccagagccgaaactagctgcttccggtggagttcgagctgacatggtttgagtttatgtggtggttaaaactggtcttggagctgggcgaactcttggaattgttctgatgctggggttggggttgggggagacggggtggagagaacagaagtcagtcctgggagccctggggatgggtcggggctgcctctgcctgctccaacccttgctttttattgccttttgcagtctcccctcagagccaggtacaagggccacccctggaggcacaggtacctgggaagagctatggaattaacagaacctccaatcagggtggaggcggcccctcctataatatccaccttggttaagcctgcaggcatggggttacgctgcctgggctggaattctcagtcttcccctccctcgcagagtggccttgggcatgcaattccatctcccagtttcctctcctgtaacacgggagaagagcagcttccgcacagggtggctgggaggatacaatggggcctcatatgcaaagggctctagcgagggccggcctgggagagatgggcggtcgttcccattgctcaggccttccctctgcatcccgtgagtgctgggcccttcatgttgcagaggggaggaggagggaggcaagaagcgtttgcttcacaggtgctggtgcccatatgtgggccgccacccgtggctctaggcaatgggcatttctatcctgatgtttcaggcaggcaaactgaggtgggcctcgtgccgaattcgccacccaggcctcgctc

SEQ ID NO: 454114 - DNA, 988 bp, Homo Sapiens
ccccttttggccaatttgaaatttttaaacggaatttcccaagccccaaaaggggggggaaatggaggactccctttaagggaaggccccggggcccttaaggggaccccccggccttggggttttcttccttaaaccccttttggaaggtggggaaaaattttggccaaccccagttccaaggccggaaagaagggtggggggcccgttttcagggcaaagggaggccctaatgggcttttcagtttcaactattggctatttggatgcccgaaaccgtcggtttttcagagggctttcaagatccggatgtccagtgctgtcgggctttggggaacatggttccggctctggagtttgttactggtggccggtccttcctccgccagagaaggtagtttcgtttccagaagaggcactagggtttatgctaggaagctgtgacatcccattggtgacggcaggtctcaatacagatttgttctgtcgactgatacaagggcagtttgctttaattccccacttgccccgggcagcatgtaccatgtctccaatattgtaaagagctgtgccaggaataatttgtgtgggcatgagattctctggttcgtgggactgtccctttgcacacttcaaccaggagaaaacttcttcatcacccatctcttctgtctcactgcgtggccggcttttcctgagccggtaacagtcaaggcagaccccaaatccacatttgcgacaaacccagtggatgttgaagagagttgtttcacacacatcacacatctcccgtacaccacgcacagctcgcttccatgccactttctggtgtggctccaccatcatcatggcctccttctcagacattacgagctggcagaactggtccccaacattggccaggatgtattttgaggtctctagatctatcccttctgctagggaggaagagggaatccacagcctcgtgccgaattcgccacccagg

SEQ ID NO: 454115 - DNA, 1116 bp, Homo Sapiens
  misc_feature (1045)..(1045): n is a, c, g, or t
  misc_feature (1054)..(1054): n is a, c, g, or t
gggggggaagaattttaccccaaaggaagcaaaatcgctccccgccccacaaaaggaaaatcctctctttttcttgaaaaaggcaaaaatcttttgtttttaaagggcgcatggggattatttaaaggaaactgtggattcccccaacagggaaaattccggttctttttcccttcttaaaggaaaggggtcctccccgccccggtggacccgtttccaattgccccggaaggcttaaccccttatttcaatatccctttaagaccggtcccaacactgtttgggaataatccttaattttctcggggcttttctgaatggaggactctataaatgggtccttaataagcaagccgggttttctgttttgctcatttccagttggctgggattattctgagtccccaaattattatttagatcccgggtggtacggggaggaaaaacacggggcctggagagatgaaaactgaggaggaagtggggaggaggaggaggagaaagcactgaacctggaagctgatctgggtccacactcagatgggcagcccgcgatgatgacagctgacccaaactaatgcgctcgtcactcaagccaaaggaactagaatttgtactatttttcagttcctgcatttccacaattgctgcaatctgagagcgaagaaaagtcagctcattttcaagggcagctatttttctaattgcagcttcatttacaggcaggtcatttttcacagtttctttctgtcttacagcaggtgacagtggatcccgaactagtcgcaaaggatgaaaaatttccactttctcttcttcatttttccatatactatttcgaaatctgagataactggcttcttcatcatttgccacatacaaaatatcagcaaaagatggaaccatagatccacaattatcagagtctacagagttcaagagcgggatcaactcaaaattaggtcttcgacaaggttccagtggaagcattttcccaataatacgaacaatactcctagttgatccatagtctttattttcccanaatcagcanaaacctgctagtccctaggaccggactgctacttccgcctcgtgccgaattcgccacccagg

SEQ ID NO: 454116 - DNA, 1040 bp, Homo Sapiens
  misc_feature (363)..(406): n is a, c, g, or t
ggcctgggtggcgaattcggcacgagggtagaccccaggcctggctgtccgcagggccaggagctgcagccatggcagccaccagcctcccacatgagccccagctcccagccccacacgcccactcctttgcccatgtggtgtcagctctggcctccgcttccacacatggaccctcagaccttgcacatctgttgtttcccttgcagggcagtgatgatgacatgaaatgaggtggggtcactcctgtttagggatgagactggggcccagggaggggcaggtgtgaagttgctgagggcagagggagacccagggctacctgctcctaatgaccagcctcacgttctccactgctcactnnnnnnnnnnnnnnnnnnnnnnnnnnnnnnnnnnnnnnnnnnnntgtaaacagaggtgaaaacactcctttaccaactgttttaggggccactcttgtttgaggccttgaacctcctttcagttccgtggtggtcctgagcctctgaatctgggtatggcccctgctgggtcctggtctcttaggcagcacgatggcctccctgctcaaggccctgcacccaggggcagattgtgggaggcccactggccatggctgggccctatcgcagagagcctgtcagcacggccatttccacacccaggctggctgggaagcaagctacgaggtgctcaaaggccctctatgtctgcaggtagccccgtcccacacagggcgaggatcgttgggcctccttagtagccaaaggaactgaggtccagagcagggaatgtgttgcccagtgtcagcatggtctgctctggggtcaggcgtcttgccctgggtcctaagccaccccaagccaaggccatgtccctggggccccattttcctcttgttcgaaggtttttggggtttccctattttctgaatgggggtggaaagggaaaggcctgttctttctggggggggacccatgagggcttccaaggggaaaggaactttccaaggctttgaacctttggggaattggcaccct

SEQ ID NO: 454117 - DNA, 1046 bp, Homo Sapiens
cgcgtgttgtccgcgggggaacgggaaaaaacgctttccgggcgcgcgtcagaatccccacaaccccgctttcttccccgcctccctttgcccagggcccttggattccctccagggccgccgcgaatctccttggggccttattcggggaaggtttttttccccaacccgcctgaagagaggcccccgtcttaggcgggtttggcccaaccccgccctggggactttttcccccccttcccaatatgtggttgggggcttgaaaggcccccggatgtaagccttcgaaggcttggggctgttgttctagcagggctgtttgtacccccttgcattgtcatttttttgcgctataaagctgcatcacgtagaagcatgttgactggaaggctccattcgtgccgaaaaggcctaagcccttcctgtcacctagattcgggcacgttgctcttccgtttgcaacggcatgttctttatcactctgagcaacctttcttctccctcgattccctagcgaggcttgggaatcgcgtggaagacacttctctcaccttgcccggttccgtaccagctcaagcccgtccctgttactccaacctgcgccccgcctcccacggagcggccgggaaggaccttgtgggacgtggcgacccggcaagggggactggccgcgaccctccggccgtcgggctcgggcggctgcgctcccactaatcttcccagaaacttgacaactgcacggcgacggccggacggggattcagaggggtcacggggccaggctgcaccggcttcgccgtgggcaggctcggaccgcaggggaccccatgcccgagccccggccctttccgtcccgtcgggagagggagcaggcagaagtcaggggagcttcagcgggaccgaggctcgctctcagccgcggggccgcgggctccagggccagcgctcacaatgcggcttcgcgccctccatgcgggagcgggtgcgttgccatgacagcgacccccgtggcgccctcgtgccgaattcgccacccaggcccgctc

SEQ ID NO: 454118 - DNA, 1114 bp, Homo Sapiens
  misc_feature (51)..(64): n is a, c, g, or t
  misc_feature (465)..(465): n is a, c, g, or t
tctcgtgtggggggttggaaaccccttccaaccactctttccccggcgccnnnnnnnnnnnnnnttctccgggtttccccgggaccagttccccccacggggtcaccccggtccgggttccttccaggggcccaaagggaaggggggttccaaagacgcccccccaattcttccctaattcccccggggtttttggggggggatgggcccttcggcaacccggggcaagccagggcccctggcttttcgggggggtccttttcgttcccgggtcaggagggcccccttgggcaagccatttgcacccccgggaggtttggacatgggcggaggacgttcccgagagggggttccgggctctgtcccaaagatgctctcccccgtgtaggaggtgacgcagcgcacagctggcaccgtttgggccttcgggctgttgatggagatggtttcgtgtgatctcagagnggcaggagggccggggccagacctctcggggctgctgccaggggcgctggagtcggagccggtggggtcggatgggtcgtagacctcgctccgcagctgcttcgtcttcttgatggagaagaggggtgaggggttctccttcctctgctccttatcgtccacaggccggaacgtgttacagaagccagggctggagagctggctggaatgtgccatgtttccaggaatattgatccggaagctctcaaaggtcgacccgacccctttccctcttgatggtcccagtggggccaaactgccatgggagctgggggctgggggccgggagctgcccgtgtgcaccccgggctcccggggcaccctgctgctggcctcgctctctgcccgtgtgcctcgccctggctgcccggtgccctccctgccagtcagtcggctgatgcaggcactggggatctcaatgctctgcccgtgggccggggccgcatcccgtctgccaccaccgtcatctctcctgatctttggtatcctgggtagctcagagatgtctgttcttctgggcgctggcttcaggggaggccccggcaccacactgcgacatgggggcttagaatctctgcttgagcctcgtgccgaattcgccacccaggcc

SEQ ID NO: 454119 - DNA, 1043 bp, Homo Sapiens
gggcagtgccgggcccttccaaggttggggctaaatagggcccattttccggtcaagggattggttttccaaagcttgaaaacctttggcagcacttggacggaaacccccaaggttttagccccggattccttcaggccaggtgtttccttcggcaccttttttaaggcccgttttcgggtcatctctttccagcggcccgcccgccaggtcatttttaccacagcaccagtcctccacggctcttgacaatacgtggaggggcaagttcataggtgaggtctcatgctcttcctaggagggaggagcgcggcgggcgggacccgcagctgggcttggcccgggagcggggaataagctcgctccgcgcctctcagtttagtggatgaagactactatcccagaagccgtttcgcctcgggctggcgagctcctccccgccctactccctccgcgcgaagaagactgagcatgcgcaacagggacagcgcctgcgcaaaagactacgcgagcgggtggctgggttcactgcaactcccggcaggccgctggcatttttcattccctcccgtgaccagtgacttccggcacgaaggggcggggctgggctcgtggctgagccagcagctgcagcagctacgggagtggccgggtggccggcgggtgccagccgccatggaggccgtgccccgcatgcccatgatctggctggacctgaaggaggccggtgactttcacttccagccagctgtgaagaaggtgagcttgccttccatcttcccccctatccgccgcgtatctccgtcgtctgcaagcgcgtgacgcccccctgcgcgcccatcacctcctcaggcccggtcgcagggtcctgtgaggccaggaggggccttcgccggttttcctcagcctgtcccacaccccggcgcccgcaggccattcttctcctccccgatagccccgtgctagcacctgcatcttcatctgaacccggttcccgacttctgccccgagtcatccctcgtgccgaattcgccacccaggcc

SEQ ID NO: 454120 - DNA, 1090 bp, Homo Sapiens
ttcaagttggggtcgggctgacgtgagcgaggttggtcatgtgctcgggtgccagtgtacggggtggcccgtgagctgatgacgaggactggcttttaatccttggtggtgattaagagaaagcttattggggcctgggagcagctccccgccgacccccaccaccatgtcgggatccacacagcctgtggcacagacgtggagggccactgagccccgctacccgccccacagcctttcctacccagtgcagatcgcccggacgcacacggacgtcgggctcctggagtaccagcaccactcccgcgactatgcctcccacctgtcgcccggctccatcatccagccccagcggcggaggccctccctgctgtctgagttccagcccgggaatgaacggtcccaggagctccacctgcggccagagtcccactcatacctgcccgagctggggaagtcagagatggagttcattgaaagcaagcgccctcggctagagctgctgcctgaccccctgctgcgaccgtcacccctgctggccacgggccagcctgcgggatctgaagacctcaccaaggaccgtagcctgacgggcaagctggaaccggtgtctccccccagccccccgcacactgaccctgagctggagctggtgccgccacggctgtccaaggaggagctgatccagaacatggaccgcgtggaccgagagatcaccatggtagagcagcagatctctaagctgaagaagaaccagcaacagctggaggaagaggctgccaagccgcccgagcctgagaaacccgtgtcaccgccgcccatcgagtcgaagcacccccagcctgggtgcaaaatcttctccaccgagaacccggaaaaaggcttgaagctggacatcggaattccgggaaaggcttgggggcccccagggggaaactgccggctggtacaaaccagacccctccgaaaaccggggcggtaatcatgaagaacctctaaaatataaccccggccgaagccggtaaaaaaacctaaatcctgggacctttcgggagggagggaactcccccctgcgaaaataattgggcag

SEQ ID NO: 454121 - DNA, 525 bp, Homo Sapiens
aaagacccccatctctgtgaaactgtgtttcttccctcaaaatcatcccgggctcttttcctcgctcccagtaaatccaaccacaactggttttagaaatggaatgtcctccccagtgaataccaggtttctatagttctccaacatcacatccctgtataagtccctctgattagggtcccaggtattcccactcctgccgagagaagtctatggccacatccctgaatgtcactaattcctgaaactgcaaacccatgcattacaaaattttaaaaacattttaaagaaggaaagataggagattacaagagcacattagagaaaaggagtgatatagtatatgtggctaatgactggtagcagactaaagcaacgtgtctacatattcctaaaggatcctattgccacaggatcctattcctaaaggatcctattcctaaaggatcctattgccacagacaaatgtttctgcatgttgaaggttaccacaataattcagacctgctgaggaatggataaaaa

SEQ ID NO: 454122 - DNA, 1190 bp, Homo Sapiens
  misc_feature (432)..(443): n is a, c, g, or t
gggcggactaatctcatccgaacaggcaaggcggagatgtgcgtcggactcacagacgagaaggcgaggtcccggcgagtatccggctcgccgttccttccgcccggcgcgagggcgacttttgcgtctcgtacacgcggggcgcgccatcttacgcacgggaacgggcgttgtgcttgaagagccccgctttatataacaggagcacgagagcgcggggtgggcaacaacaccgccggcgggtcaacgcgccccagggggtcgggtcgtaaagatgtgggcgaaacaacggcggggcgttctgcgtcccgggacgtggggtcttgcggggagggcgcaacactcttcggccttcgcgaggtcctcgcggaaggcaatggcctccggtcattagggccctccggggcggacgtcccgtcttttatgcaggcnnnnnnnnnnnnccaacctccccgctggggcggatgccccccgcatccaattgagggggagtccgcggcgccgcactttcatccctgaacgtgggacaggccccttcgcttgggaccgcgccgcaagttggcgtttcccgccggtgccccccgcgccggacagcgggccctagggtttacaggtccgccagcccgtcgccgtctgggcccaccggccgccttggggtcctgggagtcttgggcggccccgccggccggcgacacgggctccccgggcgggcgcggcgcaggagacaggcactggccggggcagcggatgggcgaggagccctcggagatcatgcggctcaccaggttgctgagcagccagggcgagtccgcgtcctcgctgaggtccggctccgactccgaccccgactcgtactcgctgttggtgtcgtcggggcccacgggcaggaaggcgggacggcgcgggggttcgcgcgggggctccggctccgaggcgggcgacgaggcctcctcgatggagttggtgaggtgcgaggagcggccgctgctgctgcttccgccatcgctgctcagctccagctccgtctccgagatggacgagatcatgcgccccaggcgcgcgccgcccgcgtcctccgagtcggagccgggcgaggacagctcctggctgctgcgacgtcccccgcggccgccgctcgagcggcttctcaggtcagcctcgtgccgaattcgccacccaggcctcgcccc

SEQ ID NO: 454123 - DNA, 1052 bp, Homo Sapiens
  misc_feature (80)..(92): n is a, c, g, or t
  misc_feature (327)..(327): n is a, c, g, or t
  misc_feature (413)..(413): n is a, c, g, or t
  misc_feature (738)..(738): n is a, c, g, or t
gccccccctcttcccgggttttaggtttatgaggatttctccccctttctttctggtaaaggttatttaatattatgccnnnnnnnnnnnnntccttagccaaaagaagattacaaaagggattccttcattagctaagttaaaagagatgttatccacaaagtttttactgcttataattaaaggcaataatttagggacaatgtttgtgtttgatctaaaaagtggtcaatcctcatggatggacagaagttgaatatgggcatgtgtaaatatttctttctctaggtgtaggatatttattagagataagaattaacttttccntagtgtttagaactgagatagtataaaggacagcctaaagaaaaaactattctccaaaacccttctcacaagtaatatcactctcntaattcaagacagaaagctaccattaccttgatgctgtaaaataagaatgaaacaatgatgcttcagcaaagcatagataatacaagtggatctctctaaaacagtatgaatgttagaaagattcatatcttttgttgctgaaagacatcaaaacatctatacccaaacatcccaacaaaacacaaaaccagaaatgcaagaaaatggataaaacactatatacggaagaaactccagctcctgaaataaatgctactggaccgatgctgcccactggtacttcacagggtactgctgcagcaataacttgaaggtaagatatcntggggaaatcccttcagtctatttgtcaaatagaaacacaactactcatttcaagggaaggggaattttcatacactgcacacaaaactgccaactaactcttatatctttgttgtttccttaaaactaaaactcattagggcaatacattcaattcaacatctaaaagttaaaccaagcttggcctcttagaagttttggactaatccttcaaggggatttatatcatccacaaccaattacaaatcacgtaacaaaattcttctttcaaatgtcttaagcctcgtgccgaattcgccacccaggcctcgcat

SEQ ID NO: 454124 - DNA, 1027 bp, Homo Sapiens
  misc_feature (152)..(160): n is a, c, g, or t
  misc_feature (287)..(287): n is a, c, g, or t
  misc_feature (756)..(756): n is a, c, g, or t
ttttttagggtgccaaggaggaaaggttccgggccatttggggaaaaaattgcccccccgaacgattgagggaagattgccgagggaggaatgacgaggggagcaagccttgcttcagagcccggggtgatgtcacgaaagccacccaaagnnnnnnnnnaggagccttccccccttggcaagcccctgcagcacccggagggcaagctgcttttggaggccatgcggagtccagggcagaggggacagtgggatgggctgcctgttgcagtggctgttcacgtcancagtgctcagccaaggcagtgaggacgaggatgagagccggggcagctgactgggcccgcgatgccgctcacaggagaggcgtctgcacacacctggcaactgcaagacttgttctcaagggtaagtacacttggacaaacgaacaccaggctacttacacagggtgagagaattcataaatattagttaaggatctaaaacaaacttctcaaataactgaaagctgaaagcctctggaagccaactgtccctgcacaaaggtttacaattgagaaatatctcctgttcctattttgtcaagtttctttaatggctgaacagaaagaagcttcaagtaatggagaaggcattgtctgagtgcagctgctttcctgggacgcctgtgccgttcctgtcttccaaatcctatgcttgggaggcccctgggaggtacatttttgccagggaaccaacctgaccttaaaaagnatgagtgtgacacagccggctgggcaggaggatggaggtgccacaggacaccacctgcccacgccctggccagcctggccatgctgccgagtgcggggaggccaccccacccagagggcacagggcaaaccctaagcacgggggtattgcccttgaagccccaggggatgcccgtgccggatcctcatgcctcattgactagcctgcttgctgaaggagcccaggggcctgagcccctcgtgccgaattcgccacccaggcctcgctacct

SEQ ID NO: 454125 - DNA, 717 bp, Homo Sapiens
cctgggtggcgaattcggcacgaggtaagaaaaggagcatatgcagccatcatggaggaagatgatgaaggctccaagttttgtgaagaggacattgaccagatcttgttaagacgaactacaaccatcaccattgaatctgaaggaaaaggttccacctttgctaaggcaagctttgttgcttctgaaaacaggacagatatttctttggatgaccccaacttttggcaaaagtgggccaaaaaggctgacctagacatggatctgctcaacagcaagaataatttggtaattgacacacctagagtacgaaaacaaacgcgccactttagcactctgaaagatgatgacctggtggaattctctgatttggaaagtgaggatgatgagcggccacgctcccgcagacatgaccgtcatcatgcctatgggcgcactgactgctttcgggtggaaaagcatctcctggtatatggttggggacgatggcgagatattttatctcatggacgcttcaagcgacgtatgactgaacgagatgtggagaccatttgtcgggccattctcgtgtactgtcttctacactaccgtggggatgaaaatattaaaggcttcatctgggacttgattagcccagctgaaaatggcaagacaaaagaattgcagaatcattcaggtctatctatccctgtgcctcgtggacgcaagaaaaaagta

SEQ ID NO: 454126 - DNA, 1095 bp, Homo Sapiens
  misc_feature (537)..(537): n is a, c, g, or t
  misc_feature (819)..(819): n is a, c, g, or t
  misc_feature (878)..(878): n is a, c, g, or t
  misc_feature (904)..(904): n is a, c, g, or t
  misc_feature (907)..(907): n is a, c, g, or t
ggattgccagcgcgggcccgcgcttctaggacgttgtcgacccggtggccaggagggggtggctctggagcgtcgcaccgaaggagagagcctgttttatgctaggtccagggggaacccgcctccccagcgcgcgcgtatgcgcccgcacgacacgcgggccgcccacccacgccctcgccctacaccagcacacctccgtacccccacccaccctttggcccccgcctttaattgagttagtacaaacacgggcgttctcatcggaggccaacgaaagtgggaggctcccgggtaggagccgctctcgtttggaccagtccgaagaggcctccagccggtccgaggtctggggcaccctttcacccaggttttggcaggtatccctccttgagtgtcaggggcgtaatttggtcccgggtcacgccgcccgtgcaggaagtttagtaggcaggccagcaccactgctttggtcagctggaaggatgcctcactgcgcaggtccacccggaacaccaggtccagatccttgtagcncaggccactctcagggtgcagcacgtggctggcagctgaaccatgcagccgcacactgtgcacatgtagtccctgctcttccagggtgctgcggaccacctgcacgaatctgccggggctgcacgctcagcgttggggaagttgccgcgcccgtgaatgggaatcggctcgctcagaagagcgtccagtcgcttcacctgtggccagctcagcccactcaggtgccgtccggggaaggccgataaggcctccgggtcggggccgccgcctgccggggctgcncgttgccaccgccgtggccgcagccgtccccacctgagcagccgcccggtccctgcgcntcagctccgctctccgacggcatcantcncgcccggcccccgggccccgacggcagaaaccgtgggggtggttaaggggaggaggacagggagagcggctgggcaggggccaaggcggggggcacgaaggcagggacggggcggcaacgacggcgagacaaagccagggaacacctcagacggccctcgtgccgaattcgccacccaggcctcgctc

SEQ ID NO: 454127 - DNA, 1051 bp, Homo Sapiens
tcccccctttggcccccccaggtacttgctttgccccttgggtttcgccaggtttggcccttcactgggattgttcattcgctaggccctgagggatgaccactgaagattctgctttccccgtcccacagggttgacaggctttaggattgttagccggtgggaggcgaactttacttttctcatccttgccaaccagtattgaagcaatgatttggcaagccttggctcgatcaaagaaagtgtccttgagagtgaggagataggcacctgttagaaaatcctgaatagcagcaatcagcggttccccattcctcgggggttacaagatttgctttagtccccatcagaacaagggcctctgctttagcttcttctgtttgaggaagatgaaggttcatttcatcaccatcaaagtcagcattatagggtgtacagacacactcattaaatctgaaggtccggtggggcttgaccctggccagatgagccataatgctcaatttgtgcagcgagggctgccgattgaacagcaccacatctccatcgatgaggtgtctctctacgatgtcaccatacttgagctcttgagccatcttttctcgatttccgtatttcaaaaaccttttcatctgcgtatgtctctgctgaatgaagtttgctcctgggtgaacctcagggccgttttgaaccagtttcctcaagaaattgatgtttgctttgtttaccttctcaggaaaagttagaattttggccacatgaactggcacagctacctcatcaatccggaggttggggtcgggcgagatgactgttctgccagaaaaatccactctctttcctgagagatttcctctaaatcgaccctgttttcccttcaggcgttggacgaagcctctggtccacttcttgggtgccatgttgaggggaatgcccgagagctcactgttaatgtagagggcacactgcagctgcaggaaatcccagtcctccatgatcatctgggtcttggctccctcgtgccgaattcgccacccaggcctcgctacct

SEQ ID NO: 454128 - DNA, 885 bp, Homo Sapiens
  misc_feature (316)..(316): n is a, c, g, or t
  misc_feature (318)..(318): n is a, c, g, or t
taaacatgtgctttctggagacagcatcttaacagaaaagagatgactctgcaggtagaaattacaggcaccactggattacaaatcaggatggcaactgtctgttcttactttctctgttatcttgacgtagccatacctcactgttctaaagcagaccaaaggaactggttctatggtagaacaatggacgcttggtcttatgtatgaaatcttctcaagctgcacttttatagatcaccctagttccaaaagatccaaagctaccacgggctcctctgacccccccatttcctcggaggcttcaggatatcgncngacggcatttcccctcacctgctttcggggcccgttttgcgctgggcagtttggcccaaggagcgcgcgcatccagcatgagctcatttctcatgggcgtttcgcgatgtcgcggccgggccgcgcacaccaagcgcagcaagcctctgtatcaatggcccccgcggctgggcggggcgcggccgcccaaaggcgctgcctttctggaagctttgttcccattttagcgtctgagagcttgcagccggctgggaaggcccccttggtccgtctggccctttcggggaagaggccaacactcggcacacgcgatccacggcagaggggagccttgggcgcgcagaattggctgcgccccgccgagagcctcctgtgggtggggagagcccctccacccctctgctcgcttgagcgctcagagcccagggccgccgaccgcagcactttccgatttgctgcaccgagggcccgcggtccctgtgtgcggtttccaccgttgttggaggcggccgcaggcgaaccgtcgggtcctcgtgccgaattcgccacccaggcctcgctacctag

SEQ ID NO: 454129 - DNA, 393 bp, Homo Sapiens
acagccctccacaagcaacttttatccaggaatttcagtgacacccactggcccatgagatctcaataagtcacaccaagggccctggaaggggtatcaggtaatctggttacactcactgccgtgtagccttgggcaggccacttccattcacaggtgcaattccttcattgataaactgaggagcttcacctggatgcctgctgtgggctctgcagacggtggtggggtgtaagaggctgtcctttgctgtgaggtagctctggatctagaagtttgagctgttacctccttagctgtgtgctctctgatcatctatttgatgtctctgagctgttttgtcccctttaaaaatcaggagagcaacctcgtgccgaattcgccacccaggcc

SEQ ID NO: 454130 - DNA, 2320 bp, Homo Sapiens
  misc_feature (174)..(174): n is a, c, g, or t
  misc_feature (178)..(178): n is a, c, g, or t
  misc_feature (180)..(181): n is a, c, g, or t
  misc_feature (187)..(187): n is a, c, g, or t
  misc_feature (605)..(679): n is a, c, g, or t
  misc_feature (682)..(683): n is a, c, g, or t
  misc_feature (685)..(687): n is a, c, g, or t
  misc_feature (689)..(690): n is a, c, g, or t
  misc_feature (2310)..(2310): n is a, c, g, or t
gggctaggagaggtctcgtagggttgcgagaaggatgcgtgggtcacagaaacataccacgcggtaggttagcccgtagtgcgtcgggctctagtacggcggtgatcaaagagtgggctgcttggttgatagccggcgtatccgattcacgtgtggcgtgccgtgcaggtggtnacantnncgtgancccggtcttttgcgccaggtgaatagtgggatacgtaggtggtggccggtagtgtcctcggggcagggcgccgatcgctgcgggagggaacgtcacgcatctgccggaacgtaggtgggatcgcggagtgggggcttacgttgtgcgtggcggcgcattatatggggggtggagggtggtggtgagggtagggattggtaaaaaaagtagggctaaccgggggaatcatggagggagctataagagcacaggcggcttctgcggggagtgctggagaggcggcggcgggcgtgcgcgggagctgaggccgtgggtcgaggcaatagcggggggcatgtgggagtcggtgctggacgggggaggttgggtgtgtgagtagggagggaaaggcggggagatatatctaacccaaaaacannnnnnnnnnnnnnnnnnnnnnnnnnnnnnnnnnnnnnnnnnnnnnnnnnnnnnnnnnnnnnnnnnnnnnnnnnnccnncnnncnnggggcgacgccttcaaacaggtggggttttgtgtgcgccctgtggcgtttttcccagtttgtcgacctcatctaatgggaacgttgggttgttcactcccacagtcttcaagccgttgatgatgcgaccaggcatgctgccaacataggtgcgcctgtgtcctcgaatgtcagactgatcacatactcctccaagtgcaatcctgtggaactctcgacctagagtcttggccactgatcttcccacacttgttttaccaactccaggagggccaacaaagcataggattggggccccttcaggttatttttgagctgtctgacagccaagtattccagtactcttttcttcaatttttccatggcgtaatggtcattatccagaagaatccgggctgccctaatgtccaggcggtcagttgtacttttgttccaaggaagttctaccataagttccaaataatttctagtcagagcatattctggcattgactgaggcatttttttgagtctctttatctctttgacacagactttatgggcctgctctggcatactagatgttcgtatttttttctctagcatgacaatgtcatcattatcttcatcttcatcttcatcttctaaagtacctgagatatgtgtaattctcctaatagggcgtattgctataaccctcttatcatcatcttgcttgggttttctggttttttgaagcaatttcaggccttcaatttgtctgacaagcagtggtatagtcatcttgcaccgctcctctaggctcacagcatctaaaatctggagtttctctttgttgcttgttcggataattgatgtcaagatgtctggtaaagcttcccttggaagactatctaaaagacgtctcaatttagcaacctgcagggacagacatatccaacatttcaaccaattgtactgcatatttgtaaaactgctctgatagttctcctagctcctccctcattttacaggtgttgggaaactcctcaagtcggtccaactgctccacttcagcaatgggatatggcttctcttttaagacctgttacaatctggaaacggcataggcctgtaatcaacagagtatagtcggggctttgggccagttactgcccacaacctgaacggccagtgcagctgtagccaatcttagtgcaagcggcgacaggtcctgcgcgtcgctggcgggctcaaggcagtgttggggatgacgcccaggatggtgcctttgcagcgacgtcgcccttcagaagcggctccgcaccagctgcaggttgcggaccgagtccacgctggtgcgcatggtggagccgggcaccaggacgccctcgtgaggtgagcagcagcgggagccgatctggcgatctggatggggctcactgatgacatcctggcagcctttcgcactggggactgtctacaaagagccagacagacaccctgcccccggcctgccccgcagtcaccaaccccgctctcgacgaattcgacctcgtccgatttggcctgatccataacttcgcataagtgtatcgactataccgaagcttactgcgcccgccaccgcggtgacgcgtcccgttcccctatcaggagttcngtatcactcc

SEQ ID NO: 454131 - DNA, 1377 bp, Homo Sapiens
  misc_feature (181)..(181): n is a, c, g, or t
ggttcctttttcaagggggcttttaccattccgggagcatgggatccaagggcccaggttttgccaccaggcagcttgccccctgcccagcccatgctcaggggccctggcagcttgggctgtccaggacactgattttgctgacagtggaatgtgaactctctcaagtctacccctggcnttcaagcatgacatccttgccttgaccgctgtccggaactgtccagtttctgcagcactgtgcatgggttttggtggctgggacagccacgtggaggattccctcagtggcctccttagtgccatttgggctagccagggaaggctggaaggcgctgctggataaggctgggctctggggtgatgttccccgagttggtgggatctaggggttgggtcctggccagcctgtctagttggcttgccctggccgcacctgctcagccagctgggcctggcagtccagtaggtcatcccggaggcgggcaatgtcctgcgtgtgctgggccagcgtacgattcagctggtccacatggctccacaggccctctctgggcctcagtggctcagtgggcaagctgtccaggcccgcggccagcaggcccagcttcctgcacgcaccctccacttgtgccacccgctggtcaaagtgtcccactgtgtgctgaagtttctgggctgtgtcctggcagcggctcagcccactggccactttggccacaccagccttgagttgctccagctccccacgcaggttcaggacctgcctgtggccagcctgaagcctggagccttggctgctgacctgctcctggatggcctggacttcggcttccaccttgcgttcccgctcatccagggacgtgttggcagccaagaaggcatcagagtactggctgacagagtcactgaggcctgtgagcgacttgctcactgagttcagattgaccttgagcagagtgatctcgccttgaagtgagctgcccgtcccttctgccagctgtccctggacctcggccacagtgccattgagctgctggagcagtgctgcgtggctggccacctggcgtaggagggcctcgctccggctctgccaggccttcacctctgccacgaggctgtccaggatggctgaggtggtgctcggggtgcacgaagtctccagtgagaccaaccgttgctctagcacagccagctctgtctgtacaaggggccgagctgacctgcccggagaggcgctgtcatggcttagctccccagccaatgttgctaggcgctcctcgaggctctgcacgcgctcttccagcatggtcccaaagccgcccactccccacccccccattccaacctcacctcgtgccgaattcgccacccagc

SEQ ID NO: 454132 - DNA, 1044 bp, Homo Sapiens
  misc_feature (244)..(268): n is a, c, g, or t
cctggggtttataaaaaaagcccaaagggggggagaaaaaggcaaaacccctcaacgccccaaaattggaaggaggaccattttacaataaggtttttaattataaattttccaaaggaaaacccagtcatccccagggcaacaggaattttccacttccccattgttttcccaagattgaaggggtttggggggggaaacaccaaaaaaggaaaagtactttggtggaggttttcagcatttnnnnnnnnnnnnnnnnnnnnnnnnntctcccctcatttgagcaaacacctgatttcgattttgaaaagtgaaattttgtaacagtcacacacaaagagagaagactgtgcatatgatagttgtaggacagggtagaaaagaaggggatgcaagaggctggggaaaaaaggaaaacaaattagagggaaggaaggatggaaactcacagtattatcttgtcccaaaagaaaagaaggtccacgtgcagcaccagtggattacacctgtcagtatattcactacccctaccatggttataactgaatacaaaattagataaataaaaacacgccagatattacagtaaacaagtgaaagaaataagctggcaaccatatggaatttaaaaagattgtgtaccccacctgggctggctccagggctcctccaggggtgtacaacaggcacaatgcactgatggggagaagccggtctgctctcatctctcatccagaacagtgttaggggtgtgggtggcttggtaactctttcactgggcccactctcacataagcatcccccagagaaatgtggggcaggcccacacacaatcacagtcctgtcggtgccactccacaaacctatcttcccactcttaccctgcagtcacaagtgcatgctccccaatcatggaggcggtcctgctcatgggatcatcaactcctgattaattgggagtagaaaaaataaaattcgaagcattcccaaaccactcggtatccttcctaatgaaatcctcgtgccgaattcgccacccaggcc

SEQ ID NO: 454133 - DNA, 1856 bp, Homo Sapiens
  misc_feature (286)..(287): n is a, c, g, or t
  misc_feature (475)..(475): n is a, c, g, or t
  misc_feature (597)..(597): n is a, c, g, or t
  misc_feature (612)..(612): n is a, c, g, or t
  misc_feature (754)..(754): n is a, c, g, or t
  misc_feature (801)..(801): n is a, c, g, or t
gcgctgcaaagacttagcaccgcggaccgagacacgggtggctggtaaccactgctgtagaagtgctcctgggtgagtggttgtaagcggagacacatatgggcagtctaaaattccccgcaatatggtcaaattaaaacctgcgatcgagcgataacaggtgtgaaacagggggcgggcggaaaaaaggcgactataaagaaagaaatgaatggggggggaggttgggtcgcgaaggttggggagaccaggggggccgtaatcgtaagctacgaactgccacgtnntataccggaatagataaaatcccgggggcggagcattgttagttgggttaatgtgggaagtgttgtcatggaataatattttttgctccaaattctcggattacaatatcgggaaccaactattcgccggggcgcgaacaaggggcgggaggcttcccttcacctattacaaggagggcattcgaatnaggggtttaaaagcgttgcacgttcatggggacggccggtaaaccggcggtcccgaaaaacacttcctacgatggtgcggcaggggtcaatttatacgcggcgcgaaattgcagcgaactanatcctccggtcgctnggtgacaaggtgcggtatagaagaaatttgctctttgcgcgtcccggtggatcgagttagtatgtcagaattgggggagaggcagaaacggggggacaaagttagttaccaaagtatgggagataaaggtttataataaaancctctggcatgccaatactcggaaggcgaaataaaaatacgtgcggnccgttgtgttgttgaggaagtactaactactagcgccatcgccaccgctggccgctgcaacgagcgtgcggatggttcaaaccgtgtggacaagggtaccgggtgcggaccatggcgggatatccggtcgtaagaatgctccagcgcgggctataaggaggcgaatacgcggttagggggtacattagtgaggcgtggggggtgttcttggcaggaagagcttatggtgtatcgtgacgtctgccgtaacggcgcagatcacgtgaaggggactgaagggattatacatgcacacatagcgtccggccacgccgtatacagcgcaagcgtaccgcaaggcgggcccgctcggccttcggagcctataggcgtaacacaggttggccgggcgactataaggcggggcattgcgctgggagctggcaagagttccgtagatacaggagccgatacgtgatcccggcgaggagggaatccgggacggtagcacccaggatgcatgaggtactcctttaccgcgatgctgcggaaggcggcctatcaaggaagcgcacaccccttccagtcctcggctgcagggcgcagggccaagagctcccggtcccaccctcggcccttggcacccggcgccggctccgccgccctctctcacacgcacccttggcagggccccgcggggcgccccaaagcttgggggcagctcccaggtgtctctgggaagggaaagaaaggccacaaagcaaaagaaggagcacagagaaggcgagggaggagcaggggcccgggtcctgtggactcgcctgggctgggagtggggacactgagagggctgcgaaggctccgggggtcgcgcgtggcccgcaggctcacccctggcccgcggctgcccttccctccccttcctgggctcctggcccctctcagtgctgttcctttctcctcccctcaggccctctcctctcccgcgcagggctccgcctcgtgccgaattcgccacccaggcctcgctacgtgggaagggacgggcgattgagggggggacggaattctgttgt

SEQ ID NO: 454134 - DNA, 1105 bp, Homo Sapiens
  misc_feature (114)..(122): n is a, c, g, or t
  misc_feature (542)..(542): n is a, c, g, or t
  misc_feature (702)..(727): n is a, c, g, or t
tggaaaataggcatacggagggggcgtcgggacagctgtcatcaggaggcctcgcctaccgtgggctcgcaaagaattagggtccgtccgccgcagcggtggtgaatccaggcnnnnnnnnnattcatgcggtaatcgcagcggtgcgcctcgttcggcctgatgtcgcccagatgtagggagccagggttgggcaatgtgtagtttggaggactctaaattttcgtcgtgcgggggggcgatgaggggaaggtgtttgtcccccccagcttcgggccccttcctcccgtaggccctttgggaagggtactgctcccttccttccagccctttgaaagtccagttcctgttcctcagggaatgggctccttggggcccttcttgagaggcaggaaggccccaggggcatcaaaggtgcccatttcttcatcctcatcgtccaggcaccactctgggagccccatccttgtcctcctcaaagccttcaggcgctcggcaccgccgcaggtgagagctgcctcccccctcccccgcccttcttncttcaccacaccctcctcgatcccctcgcaaatcaaattcaaacttgcgccgccgttccccatgttcccgccagccagcagagcggggaccaccatcagggctggcggagcgccagcggtcgccgtctcgccggggccctgctccgagcctccagctgcnnnnnnnnnnnnnnnnnnnnnnnnnncgtagggagcgccagttctcgctgtctgagcgggcgtgctccttccttgggccagcccctccctcctcaaagccacatcgtgctccatcccgccttgctgacttctcaaaccgcctctcgcctctgtcatcccagctctggctgcgctggatttcccgggggcttcgtccaaaggccccatcgccttcttcgatgcttctttggtaaaagcagctgtcaccacggccgcggcctcggctccgcgtgctgcccctgcctcgggaggtgccagccaggggggggccagcccctttccccatcagcctcagcacagccacgctgttcactgacagggagaagtttctccctcgtgccgaattcgccacccaggcctcgcac

SEQ ID NO: 454135 - DNA, 1077 bp, Homo Sapiens
  misc_feature (406)..(427): n is a, c, g, or t
  misc_feature (430)..(711): n is a, c, g, or t
ccacgtttcaagggactattctcgctttccggcgcgcgagggacgcaagctgaagccccccctcaaactctttccgagaaaagacactcattcgggggtaaacttaggcccttccccgtgcaaagtggagggtcttcaccagcccttttccttctgggggtaatcaggcatgttcccccaatttctttccctggttttttccccggtcccaagggggccttaaacaaagttttccccaaatttgggcaaaggtcccccttataagggtatttttccaatagccaatatgcctgtcccgcccctgttaaacaatttttggactgtcttgcagaaatagccggcccaggctttcaacctacaacaagcatgaggttgcttttcccaagttcccctagtatgagctgcnnnnnnnnnnnnnnnnnnnnnncannnnnnnnnnnnnnnnnnnnnnnnnnnnnnnnnnnnnnnnnnnnnnnnnnnnnnnnnnnnnnnnnnnnnnnnnnnnnnnnnnnnnnnnnnnnnnnnnnnnnnnnnnnnnnnnnnnnnnnnnnnnnnnnnnnnnnnnnnnnnnnnnnnnnnnnnnnnnnnnnnnnnnnnnnnnnnnnnnnnnnnnnnnnnnnnnnnnnnnnnnnnnnnnnnnnnnnnnnnnnnnnnnnnnnnnnnnnnnnnnnnnnnnnnnnnnnnnnnnnnnnnnnnnnnnnnnnnnnnnnngtgagctgctttttaaatctgcttttaatcaccttgataaataccactgattagtgcctaactatgtgccagagcattatatacttcagtattctcaggtagctcacagaacccctggcacataggtggaaacaccagtaaagatggtagcaccgtgctcctcagttgccatctagcacacgcctggatcgtctgggctgccttccaagtctcttcttcccattccactgctttagtgccaatcagcacatgtaagtgcctctctcaagaaataattctgcagtactcactttggcagcacatatacccaaatggaacaatcagagaagacagcatggccctcgtgccgaattcgccactcaggcc

SEQ ID NO: 454136 - DNA, 1028 bp, Homo Sapiens
tcccccttttgtgaagaggcttcccctggcccccaccgggggtcccccttccacagggcccagagaggggggtgtcccttggtccaattccctttttggcccctccttccaggggttcccccggttgccctttccacttggcggagggggggccttcaataccaaggttggttcttggtgcccttggccccaagtggggacaggctggggggatctccttctggtcaacccggtggaagctgagctggctgaggttgagtgttcctggggctggcccgagccccccgcatgatgatgagattggaggtttctcctggttggggcaggcaacagcgacgcagagagaagcagtcatccccggccctcagcaagcagccctgcaaggcagccccaagttcccgaacgctggggaaggaccggccccagccctccagcacgaaggccccgtcctgctgctcaatggggaactttcggagccgcaagctctgcatgccgtctggtgcctggctacgctgggccactgtgaggatcaggcggtaggggtggctggtgctccagtgaatgaggtacaggccgtcctcgggccgcagcttggcctgcacaaatggctccagcaggggtccgtggatcccatcccggatgctcatcaccagccgtgggggagccacctcgtggcacaggtagtggctggagtcggccgtcaggcggaaatagccgtccaccagcgacacgaaggacagcgccgcagcccgggaaggcaagctcagctccaggcacttgttgtcctgccggtggatgctgacacagtgctctttcagcaccacgtgggtgatgtcccggaagtcacagaagtaggcccacagtggctcccgcggcctgtctgccggctggctgactgccttgtgagccttggccttcttcccaaacaggctggcttgggggttcctgccactgctgccactagaaccctcctccttgttcacctcctcctctactggccaccctcgtgccgaattcgccacccaggc

SEQ ID NO: 454137 - DNA, 1111 bp, Homo Sapiens
gtataaagaggcgaggggtttttccccgggccatttataaacccccctttcttttctgtttcttgggggttttttcttccgggaatggtttactttccctcaaggatcaccggaataccagttactttttttgggacctttctgtgattggtggtccattaatcttccttcggaaccctcattttggtgcttcctcctctagctctttcgtcggtgcttttctacgtctagtctctgctccaatggtgggtaggcttggaggaggtggtaggagtggcagttctgtagcattaggattccttttttgtataggacaattccggtttcccttgtgacaggcacagtccactttataattacagttactatactcataatcaaatgctatggtgacctcagcatccttggtgatggcagacacagcatagatgcacaggtgaatcatcccatctgcaatcatgtgtcgcacctctgcatttggtgtacatgatcttctgatgaaccgagcatcattaccgaaagtacgggcatccacacacatctctacaccattgaattttgagtagaagagcacaaaggggtatggttttttgaagaaatgcccattgacctcaaattgctgtcgtaacatgactttcccacgatactctattataagagtgtccaaagccaaatctcttgcagccctcaggatcttccggtgcttttgaacacgagtgactcttcccagctgtaactgcatttgggaaccaataactgtgttattacaggccaattcagtcttattaatagtgtctaaaatagtaggtttgcccacaaattccttgctagaatgtaggtgttgttcaagcgcgttctgtacatctgcactgtactgattagtgaaagcttcttcatactggtcagtccatagtcttatccgattttcccagccctcagttgtattctcatctaaattctgtgcttcagagggagaattcttcatccgcaaggacttccgggatccctctcgaaatgccttgattttcttcgtctcttcggtgctgcacgacccttttctggactcttcttccgcttcttgggtttggttcttctaacagttaaatggatg

SEQ ID NO: 454138 - DNA, 1009 bp, Homo Sapiens
  misc_feature (73)..(83): n is a, c, g, or t
  misc_feature (85)..(91): n is a, c, g, or t
  misc_feature (318)..(318): n is a, c, g, or t
acccagttatggcccaggtgccattttcaattacttcttttctccgccacccgaaaatagaatccttcgaggnnnnnnnnnnntnnnnnnnaaacatccgcatggcagatgggtgttggaataatacttttctccacaatctatcattttaatagtttataatagtgcagttcatggaaacatgccaagtccaacaaaagcacaacagattagattacagtcagattgagaagactggtgtgcgttggcagatagacgtgctggacatgctccacacgcgacctgcagacgggacatgactgtagctgggcggcgcantctctcacagcacacagtgtggccacagggacagaaggtggagttgatctcctcctcgcagcacaccatgcacagcatggcttccttcagcttgcgtagcttctcctgcagcacccgggtctgctggcagctgaggccctcgcagctgctgcagttcatgctgctttctgaggacttcagaggcgagtgtgaagggctctggttgcttcttgaaacgaggtccacaacgccagcattgtacagagccctcctggcatggtcatacacctcctttgatgttcttttaatatcaaagacatatttcttgccaaggttaatgttttcattcagaaacagagatgccaagtggcccttcaagtcacggctatactgcatcatcacggcgctggtcactgtgtcacacctgtagaatgcgtgcgtctctgttatcgctcggtagagcccgctggccgccctggtgctgatcattttaaacaagagcacgatgctgttcccagattccttggtgaccgtcaaatatacattctttcctgactgggtggccatctgcaccacaggataagctatcctattaattgggctaaagtcatctttacaaattgagattccttcaggtccaaccccaatgagcagtttctgcccttcgctatcccgcacagaatgccctcgtgccgaattcgccacccaggcc

SEQ ID NO: 454139 - DNA, 919 bp, Homo Sapiens
  misc_feature (43)..(43): n is a, c, g, or t
  misc_feature (109)..(132): n is a, c, g, or t
  misc_feature (155)..(169): n is a, c, g, or t
  misc_feature (204)..(268): n is a, c, g, or t
  misc_feature (288)..(302): n is a, c, g, or t
  misc_feature (349)..(401): n is a, c, g, or t
  misc_feature (410)..(423): n is a, c, g, or t
  misc_feature (477)..(487): n is a, c, g, or t
  misc_feature (505)..(600): n is a, c, g, or t
  misc_feature (604)..(607): n is a, c, g, or t
  misc_feature (612)..(612): n is a, c, g, or t
  misc_feature (616)..(619): n is a, c, g, or t
  misc_feature (622)..(624): n is a, c, g, or t
  misc_feature (626)..(629): n is a, c, g, or t
  misc_feature (631)..(633): n is a, c, g, or t
  misc_feature (635)..(647): n is a, c, g, or t
  misc_feature (649)..(652): n is a, c, g, or t
  misc_feature (656)..(656): n is a, c, g, or t
atataaaataaaaggcctttctctgtctttgggcggggggggngtgtttcgcccccctcctatttatttttaaaagagaacggcgcgggcccctatatttattttagtnnnnnnnnnnnnnnnnnnnnnnnncgcaaaaacaaaaaaagtaatannnnnnnnnnnnnnnagaaaggggacttccccccccacaaaaggtttgtnnnnnnnnnnnnnnnnnnnnnnnnnnnnnnnnnnnnnnnnnnnnnnnnnnnnnnnnnnnnnnnnnctctcccccacaaaaaaaannnnnnnnnnnnnnnggccccacaaaaactttttttgggggaaaagccggcggggccctatnnnnnnnnnnnnnnnnnnnnnnnnnnnnnnnnnnnnnnnnnnnnnnnnnnnnnagaaaaaannnnnnnnnnnnnnagggagaactggggtttttaaaaattttccttaaattattgggggggccccaannnnnnnnnnnccccccaagtccaaattnnnnnnnnnnnnnnnnnnnnnnnnnnnnnnnnnnnnnnnnnnnnnnnnnnnnnnnnnnnnnnnnnnnnnnnnnnnnnnnnnnnnnnnnnnnnnnnngggnnnnggggngggnnnnggnnngnnnngnnntnnnnnnnnnnnnngnnnntttncacagcagaccctcccatcgcaggccaggaggcttagaaggaaaaatggttttgtgggtccagaaccccctgctgtgtgcagcctaggaacttggggccctgcatcccagctgctcctgccataggtaaaaggggccaaggtacacctcaggccatggcttcagagggtgcaagttccaaggctttcaggttctaggtggtgttaagcctgcagatgcaccgaagtcaagaattaacggtcatgaacctccgccttcatttca

SEQ ID NO: 454140 - DNA, 1061 bp, Homo Sapiens
cccaagttaaaggtgcaatgccaagctttttccagttcattagggacccaaggttttttcttcccaattcggatttttctgcttcaggtccctcattgcttggggtgttctgtaataactccaggcttgagggcgtctctttctttggttaactcctggtggtacctgtctgccttcttctgctgcgtggagacagcagagagagcccgcttcaaattttcccacacgccgccgggaatactgcaggcggctgcccagatcttcagactctccttctttctgcctggcagcatgctgagtgtgagccagggctgtctgtaactcagctttctctgatacgaggatccctatggtctgaattgtgaaacctgtaactgctcccttaggggctccctgcttttggtggcattctttcttttcttcttcccaactgatccgtaatttcttggttctgttgtttcaatttctctatcgtgatattgagttgtttgtttgttacatagctggagtccagggctaccgctagctgttggtaccggctctccagatccttcaggttagcagacgatgcagggccctccccattgacacatgtcgcagactcacaaacaagaccattgagctgttgggagagttgtcgcaggctctcggttgatgagaaagtcttggtttcatccatgagattagggacattgtcagcatcatgattctgagatgccgccatgctagtgagactggcaccaggggaagggacaccgccaggtaacacggtgtcatcagatggttgtagagtagcagcattgtccttgggtgtatcctcaggtgagtggcaaccaccagaagtggttgtctcagggttactgccattttttattttcttcttctttttcgctcctgtaggaacaccagggctattcctctgctgatattctctcaactttttcttcgctgcggccaatttgctctgtcgggtttcttccgacatcgcggggcggggagggaggcggggttggggccacatcagcgcgatcccgcctcgtgccgaattcgccacccaggcc

SEQ ID NO: 454141 - DNA, 814 bp, Homo Sapiens
tccacaccccgggaaccgagcggtctgcacgattcagactctctctgtgtgctggcagcatgctgaggtgaaccaggctgtcgttaactcagcttcttctgatacgaggatccctatggtctgaatgtgtactctgtaactgctccctttagggctccctgctttggtggcattcttctgtgtcttcttccaactgatccgtaatttcttggttctgtttgttctctccagatccttcagggttagcagacgatgcagggcccgtccccattgacacatgtcgcagactcacaaacaagaccattgagctgttgggagagttgtcgcaggctctcggttgatgagaaagtcttggtttcatccatgagattagggacattgtcagcatcatgattctgagatgccgccatgctagtgagactggcaccaggggaagggacaccgccaggtaacacggtgtcatcagatggttgtagagtagcagcattgtccttgggtgtcttccacttgtccaatggggggagcgctaccccattggaacggttaaggtcggacaccagcaccttcagaatgtcctgaatatcctcaggtgagtggcaaccaccagaagtggttgtctcagggttactgccatttgtgttattttcttcttctttttcgctcctgtaggaacaccagggctattcctctgctgatattctctcaactttttcttcgctgcggccaatttgctctgtcgggtttcttccgacatcgcggggcggggagggaggcggggttggggccacatcagcgcgatcccggccaccccgct

SEQ ID NO: 454142 - DNA, 1325 bp, Homo Sapiens
  misc_feature (540)..(548): n is a, c, g, or t
gaggatcccctttttgcctgcgttcagcttacatttattatggtactatagatccttgagttgtccaaaatgcagtactatgaagacattaatgaaggattttccagaaggagacattcgactctgtgagaaaaacatacctcatgctttcactcacccgacttttaaccagtgaaagtggcagacatgattgctgactccctaaaggattatttgtccaaaatgttaattggcctgaggaacaagcccccactgccatgtacatggaggcagtcagtgtactatacttagtaggtcaatgtttaattttgaagactgatattagaaatgaagaaagtgagaacctttgtcttacaaaccaactctccgctcgccatgttataggctgaagtaaacacagttgatgaatcattccataggtttaaccatacattttccaagactcagggaacacagtgatctacacagagtcttgtgtttgcacaagatgcccagtggcaccatatggtttattttggtacgcaggatctttgcagatgnnnnnnnnntctacatgtacttgattttaattgagttacattgtaagaataggctcctctggaggaaaattatgaaatacctactagaaaatgtaaaataaatcaactgaatggtaagaatataattagatatgtgaagtgtatgacaatatgacaaggatacactcatgttcccggaaccagaaatgaacccgggtctcctgtaagaccgaagatgaagatgaacccaggcctaacttaccacaaatcttggcttgagaacatcaatggggacctctaatgtaccctgccctaaaacgaagaataaagttccaccaaaaatttaattccgggccagcctaacccaaaaaaaagaaattgttgaaaaggaccccaacctgtggccttcctggccccaggaacaacccaccaagttttctatagctgaacaccttacccctcccagggttaaaaaactctcacttgacagggctcctcccctctcccaaaaacccagaaaatagaaaaaggcccctggggacttgtccccaaagacaaggcttttggaattgtcgcccaacaagaaaacgtgtgacccgccctaccagaaaaattcccttggcccactaaacaacctcctctttacaaaagacccacttcatattctagccccaaaatacagtgagggcacaaacccacatctcaatagcaaacagacaaactccctctataccccccccactacaatgaggggtggcccctttcgatccgtaaagggaggaaaaaatacttttcctcaagagcggg

SEQ ID NO: 454143 - DNA, 1072 bp, Homo Sapiens
  misc_feature (49)..(111): n is a, c, g, or t
  misc_feature (711)..(722): n is a, c, g, or t
  misc_feature (899)..(899): n is a, c, g, or t
ccaattccccttttcggggtttatttcccttcttttcgggaaagttttnnnnnnnnnnnnnnnnnnnnnnnnnnnnnnnnnnnnnnnnnnnnnnnnnnnnnnnnnnnnnnncttacttagggtaaatcccattccccaagggccccaaatttttgaaaagggcataaaagccaaaagcaaatttcaggtaccaaatttggagccccctaccatccccagttccttttcccttggaaaaaatcaaatgttatccaatttccttgggtatccccttttacaacacaacccacatatggggtgtacatatgtatatgcatatgcttttaaaaaaacacaggtgtttactcttctacatatttttccacggaatatttattttaaaatattccatatcagtatatgaaaagctagctcatccttttaacagctgcatggaggtagcataatttattcaacaatttccctaataataatattttcatatttttcttttacaaataatgctaaaatgaatatccttgcactttagtcatttcaaccacatgagtatagctgtaggatgaattaccactagcggaactaccaggtggaaaataatgccaatttaaattttgatagcaactgcatgggaaagctacacatacgtgtatacacacacacacagtagattaccacggttttttatttttcctaatctagctgaaactccannnnnnnnnnnncttatgaggttcagttcttcatacgttcaagaatcatttacatatcctttctggaaactcttcctatctatttctctttttctattgggtgactggtctcctggtgatttgcagatctttatatgcagttattaagggatttgttctttgtctaggacattacatgtattttttcangtttgtcacttatcttttgactttggttttgttacagagattttatttttatatagtttacttctactttcatggctttctcacaccaagattctcccgtgttttacagttatatgtttacattcttccatttatctggaattctgcctcgtgccgaattcgccacccaggcc

SEQ ID NO: 454144 - DNA, 1430 bp, Homo Sapiens
  misc_feature (797)..(797): n is a, c, g, or t
  misc_feature (887)..(887): n is a, c, g, or t
  misc_feature (910)..(910): n is a, c, g, or t
  misc_feature (929)..(929): n is a, c, g, or t
  misc_feature (1129)..(1129): n is a, c, g, or t
  misc_feature (1234)..(1234): n is a, c, g, or t
  misc_feature (1242)..(1242): n is a, c, g, or t
  misc_feature (1245)..(1245): n is a, c, g, or t
  misc_feature (1249)..(1249): n is a, c, g, or t
tttcgctccgagggctgggtggcgaattcggcacgagggctcaatctgaaggattcttctatggcagatgccagcaaacatggtggtggaacagaatcgttattttttgataaggtccgaaaggctcttcggagtgcagaagcctacgaaaatttcctacgctgtcttgttatttttaaccaggaggtgatctctcgtgctgagcttgtgcaactagtctctcctttcctggggaaattccctgagttgtttaattggtttaaaaactttctgggctataaggagtctgtacatctggaaacttatccaaaggagcgagccacagagggcattgctatggagatagattatgcttcttgtaaacgattgggctccagctatcgagccttaccaaagagttaccagcagcccaagtgtacaggacggactcctctctgtaaagaggttttaaatgatacctgggtttccttcccttcgtggtctgaggactctacctttgtgagttccaagaagactcaatatgaagaacatatttatcgttgtgaagatgaacgctttgagcttgatgtagttttagagaccaatctggcaacaatccgggttctggaagcaatacagaagaagctttcccgcttgtctgctgaagaacaagccaaatttcgcttggacaacacccttgggggcacatcagaagtcatccatagaaaagcactccagaggatatatgctgataaagcagctgacatcattgatggtctgagaaagaatccctccattgctgttccaattgttcttanaagggttgaagatgaaagaggaagaatggcgagaagctcagagagggctttaacaaagtatggcgagaacaaaatgagaaatactacttngaagtctctggaccaccaggggnatcaacttttaaacagaantgacaccaaggtcctgaggtctaagagcttactcaatgagattgagagtatctatgatgagaggcaagagcaggctacggaggagaatgctggtgtacctgttgggccacacctctcacttgcgtatgaagacaaacaaatactggaagatgctgctgctctgattatccaccatgtggagaaggcacacaggcatttcngaaggaggaccaattattagataaaacccaatcctgcctccattttattccagaatttgcctctttgccccaaggagggggatctcctccaaatgggggaggganaagggaanaanaaanaaattggtggtaaaatgaagccccccggggggcagttttaggaacccccaatggggtggtttggggggcaattcccccccctaaattccccaaggtaaacggggttttaaaaaacccgggcaggttcacaaaaatttataaaggggaattgggtttttaaattttttcccaaccccctttt

SEQ ID NO: 454145 - DNA, 1360 bp, Homo Sapiens
ggggcccgggcctggggcccccagggggagtaaccatttggcccccaggggaacccaccgaactggggttcagcaaaacaaccatgggttaggggaaatgttcagttcacccagattcataagggggcatactgagataggacccccgttttgacatggttgtctcatagtagatccagctatagttcccagagtcctctgctccaccagtgtgaggaaggaagtcagctgagttccctgagacattccgaaactgtaagggaacatgggctcactcctgcaagagggcgaactccatgccctggaaagtcccttggcagcgcaggatcacactcttcccaggaaacacccacaggacctggctgtgccaggagagtgggtttggggtagaattctgtcaccacgagctccacagggttgctgggctcagaccagatagaaaagtcataatatcggcagctgtaattccctccatcaccaatgcccaccgaaatgattagaaagtgagctgcactggcccccggacttgcccaggacctgtcactggatgctatttcacttccatctttgtaaagaataaagctcatatgctggtggggggtggagcaattgaaagtcactcgggcaccaggggtgaccacagggctggcccatgtcttgaagaagggcttagggtacatttcttttatgacaagctccagcggctcactgggctcagaccacttgaaggggcgtttttcagtgtgagtgcggcagctgtaattgccttcttctttatcgtgccattctctggattgtaaagaaggcttctcttccaacagcaccaagttgctggacaggttcttgctctccctccttatacagagcaaaccccatgcctgccagccatcctttgcaccggagttgtagttcctggccccggattgtgggggaagcagaaatgacaggtttggggaggatgtctgtccccaccagctcaagtgcctcactgggctccgatacagccatctcctcccatgaatggcagtggtagctcccggtgtggctctgggtcagggcgccaagggggaaggcagcccggacctgctctgagccgggcgagtggcgatccacccggtcccatccttcagcaacacaaactccttagttgagccagaagggctttgcaccagagggttaagttcttccacggggccagaggaaagttggtctctgcccacagctcaggcttaggggttggcatgactatttcagtctcttctatcaataccccattgcacagtccacagcagagaaggccgtgactatgaagagcatggtgaccccttgagctgttcccagcaaccaggcttctctcgct

SEQ ID NO: 454146 - DNA, 969 bp, Homo Sapiens
  misc_feature (81)..(81): n is a, c, g, or t
  misc_feature (181)..(181): n is a, c, g, or t
  misc_feature (922)..(922): n is a, c, g, or t
ccacatgatccaatttccaaatttcagctggcttgtgtgtgaggttcagaactcaacaagcggggtgttttatgtggtgcnaggacaatctttactgtgaaaagtgtgtgcatacaagtgtcgtaatctcaccctgtgtgcttggccctgttaggacactctctgtactatgctagggctntatgttttgcatgagagtcacaatctattctaagacatttgtggctggtatgaacctataatcatatctgtgtttcttaaccccaggtataagagtcaacatctcccctaattttctgtgtctagataggagagccttcacttttctatgagctgcatttaaaaatgttttactatcccatatctggctggatgttcacatatgacaattccaaatgtggactgcatccatatgtgagattacaagtagggtctgtccgtctgtgagaattacaattttaatggatagtagggtgtgcatacacacaagtaaatctcacctgtgcactgggctctgcaatgacacactgtgtacaacctgaagactttataccatatgtgagagtgtgatactcctttctgacctttataaaaacagaagacccagaatcttatccatttttctaagcctagctatgagagactgtatcaactattggctggttcaatatatgagagtcatcatcacacctatgagctggaacaacattatgtgtaacaaatccacgtgcaggtaggtaataagcaggggagtcacatcacccaggtgctgggccaaagatttgtacaatattacttgaggacagggaccgggaaggatagtaacatcccttggctgctgagcccagagatatgttacaatgctccctgtgggcagggttcaggcaagagagacacatcacctggttgctaggtccagcanatatgtcacccttcgtgccgaatttcgcccacccagggcctcgcttc

SEQ ID NO: 454147 - DNA, 1089 bp, Homo Sapiens
tttattgaaaagccctttttcttttcaaactggaattttaaatgtagccccaagggggaagaaaaaggaagggggtttcaaatccaagcctttgtcccacccttttagaaatgggaaaggcaatagaaactgggttttttcaggggaaaggatcaagtttaccagtaatgccattcccggattaaaaagtaaaaggggccagagagagtagagggtttttcttcagcatgtgaggatttagtgattgtccccccattatttgagaaaactgttaccactaccacaggccaggatctttccatttttgtctttcactttctcccagacccagtcatggtgaatgaccatcactgatcctacggaactttgacaaacgatgaaactagtggaggctttcaatgtagacatcctcagcagaggagtgtagccctcgtactgctgctacaagtcacacgctgagtcacattgctgtctgcagagtgatgtgaacctgtgtatacgtgcagtttcttctttacccttcgtcccttccccaacatcctcagtgagcaaatcgcatttctacctggtgagaacacccctgtaaagagcctactttgttggtccaacacagtgtgtctgcccaaatgccctttattaattaagtcaccttttggggagtaacataatcagtgtaaatcaaatgctgtccccatcccattccccaagaacctgcatcttgagaatttttggctgtgttttgtaaaagctttttgcttttacgctagtggtgatgttggaggagaatacaggataatgcatcctccctatgtctaaaagaatagcaggctctaaggcagactgtcttcattctgaagggcccagtagagcattaccacagccaagctgtttcctgaaagaacagcaggtgcctagcactctttgcttccaaatgccactgaaatgaaagaagaaaagaagaacagacaataaaaggtaataaaacccaaccaaataaatgacgaccacaggtcagcgccctctcctgggcctgccgggcttttccagttttgctgttggcttctcctcgtgccgaattcgccacccagg

SEQ ID NO: 454148 - DNA, 1603 bp, Homo Sapiens
  misc_feature (38)..(38): n is a, c, g, or t
  misc_feature (55)..(55): n is a, c, g, or t
  misc_feature (1124)..(1151): n is a, c, g, or t
  misc_feature (1353)..(1412): n is a, c, g, or t
tgttcccagtcccatccatgggttaaaaaatttccaangttccaaaagttccaangtttaagtttcccgttggccggcctcggtcctgcggttcaacaaaccctttggtaaaggaatggaacacgccatatcgtgcccttcgaaactttaatagccaccgcaccctaatacacccactaggttcaataggatactcaaggattgatgtagctggtgcccaatgtgtaggggtactcatagggtgtatagattaaaccagcttcgggccctggaggaactattgcagcagttgggtgaggagttccgtttggcatgacagcggtctgtatttgtctgatcaaaggcattatggtagggccagctggcgtaggagtacgcagggcagctggtgggagaaccggcgcaggcccagtaatgatccttggagcagcctgggctgttgctgcaagagaaaaggcaagggctggtgatttaatgttggcatctctgtaggtgccattcagaatctgcaagctccatcagctgcatcttcttcaggctgtcttctccttctgctgcaggtaccaataatttcttcacttcttcaactgctctcttcaatttgatttctgctctgttctgagcatcttccacagtgattagtacatgtaaatcttcatttagatgctcccaattgggcttgcctctattttgctcctccttttttttatccctcattgagcctttgcctcggaccatgattttacatccggtttctgcttcaagttgtttggctgtaagtcctctaggtccaaggattctcccaacaaaattaaaatctgggtattcttttacaggcacataaagtttctcttgtaactgaacaataggtcccacagcatcaggcaattctgcactccttttctctgtactgccatttaatgtgtcattgtacatgtctttccgtactctgctaatttcttcgtccagcagccgctcgaggtggttgaagatcccgcagaagttgggcaggctgctcatgagcttcttgtcgttcatcagctgcatcaggtaatctggggtgggcttcggcttctccttcgtttccatttccccgaccatattccaggctccgcagctcactnnnnnnnnnnnnnnnnnnnnnnnnnnnngagaggagggaggggcgggggcgagccccggccgcgggccgctcgggacccggcgtcccgctccgcgccggctcccgcgccgagccccggggcggccggcaccgcgcgctcgcccgccccccgcaggcactttccgcccgggcccgacgcgctcccagccgccgccgctctcggccgcccggctcggcgcgtccctcacgannnnnnnnnnnnnnnnnnnnnnnnnnnnnnnnnnnnnnnnnnnnnnnnnnnnnnnnnnnntgctggcgccggacgaggaggagccggggccgccgctcgctcggctggtcgagcccgctcagcgccgccgccgcctgtgccgcgggctcggggggtctctctgggctggtccccgccgcggcgcctctgccgctgccgccgcgctccgactgcgctcccctcgtgccgaattcgccacccaggcctcgccc

SEQ ID NO: 454149 - DNA, 1193 bp, Homo Sapiens
  misc_feature (123)..(123): n is a, c, g, or t
  misc_feature (404)..(417): n is a, c, g, or t
  misc_feature (603)..(627): n is a, c, g, or t
agataattttaataccggcgcgcgccatctagagaggggacggccgcgggcggtatatttctcgccctatttttacaaagccgctaaaatttggtgtttacgagggaacccacgccgtggtgnccccacgtgttccccgattctagtttaacactctcgttactgtccgccaccgcggggagaaaagatggtccttggagagctcggctctaagccatattgctggcccgagcaggggaagccttctctttgtggtgcgacccgagagctgcgtggtgccacggggcagggaatcttcccgcttggatgtcaggccccccttccgtatttgaatacgcacggcacctattcccctaacttccatccttaacccggggtaagggggggatttacgaggcattttnnnnnnnnnnnnnnaaggtagactccggcccgttcccgccggttagtgggcagggctagggcccctcccgggcccagttgccaatccatgctgaaccttgcccgggagcagcctcctgcaggactccggacccagggtcaaggccagactcacccgaggcaaaggctgaacgctcccggcacaacccgacctaggagctnnnnnnnnnnnnnnnnnnnnnnnnntccagggacagactgatgtggaggcctgagcctcgcttcagcgtctacagcggtccccgctggactctcggctgaggacccctcccaggtggaggccgtcgcaccccttccccgccagcctggtttcagggtggggttcctacttagggccagcctcccctgcagtctgggctgtgggtcccagcaggaaaagtcaccctggctggtggcagtgatggggtcaccagcccaggatcctgggggtgccccatgaagccccagctcctcctgtcacttgctccagccgagttagtcacagcccccactggtccacacctcctgacacacccaggccacctggtacccagggcctctgtatctagccctggccctcaggcaccccctgagctcacctggccatgcccaaggggcctgccccagccccctctccgcctctgcaccaagtgcagcccctgtatatggtgcgtccctagactggggccccaggctgccctcccatcctacacacagttgtgaggccctcctcagcctcctccctcgtccgaatcgccacccaggcctcgcac

SEQ ID NO: 454150 - DNA, 1346 bp, Homo Sapiens
  misc_feature (15)..(15): n is a, c, g, or t
  misc_feature (36)..(36): n is a, c, g, or t
  misc_feature (49)..(49): n is a, c, g, or t
  misc_feature (83)..(83): n is a, c, g, or t
ctcctcgaacaaccngccccggtgaagtgaccgtangaatctcaaagtncaaaaggtgacggggaggttgaatacggtgaaanccagagcctgcaagagccccaaatcctcagtgttgacactgaaaaaccaaagaccctttccataaaaagcagaactcccatttaatcctttccttagaaagggagctggaggaaagcggtgttaaacaccatcccctggaaatgccagccagaaaccactggaaagcacagagcttgcctttggaggcctcagccagaaccagctgaactgagatgcactcaaggtgcctcaagctcaagattctgcctctcttaaaaggtctgtgggagccgccttctctacctttcccattatccttacctctttctaggaaaaaagaagagaaaaactcttaaactcattctcctattctcccctgctatggataaaaccatttagaatttggcctagtctccactgaatacgtggcttgccatcttttgggaatggcccctttgtgatcatgaccccaaacttctgtttttttagtcagctaaagttctccctcaaagcaaaagcaaaagcaaaatcctccctgcccccattccctagaactgtgaaagcccgcatcccattccccgctcctctaactaaaatatttatatacatacaacaaaaattgtcttaacagcaacaaaccaaactttggcttggggtggggggacccttaaaaatggccagtggactgggcagttggtgtccccttattctctgtcttcctccccagagtcagtaataattgcatcgaggcctctagcttccttgacatcgcccctagtttcaggcacagcctctctcccagttacgaggcgagacaggattctgaagggggaaaggatatgtattctacacaacaggtcaacgccctctcagatatatcactctgcttacaaagaatgcttgatgctgtcataggtcagtcattttaattcagggacatgagtcagttatcagtcaagaacatgtgtggaggcaggagttaaaaacaaacccaaaacaaacccataaccagaagctccatgtctctgaattactccctttagcagctgtcccttgggtgaaaggtcaccctagtaccaatgtgactagaccagggagccaaaaagaccgtgcttttctatttcctaatgccttcatttgggaaatgctgtaggacacttgcttttatcagttctatctaacagctagaagagaaacactccctcctaccttgataacatagaaaattacagccagatggcaacggcagtgctcactcctcgtgccgaattcgccacccaggc

SEQ ID NO: 454151 - DNA, 1181 bp, Homo Sapiens
  misc_feature (128)..(128): n is a, c, g, or t
  misc_feature (637)..(694): n is a, c, g, or t
  misc_feature (696)..(696): n is a, c, g, or t
cggcgacgcgctccactaggacgcgcgggagccgccagccgccggaccgctgtcgtagcacagcttctatcacacgcctgcacgaggtgcgcccggacgcgaatccatctctaggctactgtgcagcnccaatctgtcgctacctacttcgtacatccataaccgggagctccgctctaatgccatttaaacccaccctactcagcgcaagagaaggtttttatccccattggggacaagaggattttgcgcgtacccgccccttactgtctctaaatgatggggccactcgatatggacgccattccctttcctaggatttcggggcccagagggggccccgttcttcccggggaagctcctggattgggccccgggagtccaagttccggcttaggcccgggtttcctccacgaggtttcggccggggaggaaccatttccttgggctgcccgggagccccccagcccacccccggttccggcggttgccagcggttgctgaggttgcagcaagcgcctgtgtaccccccgctcagcccgccccgcgcggggggctggcccagacccggggtcttgccctccgggtgccagcacccggggccgagtcctcaaggagcagcccggagcccagcgtnnnnnnnnnnnnnnnnnnnnnnnnnnnnnnnnnnnnnnnnnnnnnnnnnnnnnnnnnntngtcgtgttcatcgtcctcctcctcggggatcacggagtcggcggccgtctcccccgagggcttggcagggctcgcttggagctccggcctttgcaggggccacgtacaggatcgcggacggctctggggctcgaactccgggtccagctccacttccgagcggagagagcggggccggggaagccggtgcctctgccatcttcgccgcccgcccgcccgcggctggggctctcgcgctctcctctcgcgccggggcggggtgcagcgggggagggacgtggacgccgcgaaggctccggctcccgggcgccgccgccgccgcctcgcttccttcccttcagggacgcggcgggacgacgcacgatcccgcgcgggcccggggcacggcgaggagggggcgcgcaacctcggcgaaggagaagcgctcgggccgtcgccgcagcccgcccgagcctcgtgccgaattcgccacccaggcctcgcgt

SEQ ID NO: 454152 - DNA, 1141 bp, Homo Sapiens
ccaggaatttttttccccggggaaggggagatacaggccacgtggttgagattctttccccttttctcgccccaataaaagaaaagggggtttgttcgcccccccgagaagggtgcccactgtctctcggccggaggggaaaggaaccccctccaggggcttccgcgttctccgaaggccagtacttcagttaagtccgggcgctccagggaacgggaccggcccgttccacggccctgcccccttagttttccccatgggaacccactttctccattggaatggcagcttctggtgctggctgctggccctcccttggggctccctccttcatcctgggttgcccttggtcactggctgttttcctcagaagtaagtaggatcttggctgctggtccagaacaaaaggtagtggggatacctattggtggtttcacaggggtcctcccaggtagaggaatcccattcttgatagagttgctgatgtcgttctcagagtacatcatggatgtaggcacctcctggtaggcactgccctcagccagcttcttgtgcttgatgaggatcttcctcttaagctggttgggtgaggggagcccgtcggcagagatctccacgggcttggtgaggagtgtgtcccccagcaccttcttgaagtattgggccatgtttctctgctgggcaatgctgcagtggtcctcaatggacaggatgactgggtactctgaggccacaaaggcatgctccttgatggtgtgcaggacatctgagaacttgatcttggtggtaagggtgtgcccatggtaaataactggcatcccatccgggccgtcccagcagtccaactcaatgcagcgacagcccatccgcaggcagcgagcataggcttccaaggaggactcactggagaactggtccccggtcaggtccgtgttgtgcgaggaggagatccagtagtgggaaagaagggttgttcatggtgtccgggcatactgcatccagctgcgagttccacacactgttctctttggagaacaggaaggtgacaaactcatccaggaagaagtatggctcctcgatctctcgtaaggggtctcggaggaagctgagcatgaacctcgtgcggaattcgccacccagg

SEQ ID NO: 454153 - DNA, 1136 bp, Homo Sapiens
tgtagacacttccatgggcaaagcctcgttcccaagaggcccttattcacaatcatggcatcttccatatcatagccagtgtaagaaatcacagcaacgatggcattggtcccaattggatagttatccatgtcataataatcatacatggagggtctcaccaagggactctgaggagtctgaagacgatacagtttgttatccgatcggtcttgataagtgagaagtggaaagcccatagtttgcttacccatctggcattggtacatgttccgtggactctggttgtgatcagagaaagggatgaagttggcaatcacactcagcaggctgtgtggaaagagttcctggtgtgtggtaactccagcaaaaacttcatcctcaaagatagcgacattcatgaagatctgttccatagttccaattagctcttctttgcccaatgctaagttctgcacaggccgtaccagtctacaaggagtggtaaaaaggaacaatcctgggtacagacttggttttcctgtcatgggtataaggaccacttccatccagggaggaattcttttctctctcaacaccttaaaatgacgaagagaatctgcgatgcctggagcaagatccttatccacccagccaaccatgacaccgtccagcaggacagggtagcactcactgtatgatcggtggggagctccatcaatgggagtgacccccaagttgcacagtaaagctggaatagatgccgtatacacaaactgtgtgacaacctcacatacggcagttaggtggttcatcaggccacagggctccccgtctggggtatgcacgggacaaaggaagccccaggactctggcagcagcctgcgtactgtggtggtcctcatcttggcaaaatcagcccctctgtgcacgcagcggaaatgggagaggtagcgtatgaagttcagcttgtcagccacaacacaaagtccagaatcttgtaggaggccaagacctgttttagaacgcagattcccagtagcaaaaaggtattcaaatggttttgtaaggtctatgcccattgtaaaaatcctcatcaaattgtcagtgttcaaggaaacactggtcttccctcgtctcgaatcgccacccaggcc

SEQ ID NO: 454154 - DNA, 992 bp, Homo Sapiens
  misc_feature (846)..(874): n is a, c, g, or t
ggcctgggtggcgaattcggcacgaggctccaaatgacacagcaggtgccaggactgaaatgggcactgggtctcgggtgcctgggggctccccgctgggtgtcagcttagtgtattcggacaagaagtcggcagcagccacctcaccagccccacacttggtggctggacccctgctgggcactgtggggaaggcgcctgccactgtcactaacctactggtgggcaccccggggtatggggcccctgcgccccctgctgtccagttcattgcccagggggcccctggtggtgggaccattgcgggctcaggagcaggtgctgggagtggccccaatgggccagtacccctgggcatcctgcaaccaggtgccctgggcaaggctgggggaatcacccaggtacagtacatcctgcccacgctgccccagcagcttcaggtggcacctgccccagcaccagcccctgggaccaaggcagcggctcccagcggccctgcacccaccaccagcatccgtttcaccctcccaccgggcacttccaccaacggcaaagtcctggctgccactgcacccactcctggcatccccatcctgcagtctgtaccctccgccccaccccccaaagcccagtcagtttctcccgtgcaggccccgcccccgggtggctcagcccagctgctgcctgggaaagtcctagtgcctctggccgcccctagcatgtcagtgccgggctggatggtcccctccaactattgggccccgcccgcgcactagccttatcccaccccgcctcgtcgggtaggattaccggcctcgccccgggccttcggactcgaccaccggnnnnnnnnnnnnnnnnnnnnnnnnnnnnntccggggtacctcccacgccatctcccccccttccgacctccctctttcgcgtttccccgtcacaggcgctacgttccgcctacacccacgcggatggcctcaggcgcacgccactat

SEQ ID NO: 454155 - DNA, 1225 bp, Homo Sapiens
  misc_feature (198)..(206): n is a, c, g, or t
  misc_feature (860)..(860): n is a, c, g, or t
  misc_feature (873)..(873): n is a, c, g, or t
  misc_feature (1131)..(1131): n is a, c, g, or t
aaggagcgaggcctgggtggcgaattcggcacgagggcagtttccgagggcctgcatgatccacctgctgcacgatcctatgagggcttcctgtggcacacagccctctgggtgcttgggaactagcttcaggcacagcctgattctggtgatccagtgatctatggaagtcgtgtcttactccaggtgaacgggggnnnnnnnnngcctatactttggcaggttatgaactttgaactgtgatgaaatgacacgtttggctgcatttggatggtgtcttagaaccctcattgctcagacctgaaggctacttctaggagcatgaagtttgagttttgtgtttttccaaaggatacttccttggccctttttctttattgactagaccaccagaggaggatgtgtgggattgtaggcaaacccacctgtggcatcactgaaaataaatttgatcatacctaagaggttaggaaatggtgccattcccaccttagagtgctacataggtgctttgggcgtatgtaacattagtgtccttccttgaagccacaagctagttttcttagttttaaaatcctgttgtatgaatggcatttgtatattaaaacacttttttaaaggacagttgaaaagggcaagaggaaaccagggcagttctagaggagtgctggtgactggatagcagttttcagtggcgttcacctagtcaacacgaccgcgtgtgttgcccctgccctgggctccccggccatgacctcttcaccttgatagcattgtgctcgagactgaccccaggtgcagctagcactgggacacagatccttgtcttcagcaccttccaaggagccaacttttattcnctttcctctctcncctccccacctcgcttcttcccaatttagtaacttagatgcttccagcacatacgtaggtagctaccccagccggttttggattacaggcctgtgctggaacatcatctcagttggccacctttcctgggaaggctgtagacctgacattttgagaccaccctagagtcaggaaccagggacttttgactccttaggaagagcaccccattgagggcaaggcttgctgggcagaacccctcccatgggcccctaatgntggcctgggcgtgaatttcttttcttttttaatggacccaggggggattaatctttttaaacccatcccgtaatttacctggagggggagctat

SEQ ID NO: 454156 - DNA, 951 bp, Homo Sapiens
  misc_feature (100)..(100): n is a, c, g, or t
cagactctcgggcttccatgggggtaaagtagcaatccaggtcctgggcatccaggatgttctggagggggtctttggccgccccgctctgccccagcgnccgtggggcggtagctgcgcttggcgtggagggccgagccatctgccacatcatcgtcccctagcagccgctttgcccacagtggcagcttgccgttggttagcaggcaacgaggatctggatccaagctatctttggatggtgtcttcagcatctcttctggctcacactcttcctccagatcatcctctgtttgctctccagggctcagggagtgaatctcactaggtgtggacacatacgtatcctgcctggggtggccactccgcttcttgtcatttgtgtgctgctgctgctgccggtggtcaatctccagcaagtgctgcttcatgcagttggtgatctccgggcccaggtgccagatgaacacgcagctgtctccagatactgtgatcaagtgatgacagtcataggtgaacttcatgctggtaataatttctgaatggccaaacatcttggcaatgcactcgcccgagtaaaagtcaatcactgagatgcttttgtcagagcagctggtggccaggaaggtgcctgaggggtccacatggaccttcagcaaggacccttcgtcaccctgggagcccttgtagcacttcttctgcttcccgttcacagtgttgtagactctcacattgcggtcctggcaggccacggccacgtacttctgggtgatgtcaatgtccatgtcatacaaggtggttttctctgctacgtggtgggtacggacaaagtgtagtccatccgaaccctgctgggcactgcgaaagtagatgctcttgtcagccccacagctgatcatctggatgtctctgttgccagcgaaccctcgtgccgaattcgccacccaggcc

SEQ ID NO: 454157 - DNA, 965 bp, Homo Sapiens
  misc_feature (163)..(181): n is a, c, g, or t
gcccgtttttgtgtgaccccccaatgtgcgaaaggcccacccggggcgaaggaaattgtcccgtgggggagaagctccacaggctgttttgtgaagttttcaaggtcatttctgaaggtggtagggggaggtcagggagtcgtgggccaagtagggtgaaagnnnnnnnnnnnnnnnnnnntttacagtgctcggtgcccccttatggagggggaaggccagattctgaggctctgaactttttgcagtttttaaaatagactcaggatttatttattttctttttagctttatagcaattaattggctattgattggttggaatgttcaactctccatttcctcaaatacaataaaatagtttcattaaaatgtattcatgcttgaaaagaagggcgccattaaatggtttcctttctgttccactccaagggaaatgcgccgtttgtaaatcaaaaatccatcatccaaaatcacttgttcttaatgatgcttttggagaagatgagggacgtggccacaggcatggtgattttggggacaagggcgaccagcggccatagccacagggtcacagggtggggggcgggggtcagggcaggtgaggctggtgtggcctcctcctgccaggcctcagagtcggggaggagatgcatgactgccaagtcacccccaccctgctgtttcacctgcttccctccctgggccccgatcagccaccggaagctgatgggtgggtgggtttgtgcctctgtctctcctgccacaggccaagtaccctacctgagacgactcctttgaggctttgctgattgtccctcagtagatattaataggtaagcagctgcattttctccttgtgttgctcaggggtctaagatgtgggaacaagaatttctgggctttctgaatggtggctacgtttacccatcttggagatgagcctcgtgctggaatgccaccca

SEQ ID NO: 454158 - DNA, 1231 bp, Homo Sapiens
  misc_feature (1082)..(1090): n is a, c, g, or t
ccccgactaccccgacaggggaacggatcccggagctagagctcccatccagttcccctgtcccccaagtcaccacgccagagccaggcatctaccacggaatctgccttcagctgaatttcactgcctcctggggagacttgcactacctggggctcactggcctggaagtggtgggcaaggagggccaggcgctgcccatccacctgcaccagatctctgcttcccccagagacttaaatgagctccccgagtactctgacgactcccggaccctggacaagttaattgatggcaccaacatcaccatggaggatgagcatatgtggctgatccccttctcgccggggctggaccatgtggtcacgatccgcctggacagggccgaaagcatcgcaggcctgcgcttctggaactacaataaatctcccgaggacacctatcgcggggccaagattgtccacgtctccctggatggcctgtgcgtctccccgccagagggctttctcatccggaaggggccaggcaactgccactttgattttgctcaagaaatcctcttcgtggactacctacgggctcagctgctgccccagccggccaggaggctggacatgagaagcctggagtgtgcaagcatggactacgaggcaccgctgatgccctgtggcttcattttccagtttcagcttctcaccagctggggcgacccctactacatcggcctcaccggcctggagctgtatgacgagcgaggagaaaaaatccccttgtcggaaaacaatattgcggccttccccgacagcgtgaactccctggagggtgtgggcggggacgtccgcaccccagacaagctcatcgaccaagtgaacgacaccagtgatggccggcacatgtggctggctcccatcctgccgggcctggtgaaccgggtttatgtgattttcgatctgcctaccaccgtgtcaatgatcaaactgtggaattatgcgaaaacaccccatcgaggggtgaaagagtttggcctcctggtggacgacctgcttgtgtacaatgggatcctggccatggtgagccacctnnnnnnnnncatcctgcccacatgtgagcccaccgggcctaccacacccatcctctttcacgagggacagggacatccgccaccagggagaaaacacccaccatcagtaatcagggccgagggatcaagatgtcccaaatgatgaatgaa

SEQ ID NO: 454159 - DNA, 951 bp, Homo Sapiens
  misc_feature (814)..(814): n is a, c, g, or t
cgcggctgcggcgacggtggccgcggtggagccacggggcgggcttggcttggtgtgacggcggctgcggcggcggtggcggccgcgaccaggtcggcgtcctcagctggccgagcatggtggcagcctgcacccttggctcccttgtctggtgcagccagcagagccgccagccttgggcgcccatggccctccgtgtgagggcgtgagcggcctgccccagcctcacctgctgatggaggactcaatggcccagtgacctgacaccacaccaccaactccctcccaccagctgacgaatggtggacccagtgacgagtggcccttgtaagggtcatggaataatttgaagcgaggcatgagcggcccctgtggtcgcctgtgactgctggagatagaggtcccagcaccccaagccaacccagcggaccctcccagccctgcttcaaccaatggggccagtggggctccaagcagccacctaaccatccagaccccaccccactcacgcggccatggcgggccctgagggcttccagtaccgcgctctgtacccgttccgccgggagcggccggaggacctggagctgctgcccggcgacgtgctggtagtgagccgggcggccttgcatgcgctgggcgtggccgagggtggcgagcgctgcccacagagcgtgggctggatgcccggcctcaacgagcgcacacggcagcgaggtgacttccctggcacctatgtggagttcctggggcccgtggccctggcccggcccggccctcgcccacgggggcccccgcccactgcccgccaggnccccgtgatggggcgcccctgtagcccaggcctcaccactcccccgaaacttgccccgagcaagttcctccccccaccctgaatggtggcctccccccctcctttctggggtgaaagccttgggggaagggccaatc

SEQ ID NO: 454160 - DNA, 943 bp, Homo Sapiens
  misc_feature (28)..(29): n is a, c, g, or t
  misc_feature (209)..(209): n is a, c, g, or t
ttgccgaaccagaaaacccaatttcccnncatgttcttactacaagtggaaggcttaacactgaacacttcagggacaaaaagatagtaacagacactgggaactactggaggatgagggggagggcggggaaaggactgaaaaactactgagtactatactcactcactacctgggtgacagggtcaattgtaccccaaacctcaacnatcacacaatatacccatacaaaaaatgtgcacatgtagccccctgaatctaaaaacaagttgaaattatctaaatatataatttaaaaatttaaaaatttgtgtttgaggaaatagatgggagaacggatgactgcgttgcagctcagttctatatatctgaacagaggagtaggggaggtaggctccatgcctctggtggagttcaaagtgaacgagaagatgccacctgagaagagagttggatgacaaactcagccctcactcagggcctcagctccatcagcctttcctagagatgcttcttatcataaccctgggtcaaagtcttctggggagagggggcagtgaccaagctcacaggctgtgttctgcaggacatctcctccaaacaaagatgtctcagagaaactagagcccagctaccatctatgaagaaaggcctcgcagtgggatcactggggactgtgggatgagaaccttctctgaccctcaggtctaactcatgactttgcaggcagcaatactgtcagcctgatatcagagctggtggatcaagtggctattcctactctcctgctcagggaataacatgacccaaatgattgtcacccccaataaagaccccatagagagagaagactgtcatatcctatgttagagaagcaaaaggcatatccccaaatatcttagttccccctcgtgccgaattcgccacccaggcctcgctcctt

SEQ ID NO: 454161 - DNA, 967 bp, Homo Sapiens
  misc_feature (30)..(30): n is a, c, g, or t
  misc_feature (455)..(477): n is a, c, g, or t
  misc_feature (657)..(657): n is a, c, g, or t
  misc_feature (695)..(695): n is a, c, g, or t
ccctcacatttagtctctcatgaatttttnagtccatgcacttgaagacggtcacaagatataatttccatataatatgtcagattcataagagtttcagatttttggtcctccccctgcccagtgggagtacccgggccttccccagaaagctgcaggagtccaatgcttcagttaaagcatgttcttttcaaagttttcttgaggtgcccaaaaaactgtcaccagttttttggttcccagcactgggagagggataaagctgagctctggtttttgtcctttaaagtggcccaaagccgactgtatgaagagtttggtcatcaaacacatttaccaccagccttcagagtacatctgtctcattcaaaccttacaggaagcctaaacgttgtgtaggtgtttgggtggaaagataagaataagctaaacttggcctaaggagaaaaagggtnnnnnnnnnnnnnnnnnnnnnnnggaaagaaaaatacaacactctaggttttaattcaaaggaaaaatatatatataataaactggtttacacccttgggtcagactgttgcctgggaattctctacccttctctttcacagtccaaagagtttgtctctggttctcttccttcactgctttagcaaagagaggggggacttncaaagaggattccaacagtgaaagcagaatcatggggncaaaagtcactatgggggcagactgaggttggaccacacaagcactccaagctggggcaatcccaaccgctggtgaagccgcacagcacggagtagccatccacataggcctggccacatggtactcaagcagaggttttccacaagtactctttctcctcacaaacaaaaccccaagttttcccaggtaaacatttttgaaaaaacatccaggctggtgtactactgtaaaacgctgccagtttccctcgtgccgaattcgccacccaggc

SEQ ID NO: 454162 - DNA, 1001 bp, Homo Sapiens
gggcccccaaattcaaggaagcagggcttgggctcccccaaggggcttttagggtgggggttatcgcgtgcttggttccaaatttcaagccccttgagctgtagaaccttcctggcagggcttctcgtttggatggctgggttcaggcccttccaggtgccaaccagtgtgtatgcctggagcccaggatctcatcccaggagggcttgggaaccaagggagggggggtgttttatgattcaggggaggctggaagagcttgggtgaggcgctcagcggcttcagggacagcccttcagcacgacttgcagcagatccagaccctgggcttggtggcccatggccagcctcacccctgcccgtgaccaatacccagcgcagacagactgctgtgaggacagggctggcgcagagcgagcagtcacaggtgggtgaatgggacaggaagttgggtatgggctggggcttggttttcaagactggggaggagtttgtagaaggtgctatggggccaggctccttggccacagtggccaccagctctagagcagggcctcttaggaagagctcctcctctgggagctgtggaggacaggggacctgggcctgctgcttccccttctgcaggtggaccttcttcacagagtccaggtgctgagtcaccccaccaaactctgtgcaagactcaagcaagaacagaacctgctgcaggtccgactgacagagatcaatgtcattgcgggccagctccagctcgcccttcagcaccaggaacagggcacactggcgtggtatctgcagctttgttgtaagttttagggcctccaagcaaaaggccttggcttcactcacactacccaggcggcccaggtggcagaccagcttctctgagcagctcagcacctctgaaagaacctgccatttttgtaccagattttcaccatagtccaaaaacgatgtctccacagctgcttcctcgtgccgaattcgccacccaggcc

SEQ ID NO: 454163 - DNA, 954 bp, Homo Sapiens
ctctgggtatagaaaaactaaattatggttttagctatcggggtccggggttataaaacatgcacccaatgtacaatttctccttgtagattgaatgcaactatagaagtattagcataaaaatatgtggcctggaaggaatctctgaagatactgaagaacctcaagttccctacattgctaggagccaagggaaggagacactgtacacctagagcgctgaattagcagctgaggttttagtatttgaaagcaaataatataaagcgagtaatgtctacagtgggtctcagttaccatttggctacttatttaggactcgattaacttggcaacttttacaaaaaacattcacatcacaacatgcaacttaaaaaacagttaatgtaactatgccactgtcagcaaggccagcttgcataccagagttaagaatgagagtgtctgtctgcctagggcttaacattcaaagatatttataatctgtgttttaaggttaaattttatatgacccagttttccttctttgttcactatacactaaaattaaacgcctctacgctgtgcaagaaatcactatgtgtgattttactatttcaaccaatccatagaccctgaggatttggcagcagaattcaggagaaatgctacctaaagtgattgagctgttgctaattctaccttctgttccactcaagtacctccagggactaacaagggaaggcaagggcaactgtgactgactaggtaaccagctattctgttgtgacagaagaaaccaggtaatacttgattttcaaaagataattttaactgctgccctatactacttttagtatagtttggcttgaccttaatagccatgtccctcatcttagatagaataaccaaattggtttaaaattacttgatctatgtcactgaaaccctcgtgccgaattcgccacccaggcc

SEQ ID NO: 454164 - DNA, 1137 bp, Homo Sapiens
  misc_feature (43)..(79): n is a, c, g, or t
gacggaattcgctattggggactggagttccgcggtggggcgnnnnnnnnnnnnnnnnnnnnnnnnnnnnnnnnnnnnnatcaggccaaatcggccgagctcgaaattcgtcgagagcggggcctcccgccgcaatcttggcgggaaggcgccggcgctaagaagccgaaagatgtccaggtcgggcgcggcggctgagaaggcggactccagacagcgaccccagatgaaggtgagaaacggactggtgcttccaaggtaaatgaatataaagaaaatcaaaacatcgcttatgtgtctctgagaccagcacagactacagttttaataaaaacagctaaggtctatcttgcccccttttcactcagtaattaccagctagaccagcttatgtgccccaaatccctatcagaaaagaattctaacaatgaagtggcgtgtaagaacgactaacaataaagaaaacttgcagaaggattatacctccaaagatgaaaaacacatcttccaaggcagaatccacgctgcaaaattcatcctcagctgttcatactgaaagtaacaagctacaacccaagagaacggcagatgcgatgaatctcagtgttgatgtggaaagtagtcaggatggacgacagtgatgaagataccacaccagccctggatttttcgggattgtcaccctacgaaaggaagagactgaagaacatatcagaacacgcaagacttttttgcttctcttcagttgtctgagtctgctgcaagactccgtgcaatgatagagaagagacagcctcctaaatccaaaagaaagaagcctaagagagaaaatgggattggatgtagaaggtcaatgcgattactaaaagttgatccttcgggagtttcattaccagcagctccaacaccgccgacattagtagcagatgaaactcctttgttacctcctgggcctttaagaatgacttctggaaatcaagaagacacaatgaacgatttaaaggatttctgcacacatggggcaggaaatgagcaagcccaggtagttaggaacactgaggaaggggattatctagcatttaaaaggctacaaaggccaattttaaagggcatgggtcattagggaagaataccgga

SEQ ID NO: 454165 - DNA, 1000 bp, Homo Sapiens
ggcctgggtggcttttcaaaacgaggtcaaacccaagttagtgtccgctgattcgaagtggagtgaagcctagaaaagccgtgcggatccttctgaataaaaagactgctcattcctttgaacaagtcttaacagatatcaccgaagccattaaactagactcaggagtcgtcaagaggctctgcaccctggatggaaagcaggttacttgtctgcaagacttttttggtgatgacgatgtttttattgcatgtggaccagaaaaatttcgttatgcccaagatgactttgtcctggatcatagtgtatgttgtgtcctgaagtcatcttattctcgatcctcagctgttaagtattctggatccaaaagccctgggccctctcgacgcagcaaatcaccagcttcagttaatggaactcccagcagccaactttctactcctaaatctacgaaatcctccagttcctctccaactagtccaggaagtttcagagtattaaagcagatttctgctcatggcagatcttcttccaatgtaaacggtggacctgagcttgaccgttgcataagtcctgaaggtgtgaatggaaacagatgctctgaatcatcaactcttcttgagaaatacacaattggaaaggtcattggtgatggcaattttgcagtagtcaaagagtgtatagacaggtccactgggaaaggagtttgccttaaagattatagacaaagccaaatgttgtggaaacgaacacctgattgagaatgaagtgtcaatactgcgcccagtgaaacatcccaatatcattatgctggtccaggaaatgcaaacagcaactgagcctctttctggtgatggaatcggggcaaaggggggagatctcttttgatggcaattaccttcggtcgaacccaagtaacaccggaataaaagaatggcaaggggccaatggggtggaaccaacctttaagcccaaagtgcccccttccagggtaaatctc

SEQ ID NO: 454166 - DNA, 948 bp, Homo Sapiens
  misc_feature (107)..(107): n is a, c, g, or t
  misc_feature (765)..(820): n is a, c, g, or t
gaggagggaaaggggtcaaccccttgggccgggggggaaatgggcgaggaagaccggggcgccggggtgcaccaggaagtttggcccttcccttttgccgggcaccntccattttttctccccccggtccacgccaccatctatttgagccataaatcagtctcaagaagcatttccagaactcggaggagtcagggatgggagttctctgggagagcaaaggcaagggaggatgacccagagaaggaagggctgagacccagggggagggagcagggagacggaggccatcgccaaggcctgagtcctccaacccacaccaagttggcctgatcccaccctggcttttgttgacggaactgccctccaccagagaccccaggcaaagctgaaggatggctcctatgaccccaccctgccagcaccctgctgcagggccatctgcgcccctgcaccacccaagatgacaggaggacactccgaggcttccagtgagtcatcaggtgcagggtgtgcccatctgggccctgccctgtccccccagcttcccgatcaagcactcagagatgacacagaggctgtgagcgtggagtctcctggccttgcagcatgcactcagcagccccgccccgcccctgcgttaccacaagttctgttggggggtgcgggtggaggatgctccctcctccctcccttggtgccagcctctgaggtcttcttcctcaagtgcaaagagtggtctgagagtggtggagcctggttccnnnnnnnnnnnnnnnnnnnnnnnnnnnnnnnnnnnnnnnnnnnnnnnnnnnnnnnnctcagtagagtccacagccccgcaggtttttggcgatgatgacgtccgtcacagcatcaaagacaaactggatgttgttggtgtccgtggcgccaggtgaccctcgtgccgaattcgccacccaggcc

SEQ ID NO: 454167 - DNA, 965 bp, Homo Sapiens
tgggtggcgaattcggcacgaggcttttctgaggccggctgctggggtcagagtgaggcaagagcacctccccctccctagagccttagttcaagaggccagaagacccagggagaagccggcgttttgggagaaggggagctgcagagctccccacccaagcaggtgaggggaaactgagttccagggtaggctccagagtgaagagggaagaaacatgattctcaaggcccaggtctggacaagtgtgaacaccttgggcctgcgaattcagccccctccttcctttctctggtcaaaggctagacttgcaggagcttgcgtttgaagggacagcccagaaggcatcgtctgcactccccatacaggtgtgcccggagaggctgagcagcctgcgcctgagctggtggaggtggaagtgggcagcacagcccttctgaagtgcggcctctcccagtcccaaggcaacctcagccatgtcgactggttttctgtccacaaggagaagcggacgctcatcttccgtgtgcgccagggccagggccagagcgaacctggggagtacgagcagcggctcagcctccaggacagaggggctactctggccctgactcaagtcaccccccaagacgagcgcatcttcttgtgccagggcaagcgccctcggtcccaggagtaccgcatccagctccgcgtctacaaagctccgggagagccaaacatccagggtcaaccccctggggattccctgtgaacagtaaggagcctgaaggaggtcgctaccctggtgtaggggaggaacgggttaccccctttcctccaggtcatcttggtacaagaaatggccgggccctctggaaggaggagaagaacccgggtccaccattcaagtcgccccaaaattggggaagtccaagggggtttggacaccctttgcgaagaattctggaaagggccacgcttgg

SEQ ID NO: 454168 - DNA, 584 bp, Homo Sapiens
ttctcctccttcagaggccggccattcttgtaccagatgacttgaggaatggggtacccgttcctccctacacaggtagcgacctcctcaggctccttactgttcacagggatgcccagggggttgacctggatgtttggctcctccggagctttgtagacgcggagctggatgcggtattcctgggaccgagggcgcttgccctggcacaagaagatgcgttcgtcttggggggtgacttgagtcagggccagagtagcccttctgtcctggaggctgagccgctgctcgtactccccaggttcgctctggccctggccctggcgcacacggaagatgagcgtccgcttctccttgtggacagaaaaccagtcgacatggctgaggttgtcttgggactgggagaggccgcacttcagaagggctgtgctgcccacttccacctccaccagctcaggcgcaggctgctcagcctctccgggcacacccgcgacgcgaggacagcagcagcaggcggcgagcaagaaggcgcagaccagcctgggaagccccatgcttcccggccggaagggcgagagccaagt

SEQ ID NO: 454169 - DNA, 977 bp, Homo Sapiens
  misc_feature (345)..(345): n is a, c, g, or t
gttaccttatacccccaggctaaaaaattaaaagggtataatcttctggaaactgaagaaaactgaatggtatggaggaggaggaacgttttcataagaaaaatagctttgataaggggtatacccaaagggcatatatatattcacccaaaaccgcccctctctctttatatactatacaggctggcacacggccttataaagaattataatatcaaggctttaggatttcaatgaattttggaattttaatttgacaggtgcttaggccatttaggtcctgacatatcggaatcccttgtatttctaaagtatataattatgttttaaaaaggcccagatcanactttccttaaacagtaacccaacataaagccatagttaccaagtggaaaataagattgttattctgtattaaatcagtaaagggtattttaagagaaaggacaacttggaaaatagagacttcagagtccattattccaagctgagaacattttagttattagcagtggttaccaaataagctgaaggtaaatctcttcaaggagctgctcataatttgcgttgttgggaagaggcgaggagctgtttctctattccactataagatgatgcaagtttttttatccttgaaagggttttctgaagttggtattcctatcagcaaagggtcactcctggcatgttcctcacagtaggacatgaggtccgctgatgccttcgaaacctttattctttcaatggaggcttctaatcttaactgctgcacagttctccttgcctgggctatattgttggtgcttgctgttttgctggacatcttcaattattgtttttacctgaaatcagtaagactttgtgtggtccaatgttttcaggttttaagtggaatgaatccgcctgccggtgcgctgccccgccgtcgccgccgggactcggtctctaagggctcctggagacggctccgacccgct

SEQ ID NO: 454170 - DNA, 926 bp, Homo Sapiens
  misc_feature (881)..(883): n is a, c, g, or t
tcagatgcatcgcctggtctctgggactaccctacatgagggggtgcaggaatgtgggcagcaggaagagctcgtgactgtaagaggcggggtttccgagacgaatgtttgaagtgggactgggtggcctcgtgatgaaggtcaaagctcgaggactcctgaactggatccagaggcaccatcccccttgcgagcatctcaggtccatgaacttgacctgggacctgttgtcctgataaatcaagctccaagtcttctagaagggtcacggcctcctctccactatcggggcggtattcctgcagccagacctgggagctcctttgggcaggatggaaagaaagtgcttttagccccagaagctcccggatctgttccttggtgtttatttctggccgcaagccccactgatgaccaagttccttcagccgactgagagcctctcgggggccccaaagtgttctggtaacagaagcgcctgaagcgttggcggaatatctctgggtctggaggaggcgtgtcctgtagggtggaatcctgcccccacatgtggtcttcctcatcttcctcttccaccttcactattacgataccatccttctcctgtgcagcctgtggggacagacccgtggcttcccgtgattcagcagtcatcattcaggctccaggaactgacttgatccaaacagggtctgtgctcacctttatgtcctgggaggttttatgatgtgtttctttactattccgtgagccccgggagcggcctgggggcgctgggcgagaaaggggagctgactctggggctcaggccggccgaagggcaccgcacacggacttaggccctcccctcgtgccgaattcgccacccaggcctcgctacnnnggaggtgtgacgaccgatgtgccctggccgggacggaggggac

SEQ ID NO: 454171 - DNA, 1150 bp, Homo Sapiens
gcgggtctccccccgggccttggctgggaaccctaatttcccctaaactgccctcctccaacagggaggaatgttgggatccccccctaaccctgtgccccggtcctcaggcccagtcccctgaaaggaaggagtggggacgccagaggatttggtggtttgtacggttaatggtccctggttgagcggctgcgtctgctgtgctgtcttccaggggggcgtcagagccatcctcagggcagggccccagttcatggctgttcctggagtcagaagctaggggctccttagcgggaggtgagagggagccatctgtccatctagctgcttctgtgtggaaactgcccacaggcgtggtgccaccagatgactctcccccaagggacttgagcagctctctgtgggccagctccatatccttgagcctgttgagcttgagagtgagctgctcaatggtatggaagatcatgcccacgtccctgagggccaggcttggaggagagcggctggggcgtcttggatcatcgttgcctccctgcagctgaggctgaggctctgtctgccctgcagggaggctgtcaggctgaggggggctcatgggtgcctctgagtggtcggtgcttgagtccgggggtcctgatggcatgctgacataaaagcagttccccgtagcctttgttccgccttccacttcaggtggcccaggctctgactggccactctctggtagtgcagggacaaccttgctgcctgccacctcagctgccctgtctttcccggcctgaggctcctgagaagagtggctcttttccctgggaacaggagatcagtgaggagcactaacagagactggtactggtagttggtttgtgccaggcagaaagaaatgtccttatgtgcttttctcacaactttgtaacctcctgctgcctctgtgcttgaagcatcttcagccagattcctgtccagttctggagactcccatatcccagaatttctggtccttgggggtaggtgttccagagaacagagacccatgtcttcctgctctggccgttccccctccagccctgcaagctgggtgttgtccccagggcaagcaccccctgggggtgaaggggaccctcgtgccgaattcgccacccaggcc

SEQ ID NO: 454172 - DNA, 955 bp, Homo Sapiens
  misc_feature (59)..(59): n is a, c, g, or t
  misc_feature (872)..(908): n is a, c, g, or t
cacactttaaaaagagctggctctcaaccaaaagcaagaagaccctctgtcattaagcnctattgatctgaagctattccaggaaggacaaaaaaaagttcaagccagatgttcagcagcagccagagttggaccctatgtcacgagagttccgctgggaggcactgggtcccactgatgttgaaattgactgttggggcccaatcttgatgccatttgcctcattgtggacatcaaataaaccctgctggatcttcctatatatttctttggctgtgttaatgaaggcctcttcaacattgcaggctgttttggctgaagtttccatgaatataagtccatgctccctagcaaaggcctctccttcttctctcttcacatccctgcgggactctaggtcactcttattcccaatgagcatgataaccatgttggaactagagtgctgccgggcatcctctaaccatgaggtcaggtggttgaaggtttcacgccttgtaatgtcgtacaccagcagtgctccagctgctcccctgtagtaggaacgggtgatagaacggaaggattcttgcccagccgtatcccagatttgcagtttgatttgttttccatcaatgttgaccatacgagctccaaactccacacctattgtgaggtcgtggacaggctggaaccgcttatctgtaaactgcaggaggagacatgacttccccacacctgtgtctccgatgatgatatacttgaagagataagcataagtcatggtgtcgcgtcctctgggttccgggtccgcccgacttctatagccacttacctccgacctctctagccccgctctcgacgaattcgagctcggccgatttggcctgatnnnnnnnnnnnnnnnnnnnnnnnnnnnnnnnnnnnnncgccgccaccgcgtaagctccaagtcgcccatagtagtgttcattcc

SEQ ID NO: 454173 - DNA, 582 bp, Homo Sapiens
aagacatcccacagcaccagcctgtgtgtgtctcgccaggctcagagctgggaacctggaacccaggactgggtgagctcagagacataactgtgactgtactggagtcagtcttatgcccagagctaagcagaagcagggccagcccagaggagacgatgttaccgactcccaccccgtcctgtctagcgcttagagtacctctgtactggcttgcttcctacagttgctctgggaggaatgtgtgccagagaccctgacctctgacccaggcatgcaagggtctgccttgcctagttgagcctgtgcactctgtctctgcctcccttcagatagggaaaggagcttcaaattacggggtgatgtcatagcacggagtggagatggggtggcagggagacagggaggctcagggaaggaggccaggtatttcacagaggagttctgggggagaagaaggaaatcggcagagaagggaacaggaaggggtgaaggaaaggggaaaagtgccttcactgcatggaaaggtccttctccaccacagtgaggtgggaggagaggaagtgtatcctctggagtcgg

SEQ ID NO: 454174 - DNA, 1622 bp, Homo Sapiens
  misc_feature (957)..(968): n is a, c, g, or t
  misc_feature (1103)..(1111): n is a, c, g, or t
  misc_feature (1455)..(1455): n is a, c, g, or t
  misc_feature (1512)..(1512): n is a, c, g, or t
tccaccaactgagatagtgtgagactcggaaactgtctcctggcaaaaagcgatgtaaagacattaaaaggttgctagtgaactttatgtatctgcaaagcctcctacagcccaaaagcagctccgtggactcagagctgacctcactttgccagtcagtcctggaggacttcaacctctgcctcttctacctgccctcctcacccaacctcggcctggccagtgaggatgaggaggagtatgagagtggatatgctttcctcccggaccttctcatctttcaaatggtcatcatctgccttatgtgtgtgcacagcttggagagagcaggatccaagcagtacagtgcagccattgccttcaccctggccctcttttcccacctcgtcaatcatgtcatcatacggctgcaggctgagctggaagagggcgagaatcccgtcccggcattccagagtgatggcacaggtgggagaatcggggaggtcatcactatggaaagatgaaccagagtccaaggaacctgtggagaaagaggaggagccagatcctgagcctcctcctgtaacaccccaagtgggtgagggcagaaagagccgtaagttctctcgcctctcctgtctccgccggcgccgccacccacccaaagttggtgatgaccgtgacctgactgaaggctttgaatcggactccagccatgattcagccccgggcccagtgaggccctcagacagtcggctctgacaagaatcctccgaagagtgggtgcacacggccccttttgcatgcctgcaacacccgcacttcccgcataactcgaaatagtcccaggccaagttcccccgcattctattatccttcgggcacagccattatcgtcgtcgtgtaaacgtatcggaacggggtgcgaatcccctccgatcgccgcaccccgacagcactcttctgggagaaggnnnnnnnnnnnngttccgccggtgggctcatcactagagtttcctgcgcgaggggcgccatttaccctcaccgcaaaagctaccccctctcccgattatgtaaaacaagagtgaggacctcccgacagcgttggtggggggggcggnnnnnnnnngacgcctttgctatcgatgcgctttttaaaaacgcacacattttactgcgcatttctagcccgccatatattcacctccactcccgaatgaggctctcccatcgtgggtgttgccccacccaacgccccctgcaggaatatcgtgtaaacctgccccaaggtaacgacattttatagagagtgcccctcttgagattattttgtctcctgtaagacccgccggtggggccgctccccccccacggaatctctgtcgttaatgacacaaaaaacccgctggttcgcctatctttcttatgtccgacaacgtgtaacaccgcgcgaggctcgagcctgggaaaaancccgtcgtctacagtatataataccgctctcgcggggccccctcacagaaacaacancgacgccgggatccgcgtggtggggcgcgtcgcgacaaaacggagagggcggccctattactttcttaccgatcacacgccatgcccgctcgagcgcagataatagaccc

SEQ ID NO: 454175 - DNA, 1102 bp, Homo Sapiens
  misc_feature (887)..(887): n is a, c, g, or t
  misc_feature (1009)..(1009): n is a, c, g, or t
ggtatagcgttgaatgtgggcaaataccccgagagcattcttgacagccccttgcgcatcaactatcaggagttccatggcagagttgcggagaacctacaagtctccgctccggcatgcgcggcgcgcccaaatcaggaagacttctgcctctaatagggctgtgcgagagaggcagatgctctgccgccagctggcctctgcgggcacggggccttgcccagtgcatccagcttccaacgggactagtccagcgccagccctgcctgcccgagcacggaatctttaagaatccgccagcacttggtagcgtctgcagccacccaggtagcatacgctctttgctgtgtagaagaaatgcccatacgacagctttgcccctgtttgaagacctcccttcttgcctctccagacgtgttccccgaggagatcttccttccgtccttcctggtgttttggttgcccaccttgccgtgcttcctcttacgtgctagctttgtacctatcgctcactgcatgctcgcctccctcttgctggcatcccggcctgtttcaatgactaccgctctgctacttaggcacagggactccgccgcacgctgacggaccacgagggctgaccccttccagcctgacttggttcatggaggctcctactctgccctctccaagctcccctggcggctccccacctggttgcccagttcctattgatgagctctggacagaaagatgcccgtttggccaggctggtggcttgatgggtgtacctggagagggggtctggcttcctgcccaagatgcctcccagccctgccagggcccggtgcagcgggcagggcctcatctgtgctgtagtggtcgagtggtcgctgcaaggagcgtanttctgccatgtctggggggcaggttccactctgcacatgaatatgcagtctgggaggccccactgctctcactggggagggacaatgttgcacctctgttaatgcctgacttcagctgctgnggttctgatggagcccgaagccttgggggaatctgggaacttgccctgctaaaataagggccgcgggttgggacttctcagcccattggggca

SEQ ID NO: 454176 - DNA, 937 bp, Homo Sapiens
  misc_feature (110)..(149): n is a, c, g, or t
  misc_feature (754)..(799): n is a, c, g, or t
gggtttgtggccctggcggggggaggatgggtttaacctgggggcgcccggggactgtgtccttgtctggttcaggtgggcacccagggggccccgggggcttccagttnnnnnnnnnnnnnnnnnnnnnnnnnnnnnnnnnnnnnnnnttcggtccttccgggaggccattcttggtcgggccgacgacgccctccatggttcagggacgacaccaggctgaggcgtacgctgagggggctacaagtgacccttggacaagcttggcttctgccatcaggcaacagccaagagctcgtgggaggggccctactgtgtctcccattttcaggagaagatctgatgactcccaaatggcttgatgtcaagccagctaatatcatgatacccgtgacaacgcccggccccactcgctctggccacctggaatgaagacaaggtcggccagcgacaaagacaaacaaggaagtacacggactcctgaaaccccggcttcccacgaaccacccgacaccatgtcacgcctttcagctgcaaagggccaggctaaagcaagcactgcccgagtggtggcagtggacagcttcgggacaggccgcgctcgtcgggcgcagacaagcattcaggagggctcgcgggcaccggcatttacagagccagctccgccgcagctgaaggcgggcgcccaggcccgaggccaccgcagcgaggcgggggtgactggaacggggccgtcccgccacgctgcagggannnnnnnnnnnnnnnnnnnnnnnnnnnnnnnnnnnnnnnnnnnnnntcgagcctcccccgcccatgcactgcgggagcgggagcgggagcgggagcccgagccccgaggcgccgcggcctccgagcccctcaccctgctgctctggcagccccggaggccgcccggcccggatctccggcggag

SEQ ID NO: 454177 - DNA, 1121 bp, Homo Sapiens
  misc_feature (294)..(303): n is a, c, g, or t
  misc_feature (1089)..(1090): n is a, c, g, or t
ccgggggtgtgcccaagttatcccggcgccacataaagagactgcggggatgttaaaggtttttgtggtggctgggtcgccggatttgcgccgcgttggaccaccgggagcagagggtttggagaggagatatccaaggtgttttttcagaggaggggaagtgggcttccagggtacccccccgggagtagcgccccccgggtgggggggccaagccacctttcaaggccactgggtcccccttcatttgggaggcccatagggaaccaatggccctgggatgtgttatacctnnnnnnnnnncccaagtccaagcccatcccaccaggctaattggggttcaggtaaggggccccttggttagaggaggaagtgagtagaagcctgatgggggggaccaggtgggacaaacgggggggttccaaccaagcggggtggaacccctgaaggaaaggtccagggccaccatcaggggaaggttttcggggaaaggaaggaaggaacaaagggcagctcccccttctcctgcacaggatcctggcctgggtgagggaactctgtcctcagccccaggagtccaggccccatccaggactcctctgctccttgaacttgccctcaaacccacgctccaaatctcatccaggtagaaggcgcagacggcagagccagggatgctattggtctgggtgggtgaagaccccaaagagagcagagcggccatgcaggttcacaggcccagtcaaggcctgtaaaacatcaaaatagaaagtagagtccccagggacagagcagttgagccgaagcttcaggaaggatgtccagtggcggtccaaggcccgaggcgagccgcccatgtcacgtttacatactcgggctacgcgggagaactgcaccctccccagccgagcatcctccacagagacctcgcggaagaagaagtagacatggtctccatgctccaaggcctggacaaagtgtggctctcggagccacttggagtcatacttggcggagcggagtgggggctggggcccaaggcttctgtaaaccctcgtgccgaattcgccacccaggcccgctcctagnnagtaagggccttgacaaagggggataaagag

SEQ ID NO: 454178 - DNA, 464 bp, Homo Sapiens
gttcttgttgcctgggactcccagacgctccttgcctgtggaacgaactcattcagccctgtgtgccgcagctatgggataacttcgctgcagcaggagggtgaggaactgagtgggcaggctcgatgcccctttgatgccacccagtccaacgtggccatctttgcagagggcagcctgtactcagccacagctgcggatttccaggccagtgattctgtagtttacagaagccttgggccccagcccccactccgctccgccaagtatgactccaagtggctccgagagccacactttgtccaggccttggagcatggagaccatgtctacttcttcttccgcgaggtctctgtggaggatgctcggctgggggagggtgcagttctcccgcgtagttctgagtatgtatacgtgacatggcgctcgcctcgggccttggccgcactgtaacggcgggggat

SEQ ID NO: 454179 - DNA, 957 bp, Homo Sapiens
cccccgggtccaggagaggagggaaaggcttagggccgttataaaaacctgtgtccaatgggggtcacagctgctcgatgtcctcttataaaggtcactgctgccagtcagggagtcacggcgggagccactgccagtgtttgagtttgcaactgctgttccaaaccctcccaagggcggatccccagggtggcgccgagagacctgctacttccgaattcccaaggatgtgttggcaggctgggcagagccctgggagaagagggagctgctctgtgaattgctgttcagagagttgttgccgtagaaagaactggatgccaggttgttattgggctgctgctggggctggggctgaggctgctgtgttcctaaagggcgaaatggtccatttgttgttccagcaagaccaccagctgctccatttgctgaagctgcggctgctgcaacagctgcttgtgcagctgaggaactaatgatgactggggcaggagctacaagtcgaacaggagctccaagaccatttctcgcgcctgcattcactacaagggcaccagtttggtcatagtaagcagcaggagccaacaccggataacctggcatgcctgctgccagaccttgtccaaatgcaagggcagaattcactgctgcagctgccacaaggggatccgtttgctgtccctgctggttctggtttggggtcaaaggacgttggctggctcctccacggagaacctgctgctgtccttgctgagcctgtggggtggtctgttgattagctgaattagttgctgcagcggcagcggcagcttgctgctggaaaagactggcagggtagactccccagggagtaactccataatactggtgagggaccacagctgggcctagtgtcgctgctgcagccaatccagctggtaggggtccgtccctgcctcgtgccgaattcgccaccca

SEQ ID NO: 454180 - DNA, 965 bp, Homo Sapiens
  misc_feature (138)..(138): n is a, c, g, or t
  misc_feature (172)..(172): n is a, c, g, or t
atttttcagggtcaagggggttttgcaggaaaggccaaccaggcccgtgcccataccttcctgcccttcatagggtccagctcccccgggtttcagtgaggaagattttaccaatcaagttgccagtcacaaaagcanaagtcagtttgactccgatgaacagaaccaaganccggttatgatcctagactgttcatgctgggcacatatcttcttcatcaaattgacactctccattgtctggaatttctcagtattgataaagaacacaggtcctcgggccttggggtaaaagtcacgttccagaggaaacatccaagcatccagagccaccgcacaccgaaattgggtctccttggccaaagccagaatagctgtggcccctccaaatgaatgtcccatcacagccacacggctcatgtcaatgttgcccttcaaagtcatcagatccaagccaccaggcaagatgttgaagacagtctgcccagcagtgacctcttgcaggatcttcaacacccgtaaacactcgcttacccgctgatgcacctggggattccgaacatgaaattccttctccccttcctcaactcgacggaaagggatccattcctcctgcagcgattcattggtgggctggttctcttctggggcctgcttgcagaaataggtggttgccgctgaccggtccctgtgctctggcacagcaaccacaaagccacgtgaggccagctccatgcagaaggctgaatacaaagtcctggagattctgaccctccatcacatccccacagcctacgaggtggggtcctgtgacaggtggaaagcccacagactggttgacccccatttcatcaccgggtgaatcaaatgacttgccggagctgaacttgctggccagccaagctgattcctcagaagcagccccagacgtttaaccctcgtgccgaattcgccacccaggcctc

SEQ ID NO: 454181 - DNA, 849 bp, Homo Sapiens
  misc_feature (119)..(236): n is a, c, g, or t
  misc_feature (414)..(414): n is a, c, g, or t
  misc_feature (416)..(416): n is a, c, g, or t
  misc_feature (702)..(702): n is a, c, g, or t
  misc_feature (734)..(734): n is a, c, g, or t
tgagccaccgcatccggcctgagttttatgctttcaatgtatttcttacatttcagttcaagtgattttcatgtctcagcctcctgagtagctggaactacaggtgcgtgccaccatgnnnnnnnnnnnnnnnnnnnnnnnnnnnnnnnnnnnnnnnnnnnnnnnnnnnnnnnnnnnnnnnnnnnnnnnnnnnnnnnnnnnnnnnnnnnnnnnnnnnnnnnnnnnnnnnnnnnnnngtgtgagccaccgtgcccagccaactatgccattatttaaccatgtccacacattctggttattttcaatattttgcagaagataattcttgatcggtgtgtcttatgccacaaggattaaaatatgtattcattgctacaaaacaatatctcgaaatttagcagtttaaaacaacananatattatctccagtttctgagcctcagaaatctgagagtggtttagctgggtgatagtctcgtggttttggtcaagctaccaaccagggctacaatctttcgaaggtgtcattggggctagaagatctgcttcccgcaagactcacagctgttggcaggagacctcagtttgttgccacatgttccccctcagagggcctctcacaacatggcagttatttgtccccagagcaagcaacaccgggagggcaagggaagaagccatgatgtttttttgtaaccctancctctgaaagtgtcataccaatttctgtattnttgttgggtcacacagaaccaagtcaactacaaccgtgggaagactcctacccaaggcatggatttctaggaagtggggccatttttaaagtgtcatcctggaaagaggcttgta

SEQ ID NO: 454182 - DNA, 971 bp, Homo Sapiens
  misc_feature (816)..(831): n is a, c, g, or t
gcgcgaggcctgggtggcgaattcggcacgaggcaataaaggaaaaatgcaggtgcattaaccagcacccaggaccccttgtgggagtgggtttgctccccaagactaagcctctgcatgctttctccagctgaggccttggttttacctctggactgctatgaacagcagctttatcagtacttaagtccaacagaagcatgttaaaaacctagagtgacattccaggcaccaagtaaagtgagttccctttccctgtgcacaataaagtcagtgttcagtaaccaaccatccacaaacccatccaacagccagaagagagaagataccttaagagacagtacattgagccaagtctggaaggttctttaaaatgatgggtgggggagaggcaagtaaaggcacacacaagatgccccactgcagccctgtccctaagcatgtggcatctgttctgccaggattaggcatggctttggcgctggagtggctgggctcatggggctcacatgagcctcccgccttcagggtggtattcaggggttgcactctaagatggcggagcgggcctagctaggaccctgcttagatctcaggtgtcctggactggccataagctggtgggcccaggtcagggacctgctgcaccctgacctacccagggtcatcaggggagaggctcgggctcagccccctcacgggggtgctggggtagctcctgagcccctgcccagccgattgtggctggggtggattatggggagacagcaaaaaagacaagagctctgggtggagtaagacagcagcttgggaaannnnnnnnnnnnnnnnaccaggctgaagaacctggttgacccacaatgggcagaccggggcccatgcagggaaaataaaacttgaccaaccttctatggaagggtggccggggccagagcctccaagctccaacccccaggggggaggggtttggg

SEQ ID NO: 454183 - DNA, 998 bp, Homo Sapiens
  misc_feature (237)..(383): n is a, c, g, or t
ccacctgataaatgtggagggggtaagtcggcggccgacacctggaacgccgcgtccccctcggaccggcccaccggcggcgcgatgtgctcgggcgtacccgtgcgctccgaggtgggggcgcgtagctacccctgagggagagcggggaaggggctcgtgctccatgtgttaattagtcagtagcctgcggcgcgggttaaggatgggtccgaccgcccgttttgtggctggacnnnnnnnnnnnnnnnnnnnnnnnnnnnnnnnnnnnnnnnnnnnnnnnnnnnnnnnnnnnnnnnnnnnnnnnnnnnnnnnnnnnnnnnnnnnnnnnnnnnnnnnnnnnnnnnnnnnnnnnnnnnnnnnnnnnnnnnnnnnnnnnnnnngttctcctctttgtgagggcgtaggcgggatgtgcgcgcgccccacgggggagcagacgcgaggggtgtcggaggcccccccggctaggaagcgggggagttgcggtccctggttgtcccacaggagaagggggagggaacggggcaggcggggaggatgagcccttccgcgtgcagcgggggctggagtgggtccgtccgagctggatgtggtctgccgaggggcgcgcggatgctcggagggggcggatcccttagggcctgggggccaggacgatcccacccggagaagcctcgcgggcgagaagagggttccttcctgcgggggcagatggaggcgcgggagccttccccgggaggtgaccgaggccagtcagcggccccggggacccaaggccggggactctcggcggccaggtggacgggcagggccggcccgcctgggcaggcggcggggtgaaggtgtccagggcctgaggcggcaaagtgccgcacgccgtcagccccgactgccacccaccaggcacccggcccatccccggctcccatctagggatccacacccgggcgccgcggcgccgcggtttaaagcctgtgagatcccgcaacaacccc

SEQ ID NO: 454184 - DNA, 995 bp, Homo Sapiens
cacggcacggtgggagtgtctccggctggcttgcagggagaacaccgactgagacctcaaaccctggctccagtgtcatggaatccgtcacctttgaggatgtggccgtggagttcatccaggagtgggcattgctggacagcgcacggaggagcctgtgcaaatacaggatgcttgaccagtgcaggaccctggcctccaggggaactccaccatgcaaacccagttgtgtctcccagctggggcaaagagcagagccaaaggcaacagaacgagggattctccgtgccacaggtgttgcctgggaatctcaacttaaacccgaagagttgccttctatgcaggatcttttggaagaatcatcctccagggacatgcaaatggggccggggctgttcctgaggatgcagctggtgccctccatagaagagagggagacaccattgactcgagaggaccggccagctctccaggagccgccttggtctctgggatgcacgggactgaaggccgctatgcagattcagagggtggtgataccagtgcctacactgggccaccgcaacccatgggtggccagggattctgctgtgcctgcacgtgaccctgcctggcttcaggaggacaaagtggaggaagaagctatggctcctgggctgccaaccgcctgttcacaggaaccagtcacctttgcagatgtggctgtggtgttcaccccagaagaatgggtgtttctggactctactcagaggagcctgtatagagatgtgatgctggagaactacaggaacctggcctctgtggctgatcaactgtgcaaacccaatgcgttgtcttatttggaagaaagaggagagcagtggaccactgacaggggcgtcctctcagacacctgtgcaggtgagcccaggcagatcaggtgagcatcagctctggtcagtagggagagtgtccagtttggaaactgtcttatcagggcaacctattcatacctt

SEQ ID NO: 454185 - DNA, 962 bp, Homo Sapiens
  misc_feature (888)..(888): n is a, c, g, or t
atcttgagatccttgagtttcctgagttgaagggaattattttcatgcagacagcttgtcaagctgtgcagcatcaaagaggcaggagacagtataacaaactgcgaaacctgctgaaggatgcgcgtcatgattgcattctctttgctaatgaattccagcaatgctgctatctgccacgggaaagaggagagtccatggagaagtggcagaccaggagcatatacaacgcagctgtttggtactatcatcactgccaggacaggatgccaattgttatggtgacagaagatgaagaggcaattcagcagtatggaagtgaaacagaaggagtattcgtgattactttcaagaattacctggacaatttctggcctgatttaaaagctgcccacgagctttgtgattctatccttcagtctcgacgggagagagagaatgagagtcaggagagccatgggaaggagtacccagaacatcttcccctggaagtgttagaagctgggattaaatctggacgctatatccagggaattctgaatgtcaacaaacacagagcccaaatagaagcttttgttcgacttcaaggagccagcagtaaagattcagatttagtcagtgacatcctaatccacgggatgacggctcgaacaccgctcaattcatggagatgtggtagttgtggagctgcttcctacaaatgactggaaaggaagaaccgtagccctgctgtgagaatgactgtgacgacaaggcttcgggcgagtccccaagtgagcccatgcctacaggtcgcgtggtgggcatacttcagaagaactggcgggattatgtggtgacatttccgtccaaagaagaggtccaatctcagggcaaaaatgctcaganaatcctggttacaccttgggattacagaattcccaaaattcgaattagcactcagcaagcagaaaccctcccag

SEQ ID NO: 454186 - DNA, 769 bp, Homo Sapiens
cggacctacttttcacagggacaccttctggtccccagactgcttgaggtgatcttgatctcaggtggacatatatagttctccaaattctttggaggtttcttagcccgctttgtggtctgaatctttagcttcagacttccctctgtgaagtttgcctccttgatagaaaattcctgctcttccaaaccatctcctgccacccatttctcactgtccgcgttggagttggaatccacatcccgccctgagcctagttcatcctcctcctctggctccatgcgctctccgcccaccgggatccccttcccaggtcctggagtggagagcaaaggttctcctgcacagccaggagcagctgggggcttggctgaggagaccggcaggaagtctgactcgccccctctttgccgggagctgcttaaggtttccctggactccatgacaatctctacagtcttccggagttctcaggagggggaaggggaaaagggaaaagggaaaggtgagaaaagaggacacccaaaattccaagaacaaagtggtccagttgctagggtcagattcccagggatggagacacgatgaggtgttcagaagagatcagatctgcaaccatgtcccggcagctccggctccgctggccccggcgctcgctcagatcccggctcccgtcgctcgcccgagcccccaaaggtgctgctgcggcaactccatggcgatgagcatctgtcaaacggcgagccgcgagctggccgccctagctcgg

SEQ ID NO: 454187 - DNA, 944 bp, Homo Sapiens
  misc_feature (119)..(119): n is a, c, g, or t
ggtccagggaagggcggcctcacctggataagaaaactccagacctttggggaaaaggctgagctcgcatgggccgctctggggtgccacagtcggaccactgtttcggggaggcctcncgcctttttccgcgcggatgaagaggctgcagacgccgaagaagagctcgagtgcgtggggcactgatggggatcggggtgggcacacagcagacggcctgggtacgcttctttcctgacatggtctccaaggttagcaaagcttccaaacgtttccaggcctccagcctggaatgcctctccccccgctccccgacctcttccaggaacaccccagctcagggctccccactccccttcctgcgaattgaagctctgtgggctttgcggtccgggcgggcgagtacctggcggccggggctgttctccaggagtttctgcgcgaaaagtttcctaggagtgacgggatggcgtgggctcaggggagagtagaaacgctcccgggggctttgcagggaccgagcagctgcgggagctggggagcagtctgactgggactccctggaaggccctgccattggggctgggcggcagctcggcgtcgaaaaagccgggtctgaagattaatgtgccgaggccggagaccctgaggaccaagtcacgggacttgcccttggtgactcacgccttgaggccgagcagcgcggaaggcgctcaggccggatctggggtggggcccagccgagccttggtcttgtctgtcagcagcggcagctgcactgcgtctcccaaggtggctgaagctggccagctgcgggctccgcgccgctcgtcccgggtctatgggtccattccccacgcccacccggaccccggggtcactcgggtctccgtctgtgccagggagggagaatcacgccctcgtgccgaattcgccactcaggc

SEQ ID NO: 454188 - DNA, 940 bp, Homo Sapiens
  misc_feature (915)..(915): n is a, c, g, or t
cctgggtggcgaattcggcacgaggctctgttatgccttcgttaattcataatacacttatccctcacatataggtggacagaggctggatggtacataccatccccaagatctggttcagggagatggtctctggaagcccacatccaggcccacccttgagattgtatcttctcggaggatgtttccccgttagtcctcactgtatgttgttcctcacctggaagatggggtggagttgctgagctgctgtccacagggctagtcccatctctgacccactcagctcttgtccacctgctatgactcacaatgcctccaggccaggccaccccaggacaagaaggggtgctgaccgctgagctgtcagatagactctgggctctccccatgcatgcattcagtgcatcattgagcacctactgtgttctaggaacagttctagggaagtgaagaacatattccctcactgagctgtcattcttggcaggggaatgaagggagtgatcataagcagagtcccaagacaggaatttgttcctaggggaactaacaagatagtctctcaggaagctaacagagcgtgtcatgggtcaggttccctagaagcagagcctaagctgagcattcttgttcaagtgaattattggggaaatgctctcaggagaagggggtgagggaagcaagacagggcgagaaaaaggctaaggctgagccagagtgtggtctcacgtggagacctacttccgcttgctctcatggggaactctgagcacaaatggcaccacagttaggcctccttaaagcaagggagcccgtcttttgtaccctccttctacatgtcagttattggccagggcagctgagagttaccaaacagcttctacagcaactatgggatgggtgcacaccagnggatagggatctcagtagggcgcca

SEQ ID NO: 454189 - DNA, 1412 bp, Homo Sapiens
tgtgagcccttggccctttcttcccaaaccaggctgggctggggggttcttgcccactgctgcccactagaaccctcctcctggttccactcctccctctactggccaccacctggatgccaccagtgcctgtcaccagcacctcgtgggttgggggcccaccagcagactcagggccagggtctgtaggggccacccccactgtcccggatgtagcagggctccccctcggcctgggccagcagcctcaggtggcacacgggcacacgctctgtgccgaagcggggtgccagccgctcgagtgtggctaggtatttgaccatgaccatctgctgggagagtcggcccggctggaagtcccgcaggaacctgcggaagacgttccgaaggcgcagccgggtcagggcgctgtgctgccggatatgccggcggaaggagcgcgggatgcagtccttgaagctggtcttcttggccacctcctccagggggatgccatggcggagagcgaggtgacagaggtgcagaaaggccatgcccaggctctcattcttaaagtggtggatctcctcctcggtcgacagctcccacagtgatgccacgtcattcacaaactcatgcttgccctgctcaaagaggtactcaaatgaggctgggtccaggagttgcatcccctgtgctgtctgatctgaggatgcctcggttcctgggggcccacaacggtacacagccggttcccgaggattcatgccatgccagttccggaaataaaaccttatgcggaaatatagcatcaggcttgcatctctggggatctctaggatgtggtttgggggcaaccagacttggacctgagcatcgaagagggcaaagagattgaagcaaggaggagtgataccaactttatgtgcaatgtggatgcagacttcctcagctgtcagcgatgactcactgaaagtgacccagggctccccgccgcctggaccagcccagtgcagaagcaccttcaggcctcccatggcagccatgggctgggctccatccccaacgggcttactgcccctggccatcccccagtggcgcagaggcatgctcccggcaggtggctcagctgagggtgagtcctggagctccctgtgtcaactcaagcaagccacttagcaattctgggcctcagtttccccatctggaaaagggaggtcctcagggtgttgccatcaaaagatggttgtaatgtttcaatatagttccgcatattacacattcagcacagacccgggcatcggagcagtcccgaggcaccaggtgctcccatccaagtgcagcctgtcaagcgcagccagtccccgcggcttcttcctgaggacctccggccgcgctccttccgcgcccgcgtccagactcacccttccgct

SEQ ID NO: 454190 - DNA, 390 bp, Homo Sapiens
tgtttatcgatgccacggttcctgggggcccacaacggtacacagccggttcccgaggattcatgccatgccagttccggaaataaaaccttatgcggaaatatagcatcaggcttgcatctctggggatctctaggatgtggtttgggggcaaccagacttgggcctgcagcttcagtctcacgttgcccctgggcagaggacagtgcgtatgttgcccatgctgtggcctcacaggaggactacatttcccagcctcccttgcagctaggatggagccaattgcactgctggtttctggcccaagggctgggtacatttccaagcctggaaataaattctcttgccaccttcaccacccgaggtatgatgaaggtgcatcgataaaca

SEQ ID NO: 454191 - DNA, 1090 bp, Homo Sapiens
  misc_feature (1009)..(1045): n is a, c, g, or t
catactcattttttccggagttgtttctaaagaacggactatacgtttcttctaagctgttaagcacttctgttgcacacaaaacgtcctgtttcatatacccaactactctgcatatcaagctgcttggcagcatgaatactattctgctgctgttgaaattgcaacctgtttaaatgaacaccactatctgcatttctacttgcaggtggtcgataaatttcaatagaagggcgagaagaaccatatgtaagtgtcactgtaggttttttctgagataagggattctcctgcacaaagttgaggtcttcgtcaatgagatcatctggttctggcttaatatcaatcacatcttcagagggtgctggctccctcaaaggtttcactgttgacattagtcgggttgcagctccatcatcgtaagtctgtctgacatttgtggtttttgactcctgcgaacttgtagaaactctggaatctcttttttcaggtctcgcgctaggaatggcaagtggtggcactgcagcttcatgcctcctctcatctccccgactgaaattgctcttgtttgaaggcacgttactatcaaagatgttggtatcagaagacttcagactagagggttcagttgtaacagagcgaagtttatctaatacaccatgaagccatacggtgaatcgaattgtgttgttccctagaaacagggacagatcctctgtcatttggtcctgacttttcttgttggccaccatcaccataatgtaatcaggaagttcttcatcaacataagctcctaattcttgtaatttccccttaatggcactccggatcttgcggctgatctcggtgccgatctccatggctctgcggcgtgcgggaactcagcactgcgcggcgcttggcttacccggaggctgccgcggactcctaccccgcagccgggacaccaccgcctcctcctcccgtccccgctctcgacgaattcgagctcggccgatttggcctgatnnnnnnnnnnnnnnnnnnnnnnnnnnnnnnnnnnnnncggccgccaccgcggtgaactccaggtcgcccatagacgaggtct

SEQ ID NO: 454192 - DNA, 926 bp, Homo Sapiens
ggctataatacccagttatcctccatcagggtacaggtgttccatgaccagaatttgaaaatgctggctggccctaaatcccaaaaagccagcttcgcatggtagccaccagcatgtgtttggggtcggcacgttcctccacgccctcagctatgtgttctcagactagtgtctcagattctcaaagattccctgcttcatctgcagaaaggagataaacctcctcagactattaagaagagagaggcgttcgggagagtggggtgctggctagaaagcagggtcattttccttgtagtcattggccccccaggctctggatgtgggccttactgagctttacccttcaagtctctgagtctctgccacaagacggctaacatcacgatacagtcaacttgccacaccatgtcctctggcattttaaactgagtggaccctgccgagtcacgaaaacccaggccaactttctttatgctgctgatgaacgggaaggagaatgggagaggcagcctggggcttacatgcttcaggtgtactggtcttcaatttccctgggagacttggccagcccgactggagggagatggtgacgtttgctcccaggaccagcactgccccagcagctggctgttagaaaagggcaaaagagagcaaggaaaatgacaactatttcctctggcttgggtttagaactaaaatctccctgctgcccgcacctcttctcaacggagaggacattctacttggggcagaaggaaacagaatcctgttcagtaatcctctcaaaaatctgctctatatcccatcaattgatttttaatcactctatttttcattcctacagcttttgtctcaaattcaccaggtatttgatggggtcttattcttttcttccctcgtgccgaattcgccccacccaaggc

SEQ ID NO: 454193 - DNA, 1258 bp, Homo Sapiens
  misc_feature (359)..(376): n is a, c, g, or t
  misc_feature (1047)..(1047): n is a, c, g, or t
agtgagtaatcctggccgatgagctaaatctggcaaacaacgctgttggcagattttcagctgtctggagttgggagatacacgcatatctgtacatgcatacatatatatgtatttttgaaaaactgctagtcacggccgagtcattttgggttccaccccttcctgcaatcaaagccttccacacgctacaaaggatttcccttataaggtaaaagaggcttgctagatacatgtggcaaaggaacaggaagatgtcagttaatcacacaaaaatctaaacgaaaccagctgtcgggaaacaggcccagaagtctaccacacgccggctcctggcttattctacaagagtgaaaggnnnnnnnnnnnnnnnnnnaaacccacccctggtcttagttccttttgccctgggagaggttttccctctcccagacggaaagaagcatcctttgctttttcaagaacttttcgaactttttcaagaagtcttcaactctccaaaaacatcttctctcccaactagacggtcttgctcctaaatcttggctccaggctgagggccattttgaagccgagttaattgtcctccagcgagatgacttgggatgagatcagagcaagagctgtgtcggttaagtgtgagaaagaggccagaccggctaccgattgaggcttacaccgggtttctaaggcctcttgggccaaagcagcccttacaggattagaggcttcaaccaaggcccatgctgcagcccccatctgggctctttccagtcctggcaattcacaccaccaattccatctggctgggcatcttttgcctctctagggtccccaccctgagcctcaacactgaactttcagggcttttgggcttcaacctctatccgcacacccccccaccctcatcatacaactttcttgcctctgagtctgtgcacacccatgtctctggtcccagcaaacttatttattctataagacccagctcaacctccattttggagcctcccctgtcatgctcccataactgcacagaaaacccgntggaatgcagacctcgctccatcagtgagtcagctcccctggctccatttggctatgagctcttccccagggcagagaaaacacaattgagggctgggcgccctgggctcccgcttgtaaatcccaaactttggggaggccaagggggggcaaatcaccaagggcagggagttcaagacccaccctgggccagcatgggggagaccctggt

SEQ ID NO: 454194 - DNA, 962 bp, Homo Sapiens
  misc_feature (261)..(261): n is a, c, g, or t
  misc_feature (263)..(263): n is a, c, g, or t
acgccttttcttattagagggcgcccccagggccatttataatacccaattagggggatttttgccaaggggccaccgttcaaggacaccaaaattggtctttcaaaaaccggaaaaggtaaaaaccaggttccagggtatgtaaaggaaaattcggaccattttctttaaggaggagcggccccaacggctcaggaagatgacttgcctctgcttctgaggggccacgctggaaggagagccattgcccggaattccctncntcttcttcctccgagtctctccttcccaggaccctcccatgtgggcttgggccagagcggcagatgcagtgataacggcggcgcaagaaggctggctggccccgcctgggtccaaccatccagattgtgatcaagcggcattggtccggcttcagctgcatgaattgcccagcctgtccttgcctgcctctgttcgcccaggcagacttgcacatgcctgacagctgccactcacagccaagctgctacctgcctccagacggcatccttggccagatttcaccatcactaccagaaacagccttccgtcagcagccctcctgccaccagcctcaagaaggaaagcagcctgggatcctctgggccagtcgactgccaggcttcctaccacaatggcccacacaggccccatgccagctcctgccctggccttggcacccatgctgctcacaatctgggcccatcccaagcctcacgacgatcgatagagggcaccaaacagagaaacagagccagacctgcactgccatcctgtggcagcatgtggcagtgtgcaaagaggtgaaagggccacgctgcaatcgcccgcacagtcaaccctcaacctgtagccactcaaagaagtcacagaaagcgctgggcagagaagacacctggcctctccactgctcctcaggggcctcaaggccggcaggaggg

SEQ ID NO: 454195 - DNA, 1488 bp, Homo Sapiens
  misc_feature (419)..(427): n is a, c, g, or t
  misc_feature (621)..(621): n is a, c, g, or t
tgctataactgttatatttgcgcaactgggggagcgggtttggcaggactacgcgaagcggggggaggtggtatagggtgatgcttggtggtggtgtgaacggcgggtgccgcagaaaggcggggatatgcagtcacgaccctagcggggaacgtgggaagacgatggaatggttgtccgggcagaaccggtgaaggggtagggggtaagccgaatgcttgctagctcaggagagcaagtggtccgggtaaaggccccctggggcggccagttgtccagggaagttcgacagccttggacaggattccgggggggaagccatgtgggccaggggcatcactgaggagtcatcgaggtttgatgggtctatcaaatggttcctcagggcgatcttttgaggtcttcaggaaaggactatnnnnnnnnntgatgtgtggaagttttttcctttcctgggctgtaaccccctggttcggagatggttgatatcaagtaggtctggcatatcaatagaaacatcaaattttttgggaacccagtcaagaccaaaagtgaacttctttatctgcactaccaagtattcagggaatgaagcaaagcgagatgttttcacacccgcangactttgcttgtagggcactgctccagaaatcatcaacattttctggttcagagaaggcctgaaggcaggcactaaatggtatcttggcacgtaccaactcaggaaggggtcttctgtttgcttctgcttcccttctcgttagttcaataagcgatcagttcatcccttgttggttgccgcctccatggcccacaggtaactgcatcaggtaatccacccttctccgtgtagcggactttccgggtctgacagcactgaatgcgttcttccaccaaaaaacgaaaaacatcgcttgggttttctgagccgatgcggttcctctctactagattcaccaggtgcaagaagaattcctgggcatcttgctgcctgttagaggagaattccgggtggctcttgcttacaaaggccttaaacatgcgcggagagatcccgttctgctgtggcttgtgctcctccttcatcacctgttcaatgagttcagatttcaccggaggctttgaatactggcctgagagaaggccatgtcctaacttagtcatctgtgtgttgaaatcttgtgttggatctaaaggcgagtagtcaaatattctgggaaggtttcctacatacgctctctggaattctgggatgctgaagatggcctgcatgacagagctgagatagcagctgttgcccaggttcttcagacccgtgtagccaggaccatacattggcttcagtttcgtgcccgactcctggatcacttcccactcactgaccctcagcttgatgtcattgtcctggagcccattctctgtcccatgcatatgaagcatatcaattccaaaatgcgctaagtgcttggccaaatgaggatccaaaac

SEQ ID NO: 454196 - DNA, 818 bp, Homo Sapiens
cacgagactctggatgcagacaaattccgggatttctttaatcaaaatgaaaccagtgatccagcaagggatacatgtgtgatccttacagtggaagggagaacatttccggtggatatcttttatctacaaagtcctgttccagattatatcaaatcaactgtcgaaactgtggtgaaaattcaccagacagagggagacggagacgttttagcatttcttactggccaggaagaggtagaaactgttgtgtcgatgctcatcgagcaggctcgagcactagctcgcactgggatgaagagacacctccgagttctccccatgtatgcaggactgccttcctttgagcaaatgaaagtgtttgaaagggtgtcacgcagtgtcagaaaggtgatagtggccaccaatgtggcagaaacctctatcacaatcagcggcattgtgtatgtgatcgactgtggctttgtgaaactccgagcctacaatcccaggacagctattgaatgcttggtggtggtgccagtctcccaggcatcagctaatcagcgagcaggacgtggtggtcgtagtcgctcgggaaaatgttatcgcctttatacagaggaagcctttgacaagttgcctcagtctacggttcctgagatgcagcgtagtaattttggcaccctgtcatccctgcagctggaaagcacctagggaattgacaatgtccctcagggttcccacttcatggtcgccccccctccagcaacaggtcggatgggttccaagccctttgggaggttaactgtaatgcctcctggggagggtcctggaac

SEQ ID NO: 454197 - DNA, 922 bp, Homo Sapiens
ccagcccttagggtgcctttaaggtctggcaaaagattttctttccttgacttctcccggtagtaaacgtgcaaaaatgagggtgacagcccaaaggccccccagaccagatcttctttcagcaggtcctcccataggcaatctgtcagggtgcggggatcacagcagtcagagatgcagcccttgagattcctttagggaaggaggtgcgtgtaaatttttctgaactttgtaaatggtcccttgagaaagatatgcttggaatagagcatgtccaggtgacaatgagtgtcaatagaagccctcctctaggcttggctccaggtggctctttggcagggagctggatgcgtgtcctccacaaggaggcggaggcatctcctcttggcatgttcttttctccttcgacctctctttcttctgagcttctggagaagcgaaatgaacgagaattctgggaccagccttcctctgaggcctccatgtctctggaggtgttttggacactccctgtagagttgggggaataatcactcatgcggctccggctgctcttcccaacctgggctgcatcgttgctgctgctgcctgtggaggggtagctagaaggcttggggctgctggtccaatagctggcgtagtcacaccaaggactactgtacaaatgaggagggtacatgacatagtcggtggtgaaggaagaaggctccggaacggctgaaggtttcagggagacaggttcctcctgagagaatctgactgtggagatctcctcaacatcagaccagtcacttccagaagaggggtgctccatcaccacctccctatctttatgcttttggatttctaaatgagagtcagagtcatccaagaactctaggggtggagagcatttgtcaatgacagtccttcggtccccaag

SEQ ID NO: 454198 - DNA, 970 bp, Homo Sapiens
  misc_feature (362)..(372): n is a, c, g, or t
  misc_feature (470)..(518): n is a, c, g, or t
  misc_feature (569)..(649): n is a, c, g, or t
  misc_feature (683)..(683): n is a, c, g, or t
  misc_feature (716)..(726): n is a, c, g, or t
  misc_feature (856)..(899): n is a, c, g, or t
gaaaaagtgccccttaagggttgaaggcagtctgaacccttgtgcttggtggggctcgtggccttccccttttgcctggctgtggaggcctgatgctgccccgttccctgtcagaggctaagatgagatttgccagcacaggggccccagatctgcctgggcctgtgcagcaggccagcttcctggtgtatttttcaggtaggcccttgtcctgccaggtgccttcctcatcccctcgtcctgtgccagaggttatctgcctgggctggctccccacgagtcacctgcaagccccaggggctgggggcagtgactggcaggtggagatgggctgtttgcggcgagggaacagcagcctgatnnnnnnnnnnntgcacccaattggggcatggcctcttgggtgggttcctgggctcacgggctgggaacacagcggcaggcagcaacaagacaccacacaacggaacacnnnnnnnnnnnnnnnnnnnnnnnnnnnnnnnnnnnnnnnnnnnnnnnnngggagggggtggatcgctcccctgaatgtccagaaccatcgggaggcaacnnnnnnnnnnnnnnnnnnnnnnnnnnnnnnnnnnnnnnnnnnnnnnnnnnnnnnnnnnnnnnnnnnnnnnnnnnnnnnnnngccggatgaagggtaggcccaaaaacccacaaancaccaaggggacctaccgcggcgaccaccccannnnnnnnnnnaacaacaaaacaaatagggaggaaaaagggttggtcccaacgaacgatggggcaaactagcccaccctcgggggagaacagggagccaacaagtgggaaaagggggggagggaaacaggaggacaacccnnnnnnnnnnnnnnnnnnnnnnnnnnnnnnnnnnnnnnnnnnnnccctttcccggcgggaactggtggtggtgcctggggaggaacaaaccggcgggagcgggggagccaggata

SEQ ID NO: 454199 - DNA, 541 bp, Homo Sapiens
ggtcccctctctccacactggtacatttgaagggtttttctccagtgtgcgttcttttatgtgtaactaactcatagctttggctgaaggactttccacagtgagtgcactcatacggtttctctccagtatgaattctctgatgtacaatgaggttagagttccacctgaaggattttctgcattcaatacactgatacggtttttctccagtgtgaattcgctgatgtgtaataagtttggatctctgggtgaaggatttcccacacaggtcacactcatagggcttctctccagtgtgtgtcctctgatgtatgacaaggtcatagctctggctagaagatttcccacactgagtacattcgaagggcttttctccagtgtgtgttctctggtgtatgagcttacaacagctgaaagattttccacactgattacacacagatggcttctctgtagtctgaatgatgttacagtcagaaaaagatgaggccatggggaaggcagcacagcgttcctcacatctgaagggggtctctcc

SEQ ID NO: 454200 - DNA, 850 bp, Homo Sapiens
  misc_feature (158)..(200): n is a, c, g, or t
  misc_feature (816)..(816): n is a, c, g, or t
cacttggatcaaatagttttgatagacagaaaaagatctgtaccattatttcctttccttaacagctattgtaatttcctggacttggttgcttttcacttgggcagttaagaagacacagcttgttttccccatcagttttctctctctctccttcnnnnnnnnnnnnnnnnnnnnnnnnnnnnnnnnnnnnnnnnnnncgtgcgtgcacagggccaatcttcaggcttatggcttttggaacattttcttaatttaatagagaacagaattcaatgattagcaacatcactaaaaatttaccccatttcttctccatgagtcactgacacccgatgcgcatgaacagtccaacgtccacctcgtaagatgtcatcgggcttcagggttcagaagcatcgaggactggtggccggccctctgtgctcgccgtgtgacaattccagtggctttcctggcaccatcagatgcctggtgccacaagcttgggtctgctcctagggggacgaggggttcctcctcctcctcaattgctttatgtgccttcactcagtgaacccaatgggatggacaacctgactttttaaacctaagggttgggcctgaacgatgattactttgcccacgtgccttctaggtgccgaatgtgtgttcctgtgatattgacgttgacatccctgcggattcagccacaggtttctgacaagctggaggaagcaatggtaattttggctttttcggttttgtcttcagataatgaaaagcttttgtaaaacagctgagtgtcaatatgagttctatggcttcaatctcctntaaaaataaaatcttcctcgtccgaattgccacg

SEQ ID NO: 454201 - DNA, 1049 bp, Homo Sapiens
ggtactacggaggcgccccaagggttttctcgggggagctccctgggaagtgcttctccgcgagtgaccggcgccgcgttacacccttatttccgccgtctggatgggcctcaaaccggatatcccggcgggagatttctccccgggttggggcctacaagattccaggcttgcggggagagaaggggacaaccccagtgaaccggtgccccccgtccttcggcggtgaacttcgcctattaacagggccagccttttcccacaaggggtgttccggggtgattcctctctggccaggccttttgtcccggggaagggggcttccaaattttccttcgccgggtgttgcagcccttttggagacaaggccccgttcgctcactggctgagtccagccgtcgctttccaggggagccctgccgccggccgggtggactcggggggtccgcagctcaaaggttttcctgttccttcgtgcctcgtccccgtgccccggctaagttccgccgtgcccgtagtcccggtgcagaagagtgaagcctcgacggcagcagagaagccaccatagtcccccggggagaggcatccgggcgaggagctgcggatgggggcgcgggcagccgcggccgagcagtagggggtcggaggaactggcggggctccgacccgagcaggggaaagatgaggtgggaggagcagaagggagaagaggacagggaggaggcagtgtcctgggctggggtgcaaggggacgctagccagacgctgaggggggctcagtgtctgggcccccggaggggggagggggaaaagcgtccagggccccgggagaggagggagcaatgtccggagctgggaagtagtgtccgttggagtgtccagccctgtggggggcagtgtccggtgcagcgtccgaggtgggcagttgtccaagctccagggagggtcgtgtccggtagggcgtccggtggccggggcccgggccgcgcgcgctgcgctccctgcagccccgggactggcgcgctgggggcgcgagcacagagctggga

SEQ ID NO: 454202 - DNA, 629 bp, Homo Sapiens
  misc_feature (482)..(482): n is a, c, g, or t
tgagcaagctttcctggccaaacacatgaatttaatgacacagtgaaaatgtttggaaactgtaaaatactgtacagttgtaccagctgactatgaacaggaaacagacacaaagctggactagaaagtgtatgttcattccttcactcagtaacgtttattgatgcttactatttgccaaacattgttttagaatctggacataagtggatgagaaagacatgggctttgtcttgtaaggaacttaagcgtgtacaacattaatttcagtgtgtgtgagagtagcttgagtatttaccaagtgtacagaaggtctgaggtcggagtgatcactgaggagtgaggaaaggctccgttgaggagttaaatgtggtagctcttcaagggtgagtagaggtaggaaagaaggtatttcacgccaaaggaacagcatattcccaatgtgggggagtgggataccatggggtgtgtgagaggactgnaggctgctcagtacttctggagcatggagcatggggacggaagatggtgggcccatggaccttgaaagaaaaaggcagggcccttatcatggaaggatctttggtttgcccattagtaaaaagaattgaaacctttctcccttttca

SEQ ID NO: 454203 - DNA, 847 bp, Homo Sapiens
  misc_feature (56)..(65): n is a, c, g, or t
gaagggtggagaattgaagtccctttcccacctttttggggggaaggttgtgtggnnnnnnnnnngttgaggatttgcgccatttagggtattccgaggggtttttttgaacgagggttttttagggccctttgggggtgctgattcaggaaggtgggcgctgaaggagtttttttgccaagaaatgcatatttctttggcccagttcccccacaggctctggattgagtaggccttagggagggagcttccacattataagaactactgccctaaatggagatttccagagacagaaagtgaacttgtagctctgatctagaattgtctttcttcgctacattaaattaaaatgttcgttgggagccaactgggccaaatgcttcacatgtccttaaggagggtattggaataacagggccccacactatgaatccacagtgcggtaaaaaatgtgaatggatgtgccttctgggttacagcttcagagtggggaaaactcatgaaaactaagatgggcacagttgggtgccagaatgttccttgtgattcccaattactcactgcattcaggagaatgggtgttcttgcttttagctagatatgatcctttcaccattactgtagaaaggataaacattcccagacatatggtagagtaaatgttttggacaaagaaaattagtgcatagaatcaaaaaaccattaccaaaggttggcaaaagtacatgttctgaatggtgtgtgggtgggtgtgtgtgcaaggccatgaaatgggcatggcaggctctcacgagttcttagcttagagattttgcttcatgtggtcctgtggacggaattttct

SEQ ID NO: 454204 - DNA, 872 bp, Homo Sapiens
  misc_feature (56)..(56): n is a, c, g, or t
  misc_feature (590)..(730): n is a, c, g, or t
cactggcccatctgcaatgccacggctgagtttcccaaccacaggtaaaggcccancccaaaagccaaattctttcagtcaaagctcaaaaatttcagcccagcaattggatccctgtgaaggctacgtaataagcatagacataaacgtaaaatcaaaagaaaggtttggaaatgaaagtttaaatatggcaactgaagtccaaccaatggtatcatctacccccacctttctttcctcaataaatgtgattcaaaaatgacattaactccaaaaaatgaacccagctcaaaccaaggtgacctcactggttgtgaggatggcaggaagggaattatttagccaagcttgtctaagaatgggtcaccagggttggagaaggtggtaaatgttgcagggattcccacaggttcttatgaagtgaatattggaggaggggttgtggtgagtagctgggatgctctagccacatcaaatggatgtaaccggcccatccccagctgccttcctgctggaaaataaatatgcctcttggtagcctgacttcaatgggaaatgtctagtctccaaacaaggctgctctgttcctnnnnnnnnnnnnnnnnnnnnnnnnnnnnnnnnnnnnnnnnnnnnnnnnnnnnnnnnnnnnnnnnnnnnnnnnnnnnnnnnnnnnnnnnnnnnnnnnnnnnnnnnnnnnnnnnnnnnnnnnnnnnnnnnnnnnnnnnnnnnnaaccagtaggtatagaacttacattttaacccgggtctcctgatcccaaagactgtcctctttccctgctagcaaggtctgggtggttgctgaattgaacgttcttggtctcccaagaccactgttatgctggtctgtgggc

SEQ ID NO: 454205 - DNA, 295 bp, Homo Sapiens
  misc_feature (148)..(183): n is a, c, g, or t
tatttacagatcttgtccttgtttatctctctgttattcattccgatcttcagggcggggcgtaatttgatatcgagctcgcttggactcctgttgatagatccagtaatggccgaattcccgggcatatgtccggtaccgtcgactnnnnnnnnnnnnnnnnnnnnnnnnnnnnnnnnnnnnctgccgcttcctcgctcactgacttcgctgcgctcgtcgttcgctgcacaacctagcgccctatagtgattatacatttttttggtgttttgttttcttgttgttctgttct

SEQ ID NO: 454206 - DNA, 918 bp, Homo Sapiens
  misc_feature (710)..(718): n is a, c, g, or t
  misc_feature (819)..(854): n is a, c, g, or t
tatgttgttgttcaccaaacaagtggattgagaaagtccatagctttgggtcttgaagtgcacctatccgacttgcaaactcagtgatgaagttaacccaggtccagtcttaacctcaaggacggaatgaatccaaatttaagcacatgatataacctgggtatcaactgagagtaagaattgaagtcatgaatcgttggtcgttaataagctacttgacgtaacacaaaagtgaaaaaagaaagaaatcttactaacctctgtactcttagagtttgaaaaatattgattacagctcttcctacagaatcacggtcaccttcaaatgctatccaccatataaagaaaattatgaaagtcagaaagcagcttgattgtcatagtatcagtttccatcttctttaacccatgtgaatgttcaagacatgtggtagaagaaaaggaataatgctatttctaatgttcatgataaccgacactctaggaaaacatttaaagaaactccatgatttcacagttaaaattagagctctattaataacccacacagctaaggtgttttctatatctcattgctctgtatatttctagccatttatagagaagtttagcagatctacacagggttttcatcagttaattttcaacattaactaggtcacatgccagaagctgttataccaaatatttaaaaattagagctgtgctgnnnnnnnnntgacctacaataagaacttgagagagatatagactgacttcctgcctgagacacccggccataatgccgaattcccgggcatatgtccggtacctcgactnnnnnnnnnnnnnnnnnnnnnnnnnnnnnnnnnnnncgccgcttcctcgctcactgactcctgcgctcgtcttcgctcaagcgtagcgccatatatatcc

SEQ ID NO: 454207 - DNA, 156 bp, Homo Sapiens
cttgcaccaaagctttctaaagttagtgatttatttctgacaagtttgcaaaacccaagagagagcagttttctgggttgaactcatacttcgtgtttactcgagtctgagtcacggcacctgacttcctcacaggtgcacctgactgctctttac

SEQ ID NO: 454208 - DNA, 784 bp, Homo Sapiens
  misc_feature (536)..(633): n is a, c, g, or t
  misc_feature (671)..(706): n is a, c, g, or t
cttggggccttaggttggaggatccctttgtgccccagggttttgagaccaacgttgggccacacttatggagaccctgttgcttcccgattgaaaaagacaaatggagaaggatgggggtgtacactgtaggaaggagagcgatatttaatcagtaaccacttcctagggtatttttaacatgccatcactaaatccccatgcacctccttccccagctccacgaccacgctgcttacttagtagacaacctgtgggactgtgcagggactcagctgaaggactgggagggtctgacaagcctgctgctggagaaggaccagagcacgtgccacatggagccagggccagggaccttccacctcctagggtcgaaaccacggagagattgcttgcttcacttgtacaaggcaggaacggtggcatggcgtgggtggaaacttggagttggaaggtgtgtggaatattttgatgagacgcatgtctgagccgcacttgaccactacctagattggctgatacacaatcagcagcannnnnnnnnnnnnnnnnnnnnnnnnnnnnnnnnnnnnnnnnnnnnnnnnnnnnnnnnnnnnnnnnnnnnnnnnnnnnnnnnnnnnnnnnnnnnnnnnnggccgaattcccgggcatatgtccggtaccgtcgactnnnnnnnnnnnnnnnnnnnnnnnnnnnnnnnnnnnncggccgcttcctcgctcactactcgctgcgctcgtcgttcggcttaacaggccgaaagcttagcgccctatgagtcca

SEQ ID NO: 454209 - DNA, 915 bp, Homo Sapiens
  misc_feature (697)..(866): n is a, c, g, or t
gttgtgtgtatgacggcccatctcacacaaaggggggtggtttcccccgggcccctgttccaccccccgccggattgtgagcggaattctcctgggcctcgggggcaaattttttctcccgaagccaattcacaccatatgggacaacagaggtaaaaaacacattgtgaagggacagcccgttaaaataaggaaggattcctggaaatttaatacaccatatttttcgggttagattaattgttccaaaaggcatagtaacatatgatcgaactttaaattagatatcaaatattagaaaaggcctagtttttaaaaacaccagaaatagttctttcagttttactttcctatttcataaaaaaggacagtaagaatacattgttagagtaacatgaactaattcacgtgcatattgaaattagatagaactaaatgcttttctcttcaaatgtccaaggtttttattcagttaactctggttggaatctttccaagcatattaaatagttttctgctttcctaacatgggttactgaatataatttcaccttttctttatgactaaagttcatcattataagcattccttattacactaaaacagcattagtttgcctatttcctctttactaggatgtgtctgcccttataaaccctcctaactccatctggattaacctattatatgcttgcnnnnnnnnnnnnnnnnnnnnnnnnnnnnnnnnnnnnnnnnnnnnnnnnnnnnnnnnnnnnnnnnnnnnnnnnnnnnnnnnnnnnnnnnnnnnnnnnnnnnnnnnnnnnnnnnnnnnnnnnnnnnnnnnnnnnnnnnnnnnnnnnnnnnnnnnnnnnnnnnnnnnnnnnnncccggccgtaatggccgaattcccgggcatatgtccggtaccgtcgact

SEQ ID NO: 454210 - DNA, 365 bp, Homo Sapiens
  misc_feature (254)..(254): n is a, c, g, or t
agtcgacggtaccggacatatgcccgggaattcggcaattacgccccggccctgacagtatagagagtgaatatgagatctgcgaataagcataaaagatgtgactgatggagagatagacatgtgcagcgttaaattggatggagaggggggaaaatgcaatggcagtgtaattaatctggggaatcaccaggatggggagacgagaaatgtatctgaaaagaccgtagggaaatgggcaggtgcaccgtganagctgatatgagagtatatgtgtgaactgcggagtggtcggatatcaatacagatcgaggagacgttcaggatgtcatggaaatgggtgtgaggggaacatattgatatca

SEQ ID NO: 454211 - DNA, 854 bp, Homo Sapiens
  misc_feature (28)..(28): n is a, c, g, or t
ctgtgcaaatctaaacaaatcctctccngaaaccattacttattttcataataccaagtccgaactattttctgcctttagataaacatgctactttcattttcaaattctgaaagtggaaatcccttgccttttcaaaaggaatgaccattttaatggaacctaatacgaaatgatttgttaaatacaatgttaaaagcatgattaagaattcaagtaccattaaagataagcaatgtgacattcttaccagccaaagctactataataaaactaaaccatgctatttgattaaaaaggacacgatgcccaataatatataagagcaccaatttggtatgcaatgtagcttggacccagcctttcagaattttcacaggtaaaagaaaagcatttgccaagtataccataattcatatccatacgcaggtgcaaatacaaatgttactctcctgcttcaaaaattaccatataaccactctgaaagcagtggttgttcatatttgccaatacactttttaaaccgcacggcccggtaataactacatcatatctagagcactatgaatgtgtcgtcatacactacgagcgggccccgagcacaaggctgcactagtcgatgaccaggtgatgccgaggtttcaggtccgcataaacaatctatctagactataccttagtggctttcatctatcagctcagcacggtacccggaccagtaagtgcccgaattcccgggacatactgtccgggtaccgttctgagctgataatcttagtactatggtaagctatatcgaatgttatgcgaccgcttctcgattactgtatgatgcgcccgtttttcgcctctaa

SEQ ID NO: 454212 - DNA, 1002 bp, Homo Sapiens
aaaacacgcgatctaagggagacgaatcggccgaagggggctccaagaagtatttgccagaaaaaagggccccctcagattttcggcgttgtacagagccccatgttcgagtcaacaggccccagtggccaaatgccaacttcatgcttagcaagggaagaaaggttgagatttctaggacacccggaccttctcagaaaggagtcgaaaccttgcttcaacttggaccaagcctgtgggtcccccggtatttagcacgcaattctccctgtcagtttagttcctcacagattaaattatagcttctctcagagaagacctgggtacggagaaggaattacggtagaaagtaaagtagaaattcccagggcaaatatccacaaggtccagacatcacagcatctgaggctatataagaaagtggaggaattcaatgagcagcaactcgggggtgctcaagcttctctagtcctggtccaggcctcacggccccacctgtactcccatcatgggcaccacctcttcaagccacagcaagtcaatggagctgaggctcgtgtttgtcggtggttgaattcggcgtaccgcagaaggtattaaggaagatggccagtagactactcatccaggatacaggcaaagaagagatagctggttgtatacaaaggagacgacggacaccagactaccacatgggcgttgtcggacaccttcctgccctgaagatcccatgacatggataaggatcgtagtcttatatagaaatggctaccaagcgtccactggaacctctcggtcatacacgcagctggactgtaacgcaggttagggtaatcatagggaaagtggaatccttctccggccgtaatcgacgcgaattccccgggcatatgtccgctaatccgttcgactgataaccttctgtataatgtatgctatacgaagtctatgcggccgcttcctccagctcacactgcatcctgcgctcgtcgttcggcataa

SEQ ID NO: 454213 - DNA, 769 bp, Homo Sapiens
  misc_feature (606)..(720): n is a, c, g, or t
tcattgtttgatatttttatttgctttaataagtaagacgaaagtaaaacaacagaatgtatgcgagaacttcactcatttatcaaccatatgaatgactttattgctgaatctgataatagttttccaatacttgggaagattatttgctcaattatttgtgctattcacaatgtcacagctacagtcaaaacatctcaagtttaagctgcatcattaacattttcgtccatcactttctcacgtctggacaataaaccaccacaataaatcaagcccagatttgtagcgtttgcttatttccaacactgccatactgctacccagtccaatttccatctacccaatgtgatgtccttgaaatgtagaattgggaaagagatgtacccccgccccctgatacatagtatttcttctatacacataccatagacataagtaacctccagagcatagaccataaaacctagtaaattaattagaaagttacgagtttttaatattagtaactttgtttctgaatcatttaagtttaatgtaaatttagtatttaataatggcctgtgtttaaccatccacgtttaaaaaattccctgggaaaaaaannnnnnnnnnnnnnnnnnnnnnnnnnnnnnnnnnnnnnnnnnnnnnnnnnnnnnnnnnnnnnnnnnnnnnnnnnnnnnnnnnnnnnnnnnnnnnnnnnnnnnnnnnnnnnnnnnncccggccgtaatggccgaattcccgggcatatgtccggtaccgtcgact

SEQ ID NO: 454214 - DNA, 375 bp, Homo Sapiens
  misc_feature (316)..(316): n is a, c, g, or t
  misc_feature (327)..(327): n is a, c, g, or t
  misc_feature (341)..(341): n is a, c, g, or t
  misc_feature (354)..(354): n is a, c, g, or t
ctgatcataaaatatttattaaggtatactttagggaatatagtgaatataaaatttaggatcacaatatgaagcaatttcaaatcctctcaaaggtcagcacagccctcaaaactctgcagatgtaaaaccactggtgagacactaaaagcagttcgactagtagagaagtggattttcatgaacatttacaactagagcatatgaatacctcttttaagtgcaaaaccacaccacattacactaagtgcagcaacaatgcattcattattgttctcattagtcattagtaggtcaacttgcataaaacacccgnaaaaggcacantgggggttcacaangtgggggcttatnaaattggaacctggtccttgg

SEQ ID NO: 454215 - DNA, 670 bp, Homo Sapiens
  misc_feature (97)..(182): n is a, c, g, or t
  misc_feature (670)..(670): n is a, c, g, or t
gggtcctttccccccgtttgtcttcccctttgtggccccctccctgttcggaccgttttctgcgccccccccgattttttgttctgtggtcccgacnnnnnnnnnnnnnnnnnnnnnnnnnnnnnnnnnnnnnnnnnnnnnnnnnnnnnnnnnnnnnnnnnnnnnnnnnnnnnnnnnnnnnnggtgtgtgtgtcgtgcttgaaataaggtgtttactctgtcctagagatgaagtaaatccacattcttatcgaatttacagtttgacatccttaaaggactactgactctgggatagataaaagacataccaattaggaggactgagaagtccataccacagatggttgaggagttagactaaattggcagtgatttaagtgcataaaagtgtcaaaggcaggcctaaaataactcgagttctccaaggcaattcatttttttgttactacagccatctgtcaatctgaaatcaatcctacgaatccttacgtgcaaactaaaaactggagaattgcagacgtttgcagcatttaatgtgaaattagtttcatactgtttcctgaagatgctgatggtgtaggtcaaatgaaacatcatagaagaggcagtatatgtatatcctttagtatatcttttaccttcagaaacttttttttggagacagagn

SEQ ID NO: 454216 - DNA, 153 bp, Homo Sapiens
  misc_feature (102)..(113): n is a, c, g, or t
atctgaccagaagccatttattacccaacccatttatttcttagaggttccaaaccttctgtgagaatcttctctggcctggttggagatccaccttcttcnnnnnnnnnnnngagacggagttttgctcttgtggctcaggatggagtgcaa

SEQ ID NO: 454217 - DNA, 375 bp, Homo Sapiens
  misc_feature (286)..(328): n is a, c, g, or t
gttggatgataatttgttggggataccatagaagggatgatgaaatttaggctggagatgatcaccaaggtactttctatctctaagatcctgcaacccttgaaagacactctatttgacagtttcatgaataaaggcagtgacaatgaacaaattcataaattacggtgttacattacataaagcttagtttcttattaaaattggccaaacttgtcaattggcatgaaatgtaatgctgttaaaatatactttctcttatggttacaaatactaagtggctcannnnnnnnnnnnnnnnnnnnnnnnnnnnnnnnnnnnnnnnnnncgcccgtaatggccgaattcccgggcatatgtccggtaccgtcgact

SEQ ID NO: 454218 - DNA, 752 bp, Homo Sapiens
aatgggatttccatttttgggaaaaggttgagatccatgcagcaaaccttactcctttgttctgtaaatggcactggtccaccaaatgcagacgagaactttggatttgtccaaaattccttttccaaaattcagaaagaagagctggtgaaatatgtccctgtttgccattccattcagaaataggtgctgagagaacaaattcaacatccagtcttttatctttaaatgctaatttctccaattggcttctccaaattatatcatcttctgttttattgaagaacatcagcttcactttcctgagactgggtatatcagtcaaagcataattcagtattttaaccattggtgtgaagcctgttccagctgcccaccaaaagagatcttctaattctgtggaactgtggatatttgtaaaattgccctcaggactgcttacagaaacaatatctccagtctgaagacgatcaagctctggtgtgaagagtccagtgggatagatttttatcaaaaagtagatgtatttattgttgggaagaactggttccttgaactctgagagtaaggaaccagatacaggtgtatatggctttactatttctgtacctgtaataggtagcttgaggtaaacatgttgcccaatgggcacttgaagatgagtgcttggtggcagcatcaaacagaaaagcctcgtatcatgagtaacatcttccttggaaattaactggcactttctgtagtacaaaccc

SEQ ID NO: 454219 - DNA, 1154 bp, Homo Sapiens
  misc_feature (761)..(761): n is a, c, g, or t
ggcacaggagaacctcgccccacggtaaagggtgacggtttctggtgccgccctagggcacaagaaatcatggatggtcccgatgccacctgtaataaacccacgtgcttgggatataaccgcgtagtaaatattaccgagtaacatctaaggttagaatattggattgtcttaggagaccgacataattatggaaaagtttaaagatcgataaaagtaatcaccaatgttctgatttaccggcgttaaaattcttttcttctaagtggattttgacttctaaattacatgttacgatcccaggaatgtagcttaaagcagggtttatcacagctctacagtattcccaaagtctaaattacatacctatgttgcctagctggaggacaaaaagttttagcactattacatgataacatgcaaaaactgggcaagcttcaaagtgatctgccacgcttcagattccttacttttccgtaaggtcacatccctgtagaagatgacagagccggcacttgcgtaactaagcctccagaactagttacaaccctggaatgtgaccattcttttgcaatgcagttggtcaccatcatatgaaaatcttgagaaataaaatatcctgtttacctgctagttcctgtcagagaataactcattcacataacagtcctttagtctcaactacccacctatcttttttagtacttataattggatttttaaaaggaatattcaaaagtattctctacatatcccaaaanggttaaaaaaaacaagaagaaggaaattaaatacatgttggctttacgataacataagaaaggggaggtgagagtgtagaaatgaaacaaaattggctatgagttgcccaatgttgaaggtggggatgagtacgcagaacattctactgggcctactttatatatgtttgaaattttccatcataatttccttcttacctaatttttcaagattgtctcctaactctacacctaaaaagaaacattacagtactattaatagtatggtaataaatgtgtcacctttaaaatactgagttaagattctaaaagcacctgaagcttatttgctcaacaataacaaaaactatgccagacaataattcttatcatgtgcacagtgcttacagaaag

SEQ ID NO: 454220 - DNA, 994 bp, Homo Sapiens
  misc_feature (745)..(839): n is a, c, g, or t
  misc_feature (889)..(924): n is a, c, g, or t
tcaaccttttcccccaattcgccttccgtcccgccaatcccttacagacaattgaatagagaaacctaggatatatgtttcaacaggttattcagtaaacacctaaaatgagccccttttcatgctaattgcatctttgctactgtttaccgtgcacaattgactgaaatgagacactcctgtagtggcataattttaaaggatccttgattatgacaccacccactttaccaattcttggtcaccaaactggtataataaattgtaccaattattaaaatatacctttttggaaaaaataataaagatgaccatttatacctaaataaggtttcccagaaagttatgaaatactttttagcatataaaagtagttgctccttttctgaaaagtcagctgttgtttcacaaaataactcatatgatcccaggcaaacgatttctttcaaatgccatattctctctatgactttgaggtatgcttcaagagactgtatccataagaacagggcacatttgggtattagaccacagttacaaacgcaaggagtctttcttgggtcaggaatgcccttaagagttatatcgacagagacaaagatagcttctgaagccatatcctttacaatacatacaactaaatttggttatttagaggataattcaagacacagctattaaccacatgctgtgtcatgtgtgcctattttagttagtggcttctgccaggtcggtggctcacacnnnnnnnnnnnnnnnnnnnnnnnnnnnnnnnnnnnnnnnnnnnnnnnnnnnnnnnnnnnnnnnnnnnnnnnnnnnnnnnnnnnnnnnnnnnnnnnccggccgtaatggccgaattcccgggcatatgtccggtaccgtcgacttnnnnnnnnnnnnnnnnnnnnnnnnnnnnnnnnnnnncgccgcttcctcgctcactactcgtgcgctcgtcgttcgctctcacctagccttatctatcgtcgtgcct

SEQ ID NO: 454221 - DNA, 838 bp, Homo Sapiens
cccgcgggagggcaagaaaaagatttttctttgataccggggctaggccccctggaaaagggttccccgcgcagctggcgtttggttctaaaactgggcgtgtgttttgccccccgggggaacaaagtcccaaatgcaaagcgcaagaacaagtgcccaacaacccaaaaggggaaaggtgggaataaggaccccagcccacggggggtgccccttggagcgggtgggtcacaggtctcagggccatgaagccccaacctgactgtgaccaagtatggtcccccaggctgtgcccttttagaaccggggtccttccaaaaattaatagggaaggtggtactgagattccccaaggccgtctttgcagtgccaggatttctgattctgccagaacccaaggggaggacctcactttttctatttaaagaattatcagtaataaagcactcaggtcttcgaccactcttgcaaatactgtggtttttctcttgctgagtctaggacggaataccgagtttcatagtgcagtgccagtaaaggttggacttttctgtgataggggagtaattgagacaggtacaaatcgtaagatcttcccgaggactggatacaggagaaagaaatgcagccccagaaagggaggtgtgcagttgcaggcagatgggccaaggagatggtctgattgccaagtggattggagcccaagtcttcaggttttcaagtgggtaattagaacaggaaggagccaaacacaggcctgctggcgccaggagccgcaagattttccgttcaggttgtgtcgtctcagagctaagatgggtgcatgcgagtacttccc

SEQ ID NO: 454222 - DNA, 1106 bp, Homo Sapiens
  misc_feature (628)..(654): n is a, c, g, or t
  misc_feature (988)..(988): n is a, c, g, or t
  misc_feature (1021)..(1021): n is a, c, g, or t
  misc_feature (1094)..(1094): n is a, c, g, or t
aatttaagattttggaaacaagcttccttaaccttttaaaaattttttaagtttccacccctgtaaagatctccaagaggcatattagtttccaggaacctaccatttttccctaaaaagggcttccaaaaaaaggccctaggctatggtagggatttttgttagtgctgaaggaccaggtttctttaaaaagccactgggagagctatgatttcagagattagaattctatggtatttgaagataagtgtgccgcagggggtaggagccagaaccatagggcagcagtagaggaggagaaagggatttagaagacagtaatatatgattaaaagttaaaagctgatccagagcacatcagagttacaggttggaaagggggatctgccgatgagcaggaagtctgctgatggctggaaccgagtatgagaataaccctcactttaagagctgctgctgcttcttttttgtctacctttctggtaaagacaacatcaattttataaggggagcaacagagggagaacaggggatggggaggtggagggtgtatgtatgtgtgtgctgtgatccacaatggaaagagcaggcccttcagttatttcactagattttaaatgctttagannnnnnnnnnnnnnnnnnnnnnnnnnnaatacaaagtctgagctgtcccatgccccaagtcttcctgtccactaaggtccggcagagtctgaatcttcaatcagaacctctgtggtagcaccgagtatatctgagttcataaccagcccttcagtgcctccactgctgccgcttcccacaaagatcttcccatcagccatcaggttcacccgttccgtcccactgcagtatgactttgacatcccttcagcttctaacagtaggcactctccagaggttgagtttcccaagggttcaggaagaagaggaagaccctgaccatctgaaggctgcgtcagggactctgggttagtgcccaagnatatctgtgctggtgatgagggcgcctgcattngcagtccagagcttctgcaatcagcacctcagggtggcttttttgccttggtgtgccactacggtgttccttnttctcaaatttt

SEQ ID NO: 454223 - DNA, 672 bp, Homo Sapiens
  misc_feature (557)..(571): n is a, c, g, or t
ggttccaggtaatatcccaaggagcaaaaattgtttaaaggggttccattggacgttttcaagttttttcaggaaatgtctttttaaggtctttttcctccataattttctaaaatacgataaagtgataatttcttcatctctccatttaaggttctttgtagatgcatgtgtaagaagctatttttatagcttgccaggtttacaaactcagacccttttaaaagttgtttaaattgttttgttagaaatttcactcgcagttcatatgagtaattttgtgtattcctttttgacttacactcactaaatggttgctaaaaattacatgtcttaaatattgtcttaagtattatctactatgtatctttaacacttttgaatagaacaaacagcttttccattttgctctgctgcagtaaattgcaattgccattcatcattaaatgtgcactatactgtctctagtcttcttgactatgccagttgtagtaccagcttctgtatctgcactgaattctgcctcagtaatatgcctttgtttaaaatttaaatannnnnnnnnnnnnnnaacctagaaaataattataatgaaaatattaagtatctcattttaggattctgatttacataggtatcactgtaacttgtgctgtttgcataggtataccc

SEQ ID NO: 454224 - DNA, 766 bp, Homo Sapiens
  misc_feature (547)..(547): n is a, c, g, or t
  misc_feature (610)..(610): n is a, c, g, or t
ctggaagataatatgacctcagtaacaaaccacttttctcaatcaaagctggactccccagaggaattggaacctgacagagaagaggattcttctagctgtattgatattcaagaagttctttcttcatcagaatcagattcatgcaatagttccagttcagacatcataagagatcttttagaagaagaggaagcctgggaagcatcacataaaaacgatcttcaagacacagaaataagtccaagacagaatcgccgcacaagagccgctggaaagtgctgaggattgaaccaaggaaacaaggcgtaatagggaattaatgtggggcttttgctggactttttcaaatgcattgattagaataccgtacttttggttgccacagataggttttctatttattaaatgcccaaggaaagatgctaaattctaaatattacggttagctgatattcattcttttctgcttttccagaggggaaaaatgttacaaaatatccttacttggtcagttgcctcctgcctctaaaacatctctctctanaaatactgacatttcacacaggtaccaagctttgcagagggagggagactcttttggcacttntggcacagggaatttgggttgggtttggtttgttttgataattaaaatttcagaatgtcccttaagcccattcccctttcctcttcaagggaagaatcccagcctccacaaaaagggattccttttcaacttcctttaatgtgcacagaaaacagt

SEQ ID NO: 454225 - DNA, 747 bp, Homo Sapiens
ttttaccaataaatgggcatttagtgcacatcaaaaagatctgaaaaatgctaaatggggacatttcccacaaaaggaaagaaatccaatggctcctataaagggagaatatagcaatgccaagcagaatgaaaatttctgtcaaaagaaagtacttctcaaagcaatcaggaaaaactgttcccaaattaggcctggggagccacattagccactatctcagatactgattattttgtttagccttaggggcctcaatattccccctcatctgctaaacttcaacttgtttactcacaagtctgataaattccagccaagtaaccttaacattccctatggcagtgcaaaattccagacatttgtaaacactgtaaatttcacgtttggtacatgagacagcttaccggttcatctttgattctaaaaacatagctagttcctaatctatggccatttttagcaaaggtagcatcaggatcaaaacatgcttgcacacatgcacactcatgactgggagaaccatcagaactaattgctcgttaggatatagttctgaacaatttaagcagataactgactaaatggaaaacagattcacagtatctaaagccatatatcagaaattcacataattctgaggggaaaaaactcaaatatctagttaacaattgtcttcctttcaaaagcgagtcaagaggtaacattacatagctttgtattatagatcagaagaatattcacccc

SEQ ID NO: 454226 - DNA, 539 bp, Homo Sapiens
  misc_feature (73)..(186): n is a, c, g, or t
tgggcttaagtgatcctcccatctcagcctcccaagtagcttgggaccacagggttgcaccaccgtgctcagnnnnnnnnnnnnnnnnnnnnnnnnnnnnnnnnnnnnnnnnnnnnnnnnnnnnnnnnnnnnnnnnnnnnnnnnnnnnnnnnnnnnnnnnnnnnnnnnnnnnnnnnnnnnnnnnnnagtgtgagcccctgtgctccaccaagagaaacactctttgattgctaggaagttgggataaagaaattgtgctgtgatcaagccaccttctgtgtcatagaaccaaaagaagaccgcctgctatggcaagatggcctaattttattcctgcctcatactatcatggataatcgttttcctttctctagcaggtttgtgtcactgggagtactgggagcattatcctgtgttgtgctggggtctataccaagcagtgttaactttatttaaagaattcaggcagcaagattagagaatttaagtagcaattgtatatggtaagcaatacagtaacccttaataaaatttatgat

SEQ ID NO: 454227 - DNA, 922 bp, Homo Sapiens
  misc_feature (519)..(519): n is a, c, g, or t
  misc_feature (596)..(596): n is a, c, g, or t
  misc_feature (606)..(606): n is a, c, g, or t
  misc_feature (647)..(647): n is a, c, g, or t
  misc_feature (656)..(656): n is a, c, g, or t
  misc_feature (663)..(663): n is a, c, g, or t
  misc_feature (803)..(803): n is a, c, g, or t
  misc_feature (810)..(811): n is a, c, g, or t
  misc_feature (814)..(814): n is a, c, g, or t
  misc_feature (834)..(834): n is a, c, g, or t
tttttaagtgtgtgaggagatgctcagtagcagcagcctatggcaagagcttataaatgattgatgcaaatttgcactctgctccccctctgtaaggatactgatagcacaacctcttccccccaccccgccccgccttttggtcgtccatccctgtccctttctggccctcttcctgtagcccagtctcaggctttcctcttcctgaagccctacagagttagggaatggagcccaggcaccaggggtctaaagtgtgagccactgagaagagagacgccaactgcacccttgccacttccaaagcaatagaggcagagtgggtcccctctttggccacctaggccagttttgaccctggcattaactggccttagaagaaactggatcctggtagggggtggcattttgtttgtttcttccaatctgctgaatcttttgactgcaccttacaaacagcagtctgctcccatgaccctctgcccacttccattggtctccaggccccaataatctggngttgaaactttgaggaaatgccagtgacttattccagagtgcctcagttaggggaacttctctgtaaagaaccctgngtattgagcnaaaaccttattatcgttaatgacctataatggagagctccntgccttttntcttggntgctcctgtggaaaatactgaaaagaatactttgttttatttcggtggctttttataaaggggaagtggagagaccccttcaaacagggattgtgccggagagtgctctgactttgggacattcatcacagaattcccangcatggnntcnttttgggttgggttttagtntgggtttttgggggttgaaaaacatgcatttttaccgggccgtaaatggtcaccaaaaagggaaccaaaaaagcagccaatgacctgt

SEQ ID NO: 454228 - DNA, 681 bp, Homo Sapiens
  misc_feature (291)..(291): n is a, c, g, or t
tctctgcccagattctttttcttttagcttatttgagaagagccctgaaatgagaaaagatcatgagtgaaatataatctcctgaagtatcatctccttactgtagatacccctaacaacaacaggaggctttgactcagccacattccaacagaggttctaagtcagtatcctgtaaggtttccatagtcctggagaacttcacgcaaacttcttcttggtggctgtgaacctctccatgtacttatcatagccttccagttctcgaagtttctttatttcaaaaagatngccttccacagcaagcagacagatctgggaatcactgaggatgctctggggaagcatgctgagctcaagacaattctcttccaggcgaagaattttaaggcgtggacagcaagatatcttcactgagatctgagatatctgattctggttgaggttgagttcgatgacttgcagctctcccactgagtcaggtatacttcgaatctggttcttagagagatccatcacatccaggtgccgtaggctacaaagttggggaggtaatgctcccagttggttcccagagaggctcagggtcttgagggcagagagttgcccaaaggtagacggcagctctctaaggtgattgttgtttaggcttagcgtctctagttttttcagattgcatat

SEQ ID NO: 454229 - DNA, 344 bp, Homo Sapiens
attttataaaatatcacagtttcacagttgtcttttgcagcagcttttcttctctccacttttgcttgaacaatcacagtagcacaagatatggagatatattaaggttgctgcatctttttttaaaatcacacagtaggatactgaagaaataatcctgtataaaaatattgtattaagctaagatcagtaataaaagagtggaaattaaaaattacaaatattaaactcaaagggtttttacaaatgtttttggacacaggtacggaacaggatctgttggcaatgcagcaggtgtgtggtttacaatcaagaggccttggcagaattagggtccaacaagg

SEQ ID NO: 454230 - DNA, 2007 bp, Homo Sapiens
  misc_feature (1387)..(1387): n is a, c, g, or t
agcgggttggcgcgttccgtgccgggagctgcgggcgcccgggcgcccgaggcttcccggtgcgctccgccaggtgctgtgcagcctgtgtggctggctctcgctctatatttctttctgccacctgaataagcaccgaagctatgacgtggagctgccgccgtggtcaccttcacccatggagtcctctctataggcctctccgcttatctctggcttcattgatggcccattggccttttacccacccaggctcagcccaatacacctctccaagttcatgtcctgtgtctcaccttgggctacttcatcttcgacttgggctggtgcgtctactttcagtctgagggtgccttgatgctggctcatcacacattgagtatcttgggcattatcatggcccttgtgcttggggagtctggcacagaggtcaatgcagtcctctttggaagtgagcttaccaaccccttgctacagatgcgctggtttctccgggaaacagggcactatcacagtttcactggagatgtagtggacttcctctttgtggctctgttcacaggagtgaggattggtgtgggagcttgcctccttttctgtgaaatggtctcccccacgcctaagtggtttgtgaaggctgggggagtagcgatgtatgctgtgtcttggtgtttcatgtttagcatctggcgctttgcatggaggaagagcatcaagaagtaccatgcttggagaagcaggcggagtgaggaacggcagctgaaacacaacggacatctcaaaatacactagccaaggcttgctccagattatggattgggttaagtcagccatgggaaccaggttggaaatatgactgttacataattacacttataacaaacttaggtttcaataaagggctaaatgtattgatccatttggtcagtcttcaagccgagcatataccagtattaaaacactaacttctacagtagcacagttgtagaaagtgagaatactccatggtagttgggaataagtgagaactgtgaagtgagtacaactggcatttgttttcatttgtggtgaccctgggtcctcctgtccctgggaggtttgatgttcaggcagtttagaaaggaactcgaaaaagattagtgctatttcttgttcctttgagaagtaactctttcaataaacacttatttctgctttccacatagcaatttatctaagtttaccccatttactataaagtgaggggcttacaggaagagacacgcctttgacattctgaacattagatcggggaattgggtcgcttaaacagaggggcataggagggtgagagtgaaactggcagtgagggggagggctacttactgaacctcctatacccactgtngccagaggtgcccaagaccactgccaggttctgtaattctctgggaagactcagtggactcagcatatagtcttacttatagttttgatttattatagtgaaaagatacaaagaaaaatcggtaaaaggaaaaggcacctgagacaaagtctagggtaaagcaagcacaagtttccagagtcctctcccaatggaatcacacaggatgcacttaattcccctagcagtgatttgttacgacatgtgaatgagttgtctactggacaaggtcactacagacccagtgcccaaagtttttactgaggacaggtcatctaggcaggctttccctggcagatagcaaaattcaagactctcaaaaggaaagcaggtgttcagcataagccatattgtttgcacaagcagttcagacacagtaagccagtcttatcagttaattgtgggagcccctccaaaatctaagttcccaaatgccggccagtggccaaccctgtaatcaggcctctccaaggatagcagtttaggcctgctatgttaactcttttctgcacaaaacctatagagttagggctttggatctgagatgaatgaagtgtgggtagatttactgagtccactat

SEQ ID NO: 454231 - DNA, 462 bp, Homo Sapiens
aaatatgttgcaaaatatcaaaaatttgtgttatttcagcagtaagattaattgaattctcttttcacattagttatgcttaactcataaggttattataataaattatattagtaaaagtcttaactggaacaaagaatctaaatcagaatagtgatcaatttgtggatttgatatcctggatatttattatattttatgtaatgctgcatttctatttgaatgttaagtggtctttcttgtttttaatattcatgcatgtatattcatcatattttacaaggttcctggtaaaaattacagggctctatttaaggatgtattttaatgtaaatgcttatgttttttatgaattgttaaatatttcagtattatatagaaaaaaatagatttttaaaattcagaatggacaaagagaatattcattttcttattaataagataaagaaatgtttccctgcc

SEQ ID NO: 454232 - DNA, 644 bp, Homo Sapiens
ccccgactagcccgacagcagaccaaaaaagtaagaagtcactgataggtggcaaccacagtaaaattgttgtggaacaaaggaagagtgagtattttgaactgaaggcgaaactgcagagttcccctgactacctacaggtccattgaggagcaaacagcatttgaaccagatctaggtcatgtaatcttacttcatacagaggacatttatttaatgatgaaagtgccttttgttgacttctaacttccaaatactatattatcaataggcatggaggcaggtgtttccaagggtgtctcattaactgtagctgcaaagatgtgtcaagtagaagagaatttgtttaatagattttactacataaacctatactgtggagtcctgtggggatactgcaaactctattgccaaagggatgctttatacacataatactgaatttaacctcaagaggcaaatctgttttgtaccccaatgcaaaaccttcgtccctttgtgctttgtaaagcaaactcaagaaaactggtacacctgtaccagctgggtcctttatcttgcacgtagattaagttggtgggactggaataatccttttgatttgtggcattgtaacaactccgtgtaaagattatctgaaaagt

SEQ ID NO: 454233 - DNA, 693 bp, Homo Sapiens
cgaacaaacaacaaaagagctggcttttaattatgtaacaataatatggttgctattagagaagcgctatttcacagctctgcccgaaactctgggcctattagctcagtgaagagaaaactgtgaatgccaagctgaagtttagctctggctttctacacatacttggttgccccagtgtaacctctttatggaaaagccctgcataaaagacagccatctctgtttcttcggtccattttcacttgcctggcttcccaaatgggcatcagtcaggtcttcgcagttgccagcttactgccatcttggtgtgacacatgctctccataagtaaggacaggtttaggtactctgagtagccaagaggtgaaaacaatcccccaccaagcctgttcacttctggaccctacccaggggcataggggttgccaaaaatagttcttctgtaaagatctgtgtatctgtacagtggagttacatcatatgcacgtctcacttaggtgaattaaactttgtggcaaatcaataaataagaatataaagaaaaagagtgagacatcagtgatattttaaataagtagggaattctgcctgccattcttgtagtaagcacaagggagaagggagacatgataccactgttcccttagtctccatgaacttgcctgtcttggatgtgtgggcattccactg

SEQ ID NO: 454234 - DNA, 466 bp, Homo Sapiens
ggttggtttttatgtgtatttattaaaaaaagcaattacccgattaggctgacagaatgattaggctgaccattaaaaggactggcaactttatcctcagagtttagaggtaagtttgtaagaattcaggatgtttgtctaagattgcttgatactagggcaacaagactgagagcagagggcactaaaaagactgtctaggggttagacatcaattgtgtttaagtctgagatctgccccttaggtaccatatgaccctgcacaagtcatcgacccctccacactccagtgtgtcatctgtaatgaggatggggcactcccttccacactgcagcactgcgggaaccgagacaatgccatcgcagaggacctgcaggggacaggctactttcactcactcctctccttcccactctttcagagaacaagggacttgtgctactgtattctcacagcactcactgg

SEQ ID NO: 454235 - DNA, 590 bp, Homo Sapiens
cggacgatatgtactaacttttagtttgaagtatatattaatcaagacctagtcaggaaagcaaaatacattttaggtaattccacagaggaagttcaagatgagaaaccaattaggaagactttgggattatagaaggacaaataggagcaacctatcagattagcaacatcagggcgcagctcctgctttgaggggatggaaggtcacacggaggagacagaggtcatgaaggagatgctggagatgccatctgaggcagggagaaggggaaataccctgggctgccgtcttcttcctttcctccaattcatcttacaactcctctggactgtcccaacacgttgggaagcctgggacctaactcatcctcacatcgccaggtgaattccccaaaactctcatagtgctggttatagtggtagaggacccggtgtaaggtgggggaacccagatccaggagggtgttgtaggcggtctgctgctccttcccactagtgtagccattgaagagattgtagatcttgtctgctatttcttgagccttgacatcatccaccacggggcatggggtcttcacgatcacgtcg

SEQ ID NO: 454236 - DNA, 446 bp, Homo Sapiens
aattttctaattgaacattttatgggattcacttggcctcacaaaatcagtagctaatcaaattcaaactgttagtcaaggtcaggtgggcatccactgacatgaaatggggatagggaatccacttgttctattgcaaaattcagcttttcattctctgttttccaaattcagtatgatttttccaatccagtataaccaatgtttagaataagattccatcagacagggaggaatctaggcttttgcattagcagggttgcaagtggttaggtttgccagggctagagctgctgcttcccgtacctcttcattgtcactttttagcaactgaattaactgtggaatcccctgattattgaaaaaatctttgctgcctgaattctcacacattgctgaaatagcttggggaagcagcaattttagttccatcattttcagaaccc

SEQ ID NO: 454237 - DNA, 209 bp, Homo Sapiens
ttttttttggtagaaaggactttattcagaaattggtgccaggacgggagggagccatgcgtacagtcgcgctgaagcctgagcccagtgctgccccggggtcagtcctgaccgctggaatgttgatttgcactgagcactgtctgttagatacaaaatctgaaaatgcgggcgtgggtcagcaaaacataatccatataaaagcctaa

SEQ ID NO: 454238 - DNA, 453 bp, Homo Sapiens
ggaatgtagacacaatggagatgcaggaggacatggctgctatggagtaaaggaaggcaccaaactaatatacccggtttgtgatggagaggccattttgtcattttgttctgaaaccttttctggctttcgctatataggataagggatttaggcagagaccaagggaaatattataaatattatcaatttaaaagaatcagttgtttgtatctgtaagctaatggagggagcagttctttggtaattgtcttaggttcgcttagggtaggatcaatttgcaaacactaaatctcagtgtcatatatgtggagattcattgtattcagcattgaatgtagttaaatatttattgagcacttactatatgccaggcactgctctaggatctgtggatgtagcagtgaacaaatgaggaaaaataaaatccctgcctacagaactgcttaaacc

SEQ ID NO: 454239 - DNA, 745 bp, Homo Sapiens
aaatcataataatcccgctttatcgctgcctgattttcccttatcggaaaccattcatgtttgcagttggtgaggttattgagggtcgtaaaaaacggattcgatctaaacaagaaagataaaaaacaaaagcaatgctgtagaacccgcaagtatgggaggattccccgcctgaagatgaattccaaagctatgcaaaacacatgaacactggaaatttaagagtgccttaaaaaatatcaaattatgtgtatgcagtggtaacatgcatgttaacaatttctcttatgatagatggttcaaattaatcttccagaaaagtgcattaactgtttcctttgaagggctctggtctgagcctccgagaacaatccccgctttttattattgtaacctgtaagagggaaacatataaacacccaggacagcaggtaatggggagaaatagagacaaagccagagaggaggctggtggcaagtagtgctgcttagactgggtctattgggccctagcccactgtagagtagggtatagctgcagatttaccaccattattggcagtattgtttttaattcctccattcggagaacaaattaaaccatcctaatagaatctatcctagaaccaggctttccaatggccaaattgaaaccattcttgaacagggatagcaaaatccctttcataaggccttgttgaacagtaagccatggtataatctatcagtatttcttggctttcat

SEQ ID NO: 454240 - DNA, 1040 bp, Homo Sapiens
  misc_feature (501)..(510): n is a, c, g, or t
  misc_feature (954)..(990): n is a, c, g, or t
gcaatatatatatcttaattcaaagtgaatcgacagtaatacaccattaattcttattttcgacactctccaaaatagtcacctggaaaacccgctttttgtgacaaagtacagaaggcttggtcacatttaaatcactgagaactagagagaaatactatcgcaaaccgtaatagacattacatccataaaattttcccagtccttattgtaatattgcacagtgcaattgctacatggcaaactagtgtagcataggagtaaaagcaaaaacaaataaaccaaagaaagaaagccacaagtctaaaattgttaaacaattaacagttcaaacttagtaatcaaatctgtatcactggattcattaaaacaaatcttcctacaccttgcagtgtatgatttaacttttacttaacacagtccaagtttaaaattagcagattttaaaaatgaaaatgttttgctaatacagtaacatatttaattaaacacgctggaggnnnnnnnnnncaactaaatatcaggatatttgatttaaaaaacattttgcaaattaaaatagtatgcaaatatgcaacttggaaatcatgcagtgttttatttaagaaagcattaaaaccgaagaaaactggtcaaaatggtttttaaaagttataaatccagattactttgtcaatatgctaaattaagaatttagcagaattttgaaactttcttttaaaatacattaaaatgcccatgattgcaattaaagagcagtgtagttaactgggatatacctttatcaaacattagatactgtacttatgaaaatgttgaagctttaccagtttatgatcaatcttaacaagactgctttaagtcttggaaattaaagacgagatatacaacatttcagggtagtgaacatggtccgctctcgacgaattcgagctcggccgatttggcctgatnnnnnnnnnnnnnnnnnnnnnnnnnnnnnnnnnnnnncgccgccaccgcgtgacctccgagtcgccctatagtgagtgtatacattc

SEQ ID NO: 454241 - DNA, 1176 bp, Homo Sapiens
  misc_feature (44)..(44): n is a, c, g, or t
  misc_feature (56)..(56): n is a, c, g, or t
  misc_feature (65)..(65): n is a, c, g, or t
  misc_feature (784)..(792): n is a, c, g, or t
aacttttcccccttaactggggggaacccccccgggtctggaanggtatccaaaanggtggcccntttggttggaaagataagggtaggaagacaaacggatacctctcctccaaacgtcctccctgaagacataccctgcagccctgccttttgggtgaggggtgaactactttaccctgcaatatttcctttgcaagtttatttccttcctttgaaagattactcagaaatttctgaggacttgatttatcgaggtgagtgaaagatggtgatgaatgaatattatttgctttcaatacaagtgaagaaatacacacatcacttttaatgtcattaatggatccttccaacttcctttcctgatttccacatcctgagtttccacaaagatcatcaaaagatgagtgtaagccaccagcaaagtattcatctgaacacaaagtatcacgtgaaatgttcaaaggtgcttcacacagagagttacttggattatcatgagactgctggaatcatttgggaagagttgggtgaaagattttcccttgtctccttcatctcttgtaatctcttctccattgcgctgtggtgactactattaagtttcaattgtgggagtatatattaatgaaccattagattcaaataagagaataggtacatcatcatctagatttgttttttgcctttgtagctctttagccattttctcaaatttcttctgaaatctcttatcattttctggtgttttaaaattaaaatctttgggctgcatacatttacgnnnnnnnnnaattaggcttgataagtgttcattcatattagctgcagggaacaatgattcatcaatgtgtgctccagctgtcctgcatttttcaacccagagcaccgaaacgagctttacgcctctcttctgagctttgtcccaagtgctctggtagccatctttgaagataacgtgagttacttgtttgttaaaagtttttgaaacctttgcccccatatccacaagctgtgttgtaaatgtctttgaataattttctgttccattggatgaccacacttcaacataggccactacatctttcaggatgggggccgccatgacagacggcgggatccggccagctggcctacgcggtgcttgcgagcctggcggcgcgggcgggcacccgct

SEQ ID NO: 454242 - DNA, 958 bp, Homo Sapiens
  misc_feature (754)..(762): n is a, c, g, or t
  misc_feature (877)..(913): n is a, c, g, or t
aaagggttttcgcgaaaccgattgtcccaattacccaggctttacttttatacttcccgtggatgaggcgtgttttaatacgcacacccacagaaagtaatcttataatcgcatttggctcactccccagttcttccattttagctccaatcccacgttcatatttgttgcagaccaaataacaatgtcataatcttcataggcagatgttagaaattcatgaagatatgccgcattaattctaccccagtctctgcacaagacctgtggtcaaataatgtataatcaacatctagcaccaaaagctttttcccttccctgggaggattcaaaatttccactttgtactctttcactctgcgagaaattttcagtaggttttcttccctattttctacttcaactacttcatcttcaatatcaaagtcattaacaacatcatcattgtcagggggtggacctaagacatcttccaagctctcctcacgagttcccatcatcatgattttagtatttggtttcagtttgagagctccaagcttaacatcattttctgcaggtttgcctttaactttgagtccaagtaacttttggcgttctggaagaactcctgtaagggtcttgagaaactgtttgagatcgagcacagtatcatcttctgaaagtgtggtcactgaatactcctgtccaccccattttacaatgatagggagagccattcttgaaacatatgaggaagcagctttccttcagnnnnnnnnntacctggagcgcggtggaacctgcggcagcggacgcagaaaccggccgctgagagaccgaaagcgaccggaagtccgctctcgacgaattcgagctcggccgatttggcctgatnnnnnnnnnnnnnnnnnnnnnnnnnnnnnnnnnnnnncggccgccaccgcggtgaactccatgggccctatagatcgaatca

SEQ ID NO: 454243 - DNA, 1081 bp, Homo Sapiens
  misc_feature (50)..(86): n is a, c, g, or t
ggactgattagtctatagggcgacttggagttcagcgcggtggcggccgnnnnnnnnnnnnnnnnnnnnnnnnnnnnnnnnnnnnnatcaggccaaaatcggccgagctcgaattcgtcgagagcgggttgaggctaggccggtattctaggcccaggcctgtgttcccggcccttgctcaaagacaggccggtggccgctgcgacactctaggtacagcggagggcgcagcgggccgttcgctgaggtgtccggacccgccgccgagcgggccgtgtagccacagtacgtggcggcgcctcttccttgcccgaagcggaactgctgaaggagcggcagcgcaggccggacgaggtgaaccaggtcatttaaccgccttcaggtgatgaatcatctgtctaataatcagatttgaggtccacagccctttgtggtcctgctacagggtgattttcagtggatgactgactggcgtgtgctgaggggtgccgcagtgactgcctttcccttgataaggaaacgagctttctgttctttctggacacctcgttacctgtaaaacatttccggttataacttctttatccgggtgtgcatcctctgtgcaagaggaacagcttttcacaatgaaagtgtgcccttggtaacggcgaaatgggcgtctctggcccatttgcacgcttgtaagggaggaaccacacgcttttttacccgcaatactcacagtcgggggaatggcaggcttcgatccaggcttagaatagaagggtgctggggaagtgaccctggtaccggtgatgtgcaatgaatttcctgttacagaggattgagtgggttggtaaggattattcaaagccgtttcacgggggaatgcgcaaaacagattgtggcgtagctcgggggacaagggtcgcaaaaatcggtttaaggacctgttaatgagcgcttgaaccgaagaggtattaaacaaccgtgagtgacttataacggcatgaagacgagggcgaagccactagatggtacacacggtcacgatacagataatatatgtaatctgagttggtcattcttatatatatcg

SEQ ID NO: 454244 - DNA, 994 bp, Homo Sapiens
  misc_feature (894)..(930): n is a, c, g, or t
gcccgctgtggggtcccttgccgatctccggggtatgagcgcgcccgcgattttggcccgttatccagatctcccgctgtgtggtttttcccgggggtgaatgtgttggaacccaaatgtcttctcactttacaaggccgtggtgttctcaaagaggatccattctcgggtttaaggtcttctggggaagccaccatggagtttatggcctattaagattactaggcattgaacttatcttgagcaatatacctttcttggccaagtctgtcattaaagaccctcctcatgtttcattatataatcaaacatatctcctccatccccaagttctagaataagatatagtttggtctgggtgtcaataacttcataaaggcggacgatgttaggatgctgcactagtttcatgcatctcacttcctggaaaagatgaccagtagctagagtgtccagttttgtcttgtcaataacttttactgccaccttttcacccgtaaagacatgcctggcaagtttaaccacggcaaaatggcctcgacccaaggttttatccagatcatataatccagcaatctttccatcataccctcgcttaaatcctgccatgctggtccaacagaagaaaaaatatttagactgtttaaaatagatcttctcatataagaatatctggtgaatacaaaaaattcattttcaatgtcgtcatggatatctcagccggcaggcgagcgtccgtccgcagcggccgcggcgccgacaactccctcccggccgccgaaaccccgcacccagcgctaatcataatacctagcgggctgccggccgcggggagggggtgccgggtagcagcccgctctcgacgaattcgagctcggccgatttggcctgatnnnnnnnnnnnnnnnnnnnnnnnnnnnnnnnnnnnnncgccgccaccgcggtggaaaaatcccaaaggggcgcccctatatgatcgggaatccaactttcc

SEQ ID NO: 454245 - DNA, 1513 bp, Homo Sapiens
aacttaagtgtgatgagtgtggtaaggaattcagtcagggcgctcatctacagacccatcagaaagtccacgtgatagagaaaccatacaaatgtaagcaatgtgggaaaggtttcagtcgtagatcagcacttaatgttcattgcaaggtccacacggcagagaaaccttataattgtgaggagtgtgggagggccttcagtcaggcctctcatcttcaggaccatcagagactccacactggggagaagccattcaaatgtgatgcatgtggtaagagcttcagtcggaattcacatcttcaatcccatcaaagagttcatacaggagagaaaccatacaaatgtgaggagtgtggtaagggcttcatttgtagctcaaatctttacattcatcagagagtccacacaggagaaaaaccctatacatgtgaggaatgtggtacaggctttagtcggccttcaagtcttcaggcccatcagggagttcacactggagagaagtcatacatatgtaactgtatgtgggaaaggctttactctgagttcaaatcttcaagcccatcagagagtccacactggagagaagccatacaaatgcaatgagtgtgggcaagagccttcagtgaggaattcccattatcacgttcatctagtggtccaccacaggagagaaaccctataaatgtgagatatgtgggaagggcttcagtcaagttcgtatcttcaaatccatcagaaggcccccagttatagagaaaccttttaagtgtgaggagtgtgggcagggtttcaatcagagctcacgacttcagattcaccagctgatccatacgggtgagaaaccatacaaatgtgaagagtgtggtcaagggatttagtcgtagagcagatcttaaaattcactgtaggatccacacaggagagaaaccatataattgtgaggagtgtgggaaggtcttcaggcaggcctcaaatcttttggcccatcagagagtccacagtggagaaaaaccattcaaatgtgaagaatgtgggaagagtttcggtcggagtgcacatcttcaagcccatcaaaaagtccacactggagataagccatacaaatgtgatgagtgtgggaagggcttcaagtggagcttgaaccttgacatgcatcagagggtgcacacaggagaaaaaccatataaatgtggggagtgtggtaagtacttcagtcaggcctcaagtcttcaacttcatcagagtgtcgacacaggagagaaaccatacaaatgtgatgtgtgtggtaaagtcttcagtcggtcttcacaactacagtctcatcagcgagttcacactggggagaaaccttataaatgtgagatatgtggtaagagcttcagttggcgatcaaatcttacagttcatcacagaatccatgttggtgataaatcctataaaagtaatgggggtggtaagaactacagataacgccgcaattacattcttttcccctccctttttggttttct

SEQ ID NO: 454246 - DNA, 981 bp, Homo Sapiens
  misc_feature (886)..(923): n is a, c, g, or t
cttataaattctctctctaatattttccttccccgtactggcatgttccgctttccggcaattatcaaggttcagcacaaccttttgactctgggtccaaccgccctgacccaccgtcagtccgccttcgggcccaggcttgttcctcacacaatcgaatacccgtattaggtctccaaaccatggaaattttctctcatgaagaaataggttccttagtaggtcacagaggtaaagggtatgtcaatcgttcccttaataccctacggaccaatccaggagctacacaccaaaataaattttggcaacatatttcagtaaagatcaaactgtgcaaagagtggattttattattactaggagctactgttcatcttgaacatgcagcattatattgcaatctatgcggtatctaaggagtaatccacaagatgcaggaaatccaaacattccttgaaattgtacaaccctactccagagcagtccaagtgctgcttgctggacaacgtcaagtgtaccacaacagcaacaacctgccccgtccctgagaaagaggtgtgaaaggttccgcagagtccctttaggggagaaggagggatgctgccacttcctggtggggggaaaaaacccaacacactcacctaacagaaaacatagaggctcacaattccaagttagaaatgggatcaacaacaacagaaatcaaatcatcccaaactaaactgggtgagttagggaaaacgaaaagttgaccaacatagaaaattatcctgaaagtccaaatgaaaattcaatttggatttccactttaaaagatctgaggtaagtggcatccatctctgtatccgctctcgacgaattcgagctcggccgatttggcctgatnnnnnnnnnnnnnnnnnnnnnnnnnnnnnnnnnnnnnnccgccaccgcggtgaactccaggcgccctatagacgaaatacaacttcctgttgtttc

SEQ ID NO: 454247 - DNA, 665 bp, Homo Sapiens
gaatgaaaaaatttgaacacaggggaacttaatgtcgataagccagaatggtaaagaccatgttcaagttagttagcttatcttcctcctgtaaagcaaatcacagatgtgaagttgatcatgccagtacaaagtcacagcagtcaaaatcttctgtttgatgcaacacgagaaagttgtttctgtttccttagttaaaatgcgaactggttgtctagtgtttgtcggttatcccagtttattcgtattcacaagttaacaaatagttaacaatattgtaggtgaagtggggtattgctggatcaaaggctctagaagacgtctttaccgaccgaatctgaaggtttattgagttcaaccctcacacctttttcacctgttagatattttactttagctcgtgctctctcatctgcatcaaaataccaaacagttattgcgtaccttgtagcatatgctggttgtacttcatgagggttgcgacggtcagaccagaaaaacagcagtctatcaaatttgggttcaatgtcagcaaactgggctttgccttctggaaaaattcgaagtatacctccacttaccttggcatcccagtctttattaagataatatatacatgtcccacacgctctcgacgaattcgagctcggccgatttggcctgat

SEQ ID NO: 454248 - DNA, 933 bp, Homo Sapiens
atcaggccaaatcggccgagctcgaattcgtcgagagcggctttgaatcaggtttagcaggtcactttaatgagatccaagagaacttttatcccttccttgataccaggagttattgtcttatggcattatctcaattccccacaacatgatggaaggactctcggacactttgttagaaccaaagaaccaaggaaatccaagcagtgctgccatctctcactgcttaggggcttaacaatatgtacatgtggcaggggacgaggttattccacacagcctggaagctactaacattctggccagttccatgactgcctcaattctaaataattacatgtgtgctcagtcatgaagctgaattctccccttttcattcttggtagatactaccaaaagtctactgaaccttgtgttaaaattcttgcgattaacagatgcgcaaagaatcttactttggcagctgaataatacaaagctattcaatctcactgcctatgctataaatataagtttctagtgtcctgattattatatataacataattattcatcatatataaagcgacatacaggttttgggtagcatatgaataattaagcagcaagcagttcccttctagatcagggaaaccaaacacaataaagacactaacaaatggataaccaagccagacttcatacacaagaattgcgtgctgattcacgcttgaccttttactccgtgttgcccggtcatgcttcccgtgcgccagatcccccttcttttcggtttttttcccagtgtctccgggtggctccctttggcccatggggaagccacggaggtttccactcctaaaaggcctcgtgcttgggggccggggtgctgcccctttgttgccctcccacagtgtgggacttctcgcgcctagaccccggcgggggggtgcc

SEQ ID NO: 454249 - DNA, 1144 bp, Homo Sapiens
  misc_feature (891)..(963): n is a, c, g, or t
tctgccgatatcgtccggcccacagagttagattgaccccccctcacctgtgatctaggtcatcttacaagaatttatctttctccctggaacatcgacccttgtaatcggtggcctgcaccgttccagaagtctacatcgggagtgcctattcactcataacagtggttgtggaggcttccccaaatacctgcgtgataggcaaactccgtcgtttccctgtacaggaccgttattacgcttgcatgcaggggcaataccaggaaaatgcacactcgatttcgcctgttccctgaaccttttcagtggaaaaggagatcacccccaacagtcataactggtcactaatattctctccctccctaagtattctacaatggtaagaatggaggaagcacttcaagtagccatcgacaacaacagaggatttgtctcacccatgctcacacagtcataatcacctctgagagactcagggtgggctttctcacacttggatccttctgttcttccttacacctaaataatacaagagattaatgaatagtggttagaagtagttgagggagagattgggggaatggggagatgatgatgatggtcaaagggtgcaaaatctcacacaagactgaggcaggagaatagggtacagagatagggatctaaggatgacttggacacactccctggcactgaagagtctgaacactggcctgtgattggtccattccaggaccttcatttgcataaggtatcaaaccacatcagcctctgattggccatgggccagacctgcactctggccaatgattggttcattccaggacatttatttgcataaggagtctaatcacaccagtcttggattggctgtgagccaattcacactcnnnnnnnnnnnnnnnnnnnnnnnnnnnnnnnnnnnnnnnnnnnnnnnnnnnnnnnnnnnnnnnnnnnnnnnnnagtcattagagcttcaaatttttgttctattcctttctgtcttctggtattacccattagtgtgtttagtacaccttttttagttttccgcagttctcggatagtcgtgtagttgttcttttttgatcatcttattttagtctttgctttcagtctttgggtatcctgctagatacgaacc

SEQ ID NO: 454250 - DNA, 806 bp, Homo Sapiens
ctaatgttttactttgggcagtgttggtatacatacaagggctaacggtatggggtcccaatattatactataaaaccatttaatcaaatttttgaaaagtcggaaaaactgcgtgtattctaaagtcactgggaaatttaaaagaaaaatatattccagtagtgacttacagatgaacaatgatgctgacaatagacagtaatctgtttttccatgtctaggttctgtgagtttctgatataattatttctctatacatgtgatatgacaagaaagaaactatcagtctgtcctcatatcccagtccattgtctccctctatgtacaacgtctttgacttacaatcctttcttgtgaggcttactgatgtaatattagagcacaagattcatgctacgtctttatccaatagtcttgcagtcctttgcacacagaattcaaagaatctcagccactgacgtctactcttggtaaatacgagtaaaaaccaattcttggagccaacttcggtagcaacttctcttacagagcatcttcctcttgtgaacatctttatcactgtgtattcaagtaggctggtcaggtaattcttaccaactcctggctaccagaaagagacagcaaggtttctgtccatcatgacacaccagaacggtgcactgttaaggctagtaagtgaaacttttctccttgtcccaggtggatgtgtcatccatcttgcacaacccaggcggaaatgcatgtctcctccgagacccattcaccatatcggctcgtccgtccgaagtgtgaccatctctcccag

SEQ ID NO: 454251 - DNA, 1146 bp, Homo Sapiens
  misc_feature (1070)..(1106): n is a, c, g, or t
ctggcatttctgtgcctcctgggactgaaatctctgtttctccacctggaagatgaggcctcctgctcccagggcagacagatgttaaggaacttcccggcgctagtgcccaccagactgcgctcctcctaatgcggggacatgaggctgacaccaatgctccctgggaagctcgggctcccagaccacagtaaacactgcgttaaaacagcaacaaaaatgttacaatagtaagagctacaacagtaacatcaacaaccacgtcctaccccacgagtggctcattctagcaaaattgacaatgaagggcttgaaagcgatcgcatttaggaggccagagctcagacgacgtccagctccgaaccccacaagccttgtcgtgaccgcgcccccgcaggcggggggccccctcgcgggtcacccgcaggggcgcacctccaatttacccaacaaggtcgcatgccccagcctggctctagtccccgcccagtctggggcgcacctgtgcagggcgcgtgggcaagcgagggcgggcggctgcgcgccgctccgtgtgcacgttcctgttccggactttctgggcgtcccgttacgaagcctttcctcggcccttcctcaggtgcgcagcgcctccgggagccggtcccggcggcaccgggcacgacgccatcttccctcttttaagggcaccggggctgtgcggccgcggccgtgggctggcgttgccgcgctacggtctggccgggtccgcacgaccccagagttcggagcccgggtgcccggaagccgcactggaggactgtgcggcggcgatggggcgtccagccgtcgcggcgagacgcagagggaccaccccattgcacaggcgcggagactgaggcccgccaggggccgcgcctggcacgatcgcccgtcggggacctggagccccggacagagagggtacgtttcggagccggagtcccgagacgtcgccccgccagcgacttgctggagcggtaaaacctgggcacggctccccacacttccccgctctcgacgaattcgagctcggccgatttggcctgatnnnnnnnnnnnnnnnnnnnnnnnnnnnnnnnnnnnnncggccgccccgcggtgaacccaggtgcccattgacataca

SEQ ID NO: 454252 - DNA, 1008 bp, Homo Sapiens
  misc_feature (931)..(967): n is a, c, g, or t
acagcgggggggcaccacgacgcacgtaccgaggcggggctcctcgcgggcccccactttgggaaaccgggctaggaccgcgcacaaagtggttcgacaaaccagacagcgctccaggaaccggacccgggaagatggggcccaggtccccaaaaagcccgggggaggaccctgcctggcaaaaatccctaaacgttaaaagcaaaggagacccgcgcccggctctcctcaggcccttgggcccagaggatcctccacttctccggaagcagctccaccacggtccgcgcgtcccctgaaagcaccgtccggaggcagaagcagcacggtggagccaggacgagatgccgctgcccggcgcctgccgcccggggctgttccctgcggcccctcctctgtgggctctggagtctccggggaagccccagcgggccggggttttccgtggaacctgcctctgccccggaggggtcctctgcagcccgcacggccaggcgctctgggtcgtggcggtgaggtgccccttcctcggggcgtccggggccgcgccctccccacgccaccgcagccccagacagcgcgcgggtctccggcgcggaggccgcgctacccctgcaggtcggagaagggggcctggcctccctcgctgcagctggacgagttgctcagcacggccgaccccgggctcgactctgagctgctcaggcactgggccgagccggacgggccgagccggacggacaggctgctggccggcacccagccctccttgccagtggtcgggtccctgacgtaccagaggccctcgtcgccctcctgcaccagctccaccacgtccccgctcctcacgcgcagcgcatcggggcctcccttctcgtggtccgcctcgaccgctctcgacgaattcgagctcggccgatttggcctgatnnnnnnnnnnnnnnnnnnnnnnnnnnnnnnnnnnnnncggccgccaccgcggtgagatccagtcgcccatagactaca

SEQ ID NO: 454253 - DNA, 862 bp, Homo Sapiens
  misc_feature (776)..(812): n is a, c, g, or t
ctcttcctgtgacatcatttttaaaggatgaattatcaagaaaacataggagccaaagcaagaatccaaaccaaagattggagagacttaaacttgctgcttccaattgaaaaatagtaatagagtatgctggcgattccaagaacaaaagaccaagaataaaaattaccaaaattaaggaatttgctgttttttcccatcttacgtatagacctaagcatatagcaaccaataaattgattctggctaaatagccaagataccgcactgaagaatgcatgttcacttctctatttacttcttccagtcttgtcattgctaaatagagacaatgactaaagcaataacgcagtgatttacacatgtaaccagcaatgtgggcttttccctcacgttacaaaaattaaccgcttgtatttcatccagtatatccaatgtatccgcaactcctatttcaacattttctcttgtggaaattttgtttatagtgatctgactcggccgtcgccaccaacgcgctctcccaaccctcggagtcagttccaaaaccaaaccaaaaaggaggagagcagacaaggcttcagcctgcgactgagaacagggaggcggcacgccttggggaaccgagggcccgaggccatacgcgctaatacaggccagtgtcggcgtaaactttctccgttaccggcccggccgcgaccgccatgtttccgccgccgaaatccgcgacggtacccgctctcgacgaattcgagctcggccgatttggcctgatnnnnnnnnnnnnnnnnnnnnnnnnnnnnnnnnnnnnncgccgccccgcggtgagactccattcgccctatagtgagtcgtatacatc

SEQ ID NO: 454254 - DNA, 1029 bp, Homo Sapiens
  misc_feature (170)..(170): n is a, c, g, or t
atagtcaaattatgtccttgctgaaattaatatagtagcctctcattgactatgacaggtccggtgctgctcagaatagtgatgtggttgaccagctaaaaggctaaagatggctccagagacagcagtgcccaggaaactctccaacacgccctgcatgttgtcagtgngcatccccaagcagtcctccgaaaagtgatagcattagttacagttgccagataaatgaagagaattgccgaaagagcttgaatatttaaagcatcataaaaatcactggcaaaaaaatggcgctttcctctttatgtctttaattagtccaccacagaaccgtccagttcgctgcaattcttcacaatccccatgtcctcctcctccgtgacctccatcatggggcgtatccccattcatctgaacattctctccacctgagtacatattctttcttttgtcagaggatggaagactcttaggaggctctatcctaattgctggatcccattccccaggtggaaggacgatgacttcatctaggaactcatcaataccagcaatcaggtcgtgcctgtcttttgctttataagcaatgtcatggaacacctcatcagacatcagggtggcaatggctctgccaatctcgtggtaggacttggctttccccttaggacctaagagaatgaacaagaaccttgtgggcacaggaacttcagtcagggcacccagcatgacagcctgctgtagcctaacaaaggcaatgaaaggagtatccaaaaagtcaacctccccaacaagcacgttggaagcttctgcatcacgtggcaattttttcatgaacttattcttcagctggtccttctccggtttatcagaaatgtcattcagactggaggaagtcagattcctatgggtcatggctgggctaccattatcagggttggtaaacatcctacttgcactggagactgtcttcccaatgtcagccagggaccgaaggttggatttcttggtttgatgccggtgcttccggag

SEQ ID NO: 454255 - DNA, 619 bp, Homo Sapiens
  misc_feature (535)..(571): n is a, c, g, or t
aaccctaaaggtgaaatacagcaaattggataagtcacattttaagaggatattgtacacatccgagaaatacccttggaaagttcaccaatgattccttctggcataaaaactcctagtcataatctggtcccgccattgagaaatccattccagtttcatagtgcaagaccatggaagcgggtatccacctgcccaccattactgtaagtatcgatagactttgaaacagtgatttccagagtctgcaaccacaacatgaccatctgaagttagggccaggccttgggggccatagagtgggtcagcagatgtgttaatgtaggacaaaaatgatccactcccatcaaaaacctggatcctgctgtttccccagtcggccacaatgatgtttccatttgaatccactgctacacctgttggagcattaaactgcccatttccttctccatttgagccaaacttcaacatgaattctccttcctgattaaacaccgctctcgacgaattcgagctcggccgatttggcctgatnnnnnnnnnnnnnnnnnnnnnnnnnnnnnnnnnnnnncgccgccaccgcggtgaatccgaggtcgccctatagtgagtcgtataa

SEQ ID NO: 454256 - DNA, 838 bp, Homo Sapiens
  misc_feature (92)..(92): n is a, c, g, or t
  misc_feature (751)..(787): n is a, c, g, or t
ccggacatcatttatatgaccactatttagccactgcctggcatctctaagcatgatccgttcttcttcctttcgagctgctttctatatcnacccccttgccgattaacttcattttgaagtagctcttccattgcctcctcctcccgcaatatctaaaggtgtatctccttcactgttgacagccccctacatgtgctccttgaccaatcaaaaactctgcaatatcaagatatccacaggaagctgctgcatgtagtggtatccagccttcattatcaggttgattaatatttgctccattttctaccagaaacttcacccatatcaacattgtcatcaatgcaagcctggtgcagggcagtgagtccgtccacattggcgtaattgatgtcggcgccgcggtgcagcagcttgaggacctcgtccgtgtcgccgctggagcaagcagccaggaagacggcgccatcgtcgaacttcaccttggtcttctggcgcttcaccaccggaggctcgaggtccgtctcggagccgatccagcgtttcagctgctcgttccgcttctgcttcgcgtccgccatcttcatcccctctcctgccgccgggtctggaaaggaggaagcggggaaggaaggttgtcctgtcgggctgggggctcccgggaatccggaggccagcagtggaaccgcaaggctctacagggcagatctccgctctcgacgaattcgagctcggccgatttggcctgatnnnnnnnnnnnnnnnnnnnnnnnnnnnnnnnnnnnnncgccgccaccgcggagaaatccaggtcgccctatagtgagtctatacatca

SEQ ID NO: 454257 - DNA, 913 bp, Homo Sapiens
  misc_feature (112)..(112): n is a, c, g, or t
taccagggaggaacatcttctatggtataaatcatgtctgatcgctgggggtccagactacctgacatgcttcagcggcacgatcgcagtgcccttcctgttggccgatgcnatgtgtgtggggtacgaccagtgggccaccagccagctcattgggaccattttcttctgtgtgggaatcactactttgctacagacaacgtttggatgcaggtaacccctgtttcaggccagtgcttttgcatttttggcccctgctcgagccatcctgtctttagataaatggaaatgtaacaccacagatgtttcagttgccaatggaacagcagagctgttgcacacagaacacatctggtatccccggatccgagagatccagggggcatcatcatgtccatcactgatagaagtagtcatcggcctcctcggcctgcctggggctctactgaagtacatcggtcccttgaccattacacccacggtggccctaattggcctctctggtttccaggcagcgggggagagagccgggaagcactggggcattgccatgctgacaatattcctagtattactgttttctcaatacgccagaaatgttaaatttcctctcccgatttataaatccaagaaaggatggactgcgtacacgttacagctgttcaaaatgttccctatcatcctggccatcctggtatcctggctgctctgcttcatcttcacggtgacagatgtcttccctcccgacagcacaaagtatggcttctatgctctgcacagatggcagggaaggcgtgcttctggtagccccgtggtttaagagttccatacccatttcagtggggactgcccaccgtgtctgcggccggatgtatcggaatgctcagtagcgtggtcgccagcatcatcgagt

SEQ ID NO: 454258 - DNA, 850 bp, Homo Sapiens
  misc_feature (755)..(791): n is a, c, g, or t
tccctggctcctggcccggcaggcgcgccgcggacctcgggctcccggtccccgccggagccgcctagtcgcctcggcagattcccaagcccgaggagaaggcgggcaggacaggtccgggagctcggaaccagccggcggcaaaggggcacgaccggagctgcccccggcgaggttccgcagcctcggcgcccagcgcctggggcccggctcccgagagcaagcgcaactccggagcctttgtctggctcagcgctccggccgcccggtcccgcggcgctccctgcgcgcccagctcccctgtccatgcccggggccgggcgctgcccggagcgcgcgcctcctgcacggggattctgctcgccgccgcgcccgaccgggcccgggtccccaagcagtcccgggaggaggcgcagggagccgacccgagagagcgagcgagagagcaagcgagccagccaaggagcgggcgcccgacgtccccggcgagttcagcgcggctccgggcgctcccagccctcctccccgcgcgccgcggccgccgcgctcttaaagggccagtgtgctcccagtgcgcggacccgggcggggaccgggggcggtgccccagccgcaggcttctcacaagcaggtgcgggcggccgaggcccgacaggtgggcggtccgtttacgcttcccagacggcaggaaacctctccagcccaccccgcgccccgctctcgacgaattcgagctcggccgatttggcctgatnnnnnnnnnnnnnnnnnnnnnnnnnnnnnnnnnnnnncgccgccacccgtgactcccgtccccatatattacattcatagcgggtgcggtgtgggg

SEQ ID NO: 454259 - DNA, 968 bp, Homo Sapiens
  misc_feature (46)..(83): n is a, c, g, or t
cgatgtatagatcactatagggcgactggattcacgcggtggcggnnnnnnnnnnnnnnnnnnnnnnnnnnnnnnnnnnnnnnatcaggccaaatcggccgagctcgaattcgtcgagagcggggctctgcccgaggtgcggcacccactgtgtctgcagcagcaccctcaggacagcctgcccacagccagcgtcatcctctgtttccatgatgaggcctggtccactctcctgcggactgtacacagcatcctcgacacagtgcccagggccttcctgaaggagatcatcctcgtggacgacctcagccagcaaggacaactcaagtctgctctcagcgaatatgtggccaggctggagggggtgaagttactcaggagcaacaagaggctgggtgccatcagggcccggatgctgggggccaccagagccaccggggatgtgctcgtcttcatggatgcccactgcgagtgccacccaggctggctggagcccctcctcagcagaatagctggtgacaggagccgagtggtatctccggtgatagatgtgattgactggaagactttccagtattacccctcaaaggacctgcagcgtggggtgttggactggaagctggatttccactgggaacctttgccagagcatgtgaggaaggccctccagtcccccataagccccatcaggagccctgtggtgcccggagaggtggtggccatggacagacattacttccaaaacactggagcgtatgactctcttatgtcgctgcgaggtggtgaaaacctcgaactgtctttcaagggcctggctctgtgagtggctctgttgaaatccttccctgctctcgggtaaggacaccatctaccacaatcaggattcccattccaacctcgaccaagaggccaccctgaggaacagggttcgcacttgctgacgactggcctgggtcattcacacgaac

SEQ ID NO: 454260 - DNA, 955 bp, Homo Sapiens
  misc_feature (383)..(420): n is a, c, g, or t
  misc_feature (785)..(785): n is a, c, g, or t
  misc_feature (877)..(913): n is a, c, g, or t
tctttcctttaaagagttgttccatttaaacaaatatattcagttacgtgagtccccagcatattgagcaaatcaactttttaatgagactgatcccaccaataggaaattattcccacttctctgcaccagagcttcaactacagaatttagccacttgagaagttacgtcaggtaagaagaatttattaatacttagtgatgtaacagtttttcttaaataactttaaacattatttctccaacagttttcattcaggtagcagtgtctaaagaacataatttttaagatgaatatacaaagtcaccttagtcaccaagatgctactttgccaacatggcctagcgtctgtcttagttcgttttcccttcatctttgcttnnnnnnnnnnnnnnnnnnnnnnnnnnnnnnnnnnnnnnacctagaaggtgaggcaggtgattgtcttcatgagctatctgagagactgtggcagaagatgagaacagaatgacatactgaaagagccaaacccacgcacagaatgcgttccctttgttatgatccggtggaatgcaagctgggaataggataaaatttggaaatccggctctgtgttgatgggttaaggcattcagactccccagtcattttaaagaatacttcctgttcctgtagtttcctggcaaactcttcttccagtgtctttttcctaggtctcaatttctctctccactcctttaattcttggctatgttcctcatctaactccttcagtttctgagtctcatgctcaaccaacaangtggcattttttcattctgcagctgatgcagttcgcggacattggctccacacgctctcgacgaattcgagctcggccgatttggcctgatnnnnnnnnnnnnnnnnnnnnnnnnnnnnnnnnnnnnncgccgccaccgcgtgagcgccattcgcccatagtgatctaca

SEQ ID NO: 454261 - DNA, 883 bp, Homo Sapiens
  misc_feature (368)..(380): n is a, c, g, or t
  misc_feature (794)..(830): n is a, c, g, or t
cctgccttcgcaaagacttgctgatgcgggcagcctgcctgttggtcgcactgttggccagcttcaagtattcagccacgttgtcgtcccgggctgttttgtgccatcttgatttgttctgtgagcttccggatcttctgctgcacggtgacgccatggcagcctttgtgcgctgagggtctggtgttccatccccagagtctgtgtggatgctgccatcggtactggaggcccctgcactggatgtttgggcaaggctgcttacttccaaccgttcgatccaaaccccctgtcaggcagtctgctgattttgcttgccaccaagctcatccttcatttgtgcactgccagagaaagcttggatggtnnnnnnnnnnnnntcacaacctctcttggctataagctctttccatttgttccagcttccaaactgcagaggagctgtggcatagtctgtcactgctgcacatacttggtttccgagaataacgctgcaaatgaggacagctaccactgggaatgctttcccccaccaaagagccgcagtgaagcttctagtggatcctgggcttctcaccttcacagtctcagagaagtgactttcacaaaacaggcaggtacagccgcaccacattaataccctcgcatagccaatcctccgcagtgcccggctcagcctatgtatagtttcaattctatctcctgtagcaactcttagagctttctatatctgggagcctaggagaactcagtccgctctcgacgaattcgagctcggccgatttggcctgatnnnnnnnnnnnnnnnnnnnnnnnnnnnnnnnnnnnnncgccgccaccgcgataacctccattcccctatatgatctatcattttttccct

SEQ ID NO: 454262 - DNA, 992 bp, Homo Sapiens
  misc_feature (61)..(103): n is a, c, g, or t
  misc_feature (908)..(944): n is a, c, g, or t
acagggccgtgtttaatgggacagctcaggggacagcgccaggcccagggggtcccgggannnnnnnnnnnnnnnnnnnnnnnnnnnnnnnnnnnnnnnnnnnctggtcactcacggggggtgctggggatgcttgggggtccctgtgcaacaactgagggaggtcaggggagacacggactgggggttcagtccttccagtcctggcagatgcagagaccccactcccaggacaggtggtgcgtcctgtcatcgtcggtgaagagggacaccaccagataggggccccgcaccagcgcacccctcggcgcttcctccaccggagtcacaaactcatactcctgggcgctcgggccatagctgcccaccatgtagacggtcttgtccacgcgcaggccccggcggtaggtgtggtgcagacacttgaggccgctgacaatctccctgtggaccttgaaggagatcttcactctgtaatcaacaccttccttcaggacaaacacctggtccttcagaacagccaggtcccctgtgagatccatgacgacgggccccggagcctgttccgacaggagtgtcagcctggtcacctgcacattgggcaggcttgggtccacggccggtggcaggggccccagcagcacccgcttgtacttggccaggctcctgtcgtccgggtccagctgccggatctccaagaggctcttcctccccggcgcccggtactcgggcacagcctcatccaacacctcgtccactgccggtggcccaccctccttgtcagccaggaggactggtcccttccccacagggctggagcctggatgaagtcccccacccctgccagaccccagccggggggtcggcccgctctcgacgaattcgagctcggccgatttggcctgatnnnnnnnnnnnnnnnnnnnnnnnnnnnnnnnnnnnnncgccgccaccgcggtgaactccaggtccctatagtgatctatacatca

SEQ ID NO: 454263 - DNA, 888 bp, Homo Sapiens
  misc_feature (809)..(845): n is a, c, g, or t
cattgatagggagatccgatgaccacatagataaggtctcccaagggcaagactggctatcagcgcgtggtgccatgtcctcatacatgtggttctggtgaatgatcctgagcagagttgcattccccaccattcccacgatgaaaatagtacaagatatcacagtgttaatgtattttgaaagctgaagtaattttagtctgctgtgggcaatagttgtgcattgagccattgctgggtaggaccaaattagtgggttgatgagtggtaaccaggaagctgagctctgtgccacgaaaagtggtgaaatcatccacatgattgcttagatttgtgctgtatctctcaggattatcactgattacacatccaaccagtgccagccaaaaggatgccctgaggcaaagggtttccatcttgaggcaaatttgaggaaatatctcttattgcacttgtgctgcttttacaccttcacttttttttcaccgtggagctcggcgtgcgcagacagctgccgggtccgcgcggcgcctgggccagaggaagccggagccggcgagggtgggtggcgcggagggtggccggtgtcccgggttccggcgcggcggcggcttcggctgcacagcttccccggcttcagaaaacttcctgggcactgcttctcccggggaggtcttcgctgggaccccagtcccccggcgacgaccgggtgggatggatgaagcctctccaccgcctctccacaatcgtcagaccagcgggatgactccgctctcgacgaattcgagctcggccgatttggcctgatnnnnnnnnnnnnnnnnnnnnnnnnnnnnnnnnnnnnncgccgccccgcggtaaactccggtcccctatatgatcatcatc

SEQ ID NO: 454264 - DNA, 1037 bp, Homo Sapiens
  misc_feature (13)..(13): n is a, c, g, or t
  misc_feature (21)..(21): n is a, c, g, or t
ttggccgaaggcnccaaccangagcacctgtgcagaaagttgctgggtgctgtcatgctggtggcctacatagaaaagggattagactctgtacaaagattcctttagaggcatattcatattgcaaggctctgctgaagtggtctaaataagccttagaagcagaaaatgcagccagctgaggagtgggtttgccagcaggagcccagaagagatcgtgacgatggcacctttctttctctccaccattcccggtaacacaacatggaccatcaaactagcggcggcaatgttcacatttatgatgtcccagagcttgtcctcggacagctgagtgaaatactgcgggtagggataaaacacacccacgttatttaccaagatgccaacgtctttgtccttcagggcttctcgaattggaaggtagatctcacgaccgctgctgaagtccgcaactataatatcagtttccactttgtacgtgtcggctatgtctttagcaacaacctgcaacttctcctcgttccgactaatcaggattatattgagacctcggcttgctaactcttcagcgtaggcttttccaatcccatctgttgcaccgctgacaacggcccatcttccatactgcttgatcaagtctgctctgctccccaggcgggggataaaatgcagcctgatcaggctgtaaaagtcacagatgacagtgatgctttttctggccgtataccaggctccaaccaaagctagagcttccatatagcaattgcaagacctggcgatttccctgtacaagaggtagaaactgtcaacagcagccatggcaaccttctctctgccagttctgggccgtcagcagtatgtggctccgtccttctcttaaggccatctgcaggccggcaaagtcttccaaaccggtcccgccagacccgcgcggccgccgcccccgtctcggccgccggagctgctgccgcgccgcgccctcacgtgacccgcgtcgctctcgacgaattcgagctcggccgatttggcctgat

SEQ ID NO: 454265 - DNA, 868 bp, Homo Sapiens
  misc_feature (777)..(813): n is a, c, g, or t
gtctctccccgtgttctgaagtgcctgcagctgggagatgaacttggtcttccatgctctgaagttggcctcaatgctgccgtgcttgcttttaaccacgtcgcagtcgccctccgcctcgactcatcacacgatgcacgccaagcatccagagccacttgtcaacatttttgccaaccttgttgaagtggctagcataggcagaattttcccaggccaaataccgcatctctcatacccttcaggtaagttttgccaaatcgaaaatcaatggatgcttcctctaaccatttgcagaaccactctgcactttcggttggtaggccgtcagtgtatgtcgcaaccaggaagacacagacatttttactagtcacctcttctatcagatgatcatctggatcatattcttttagattaataatggccacaggcagatccagggacgtaactgcttcagcaagaactgcttgcaaatcccgtgcatctcgatgacaatctggacacaaatccaaaggctaatgctaacagcaaagcccagataaatgtcaaacctgtttatccataatgatattaaaggtgaggagaggtcccatgtatccgcagaaggatccatcctcctcagagccgacaggagactaggatctcggacctggagagcccaaaggttcgcactggtactgcgagacgcaccgagctacctcgcggcgttagcgccgtaccgagtggctgcaggactccgctctcgacgaattcgagctcggccgatttggcctgatnnnnnnnnnnnnnnnnnnnnnnnnnnnnnnnnnnnnncgccgccaccgcggtgactccaggcgccctatatagtctatcagtcacattcgtc

SEQ ID NO: 454266 - DNA, 849 bp, Homo Sapiens
  misc_feature (215)..(215): n is a, c, g, or t
  misc_feature (758)..(794): n is a, c, g, or t
  misc_feature (808)..(808): n is a, c, g, or t
taagtacgagtaatatcaaactgataaaaatattggaagggtaacccttgaagagctgaacaggtttttctctggctactcgagcatcccagcatttcacagtgccatcagtacatgctgaatatacactgtcacaggaatttgcaaatctgactccattaagaagtccaggatatccactaaattctcgtagtacatttaaacctttcctttantcatatattcctgattgatccattagaacataaaacagcaaccaagttttcctttcctgccttggacagtctttgatgtgtctataccaagaaggtaagtgggctctttggttcctaaggaacatttaacaatgtgcagattagcaaattgttcctcaatcttttccatgtcaacagcagcatccaagggtagtaaaactccagcaagcccactttttaggtatttactcaagagaaatgacaacttatgtccgtacaaacacctgtacacgtgttcatcactattttatttataatagccaaatacctctttagatagcccatgtggtttaaatgatataatagaccagttgctggtatcataccacatcccatactacgggtcgtctcttcccaagtgaaaatctgctttctggcctacaaaaggattatactaaacccttttagtggtggcgagagtatccgtggagaggaaagagcaggaggaaacaggtctttccccccgctctcgacgaattcgagctcggccgatttggcctgatnnnnnnnnnnnnnnnnnnnnnnnnnnnnnnnnnnnnncgccgccaccgcgntgagcccgggcgccctatatgatctatactcgatttggcgc

SEQ ID NO: 454267 - DNA, 699 bp, Homo Sapiens
caagtgagtctttagttgtagataaattctgagaattcatcctggcatcccttacacctacaatgcatcatcatcaactttttctgtaccagcacaaataatatgatcattacaattaatatcaaaactgataaaaatattggaagggtaacccttgaagagctgaacaggtttttctctggctactcgagcatcccagcatttcacagtgccatcagtacatgctgaatatacactgtcacaggaatttgcaaatctgactccattaagaagtccaggatatccactaaattctcgtagtacatttaaccttcctttatcatatattctgattgatccattagaacataaaacagcaaccaagttttcctttcctgcttggacagtctttgatgtgtctataccaagaaggtaagtgggctctttggttcctaaggaacatttaacaatgtgcagattagcaaattgttcctcaatcttttccatgtcaacagcagcatccaagggttgtaaaactccggccagcccacttttaggtatttactcaagagaaatgacaacttatgtccgtacaaacacctgtacacgtgttcatcactattcttatttatgaatagccagaataccttagtagcctcaacctgtaccggagaaaacgccggctgcgcggcggcttagagcggtcaagtggaacccgct

SEQ ID NO: 454268 - DNA, 480 bp, Homo Sapiens
  misc_feature (21)..(21): n is a, c, g, or t
  misc_feature (30)..(30): n is a, c, g, or t
  misc_feature (53)..(53): n is a, c, g, or t
  misc_feature (59)..(59): n is a, c, g, or t
  misc_feature (91)..(91): n is a, c, g, or t
aaaacacggtccacggggaanttggcaaancctgaactccccattaaagaagnccccgnggataccccactaaaatcctccgtagtaacanttaaaccctttcctttaatccatatattcctgattggatcccattaagaacataaaaacagcaacccaagttttccctttcctgccttggacagtctttgatgtgtctataccaagaaggtaagtgggctctttggttcctaaggaacatttaacaatgtgcagattagcaaattgttcctcaatcttttccatgtcaacagcagacatccaagggtagtaaaactccagcaagcccacttttaggtatttactcaagagaaatgacaacttatgtccgtacaaacacctgtacacgtgttcatcactattttatttataatagccaaatacctctttagatagccatgtggtttaaatgatataatagaccagttgctggtatcatac

SEQ ID NO: 454269 - DNA, 684 bp, Homo Sapiens
cacccgagcgcccacgagcaccagcacttcctgcaggaccaggagtccaacttctcccttctcccgttagcaccagctggtccaggggggccaatgggacctgtcaggccctcgtccaccagcgtttccaggggctccctcagggcctttctcaccgacgtcacccctgtcacctttgggcccagcgataccagctgctcccctctcgccaggcattccctgaagacctggagggtcctgagccccagggtggcctgctgggccagatgcacctttgggaccatcagtgccaggagtgccggggagcccacggggaccctggaggccctgggcaccgggagagccacgttcacctgggaaacctcgttcacccctgggacccacgaggccaggggctccagcttcaccgggaacaccctggtcacctggttttccaccttcacctgggggaccaggagggccaggaagtccctggaacccagatggcccaggagcaccctgctcgcctcgttcaccagcaggtccctgcagtggaaaagaaaaggtgagctgagccagtgttccagagaccctgagagccacagctagttagggcccaggggaggtcagcagtgtgggcagcacaggcgtcttcctgcaccactccgctctcgacgaattcgagctcggccgatttggcctgat

SEQ ID NO: 454270 - DNA, 1193 bp, Homo Sapiens
  misc_feature (776)..(776): n is a, c, g, or t
acacacaacttcagccggctgaacagactcacgcagctccagcccatcttgctgacctaattcagaaaagaagtgctacagctctgtgcctgtcatctttgcagtgtagcattttcaggtgatctaggaaacagttatttttatgagcaaataagagaaacaggaatcatgatggggatatatttaacagacccagtactggataaaacttaaagccagtttctattcaacatagtgaaaaggtcaccttgcctggctgagaaaagcagcaaaatatcagctttgttggtttcagttaacctcttagcccgggctaatctcttttccttgatgttcaaaccaatttgggatatctaactctaaagagagacacactgtactcatggtagatgacaaggaaaagaacatgaaatgtctcaccttcttcttgatgcttccagagacggtaaagaacaggtccaagaaaagctcaaagaaagcaaataccagcagcagcagtagcaacagcagcaagttgccaccagtttgttatgaaataattaccttgaagactaaaaagaagaagatggctgctgatatattcccccgtaaaaagccagccaactccagcagcaccagcgtccagcagtaccaccagcagaatctcagtaacaacaaccttatcccggccccaaactggcagggtctttatcccaccattagagagagaaatgcgatgatgttcaataatgatttgatggcagatgtacattttgtggttgggccaccaggtgggnactcaacggttgccaggacacaaatatgttttagctgttgggagctctgtgttccatgcgatgttttacggagaacttgcagaggacaaagatgaaatccgtataccagatgtcgaacctgctgcttttctcgctatgctgaaatatatctattgtgatgaaattgacttggctgctgacacagtgctggccacactttatgctgccaaaaagtacattgtccctcaccttgccagagcctgtgttaatttcctggagaccagcctgagtgccaaggaatgcctgtgtgcttcctcttccagagctgctgttcgaggagacagaactgaacccagggtgctgggacgtgattggtggccaggcgtgattaggctcaagtctgagggatcctgggattttggattcccgaaactagaa

SEQ ID NO: 454271 - DNA, 1074 bp, Homo Sapiens
  misc_feature (916)..(934): n is a, c, g, or t
  misc_feature (986)..(1022): n is a, c, g, or t
caattgtcactgtgtaccggttcagataatcaaacagggacccgtgctcatgatagtcagaaacaagccacagctgtgtccaggtgccattatctttattgtcagcagcaataaatccaaggatgttttcatggcgcagcatgaccgtctggtatatctctgctttcgctgaaccaagaccgttcttcaccgagaagagaatattttcacagccacatcaccacccctccagcggccccgccatacttccccaaaccgacccttgccaataatctcttgtaaaacgatgtttcgggccactgtgcgctggacaaagagggggtaaccctgagccagaccctgaggtggagagatcgtagacaagatcctggagcgtcttgtctttggagagacacatctcacatgagggatcttccatgtccagtctctggcggttgtgatagacacgctgatgatagttaatgacaaggaatacaatgatgatgatgaggaacaggaggaacaccgggccggcgatgatgcctaccagctccaccgggccccacatggacgggtgctcaggctccttgaggtgaccactgggcaccctcaagtcgatcctgttgcagtagtcagtgtagcagcagtgggtgttgcgcaggtcctccgagctcaggcagtagaagggcttcccggcagggaccagctccactttggggatgcaggtgcgcacatggtgctccatcccatccagattgaaaatggaaaccatgcaggccccatctgtctcacacgtgtagttggcctggaggcagctggtgcacgcacacagcagagcctggaccccccggggcccggacccgccgctgccggcgagcaggaggacaacaagggggaagaaggaggaggctccggccgactccgccatagtaaccannnnnnnnnnnnnnnnnnnagcccaacagcccgctctcgacgaattcgagctcggccgatttggcctgatnnnnnnnnnnnnnnnnnnnnnnnnnnnnnnnnnnnnncgccgccaccagcgataagccccgattcgccctatagtgagtctatacatcc

SEQ ID NO: 454272 - DNA, 953 bp, Homo Sapiens
agtgtccggaagttcccgttctgggcaatcctggccttgtgtaatacagtaggtttaaaattatgttggcaaatgttcatgtttggttatgacagtagatttgggaggcccagatcatcttgccccgcgcccactgcccctctgcctgctgttgtgaagcggcagcacctccagggatgcgatgcccgcgctctccaggatattcacgtccacgctcagcctcccggacagctgctggggccgcacgctgatgctgtgctcgtacttgcccaggcgcctctgcagaagctcctcataactcaggaaaaaggcggctttgtctttgctgggaatcactgcagaagctctgaatatttcagtcgccctgtctctccattttcttctgtggttttattgccgtgttgtgctctgtttaccctatgcaccactcttgcttttctgctctctgtaatttcggcctgatacaccttgtctccaataagcatagtgaagttggtgatgaaagctgcagctggaatctgcatctggaactcaatgtcctggtcttcagaagctctgttcagcattctgcaggaaaccgtagtgaaggcataacgggaaatgatggtagacttcactgagaattctgtcatcaaaggtttggttttcagcctctgcaacagtctgacttgcctcgggaccctgagtccatcctggtcacgaagagtggccccagctctgcgcctcttcctgcgaccccacacacagggacagccccaggcacagccccagcagcaggagcatggcggggcgagggcgcgggacgcgtcggggacccggcagggacacgctttgcagcgcccagggctcacagccactagcccgctcatcgacggaattgcgagcttcggccgatttggcctgatccataacttcgtataatgtagataaacgaagttatgcgcctgcacaaa

SEQ ID NO: 454273 - DNA, 796 bp, Homo Sapiens
  misc_feature (710)..(742): n is a, c, g, or t
cattttgtgtttcagcatacacatttttctcaacaggctattttgctgaaatgttttcagaaacttctagttaacaataactgatgtcttatacttaatagattttcagtaacttcgttaaatgaatgtcaagcacaatgctaatgctgatatttggaaatgatgttgaagtttcaataaggacatctaacgttatggatggtaattcagtcttactgtaaattactacctgactctgaaacttagtaagagtaaatgtagctctgtaagaggaataataaagatataattgtcaaaaaaagtttgttcttgtgtcttggctcaaattcccttgtttatattttaaactcatattctgaagtctttttccagaagtgaaacttgttggcttcaagtaccctcagggtccatctcttgcttcattatgtacgccttctatagatcctgttagtaggcaagaaaaagggggcatgtgtgtgcatgcactcccagccgccgggatgagctgtcctttccattccacttggctcctcaccataacaagtcttggatattttgtgtcatagtactttgaaatgtccaagagagaaataatccttttttgctattgtttgaaccattcagactcaacaaagacattttgtaaatgatgacatccctttagaacatccgctctcgacgaattcgagctcggccgatttggcctgatnnnnnnnnnnnnnnnnnnnnnnnnnnnnnnnnnatgcgccgccaccgcgtgaactccgggtcgccctatagtgagtcgtatacatcg

SEQ ID NO: 454274 - DNA, 1156 bp, Homo Sapiens
  misc_feature (134)..(231): n is a, c, g, or t
gggtcttaaaataacctccagaacaagttgcacctttgaccggcccaatcttctatcccctaaccagggggttaaaaggatgcaaaccgcactttaaaagggaccttttactccccggtccaaaaactaaacannnnnnnnnnnnnnnnnnnnnnnnnnnnnnnnnnnnnnnnnnnnnnnnnnnnnnnnnnnnnnnnnnnnnnnnnnnnnnnnnnnnnnnnnnnnnnnnnngcactctatctacctatacctatatattttacttgtatttctaatcttggactatgtaattacttcattcacttgtgtgttttaattttcatggagagagaagagaaagaaagattttccagaaaaagccaaaactgtgtgtgctgtgtgtctgggtgtgtatttaaataacataaacaaataaaaacagtgccacatacttattgccagtgcagcaacaatgtaaaacaaaaacaaacacaataattctgaatgttcctaatatctctttgatttataaagtttaaagtgactctttactcagtggatgtgggcttaaagtaatcatgattaacatgtttaacatgaaagtagagtatacaactttatctcatgttctaaaacttaagaaatttcattgtactcagattatccacttactgtgcattcaaatcgctttaattgaattctatctcacaaatccttcatttaaatggttgttccaagtttaataaaagagtttcttgcaatccacaactcgagtcatttgtatcttgtacagtaaccaagacaagaagcatacataactgcttctgggcacaaataaatatctccctccccaccctccccccaaaaaggttctatcctttctgtagcagccaaagttgcaatctttcgggaccagcaagctagcaacggtttctctccaagggtctgagaatgtttatcgctgctaaccatcccctcacctcatctgtatgatcctgtcccttggtcatgtcctcgaagaaggtgggacgtgaacatagaaagtcccctcctcagagaacctagcaaggtcgtggttgccttgtttctggtctccatttgttggagtctcccaggaacgttaagagagaaatgctgctttaaatactgttaacttttcttctgcctcaacgccgct

SEQ ID NO: 454275 - DNA, 814 bp, Homo Sapiens
agcgggtgctaaggctgcaaggcgctgaggggagaggcgccgccgtcagcgccgccgcagctgggacccgttagagcggaagcgccgccgccaccgccacctttgctgtcccccggcctctagttccccgcaggtgggaggtgggagccatgtcgaaacggctccggagcagcgaggtgtgcgctgactgcagcgggccggatccttcctgggcatcagtaaataggggaacgtttttatgtgatgagtgctgcagtgtccatcggagtctagggcgccatatctcccaagtgaggcatctgaaacacacaccgtggcctccaacactgcattcagatggttgagaccttgtataataacggtgctaactctatatgggagcattctttgctggaccctgcgtctattatgagtggtagacgtaaagctaatccacaggataaagtacatcccaataaagcggaattcatcagagccaagtatcacgatgttagacgttcgtccatcgcttgccctgccgggatcgacgatcgtgtgattgccaacagatcttagcaagcaactccattcgagcgtgagaacagggaatcttgacaacctgtctgacgactgtatatcttatacgggagcaccaagccacacttctttcatcctgacaacaggcaacaccccactccatgtagcactccaaagcagggcacgatcaccacaggctgacatcataggcagtcatatgcgcgccagacccacggcaccacaggatcaagtgcgaaaactcccgaaacgcagcagcgcctgacagaggcagagaacc

SEQ ID NO: 454276 - DNA, 692 bp, Homo Sapiens
  misc_feature (562)..(571): n is a, c, g, or t
ccttctttctttcgcctctcatcatcatctttttcttaactctaccatgcatccatagtaaggtgtacacattattattacatatttcaattttattcagctacatccccctttaccagatattcggcattcgtatctggattcttgtcactcgcagtcacgatatatgtttacctactgtctatgcttgcttatgatactcctagtgcatgtttacgagatatcaatgtcagatgggtttgtcagtcgtatgtatcaggtctgcatctgcctgttgtcatgtcttgtgtcgtcggaatctgacccttgcctctctgataccatagcaggggttttccgcggcttctgttgttcgaggctgctggtggagttcttgctgtggttgcgggttgcccagaagtcccccgcgaggtgctgtccagttccccacggtgctgaaatcaacgcaccgaccgaaggactcacgctgcccagccaatggcgctggaaaatttccgctatcgctgcgttttgtggttgtccatccgtttgtcctttcctccccttcggtcctcttaaggcnnnnnnnnnnctgttcatgtgctctcgctctcgcttactagcactccgctcatcgacgatgtcgagcttcggccgattgtggcctgatccaataacttcgtataatgtatgctaaacgcaggagtcgcctc

SEQ ID NO: 454277 - DNA, 1082 bp, Homo Sapiens
  misc_feature (922)..(960): n is a, c, g, or t
  misc_feature (1000)..(1036): n is a, c, g, or t
ctcttttgtgcgtcttctttattggcgcccgtcttgtccctaccttttctcagtggggcgttcttggtgatctgtgttggtcgccttgccctgcttcaggggtcacccgttccatccttggtgcacttcaggcatgggttcagtgaggcgctctgcccgttcctcagccctctccgtgtggtagggttacacgcagcgcagacatggcctcttggatctgtcagacccaggccttttagctctgttaccctggccccagagaggctttcctcgggcccccacttgccctttgtgggactcactcaacccaaccctgggttgggaccttgaagccgagggaatgacaactcttctgaagcaatgggttccgaccctgggctcagaatcaagttccttttcgttttcggacagcgagggcctctgggggaacctccagagaagaccagctccccctcttccttctccctccctgggcagaaagcaggggcaggaggctcaaagcttcatccttactcagcagcatttggtttccaagatttctgtgtagggaacgggttcagaaccctctaagtgagagcacggcaggactccctcccacttgggaggacactaggagccagggctgggggatgggaacagcgaggcaacagcccaacgcttgaccctctcaggggccttggctgagccagtctcctcatctgtctcccaggttcaggggagcagagacaacacggggagaggagatggctcaggataaggcacccccacagagaagggcagggagagtaatggagagaggaatcatgaagcaacgacacactcccactctgggaaggagatggaaaggagacagcacagagagatagagacagagaaaggaggggctgggagacctggaggcctgagagaccctcactccctnnnnnnnnnnnnnnnnnnnnnnnnnnnnnnnnnnnnnnncgctctcgacgaattcgagctcggccgatttggcctgatnnnnnnnnnnnnnnnnnnnnnnnnnnnnnnnnnnnnncggccgccaccgcggagtactccgattccctatatgatgtatacat

SEQ ID NO: 454278 - DNA, 1370 bp, Homo Sapiens
  misc_feature (41)..(77): n is a, c, g, or t
agacagatatataggggcctggattaacgcggtggcggcgnnnnnnnnnnnnnnnnnnnnnnnnnnnnnnnnnnnnnatcaggccaaatcggccgagctcgaattcgtcgagagcggtaagtcaaatatcttctttaagagtaagggcattcttccattgtaggtatttctaattgactttataataatttgaacaaatcttgaacaagatttaaagaatttataatctcccaaacttaaaattgtattctttctggttttttatttttatgtattaagattatattcaaaccacttaattatcttcatgacataagtttgtgttaatagaaaattatacagaaaaaaacatgatttgttcctctgtggaaagatatgcttcaatgagttaaatacccttgaattttggttctcatttcttatttggacttttctgttatgtacctcaggggtcttaaattctaacagatgaagtagtcaaaggggtataaaatacttgaaaaaaattaaaacttcaaaagggacgaatttctctgttaacttttgtttatcctatactgacttattttgaaattgtgaaaaaacaggcagctaccatataaattggtatctatgaaaatactgattactttcttcctgtgattttcactgttaagaaaactttgtcttgaaatgatggacaatcttaatacttgttcagataaacgaaatgtgactttcaatacctttaccatttgtatttctttagggaaatattttaataatgattgtaaaaataaaagaaatatggttgagaaaaatagaagaaattaagatgaaatttgaacagttgtaatccacagtcccatttttccctctattttattgccttctactaagttattgaaggcccagatctgcaaaatttacaagctactaattcattgtctcctttaagaatttggagcaaaaattattccgactatgcggaaatgaattcacatcatcatggcaggttttgactatgagggaattcaggttaggttcaaatagaataatggtccatggagaaaaatactttctgatttttcttcaagttggatggcacaggtttttctttatttaaacacaacccccaacaagtcctcctgagaaattttgccttcgaaaaagaagttttataacagattgcctgtagctacctttataacttcggtaacttaacttgaccaaactgtctcaatatgcctttaaactcctgatttaaggtgcttccagaaattattcatatccatcattccaaaataactaactgaaatcgatcttaacatttatttccctttacaaaccaagagtcatttccaaaagtcttaattatccaaatatatcta

SEQ ID NO: 454279 - DNA, 1001 bp, Homo Sapiens
  misc_feature (52)..(88): n is a, c, g, or t
ggatgtatacgactcactatgggcgacttggagctcaccgcggtggcggcgnnnnnnnnnnnnnnnnnnnnnnnnnnnnnnnnnnnnnatcaggccaaatcggccgagctcgaattcgtcgagagcgggagcttggggacgcacggagaggtgcgtctgggtgagtgggcggcgccgtgcgccgagggcatggaggagggagcgctgaggccggcgcgtgcgccgtggccggggcgcgccccggccgccatcgagactgagggcaggaccctcggcaccttcgatgattgtacgctgggtgctcgatgggaggagggtattgcatgggtgagctggttcagactccttgaaaaatcatcgtcactcatttcttcctcgcggacgtcctgcccatcgctctgagaccggcgccccaagtagagccagagtagttcgtacccagccttttcacgtaactcgggcgaggtggttcttctccgaattttttccgtcaggcccagattagcagattttggggtcagctgggagaggcgttaacttttcttcgcacactcttgctttgtgcgctcaaccacagtctgaattctcgcagaggcgttccttgagtagcccttggccacactgctcacctccctgcagaagtcaaagccccagccctcctctgcgaatcccgaggccagcctggttggttaccttctccccttcgccctttactccaggccgtcgagcatcaaacactagcctccacacgtggaaaagaccctgactcccacagtagactagtcttatgggagtcctggctcttgggccaggctgcattaggaaaatggaaaccagactgtcttcaaattcttctgcctagccttagccattagagagaggtcctgctaaagatggactgcaaatgcgcttgatggaaggagatgtcaattccactgaagtcctcatttctgctgtaggtgatattatgtcgtgactttaggagaagtaatggtgatacc

SEQ ID NO: 454280 - DNA, 877 bp, Homo Sapiens
  misc_feature (769)..(805): n is a, c, g, or t
  misc_feature (845)..(845): n is a, c, g, or t
cagatagtacaggcttcacatagaatgttgttccatcttcatgagaagcacatttctaaggtttgctgaatttaaaccccttcattgagatcatctagatatctgtttaagtctacaatatatttatgtacactttgaaatgctaaataaaatctggtcacaatttctatgttgttttcacgaaattcgttcatctaaatcctgtagctctggcttagcatccagtttgctttcccataattctggacccttaaaatagctgaaatcaaatatgatatctccatatttctgttgatcagctctgtcttttaacctgaacacagcaggaataaactcagagagtctcaaaagttcagcaatgatggcattaccacaggaaacaatccttaggattgcttggccacagaggttgttctcggctagaaagtccaacattgtgaggcggaccgactactctgtgcctggacactggggatgattaactggcctcagagctggtgtctgtatattattagatgaaaccaggtgtgcagagagattggctcctccattaaagaacctgtcagccgggccgcgccacggcgcacgcgcagggccggaggtcgcgcgctgagccggcacccagtttccacccctccctcaaggcggcggtcctcttctatccgcagtcccggacctggagcgggtcagaccccgacttccgcacctgactccccaggcggtcacatccgctctcgacgaattcgagctcggccgatttggcctgatnnnnnnnnnnnnnnnnnnnnnnnnnnnnnnnnnnnnncgccgccaccacagcctggttaaactcccccatgtgggcnccctcattatttgagttgttagtagaattttc

SEQ ID NO: 454281 - DNA, 877 bp, Homo Sapiens
  misc_feature (798)..(835): n is a, c, g, or t
ccttgtgccacctgcttgcccgggaaaatgaacacttgtaaacacaagtgcaaaagcaccttcccattgttggataactctctccaccaaggtagtaaagctggtatcttgactttcccgattgtcatacatatacttaaccgagcttggcaattgtctgtgtgtctgtttcagattcgaagtcatagcctttgctttccgaaactttttcaagtctttgtagttggtgatgattccattgtgaataacgataaattcattatgttttatcagagcgctgggggtggctattgacaggactgggttctccatgtgttgcccaacgggtatgagcttattccaaggtgtacatcaaattctatatccaaatccatatcttgttgcttgtgaacttcttcatccagtgccttaacttttcctttcttcttaataagctggattttgcaggcattggcttcccaatctttatcattgcctccatcaaatcccacaccagcagaatcatatcctctgtactccagtctctgaaggcctttgattagggtctccaggatttctcgtctcgttcgaggaacatggtagtttaagtaagcaaatataccacacatgatgccggagacacggcccgcgaggccaggggcgagtggctggcgggatcgggggtgcacacacgagcttcggtgggcaatctgcgggctcgggggccggggtggcgccgacacgactccctcggggatgcgacggccaaggcacgctcccgctctcgacgaattcgagctcggccgatttggcctgatnnnnnnnnnnnnnnnnnnnnnnnnnnnnnnnnnnnnnnccgccccgcggtaactccgagcccctatatagtctatcatcc

SEQ ID NO: 454282 - DNA, 702 bp, Homo Sapiens
atggaagatgtagagtttgaccttggaaaaggcttggaagtgtcatcactggttgtgggtttacctgctcgtaagcccagtgtctttttgattaagcgtggtgtaaagaagcctgtgatgccagaccacccacccctcagcagtgccactgcccccacccgccaccacggtcgtcattacagaggttcctctgtgcaaagctccccccatagcacttgggtggcaccagattcgcctcttgctgggcaggagtgaaagagaacccatcagcatgctgtagagaagcaacagatgagaagttacccgtgagttcgtatttcttatggggctgattctccatttctcggaaggagctgctgcgtttggggggtgtaggagcatttctcttcttcatgaaggagctgaagaagccccccttcctatccctggtgaagcatgtctctttggcatcttccaagaggctgctgggtgacttgtctctttgctttcgaggcagtgctggggatccactagaggcctgtgcacctctgatgaacctggtgctaaactggaagcagaattttctgtggcatcttgtgccccttcaatgttctccttgttctccacctgtttcttcagtgtccgagtcttggaaggaagtataggtagccggggcaggtatgccgctctcgacgaattcgagctcggccgatttggcctgat

SEQ ID NO: 454283 - DNA, 904 bp, Homo Sapiens
  misc_feature (820)..(838): n is a, c, g, or t
tgtgctccgccagttaggactgacatagtggtgccggtacctggtgcctctggacccggccttcctggtagcacagcaccttcaaagtcgggcagccggagttcttcccctcctgcgccatcccaggagggccccgtccaggagggcctccgtttcttttcttccttcccctctctgacagcctccaactggaaggaaatcctcctctgaagtgtgggaaagagaggcctggggtttcaggtacctgaacagcggggtgtcctgggcctcactggggaccagggccgtttggatggtgaagtgcgccagggcctccttcatcctcgccaccttccctgcgggcggctctcccacctcagaggcgcgctcccccttgggccggtgggcattgggccagtgctgtaagatcgtctccggaggctggtagagcttgttggggttcaggtgtccagagatgtagaggtagacgtcctcccggtggtctttctgaagccgattcagaagtttcttcagattacacagggtcttcactcctggcgtctcgcagtgcttcagattacacagggtcttcacgcctggcgtctcgcagtgcttccacttcaggtacactccccacagactcccatgcgtaaatcacattaatagcaccagccttcagggtcacagagacaaaataaaggacttctgacttgatgaatgtggacgcgctgagctttgtggtcatttataggagcgcggaaaggcagcatgccagggaatgctctgaagtgcggctttttaaaatcaccctctgaacagcctgcaacctgccgcttcgtcnnnnnnnnnnnnnnnnnnnttcaggcttccggagactccaaccccacgctctcgacgaattcgagctcggccgatttggcctgat

SEQ ID NO: 454284 - DNA, 850 bp, Homo Sapiens
cacagatgatggtaagtttgggattcctcagggtccaaggtttgggctgttgtcaggcgctgcagaccccggcgttgcccgtgccagcaggctctccccgtgtaagctgctgtgccagccgtttccagggcctgcagctgcgcctggtccgctcctggcaccgttgcagcctccgcacccggcgttgcagtgctcccagcactgggcccagcccggtctgggcctgttgggcagggacttcaggttgtgaccgctcaggagttggcgcaggggccaggggggtcaggagcatggtggccacagtcttggggctccccgatgtggggcccagcaccactaggcgcactgggccagagactgggatggcagggctctggggcaaggggtgtaattcttctgtaggggaaaggcggcggcgagactggcttctgggtgcttcgggtcctccgctgactcttggcaggtggtccccgggagaagatggagggcactgcatcaggccgcaggtagcgcacaccccagcgccactggaagcaggagggtgtgaagtgctcgctgcacaagtgctggtggcagctgggcacccagtgctcacagcccatgttctgcagccaggcctgcagccggggaccatccttcagtgggaacttgtagaagctcacagggcggttgtctgcacccaggcggcccgcagtgttggagcagttcggcgccctgcagtacttgggcattgctatccagcccccgctgagttttgccgggtcagcggctgcactttggttctcgcggagcgccgcctaaccccgacccccgctctcgacgaattcgagctcggccgatttggcctgat

SEQ ID NO: 454285 - DNA, 1000 bp, Homo Sapiens
  misc_feature (222)..(222): n is a, c, g, or t
  misc_feature (913)..(949): n is a, c, g, or t
cagcgtttgccaggccggcccagcggacgtttggcgcgcctgtgttccttctcgtcttttactacagagctgcttgacggcttctcctggagcgatcacttggctggcgtgctggtccaggcctctcatcctgtccacagacccccttttcactggcattccattctcgaagctccttctgacaggatgggggaggtggccaggtgcatagggataacttcnctgatcattatctgtttcttgaacaaaaaatgcttctccattatctcccgaatttcatatgcaaatccacagattccccattgatttctatgtcaaccactttctctcgggagcgcaggaccccccatcttcccaaagcggacgtggaaaggggagcattggaggtttccattgggctggcggatgacaatgatgtcaatgcaccctgagagtgtggcgggattcagccccttgtagagctccttcacggtgacaaacacctggccggctaactgccccacgtaattcatggtctgcactctgctcatggatgaggtttctagttgtcttctgttaagcaggtggccttgaattctggcagctcacgcttcagagttaccttagctttcagaggaaagtctcatctccccatcagaaggcacattgtcaggacctggctcagcttccattaacttcagataaaggcccctgctcatgcgaacctgggtctcctggtggattctcctttttcttctgattttctagttctcagcaggctgggccactgctgggtggctgctgttaggacaggcatggctggccccggtcttgcccttcatctctcttccctcctgttccttccctcaggctgcctcctcgcctcccaccctccgctctcgacgaattcgagctcggccgatttggcctgatnnnnnnnnnnnnnnnnnnnnnnnnnnnnnnnnnnnnncggccgccaccgcgtgagctccgagtcgccctatagtgagtcgtatcattc

SEQ ID NO: 454286 - DNA, 1114 bp, Homo Sapiens
ttttttttggtagaggaaattttttattacagcagggaagattttaatacatgacatctaaaatctctatagatgcttccatgttaaaaaaaatatatttatacaggtaaaaacgatcgttttcaatgctttgaaagtaagatactgcacattttttttaacctgtccaaaaacatcaaggtgggaggtcaggcattaataaacattattaaacatactccttgataataacattttgatacagatacatcttttagaggtcacaatatcatggaccaaatcgatgttaaaaaccattatcaacactataaaatgtgagacagcatattacattttttatggagattctctcatattatattctaataaaaaatatcctaatcttcatatattggtaaatccatacttgattcctcagccatcctttgtctaagtgtttgaggtcttagagtaaatggtattctcttttcatggtcatcaggctcactctcagggtcatcttcgctctctctcttcataccagagatggaggaggtatgttgtacatccaaagaaatatagtcatcttgggcctgggccaattcacgttttctgcgggctgcctgaataaaagctgcatctgggatcttaactgttgatgaaagttctttttctccaagagagctagaactgtcagaagacaaaccctgatcatccttactttctgaggagtgatgtattttatcctcttcatctgtggacacatcaagggttctggattctgagccttcgtccgcgcggggagccgctttggtggcacgccgggagctcgcccagacccggccccggccacgagggccccgaacccggtggggcagtcccgccacctgcgcgcggcctcctccagagggcggctcttcctccgcagaacccgggaccggaagttccctcggcgccccaggctcagcaggcgactcctcggcgccatcgctgtcgctggaatcagccgcgcgctgccgaaaagtccttttcggcctgtgagccatggccgaggcccgagcgcccggcgccctagaacccgctgaaccgcaagccgcagcttcagtcggggcgagggcggagattaatttcatta

SEQ ID NO: 454287 - DNA, 702 bp, Homo Sapiens
agcggggtctcgctgagtgcccagccgcccggcgcccaggcctggggcaccgcgagtgccgaaccttcggctggacaccaagatgcctggcgaacagcaggcagaggaagaggaggaggaagagatgcaggaggagatggtgctgctggtgaagggtgaggaggatgagggtgaggagaagtatgaggtggtgaaactcaagatccccatggacaacaaggaggtcccgggcgaggcgcccgcgccgtccgccgacccggcgcgtccccacgcgtgcccggactgcggccgcgccttcgcgcgccgctccacgctggcgaagcacgcgcgcacgcacacgggcgaacggcccttcgggtgcaccgagtgcgggcggcgcttctcacagaagtcggcgctgaccaaacacggccgcacgcacacgggcgagcggccctacgagtgccccgagtgcgacaaacgcttctcggccgcctcgaacctgcggcagcaccggcggcggcacacgggcgagaagccgtacgcatgcgcgcactgcggccgccgcttcgcgcagagctccaactacgcacagcacctgcgcgtgcacacgggcgagaagccgtacgcgtgcccggactgcggacgcgcctttggcggcagctcgtgcctggcgcgccaccgacgcacgcacacgggcgagcggccctacgcttgcgccga

SEQ ID NO: 454288 - DNA, 816 bp, Homo Sapiens
  misc_feature (735)..(771): n is a, c, g, or t
ggagacttgaattgtggtttatttagaagctgggaaggctagtgggaggagaggagagggagaggttgatacaaaattgcagctcaataagttctagtgctctgtagtatttcaaggtaaatatacttaacgacaatctattgtatattttcaaaaagctagaagagagaattctgaatgttcccaacacaaagaaatgataaacatctgaggtgatggatatgctgattactgtgctttgatcattacacgttgtatacatgtactgaaatatcactttgtatcccacaaatgtgttattatgtattaactaaaaataaaagggagaaaaagaacacaaaagtatttttttaagttgtccatggttgcatacaaatgagtggtacacatattaaaaagcagttaaaattattacaaacttcaacgaaattaaaaattgtgccactaaacatacaaaaaagctaattacttcgtgtttcattaaaacttttctgaaaaggcaggcctctcacctcagactagtttcatgcctatactttccaacagagtttctaaaataacatcatttttgtgctgccaagcaaaaagtcagatctgtttcaatactgctaagtcatgctccacagtgaaacagcagcagcatgtctgggatccccttttctagtttgtctgatggaacctggtactcacaaggccgctctcgacgaattcgagctcggccgatttggcctgatnnnnnnnnnnnnnnnnnnnnnnnnnnnnnnnnnnnnncgccgccaccgcgattgactccgattcccctatagtgagtctaaa

SEQ ID NO: 454289 - DNA, 1021 bp, Homo Sapiens
  misc_feature (915)..(951): n is a, c, g, or t
tgcgctctctttcttctcgttgcctctgtgtctgttttggtcggaacacgttatctcacagcgtcagttttcgtcccgttgtgtttgctcggcgttgggtggttgttcctccctcctttgggggtcgccataatttgtgtgtgcgggcccctcccccccttgttgtttgtcccgctcttattgtcgggtctcatctccgttcggtagtgtagctctttatctatgtggttgtggtggtgtcttgttcggtttttgttctatgaaaaggtttgattttattaaaccttttaataaaggtattagtcctcaacagactgctcatcggaatcacttctaaagttaaaaaacatgactaaccagatacctgggttccaagccacatttactgaacggaagcctgggcatatctaacaacttgtagaagttctatgtgtgattctggcactacttgctgtttatgcaaaaatagactggagaacctccaaggttccttttaactttaaaaacgaacagaagaaaaacataaagcaaaattgaaaaaatatagcacaatgtggagaactgaattgaataaagatacgatcagggacagaagcgaaatcttttatccatgcaggtcttcagcatgctatatttacactttttttattgctccactctctcaaccaaagacacacatacaaacgtccttccaaagcatgttgtaagttatttacatatttcttatgttacatgcctcaatctacatgtataatactaaaagctgagtttaataatacaaacataaaatgctattctgagaggtagttttagttttatcactgaaatagtataaaaggtagaagttttatatttaaagtgttgattggatgccccgctctcgacgaattcgagctcggccgatttggcctgatnnnnnnnnnnnnnnnnnnnnnnnnnnnnnnnnnnnnncgctcgccccccggtaaccacgtggccctattggtcgactgcgcgtcggcggtggttgttggtgttgtgg

SEQ ID NO: 454290 - DNA, 1167 bp, Homo Sapiens
gacacttattacttattacttattgtctcctacctccctctctcatcaacgacaatgtatagtatatcacatcttatgactcgtcatcaattacagacatggtacacatcagcgtccgaggaaccacgcatccctggtattctcgctaacacaaagacggctgcgcgctaaacttctcccaatttccggaacctatattggtcctcaccaccatataaccccggtgttcccttccaccctacctctcgttcccccaacccaacgccaatgttggaccaagggcttccttccatgagcatcataggagggtccattgtttgacagcacagtccgggtctgtgagataataactgccctttcagaggcccaatgtaaagaacagcagcgccttgattccaggagtgataagagccccttctaattcaagtgcgtcaatcttcagactggttcatctagcttcttctttgtgtgttctttgttggatctctgggtttctttaagagagaaagttcttcggggtgtctgatattaaaagtcttacagatgtcagaaacagctttgaagactctatcagagaaattcactttcaccgttcacatacttcatgttgggaaagctgcaggcggagcagttttgttgctgaggggtgaactgaagcttagcatctgcctgaataccatacttatctaaggtccaatgtgtcttcagaagccaagttctcttcgttttcccaccagagagcatggtcagaccaatctttttttacatcgagtttctccaccagcttaagcatcacgcctccaatgtgcacctcgccggtcactctcagggtgacatcgcggttcaggtccgtcacatgggcactcagttcccacgtcccgtccgcgtagcagccatctggcatccttatcccgtccagagccatggctccttccgcgcgctcctagcgctccgggcccgggactcgcgcggcaacaggcgaggggctggaggctcgcggggcggcggtgtctgcgtccggttcctcggctggcgaagcgctgcctgtggccggagcggctaatggagtcccgtcgtcgcggcccctcgcctggctccccgcgctccaccctctccccgccccctctgtccgagcctggctgggctgggcgcgctggcccccccgct

SEQ ID NO: 454291 - DNA, 935 bp, Homo Sapiens
tttctctggagatcgccttctaagggtagggattttgatttcctgcgtgatcttgagacttacttcttttggatgggcttttagattttttcctctcctttgacttgcttcctagttgttttctctttaacgatttcaataccccccttacttttctttttatcagacctatgtctagtccgttctttggatctgcttttacttcgtttctttgtagtaattttattgtccacaagttcaagtttcccctttgtacttgaagatctagtactagacctatttccatttcttgccttttcatgaatttccccctcttcttcagagccagactcataaccttgcaaaatgagccccataccagactggacctttccttccattaactcattatcaagttcggccttaatcaaggctctctgtttttccaagtcttctagcaaagctaaatcatcaagtttagttctttttgctggagacataccctctttatcagaagcatcaataatctcttttcttttgtgtttcttatgtttatgcttatgtttatgttttttatccttgtcttcttctgaggaatgtttatgtttcttatgtttacttctgtgtttatgcttcttttttttgtgacgactgtgcttattttgagactggtcttctgatacttctccattttcttcatttatactcttttcagaattagcatcttccatctctggctgctcccgtagcgactgggtctccgcggcggccatcttgaacttcctgactcctcggcgtcggtggcggcggctcccggacggtggagggtaggggaagtggaggaagaaggaaaagacgctgccgcgcatgtgcccgctctcgacgaattcgagctcgccgatttgcctgatccataacgttcgtataatgtatatacaccaaggtatcgcctccac

SEQ ID NO: 454292 - DNA, 822 bp, Homo Sapiens
  misc_feature (27)..(27): n is a, c, g, or t
  misc_feature (42)..(44): n is a, c, g, or t
  misc_feature (68)..(68): n is a, c, g, or t
  misc_feature (73)..(75): n is a, c, g, or t
  misc_feature (80)..(80): n is a, c, g, or t
  misc_feature (737)..(773): n is a, c, g, or t
aatccatagaaatcttcccactggatntagtgacaggtgatnnntgtgttccacagaaacgtcccaantatgnnnagaanagccaaaaaggtccatctcgactttcaatatgatcaaatttgcactcccaagacggttcaatagagtacttttcatcaaagtaaagttcaaatgcactgtcttggagcggctttctatgatgtagatgcattcccggtcagggggatacttgctgggatagttgggagaggtaaagatacctccctctgcatgttttgtccaagttccacactgcactgacttctgtgtttctgaggtggtttgcttttctgttcctttcttggttgccccagacaaatggaggatgattaaacttgctacaatgtgaagcacgctgcgcccatggatcatgtctgtgcgttacaccagaggctccgggctccactaattccatttagagacgggaagacttccagtggcggggggaggacagggtcgagaggtgttaaagacgcaaagcaagaaggaaataaaggggggccgagagggagaccgagaggaagggggagctccgagcccacgctgcagccagatccggatgagtccgtcctccgccccgggcgggctctcgctctcgctggccctcagcgccgcgcagccagcagcatccccaccgtgacgctcgcatcacaccccacgctctcgacgaattcgagctcggccgatttggcctgatnnnnnnnnnnnnnnnnnnnnnnnnnnnnnnnnnnnnncggccgcccccgcgttaccccagtgccctatagtgattgtatacaatcc

SEQ ID NO: 454293 - DNA, 750 bp, Homo Sapiens
  misc_feature (665)..(701): n is a, c, g, or t
cagtcgtccactgaagggggagatggttactgtccggccgacgcgcaggatgggaagagcgtttgtgaggcctccgtccacccacttctgccctttgtattccactagcttcagtcctgcataaatgggcacaaaactgctggctaggaggaccttaatgaggtcctccctggaggaaaaagtgggagactaagtgattttctctggttttggcgttggtgatggatacgtgcagtcggttctgggccagctcgtgagcgctgggaggaagaatcgactccatcccacttcttagttgggccatgaagtcataaccgggcgttactgccccgaaagactgccttctgatttcttcggcaaacttgtaggtaaattggttacattcctctattttttctggtgctgttagcagaacagaagcaaccaacgatcccgcagacgccccagcgaaggctttgacatccttcacaagttttttgccatgtctgcaaagtgcagatgctgcccccaagtggtaaatgcccagaaatccacacgctgcaaatgataggttgatgtgcttcattctagctgtagcactgcgagcaactgacctttaataatcctcattttctgtgccacgcaccgctctcgacgaattcgagctcggccgatttggcctgatnnnnnnnnnnnnnnnnnnnnnnnnnnnnnnnnnnnnncggccgccaccgcgagagaccccattcgccctataggagtcgtatactc

SEQ ID NO: 454294 - DNA, 690 bp, Homo Sapiens
gctggggtaaaactaagaagcagccatttcccagacctgtaaatccaagggatagaaaagccacacagcccaagggccttggctttcccacaggcactctgtggattttcagctctcagagatgccacgcggtggccctcagatcctggtaccagggtatccccagcagcatacatgttcctagactagacgagagtataactgtcagccctgtttagaagcaggaggaagattcataactttgacaactggacactgacaccgtgagattgaataaagagccttagaaacatgcaggtgaaagacaacccgtacccctggcagtgtgtgcttgtgaatgtttgaggatttaacagagactatggcacctgggagccatttgtcattgaaaagttaggaggtttaaaacccccataaaataaccgaagccctgaaacctctcagctggcttccctggaaagatagctccaccctggttgcagaacaggagggaaaagcctcttctcctgattccaggtgggcacccatttccttgcgctgggagcacagtgacaggctggacatcctcccattagctacccggcctaaagctgagcacaaaactagtgtcccgattgagttttctttatcaacaagcaaacacagcaacctaaatcaaaatgcctttttttggccaggtgcggtggctca

SEQ ID NO: 454295 - DNA, 647 bp, Homo Sapiens
agcggggggtcggtgtggggtagaatggccgctgccgccgtcacccgcgggaccccgggagcacagactccccctccccccgtgcccctcaggccgggggtgaccttgccccctggagccctcaccatgaataccaaggacaccaccgaggttgctgaaaacagccaccacctgaagatctttctccccaagaagctgctggagtgtcttcctcgctgcccgctgctgcctccagagaggctacggtggaatacaagatgaggagattgcatcctacactgatcacctttgagaagcatgatgagtggctgtcttgtgccccaaagactaggcctcagaatggctccatcatcctctacaatcgcaagaaggtgaaatatcggaaggatggttacctctggaagaagcggaaggatgggaagaccacccgagaggaccacatgaagctgaaggtccagggcatggagaggaagagttgggagggcagactagcccatccccccaccccagcctgtctcctggcagtgtctctatggctgctacgttcactcttccatcgtcaaccacaattccatcggcgctgctacttggctgctccagaaccctgacatcgtccttgtgcaactaccatgaacgtaccaggcccg

SEQ ID NO: 454296 - DNA, 1175 bp, Homo Sapiens
agcgggacggtggccgcgaagctagggccaccatggcggaccgcaggcggcggctccggccggggacgttggccccggtgcgcgagggcgtgaactgcaggtccagatgtttcacaaagcacaagaacgggctgaagttccccacctctctgcacagccggcagttggtatttccaagaaaggggctggacgacttcaggaagggctgcccgccttgcactggtctggtgactcaggtccctgtggagggctttctgccccagatttatcacagagctccccaactggccccaaagaagaggcagatcaagctgctcaaggaagcagacgtgctttccaagctctcgccagcccagcaggctcggaaggcattcctggaggacgtggaggcccacctgaccccacatcccttagcgctctacctgaatctggaagaagctatgcccatagagctcttatcaaaggtgctggaagtgcttgatcctgaccggaagctggaggacacatgggcttattgtcaggacaccaggaaaggaatgaaggaacccacgaagcttttaaaaaaacattctacccaagtctacctgggaccttccaagaagacgtctgtgtcaaacgcaggccaatggctttatgaagaaaagccacattaaatggatttgctccatgaacaatggtcctcgtcctggtcttcatgaaacatgtatgcaaagcagttagtgacttctgcaagtggggttacttacttttggaatttcggacattcgatgaacgagtttcatcttgaaaccagtttgacatttgactattgagaccaaaccaagccatgatgcgctccacacgatgaagctaaatcaggttcctctggagctaaagcgtagtgtggggctcagtaaactgcaggagacagagttcttccagaaaccaggctatgagaggaaactccagaaaccacagaatccttataagccaaagtgggtgaagatgaggtatggagcatggtatttgaaccccgagttgtggaaaaagcaaagagtagacgagcctctggttgaccctgaggtctcacatccggctcaataggagaagttttaaaaaggagctgcaggaacaggaggagtagtagcagaccttcacggaacagtgcctttaaggatttcaagaagcagaagtag

SEQ ID NO: 454297 - DNA, 554 bp, Homo Sapiens
ccgatgtcctgtacctctctcacagcgtcctccatgaagtaggtcgctacactcttttggcttcatcttgctcaaggtgtctgacctactggtagacgttaacccctcaagcacagtagtactgagccgccacggtaaggacgcgtgctacacatgcactcgtaggttcttttgcgtatgatcggtcgtcctaccctcataggaagcgagcgagctaactgctgcacggttctttcgttcccgcccacccgacgtggctaccacggtgtgatggctagcagaccagtggtacctatggtagcgcactgtatcgtatctcccgcattgtctgtcctcattctgcgtctggcgtcgcgcgtctgcccgggcgccggcagcgcggagcccgagcgcccgggctgcgccgcctctccctgggtcttggcgccggcggcgacggggctgagacgcggctgcgagcgccacctcctcggctcgggcttcggctccggggcgcccgggactgcgggaaaatcaaatctgcccgaagccgcagcctcccgccccccgccgct

SEQ ID NO: 454298 - DNA, 1008 bp, Homo Sapiens
aaacagggccgaatgccccttcggattaaggttccgcgccggcgaatccgcgttttgtgtctaattaattgccgtctgggagttttgcccggtgactttcccatcggggacggggggccccacacctttgaacaaagcctaggcctcccagggggagggagtaccccccctgcctttccggttgggtttcccaccgcccgtggaaagtaggccctgggtccggtggcggtcggaggttttttaatcccccaaccccgaggagcccatagatgggggacgcgaaaaggaagagccccccggggcttcctgggaccacaggaggcatcatttttgacccagcggatgttgggaggtggattccccagagactttgcagtgcagttctgctgtgtgtcccagagacgtggtgatgttattcattggttcatcgagggtcaggtaagaatctttgttgagttcacttgagatgttccatgatggaggtaggcactaattcagcattgagtgacagctttgtttcttgggcagcaagccccgcgtgcggccagcagcagcgcggctagcagcgccaggagcggcgggcgcgtcccgcggcggcgcggccggtgcattcctcctctcgctgaggcggcggcggcggcggctcccaggccgcgcgcagaacatccacgggctcttcccgggctcccggccgcctcgtcccggccgctggcgctcgcaggacgccggggacgtctgcaaagctctttgtccctctaacctgctccctcgcctccgcctggccgcctctggatgccgcgagcgcgatcccttcccagccctctggctgcagcctcgcctgggccggcgggtcagtcccaggctgtccgggtcgcaccagtgggcgtgagtcgccctgggtcggactccgagaacagcgcaccctgcgcccaggggctgccgtcccggggctccctcggcggcggcggtggcggctgctccagctctccacgctccctctctcccgct

SEQ ID NO: 454299 - DNA, 721 bp, Homo Sapiens
ggattcggctccgtcagccactgcgccctgttcttgtccacgtagcggatgagtcagcggatacagggcgtagaggtcccggcagagcacagagaactcgtcccgcaccagcagctcgccctcctgggcctccgccttggcctccaggcgcacctgctcctcctcggacaccaccttccctgccctcttgcgcagccgcccgatagttgggatgaagtgggactgcaggagctccggccgtgcacggctcacaatgggctgtgcgaacacagccagccgcttcatccaggaggcctcgtcaatgcccaggttgttgacgatgattctcaggatattccccagcagggaagttgaggtggtcagaggtgaacagctgtgcagggtgggggggcgccggcgggcagggcggaagggggtgcctcgggcccgcgctcccaccatcggggcaggtagctgcatagcatgggcagcgtgatctcgatgacatgcggcatctctgtgtagcgggcacctgactcggccagccccccaatgtctgccatgagccgctccagcaccgggatgtcgggacacatctcctccacactgttggggagccccaggatggcccgctcccgcggagacttggtggtgtacacggagcaggcgttgtactcgttcagctgcggctccaggaacgccaccggcatggctgctgccagacgggccaggcacccccgct

SEQ ID NO: 454300 - DNA, 580 bp, Homo Sapiens
  misc_feature (307)..(352): n is a, c, g, or t
tgtatgcattccggctccttgtgtagcttgtagtcttagtccactgatgtgttctctatagtcggcgtccaccaccacgagtaatgacttgcttgttctgagatcgttggagtcagtgtcgttctacaatatgtggatgtttgctacagaggcggttattcctgtgtccccaagactccggtctggagatgaatatgcagatgtgggagccgtttctggggtcaactcatgcagcttaagtcatctcaaggctcatctggcatttagatgggccaagacaggctcattcatgtccatgttcacctannnnnnnnnnnnnnnnnnnnnnnnnnnnnnnnnnnnnnnnnnnnnngcaggacgacctggacttcctgaagcggctatttctcaccttgaatcacacttcattttgttactttgctttacacccacagaatctgtacacgccaacactctccatcttaatgccctcagctcagctcaccgaccttaagcagctcctctttgatcacaggatgaacaccttggcgtttgctacaacttggcttcagcctattctggggcctcatcctactccgct

SEQ ID NO: 454301 - DNA, 897 bp, Homo Sapiens
cttctgcgggtttggttgttggaggtatggttcgtcatgggtcagcgcgactcgcggtggtgtcgttctctgtgtgggcgtggtatgcgttgtctcctgtgatggtctgtatgcgcggtgtctcagagggtgtacggcgcgatgtccctggccgttgtcctgtgaccgctgggcctcctcttgcttgtggtcggttgtggccgtttgcacggtcgttcgccgcttatgcaggctcatccgggctgccaagccggtcgcgatttcggcgcctgagtcgtggttctggcgcgtgcgctgtggattctaggttctcctggttgtccgaggtctcctgcacgcagtctgccggctatgctcgctccttttctgttgtgccgtctggactcttcgtgtctctcgaactctggcgcgttctctagcctcgctggatctccgtccgcgtctatggtgtctcgtgtttagagctctgcatgggtcagcgctatgatccagcctgcttcgagcgcgggtgaggtgtgtccgcggtggccatggtgcactcgtcagcccccggcgatccaccgtacgccctgtttagtcccgccccccctccgcgcatcttctttggggcgggccttccgccccgccggggccatgtttgttacccgaggggcgggcgcgaggaggcgggtcgggcgcggtcctgcgcggggttttcttaaacggagccggctgggaagtgaggtcgccagagaggtgaggtcgccaggttggctgcgaaactgtggctgaagtcttccctttcccttaggagcagagcttctctgtggagttaggtgtcgggatcgggccccgcggactgacggcgttggcgcaggcgcagccgccgctctccgcgcgccatggcgcccgcccgct

SEQ ID NO: 454302 - DNA, 671 bp, Homo Sapiens
ttggaagagaagagtttctcgacattcgcctttggtgacaagtcatagtcgctgtctgatctgtagagaaatgactctctgcgctggctgtgcccaggaaaggtggcgtgaagtaccagcccagcggaagatctggcctggggatccagtggactccgactctgggtgtaagggccattttcctcacatcaaagcactcctggcttacagtttgtaatagcaatgcttggaagcgttgtcacaagctcagtgtggtcggcctggaattaccatctccctcaggagtccttgccctttcactctgtctttgagacagtggtggtaactgtaagttgtcctgagcaacaccttctccctctccagaggtcgatcccaagtgtgttactggaagaactgtaggatttactcaagctacattcgaaataatctttaacattatcatcagccatcaccgtcatcacactcctgcttttcttcattatagaggtggaaaatatcccctcttaggatgtctgttattcaatgcagtttgctgacactttttaatacctcacagacctcctgcaatattccgcgggcacggtaccaggggagttttgcaaaataaccctctctcccagccgggagctcactgcatctcccttaccaccagagctgaaggattacccgct

SEQ ID NO: 454303 - DNA, 775 bp, Homo Sapiens
  misc_feature (26)..(26): n is a, c, g, or t
  misc_feature (40)..(40): n is a, c, g, or t
  misc_feature (58)..(67): n is a, c, g, or t
tgcacccttttagagaaatatttganttacacggatccanaatgtttgttttaggggnnnnnnnnnntcggttgccattacttcaataatccataacgtgcaatttgtcaaaaatacaaatcccagctccatcctagtgaaaactagagttcccaaagctatcccacattccttccccattcagtcaggtttagctagccagtaagtttccaaatccatcatggagcaaccttctctctgtcatcacaggttgttgatatcgtagctctgaggaacatctgagcttctgagacccagcttctgagatccagtaaagttcaacaagcattagtaggtcccagatggcacatttcagctgaacctggacaagtcactaaagccctatagtgcattctgaaagcctgggcgtgtcaccaggtatcctctttgtgagaccccgctgctccagtacattgatcttaagataccaacaatgatgtggtaaaataaaaatgaaatcctggggtgagagcattctcagccagtgtagctagtggatccagtttcctcagggactctacataatggaaattttaagttcctttgaaggttgagttccaaagctggccttcaatttcacctgttgtcccagctacttgggaggctgaggtgggagaagcacttgagcccagaagttgaaggctgcagtgagctatgatggtgccactgttctccagcttgggcaacagagtgagacccagtctcttagtaatctcagcacaggaaagaacccgct

SEQ ID NO: 454304 - DNA, 563 bp, Homo Sapiens
tatccggccccaagttttatatatgaagtgacttagtgactatatattgcttaggtatctgatcttaccaaataaagttttacctgaatagctgacttcagcgatgaagaatccaacaccacattaagataataccacaggagacaaatttataagcatttctggaaccctaactggggctactgtgtgtggaatacagtaaactgaactgacaatctgatcatcacaagaacaaatcctaatagtcttcacaaagaatatgaattcaatctctatcccacatcttttgctcaattttatatgctagcatttgtagatgttttcagggcaaaacaacctccctcacccaccttataaaacataccaaaatgattactatagtcatgtctatgatagggttaaatttgactcacttctttgaaattacagaaacgtatacacaaatatgtaattaaagagcaaatgtgtgatagtgagaaacagactacgcagggctgaatataaggaagataacatgagcctacaatgtgagaaacttacatactatctcatttaattccgct

SEQ ID NO: 454305 - DNA, 1381 bp, Homo Sapiens
  misc_feature (969)..(977): n is a, c, g, or t
  misc_feature (1328)..(1328): n is a, c, g, or t
  misc_feature (1338)..(1338): n is a, c, g, or t
  misc_feature (1353)..(1353): n is a, c, g, or t
tagtatgtgaagaatttattcgatagtcgtgatcatgtagtcctccattgtttggaagtgcagaccatggattcctatgcagcagatgggggtagtctgtttgtgcacatttatcctaagctgctgaaattcctccgatgtgaatgggccatagtaatctttgcctcctgcgtgactgtaagcatggcctccagtggatcagagaagcagctcagtgattgttctcatggccaaaaataaagcacaagggttaccggaattgaatgagccctgttcagggcagcacggggcatctgcaccccagctgggcagcatgaaccttgtattcaactatactcttcatggcagtagttggtggcaagcattcgcgtgcctctgtcacaaccatacgtagaaacacattaggtatgtctggaaagctacaaatcccacatccaagcacagtaccgtctgcttcatctgattaacacacacacaagaaagaaaaattacacccacagaaaactgagtatgtattgtagaaatgtagaggaaaaataaaaatattttttcaaatgtaattacttttaatatatgcttgtggaaggtctaatacaatgtatgctgtctctgtaatttttgctgtaaataactggagacggtgaagtacactgatttttcctatgtcctctgtttaagccataagactttgtaacaatttttttagagggggaaaatcaacaaagagccaaatatgtacttgcttcctttctgcgtgttatgtacttctcagttttttaatggaaactggttgtaacagtttaagcatcttgacgggtcattggtgttaagtgtatgcttctttttgtaatatgactgagaaagggacagggctgtcaattaaatctgctccaaagaatttgtattgaagattggcctaagacctgcaaactccatctataactaagtaaatccgaaaaaggaaatttnnnnnnnnngttgcctgagttaagtcatctttccttgtagcaaatggctttgtccaaatcctttctgcatggaatagcttaaggaaaacaaactccgctttctgatgaacaagatatttttgtacacatttatttcttgttaataacctgaggtcagaccactcgtttgctgttgccataagtgaccttccccaaatacaatgttgtaaataacctaggggaggtttggggagagactgagagggaggaaaatccaaggtgttcatggagctatagcaacacaggcaggagcaagttgttggaaactggatgcttttcctgcatcccaaatatggacttttaaaaggctagtattttatngatggttcgntttattatggattanaaaggtatttaggtttaaatgaggacct

SEQ ID NO: 454306 - DNA, 1173 bp, Homo Sapiens
  misc_feature (24)..(24): n is a, c, g, or t
  misc_feature (155)..(155): n is a, c, g, or t
agtagcatttaagaaacaaccccnaacactgggtagaaaatactcagttccagccacactgtattaaaaacataattgtacaacattgtaataaattagcctgcaattttcagtaactatgtttacccaaccgtgtaaccgaattataatgttcncctaagccatatgcatgtctcatatatacaagtattagtggtttttttgaatattcttcaccaactataatgggaggagaatctgcctgtattatctctattggtgtttgtaaaatgtgagacagagctcttagctcaagctgacctccccatgcagctgtgtttacaatatcttcacagtacttctgaaattcttctggagtatacatatctcctgtattagggtttgttaaaaatggcagaaagtcttccacatggctttgcatatactcagcgttctgacttctcaaggcaaccacagtcagaagcacaatccttttcctttcagttgatcttcaatggctttatacatacagtggccatcagatggaatctgtttaatttctaactgtctagctgccaatatttgagcaagtttctcactttccatatgtctggctcctgttaagttttcaatttcagcttcagctatccgttcttctcgctccttttccaatgcagctttcttttcccgtctctttttgtgcttttgatatccgaggtggctgattctcaagcaccaagtttgaaatgttaacagcaacagaatctatcttattctccttagtagtcagcttcaattgctccagttcctctctatgtttctgttccatttctttgttccaacttggccacatcttcggtgagctgcttcctcctcttcttgtcattcttgggaacagcattcttcatgccctgaattttggcttgcaactccttcttctctttgcgatgccttctcagcagctgctcttcctcatcaagctcttcggtcaataccgcctccatgacgaccaggtaccccagcacacgcgctagaagaaacctgcaccggctagtaggcaccttccacccctcaaccctcacccggggctccattggatacggctgggacccagccccgccttcaaggcggcaccggatctaagcaaagccactgcaaagacgagaaacttaaatggggtgctgcgcgtccgct

SEQ ID NO: 454307 - DNA, 645 bp, Homo Sapiens
agcggaggaagagactacttttaagtccaggagagagagggactcattgctctgagccagtcacctgggacctctgctcagaggaccgcaccaggaggctgcgcccaggattttgtcgggagccacgctgagtggcaagcaggaagagggacaggcatgcggggcgtgaccacagtggaggagacaggtggatgtggaaccacaggctgctcattcagcacctttgttgttactgtgaacgtgaatgtgggccagtatcaagagagtctctctgagtgactgcaccatggcactggcaccagggcgactattagccaggtcagaccactagacttcagtgcagggacctggttttcccttcgtttgcactttagtaaattgggtgggaggtttccttttggatctgttttgagactgttccagaaagaaggcttcctttcccgagacacttccataggcagcaatttggtgattcatttgcagcaaaatactggcttgttaattattttcctgcccagcgcctgcgtgctaaacaacagatgaggatgagcgtaccactgaagtctgaagatgtcgccattgaacggacagtgttttcatatgtttctaggttgtcttatgctacagtttccaagccagccccca

SEQ ID NO: 454308 - DNA, 883 bp, Homo Sapiens
aaacttgttccagggacacttacgcgctcgaacagtcgcttactttcgtccaggcgctcatccagaaggacacctccgacgtgcgctgcaccaacggcgaaccgccggttttcgtcaagccggagaaagtagttggagtgattggggcttcggggagttcggtctccatcatggtagccaacatcctgaggctcttccagatcccccagattagttatgcatcaacggcacccgagctaagtgatgaccggcgctatgacttcttctctcgcgtggtgccacccgattccttccaagcccaggccatggtagacattgtaaaggccctaggctggaattacgtgtctaccctcgcatcggaaggaagttatggagagaaaggtgtggagtccttcacgcagatttccaaagaggcaggtggactctgcattgcccagtccgtgagaatcccccaggaacgcaaagacaggaccattgactttgatagaattatcaaacagctcctggacacccccaactccaggggccgtcgtgatttttgccaacgatgaggatataaagcagatccttgcagcagccaaaagagctgaccaagttggccattttctttgggtgggatcagacagctggggatccaaaataaacccactggaccagcatgaagatatcgcagaaggggccatcaccattcagcccaagcgagccacggtggaagggtttgatgcctaacttttacggtcccgtaccccttgaaaacaaacagaacgacattggtatgggttggccgaatactgggcaggcaaaacttccactcgccaggttgaccgattactggggctccaaacagaacacccgattcgcaaatgcacacgaccggggagtc

SEQ ID NO: 454309 - DNA, 969 bp, Homo Sapiens
aaatgagagtcacatggaagctgtttaatgaagaccctgtgttccggagaaaacatttgaggccacaaacataagtgttgtaccaggtccgggggttgaaaaattggaagacaagtaacctagaaggagtgcaactcagttacccctttcttgcttattcgggaaacaccaggcttgacccaagcatgaaactgcagggtgaaccgcaaccatctgtgtctggcggggagacgttgttccccatggaccacacaccacgctgacaccagaggcctcttgtggagattccactgcctctggtgtcctcgccctggctgaaattctcgcccaggaggccagcaaagcctctggggcagaagttgtcaccacaactgtattaactccctcagggagagcagtggaattttccagggcagggggctcccccacaggaggaagagccacttcaggaggatgtgtctcagaactttgcagggacgtttcccccttgttccacctttaattttttttgcaatgatttccggattttggcctcttttgctgtgctaggaaaatccttttgatttgggtaggcaaaggcacacaggcgcttatatgcatccaatttctggcctttggagctcagcttcaattgttggcaccaggcccgcagaatgtcccggtgaatcagattaacaggtggcagtttagaaggtaatggagggattggtatcttcttctgaggtctggggttgtcagtgtgctctgcctttttcttagggcagagcactttactgcctttgacagacattttttctttggttctctttgctgatgttcctggcaaagcaattgaatttggttgattagaagcctgctgatcctcttccctcgacttctctgtggaggtccactccttgccttttgccttctccatacttgtagaagaagcggagcctcgcaacatgcttccaaaatggcccctccgct

SEQ ID NO: 454310 - DNA, 938 bp, Homo Sapiens
agcggacgagtctttccgcctccccagcccgcccgggagctgcgagccgcgagctggattatggtggcctgagcagccaacgcagccgcaggagcccggagcccttgcccctgccctgcgccgccgcccgccggggggaccaagtgaagccgccaccggcccgccatgcccgcccctcccagccccgccgggagccctgggcccgctgcccaggctggtcgcgacgtgcccgatgtagcgggctccggatcccagccgtctcccctgctcccggtgctctgcgagatctcccctgaccagatctccacagcccggacccgggggctggcccatgggccctagcatggccctggcgtcctgatgccccccaatgctccctctacctgaaaagcccaccagcatgcaacccagaacttgcgggcgcaagcgcgccagtgtacggacgtgggccagtgcagagccccagaaggggcccagaaaggccggagggcccaacaatggacccaagcccactgccatggagtcctgctgtggatgggcacgggcaatagctgccatgacccacaggaacccatgaaacggcaatccgagctggacccctgcgcagctaaaccaggaggggcgaccccacctgggggcatgcgggatgaccccgagggtgaacctgaacgaaaatgaaggccccagaatgggtaaagcacccgtgtccgataatactggtcagtcttttttggttcggaaccaattggtagcacccaatccctgcaaagcgtcgcaaacttccggtagcaataggagatctatactatgtttgtaaacaatttaaactgatggtgacatttctactctccggaaatacagtcaccaaatagatccttgcatggactataatacggcagtctgtagaactgtatgtggtttgtattgctatgcacccc

SEQ ID NO: 454311 - DNA, 792 bp, Homo Sapiens
attacctcttttcgcttaatgtctattttcttcctcatgtagctacatttacagagtgccagcagcccaggctcacactgccaagagctggtgtgacagcttatagggaggtgggatgtgtgcaggccccactaccatggccccatgtgacagatctcagttggctagttctgaatgaggatgctggatgaagacaagccatttggcctttgttcatattgcaaggtaagagtcctttgtcatcaaaatgaagggctcttgggaaaggagttggcctgtgtcaatgagatcctgtttcccattgtctcctagagcagaagatgctactcaagccacaggggaacaatctgcatgcacatcagccaggcggaactgagcatggaggtcagtgtattcattcaaaggcatctattgctgtggcagttaatcacctgtgccatgtcccttaaccttccagagctagtgccagtgatgcccctgcattgagccttctctgatgacagcagaaggtgatttacttagttctgtatttccacagttccttcatcattcatcccataattggtcttgcaacaacacaactggttttattcctatccatatggtagcctctgtgagtccttcataaactcaccaccctcccaagtatttctgaggatcttcaaaggcagtttcccaagggcccccaagtccgactgtcagctggacccatcacaagtggcattcaccatggtctttctttccagctccaatccagggcccacaaagctgttggaggaatttcactccgct

SEQ ID NO: 454312 - DNA, 897 bp, Homo Sapiens
cgtggaggtaggccatgacgggcttaagcaccactgttccggatgtcttaatccgtgcatcccggtcattatccgctaagtcctcgcctgtttcttagcgccgggacccatcctccgtcggcacatagacgttcaggtaagagacagtcttcgttgggcctcctggatgtaagtagcgacgatatcccaagttggcagtgaaccagaccggcagcatgactttcgggcacagctgtgtggatgttctgggggcacactgggggaaagtgtgtggcgttccggatgcccgaccaggatggggtggttcaggggcagggaaacgtttctcgccgatcgggggagctgcgtagggcacccccaggtattggtccacaggccccaggatctcactgggcagtggtactcgggcaccccttagcttcccaaagtgagtgttgactgtgggtgctggggcctgggtactggccctcagcgccaaactgaggaaccacagggtgaggcacaggctcctgccaaccgtgggcttggggctcagggacagcgagggcgggccaagccgcagccacatgttccgggcagggggactggcaggagaggcagactccagggtcacagcatcagcccaataggcagccccttcatggccacactgacttgaacctcaaaactgagctctcgagggacacctacaggtgcccagcaatgtagagagcaggtcgtccaagcaccacagcttcagaaaggggactccctcagggccagacaggcctgttccccgggctgctgcaagcgactgaaccgggccacggaccacccatatcgcctccaggccaagggctccgcacccgaatccccgagatcagctctccggcagcctggctgctgtgcccccccgct

SEQ ID NO: 454313 - DNA, 736 bp, Homo Sapiens
agcgggtctgctccgggccgcgctgcccgcgctcctgctgccgttgctgggcctcgccgctgctgccgtcgcggactgtccttcatctacttggattcagttccaagacagttgttacatttttctccaagaagccatcaaagtagaaagcatagaggatgtcagaaatcagtgtactgaccatggagcggacatgataagcatacataatgaagaagaaaatgcttttatactggatactttgaaaaagcaatggaaaggcccagatgatatcctactaggcatgttttatgacacagatgatgcgagtttcaagtggtttgataattcaaatatgacatttgataagtggacagaccaagatgatgatgaggatttagttgacacctgtgcttttctgcacatcaagacaggtgaatggacaaaaaggaaatcgtgaagtttcttctgtggaaggaacactatgcaaaacagctatcccatacaacaaggaaactatttatcagataaccacattttaatatcagcattggtgattgctagcacggtacattttgacagttttgggagcaatcatttggttcctgtacgaagaaaacattctgacttctcgtttcaccacagttttttcaaccgcaccccaatcaccttataatgaagactgtgttttggtagttggagaagaaaatgaatatcctgttcaatttgactaagtttttggtaatcttgcactaag

SEQ ID NO: 454314 - DNA, 738 bp, Homo Sapiens
acaactctgaaagatgttcagctaatgcataagctgttgggtctctgtccaaggcacagagaacaatatctgactccttctgcagaatggcttttgtgcgccctcccgaaccaaatgtcatatctagaaaaatctgtcctttttgtggtgacaaacaatgaacactttcatccaccattactggaatatgtaatttagccatagtttcaaaatctctatcttgagatctgtgtaactcctgggcttgagtttgatctgtttgctcccgggcttcatattctctatatttttctgctgtagtatgtattctgtttggccagacacctaaattaggtatgccagattccaaccaacatgaaaggcattctttatacattctacaaaaatatggataccgaagcattttgtaggtaaacaaatctgaagcacgaagacttctcagctggcctctaactcgggccagcgactaccactacggtccaggagaacctgaatgcgccgcgcgtctaggtcctgccctgggggaaacttgtaaggacggacagattgggtccacgtccgcccaagcaactgaggaccgtctgcctttggttccgctgtttccagcctcagctgccaaaggtcctgttgcctggggtttccaacgactttcccttactctgggaccgggccctgcacccgccgtttacaggaggcctgtgatctcaagcggctgcctcccaccagcagctccccgct

SEQ ID NO: 454315 - DNA, 618 bp, Homo Sapiens
ctggggacttcaacctcgccttggtcggccctttcccgtggaaatctcggaatttatcttagaagtatgaaccttttttaatcctcctcagggaggaagtgtagtcctgagtgattatatatagccaactggcacagttcgcaactgtttcagtcgtgtttaccgcttattggccgttctaatgcccaggctaacgtacatcagtcatgggagtccatgagcgaagctactgaccacatggttattagggccatcttggcgtggtaaagggttatcgatctggaaatgctgatcaaaactcacacatcgcaatcacgatcacgattgctgaccgtgaactggccggagatgaccatgcgctttgaccatcaccgccgcacgacgataaatcgagctgaaattcaaaaccgggcgacaaatgtggcgtcttaactgtcttcgtccacgcagggcaacctttcgtttattaccaggattattcaagtcaggccagtaactccaggtttaatgagatgattaagaatcgcgcttattatcgggcagcatgatcgcgggcggtattatttctgcggcaggttttacctgggttgcaaaggcggaaccgcctgcagccagaac

SEQ ID NO: 454316 - DNA, 608 bp, Homo Sapiens
  misc_feature (57)..(57): n is a, c, g, or t
  misc_feature (79)..(79): n is a, c, g, or t
aaaaaacgtggtgtccacctaagggccctcaactcctaggaaaaagttccttttggnagccatttcctgaacaacaaantctcctcaagtttcccttgaatcgattccctcagtggtctccttgtattctggaaaagtgtcattcaaatccatgcaaactttgcccacaaatgcccgctgtccaaatttatctgtaatgtcggcaaggagcagagatgagtcagtgtgaattgttgcaaagtaacaagctgtggttgttccattctttagtgttctcctgacaactctggtatatacttcttctgcaaagtcgatgttctggaatctgtgttctgcaggaaatgtgtacttggtcaaccactccaagagtggcaggtctatgctacttccagcaaaggaatactgagaggcatggatgtgtgtatcaaccagcccaggcatgaagaactcatggtggctcagttctcttatttcacacggcttgaagcaccattctttggccagtttttcctgttgagatgcttcttctaaaaacactattttgccgctgtcgctcacgccgaggaggtgatcccgcagcacctccatggggcaggtccaggtccgct

SEQ ID NO: 454317 - DNA, 855 bp, Homo Sapiens
ccttggctcctgcttcttgttttccccccttttcccctccgcagcaggcaggagagggaccgccccgcggaggcgccgcggacgcccgccctcttcacctgttgcccgactcccagcggcggagaaggcgccgcgtcgcacccagggtggctgggttggcagcctggcgggcggcgcggaggagagggcgcaggggtccttctggccgtcttccgctccccctcccggcctttacttctgtcaggccccgcctggcccaggcccgcagcctgtttccttccacctgggcgggtcgggggctgcgggcattggggccccttaaggaaacccaggcctccagggactccgccgctccaggactcggcgcggagggaatgactgagcgacgaccgaggcagggggtgatgtggtacctcgaatgctgtggaaatggcaggaatgatgacccggccggaccttagacccgagatcgatgagaggccgccagcactgcccgggagacggcccgctcttctccccctcctgctgcggccgcgccagagcccggtgttatttcctgcccctcctgtcgggaacaatttgaggaaccaacttaatcgcttggctttgagggcgcgacgcttccaggcgctctccgcggctctgtcccgcggaccggtggagcctgggtgacggcgcctgggccggaggaggggagatgttggggtccctggccaggatgaatcagcgtaaccgtcccgtcaccctcgggggaacaaacacatgtttcaacgaaggcttgaagggtgtgatttgtgtaatgttaactttaggaccaattgagctgtgctttcctggcatgggacaggggatggc

SEQ ID NO: 454318 - DNA, 976 bp, Homo Sapiens
  misc_feature (888)..(924): n is a, c, g, or t
cccttctctttttaaaaccaatttcactaacattacttaaaaatgattttctgcttgcacaagtgacttaagcattgggggacaccctgcgggtctgtctcagattccctttagacacccaatgctccacagtttttacgacttaggttaatagtccgataatcacccatgagttcctggactccggtttgttgtgggattggaaatgaacgataaaggctgcgttcatcatcatggccttaaatttcttctcccacttccggtcgtgcaggtgtcttgggcaggtgatcccgaggccactctgccgtgttctgtgaatcttggcggaagggaggcgagctgtaaataaaagcgtgaccattagaatcgccgctgtgtagtattaacctgttgagcgcggggcttcccggggctggagctgcaccgcgggctctgctgtctgggactctcctccagcgcggacccgacaggacgccagggaccaggccggtccggccgggacagcggggcctcgggcagcgacggggccgggcctccccccagcacgtccccagctcgggcactgaggccttgcggagaccccaggactcgccgcggaggccaccagtgcgcgtctcgcgtggcgctacggcctcgggaattccgtcacggcatagccgggtccagcgcggtgtagaccggggccccgcgccttgctcggccagagcggctcaggtactactccaggtccggccgcactcgcggccactgcgaacagccgggacacccaatcccactccgcccagggccaagaagcccgaggaggccgcagaaccgctcccgctcccactcgcggccccaagaccccccgctctcgacgaattcgagctcggccgatttggcctgatnnnnnnnnnnnnnnnnnnnnnnnnnnnnnnnnnnnnncggccgccaccgcggtagcagctccaattcgccctatatgagtctatcatcc

SEQ ID NO: 454319 - DNA, 539 bp, Homo Sapiens
cgttcatctagaagaatattctccatcttcacatctcgatgcatgatgcccaagtcatggagataacacagtaccagcaccaactcggcagcaaagagacggatggaagcctcaggaaagcagccaacagccgaccaaagggagtacagatctgtgctgcagtagctacacataatgaaaaggtgccgttttccctgccagctgtcccccaagctgtgtacaaagggatggttgatctgtcgctggatgctaacctcctctttgcactgcctcacggtatccctctgtaggacctttaccttgggcaccaccttcactgcaaatacagctttctgggtgcaatctagcaccttgaggacagttccaaaggagcctttagccacgaggcctaaaatcttcagctgctgctgccccctaatgggcctaatgggaaactctggtagaaagaggttgatgaactgaggcactggccactctggcagaggcttctctaccagtactggggctggctttagggattcctggtgcagatactggtc

SEQ ID NO: 454320 - DNA, 762 bp, Homo Sapiens
agcggggggggcggcccgggactgcaccgggaccagcgcctccccgcttcgcgctgccctcggcctcgccccgggcccgggtggatgagccgcgcgcccgggggacatggaagcgctgacgctgtggcttctcccctggatatgccagtgcgtgtcggtgcgggccgactccatcatccacatcggtgccatcttcgaggagaatcgcggccagaggtacgacagggtgttccagttggcggtatccgaccatgagccgtcaacgagtgacaatcctgcagagcgagaagatcacctactccatcaaggtcatcgaggccaacaacccattccaggctgtgcaggaagcctgtgacctcatgacccaggggattttggccttggatcacgtccactggctgtgcagtctgccagatgccctgcagtccctcacggatgccatgcagcatcccacacctctttgtccagcgcaacccgggagggtcgccacgcagccgcatggcagctgaagccccagccccgatggtgaggcctacacactggcttcgagaccacccgtccgcctcaatgatgtcatgctcaggctggtgacggagctgcgctggcagaagttcgtcatgttctacgacagcgagtatgatatccgtgggcttcaaagctttctggaccaggcctcgcggctgggccttgacgtctctttacaaaaaggtggaccaagaaccattagccacgtattcaccagcctcttcaccacgatgaaga

SEQ ID NO: 454321 - DNA, 529 bp, Homo Sapiens
  misc_feature (383)..(395): n is a, c, g, or t
tgagaacgctgacttggaagagtaaaagcaatctcctaacaggctagagccctatcttgactggttctggtactgtgtcagcccaaagtttaatactgtactgtatttagtgcctgctcatatcatccaataaaaataagactttttagtctattttgaatcaaattattcgggtaggtgagttagagaataaaacacactaaaggtactgaattccaactacccattaagtaactcatgactttagggtgtagtgtactcaagtctcaactgatgattgactgatagactaaggagtaggaaagaatccaatatgtacacagtttggacataaaacaaaacaaagaaaaagctggggactttccagaatggagaagcacaannnnnnnnnnnnnaacctttaacccttcccctcaatcccaacctatctaattatcttcacttttctccacaaattgttttctcttttctctttagtttattctatgtagaaatggaattagtgtgtttttagtgttgctaccacgct

SEQ ID NO: 454322 - DNA, 923 bp, Homo Sapiens
tgacagggagcgaggagagtgtgcggggggtgcggagggtcatacaggagggaggccgtgagtagcgagggcgatgtcgtgggcgcgggggggctgtgggatgacaggagggggcaggatcagggcgaggcggtgcagtagctcattcagtagacccaaggtgaaggtgggtccatggttgaaaaacaagcgacagtcggcatcgtctttataggggtcacatgacttcaggagccacgttcttctgaggcaagaaaagagagtatgtagtagacaatccaatttctgaagcagcatctatgtagttctctttcaagaggtgattctccacctacatacacgcaaaatacacggtgtctcttctgcatatgttcaaacatttgttgacttggaagtggccgaagttagagccccagatagctctgtgagcaatacgtcgatgatatcatcttttgttcgtggtcctcgtatgaattatatgccaagtcccctgtttaatagctgtaattgcttggataaccgtcgaactgccgaagctcctgaagcaagtgcatagaatagcgaacgtagcagtccatctgttccaaccttaatctggagaagccacatgctgtttcagtctcaagaccagcttcattccaaattggttccagctttttacaatggccacaccatggcgcataaaaatctacaagccaaatgtcatcatttcgattttctttaaacgattcatctaaatcttctacaaatcctttacagacgaccatatcaagtacaacaactcgtggcgcagagccagcagggccgtccaactcttccacgctgccatgctagccctggagagctgcagaagctgactgtgcaaaagagggataaagacactggggtccgccgcctgcccgcccggaaaggggaacccgctc

SEQ ID NO: 454323 - DNA, 893 bp, Homo Sapiens
cttaggtcataagatatgggttcggtaacttccttgatggggaagcttgaaaggcatctggaccacaactttgagtaactattcttccttccatgggagactggggggtttatgctttgttggtactttcctcttgccgacaggttgtgccacggtggaaccattcctggactgcctctctccctggtttccttcgcgctctatggaattactgaggtggtctttatattcccgatttatgccctcaatatcattgctgcctccttggtgcctcatcactacttggttcgaatttgaccttgacatttcctttacccacggcaagaacactcttcctcttggtcttctgacaaggttcacttatcatcatttctaacttaatcaaaggcccttgtccttcaccctctgcaaccacaattggccatttggactcaaggtttgcctggacagacaccaccatgtgtcatccaatgatgagacagtaacagaataatccttaggatcgtaaatgtctaaaggtgtcaccgaaccatcactgaacgaaatccaagaacttactattgcttcctgctgtggggactgaagaacatccagggcagcagctgtggagacgatggcccttttgtctgctcggtgtggctgcagggagagagacatgccagctacgagctgcactcccagctccacgatggtgactcggtcatccaggacaatcaccgtcttctcagccaggatggagtcagacaacggcgagaggacctgcaccgtggttattcccggctcccgaccagccaaggtcctgccgtcctgtaactgagcgattttcggctcctccaccttcatgaactcggtcacaaggtcagtgatgtcaaactgccagtcggggccccgct

SEQ ID NO: 454324 - DNA, 524 bp, Homo Sapiens
gcagctcttcagccaaaatgtcactcatagtgcactggagaaggtagggcacctccacattccggtctccgtcaaacacaccatacagggcttcgcggttgtcacagaagttattcaccgacagggctgcgacacacaacttgttttttacccccgaagcttcagtgtaaccatgactccatacagctggggctccggaagcgtctcctgtagaaggctgatcaatcttgaaacagcggatattattcagtagttccagggttttgtgatcaaggacaaggcgcgggtttccagtcaggtctagctcctgcagtttgggaggcaggttttctggtaatgtgacttcacttagctcattacagctcaggtccacacacttgatctctgggagctgcataacttcgggaaagacctcgatgcagttggagtgagcaatcacggtgtgcatgcgcctgcaattcatgatcgttgttgggatggctttcagcttattcccactgagatcaatttcttcaaattccgct
